United States Patent Application Publication US 2006/0134663 A1 - sequence listing, part 90

SEQ ID NO: 255977 - DNA, 864 bp, Homo Sapiens
  misc_feature (70)..(70): n is a, c, g, or t
  misc_feature (802)..(803): n is a, c, g, or t
  misc_feature (849)..(849): n is a, c, g, or t
agtaactgaatagcaaggtgcctatcccagcttatctaaagcatggggacaaaaagccaccgaacagttntgcagccccaggactaggaatatatttaaatgtatctgcctttgcagaaaacaacaacaaaaattctacatctaagcggctgtgtagtaaaaaacattacatttgtgaaaagttttaaaacatactacttaacagtggaataaagtgaaaccaaaacatgttcaacttaaaaaggcaacaggaacctcaaagcaaattaacatggcataaatctatctttgaaagtactcgaaattatatatagctccaaaacttctaatatggtatgccaaacatttggttaaagatatgttccatcattattttcaagaagtatgttaatacacattaagtaaaccctgaaagctcagcttggccttaatttttaggctttacaaatcatatgctgaggtcttcatgcgccgatcagtacacacacagatctggaaacttcatctcatagactgggacagattggtattgggcatgcccagaagtaatggtcagtgttcctgatggactgggaggaggacgtatggtgagttccaatatttgggcaagtctatcatgaagcaaatttgctttggattcacactgtgctgctatttcttcaaaaggtgctttctgaaatttctctatcacaagacgcctcttttccttttcctgttcttccattccactggtatcaatgctttcttcaatgcttcaaaagtgatttcttcagtgttactaaccagcagtcatacagaaggnnaacatgtgtgctggattaaaagtatccagcgctgaatggatagcgngtgtcgcacaatgct

SEQ ID NO: 255978 - DNA, 608 bp, Homo Sapiens
  misc_feature (26)..(26): n is a, c, g, or t
agcaggatcatggaagagtatatcanagcatgtgaaaatgccaaaacttcccaacacccatgaaaaggtttttgcttatggtaagcgtgccaccagttttccttgagaatcaaataccacatcagtgttgtattggtaacggccatcagggggacactgaggatcactggtatcgcatggcttcttgtccccaatatttgccacaacatagatagagctgttcttggccaggcagctgagtctttcttgtactggggtctggccaaatctgttacgattattacaggggatccagtttacttcagggtctgggatgtcctccaaatatgggtagagagagtccctgttgaagttccagccataaatagcatcttctggagtcacaataatatgcgcaccctgatctgctgctgatgtgatcgctccttccaaaatgtccagattccgattcattaatgccaaagcctcctcacgagacactggtgttagggtggcattgggcaatatcgctgcatgctcataaacagctgcagtgaaagtgtcctggcagctggctcttgagacatagaaaagcaaaattgccacgtaagctggcaactgagtagtca

SEQ ID NO: 255979 - DNA, 397 bp, Homo Sapiens
  misc_feature (25)..(25): n is a, c, g, or t
  misc_feature (64)..(64): n is a, c, g, or t
  misc_feature (86)..(86): n is a, c, g, or t
  misc_feature (90)..(90): n is a, c, g, or t
ccatgaaagaagcaaaaaagaaaanaacttgttactaagtacactgatgctataaaataaaagnagtccctttaaggaactagagncaanaaaaaaaattaattcattgacccattacactggtgaattttggctccaaaggtgttcaggttggtaatcaatctatgacttataaagaaaaagaccttgagacattatcaaattactcttattgagagtccaagagactgtagtttagtgaaaagcaacagatttacagtcagatagacttaaaagctaagtttgaatttgagttatggcctggataacttattaaaactgataagccacaatctcttcatttgttattgtaatgagtcaaccagggaaaatatataaggctgggcacggtggctca

SEQ ID NO: 255980 - DNA, 1022 bp, Homo Sapiens
  misc_feature (67)..(67): n is a, c, g, or t
  misc_feature (74)..(74): n is a, c, g, or t
  misc_feature (968)..(968): n is a, c, g, or t
  misc_feature (975)..(975): n is a, c, g, or t
cgggatgcgcccccgagcagcgcccgcgccctccgcgccttctccgccgggacctcgagcgaaagangcccgcncgccgcccagccctcgcctccctgcccaccgggcacaccgcgccgccaccccgaccccgctgcgcacggcctgttcgctgcacaccagcttgttggcgtcttcgtcgccgcgctcgccccgggctactcctgcgcgccacaatgagctcccgcatcgccagggcgctcgccttagtcgtcacccttctccacttgaccaggctggcgctctccacctgccccgctgcctgccactgccccctggaggcgcccaagtgcgcgccgggagtcgggctggtccgggacggctgcggctgctgtaaggtctgcgccaagcagctcaacgaggactgcagcaaaacgcagccctgcgaccacaccaaggggctggaatgcaacttcggcgccagtccaccgctctgaaggggatctgcagagctcagttagagggcagaacctgtgaatataactccagaatctaccaaaacggggaaagtttccagcccaactgtaaacatcagtgcacatgtattgatggcgccgtgggctgcattcctctgtgtccccaagaactatctctccccaacttgggctgtcccaaccctcggctggtcaaagttaccgggcagtgctgcgaggagtgggtctgtgacgaggatagtatcaaggaccccatggaggaccaggacggcctccttggcaaggagctgggattcgatgcctccgaggtggagttgacgagaaacaatgaattgattgcagttggaaaaggcagctcactgaagcggctccctgtttttggaatggagcctcgcatcctatacaaccctttacaaggccagaaatgtatttgttcaaacaacttcatggtccagtgctcaaagacctgtggactggtatctcacacgagttacnatgacancctgagtgcggcttgagaaaacaccggatttgtgagtgcggcttgtg

SEQ ID NO: 255981 - DNA, 2048 bp, Homo Sapiens
  misc_feature (1665)..(1748): n is a, c, g, or t
ttcttcaaactccccctaactaattaagggagcgaggcctgggtggcgaattcggcacgaggccacaccaaggggctggaatgcaacttcggcgccagctccaccgctctgaaggggatctgcagagctcagtcagagggcagaccctgtgaatataactccagaatctaccaaaacggggaaagtttccagcccaactgtaaacatcagtgcacatgtattgatggcgccgtgggctgcattcctctgtgtccccaagaactatctctccccaacttgggctgtcccaaccctcggctggtcaaagttaccgggcagtgctgcgaggagtgggtctgtgacgaggatagtatcaaggaccccatggaggaccaggacggcctccttggcaaggagctgggattcgatgcctccgaggtggagttgacgagaaacaatgaattgattgcagttggaaaaggcagctcactgaagcggctccctgtttttggaatggagcctcgcatcctatacaaccctttacaaggccagaaatgtattgttcaaacaacttcatggtcccagtgctcaaagacctgtggaactggtatctccacacgagttaccaatgacaaccctgagtgccgccttgtgaaagaaacccggatttgtgaggtgcggccttgtggacagccagtgtacagcagcctgaaaaagggcaagaaatgcagcaagaccaagaaatcccccgaaccagtcaggtttacttacgctggatgtttgagtgtgaagaaataccggcccaagtactgcggttcctgcgtggacggccgatgctgcacgccccagctgaccaggactgtgaagatgcggttccgctgcgaagatggggagacattttccaagaacgtcatgatgatccagtcctgcaaatgcaactacaactgcccgcatgccaatgaagcagcgtttcccttctacaggctgttcaatgacattcacaaatttagggactaaatgctacctgggtttccagggcacacctagacaaacaagggagaagagtgtcagaatcagaatcatggagaaaatgggcgggggtggtgtgggtgatgggactcattgtagaaaggaagccttgctcattcttgaggagcattaaggtatttcgaaactgccaagggtgctggtgcggatggacactaatgcagccacgattggagaatactttgcttcatagtattggagcacatgttactgcttcattttggagcttgtggagttgatgactttctgttttctgtttgtaaattatttgctaagcatattttctctaggcttttttccttttggggttctacagtcgtaaaagagataataagattagttggacagtttaaagcttttattcgtcctttgacaaaagtaaatgggagggcattccatcccttcctgaagggggacactccatgagtgtctgtgagaggcagctatctgcactctaaactgcaaacagaaatcaggtgttttaagactgaatgttttatttatcaaaatgtagcttttggggagggaggggaaatgtaatactggaataatttgtaaatgattttaattttatattcagtgaaaagattttatttatggaattaaccatttaataaagaaatatttacctaataaggnnnnnnnnnnnnnnnnnnnnnnnnnnnnnnnnnnnnnnnnnnnnnnnnnnnnnnnnnnnnnnnnnnnnnnnnnnnnnnnnnnnncaagggagaaggacggccaacggagccagcgatactacagaggaatcgatgattcttccgccgccccctggactaagagacatcttcggtaaaaaaacttccttgcaatggggggaggcgccgtggggggaggcggccgcgcggcgcgaagtaaaaaatgtgttcttaaaaaaaggtcttgagggggcggctcgcgccccaatgaggacaatgtcaaactgaaaggagaagcggtcttgggcgaaataaagggacgggggagacggaccaccatcaaggggggtgtatgccgcaccaacg

SEQ ID NO: 255982 - DNA, 392 bp, Homo Sapiens
agggcagagtagaatttattgggaaaaaggaaagctctcagcaaagacaggggtcttgaaagcaggttgccagtaaggcgtctgtgttctgtgtcttttatgtggcagaagctgggaagtcttctgtgggttttgcccagatgagagaagtaacattttcttcttggggtactacagctgtgcatgcctaagttttgccaaagggactccatcttggttattacccatgagtgcctaagcaaaacccatgggggtgctaaaaccacaatgctaatgtcatgtttaatgacattataacgagctgggttaaattagggacatttaggctgatttattgtgcccgcaccaaagttgggatggtcacttctgactcatgccgaatacggcacgag

SEQ ID NO: 255983 - DNA, 777 bp, Homo Sapiens
  misc_feature (191)..(201): n is a, c, g, or t
  misc_feature (763)..(763): n is a, c, g, or t
cttggcaatgtattaaacagcaggccttggagactagcacttgagttatcacagccaccacaaccaccactgccatcatcaccttcccggaaagcagccacctgtctggctcctggctttgtccagctgccaacctaaggcatgtgcctacgcaggaggcgatgacattttggctccacgttcaaagttgnnnnnnnnnnncctttctcatgtgttatttctaaagataacaaaggtcaaaaggcatccagcgttttctggtttctcataagcttctggtcaatatttaatctggtttatggattttttttaggtcttctagatgccttcttgaggctgcttgtggccacccacagacacttgtaaggaggagagaagtcagcctggcagagagactctgaaatgagggattagaggtgttcaaggagcaagagcttcagcctgaagacaagggagcagtccctgaagacgcttctactgagaggtctgccatgggcctctctgggcctccaacttgtgggctacatcctaggccttctggggcttttgggcacactggttgccatgctgctccccagctggaaaacaagttcttatgtcggtgccagcattgtgacagcagttggcttctccaagggcctctggatggaatgtgccacacacagcacaggcatcacccagtgtgacatctacagcacccttctgggcctgccgctggacatccagggttgcccaggccatgatggtggacatccagtggcantctccttcctgggc

SEQ ID NO: 255984 - DNA, 652 bp, Homo Sapiens
  misc_feature (498)..(499): n is a, c, g, or t
  misc_feature (537)..(537): n is a, c, g, or t
  misc_feature (549)..(549): n is a, c, g, or t
  misc_feature (574)..(575): n is a, c, g, or t
  misc_feature (582)..(583): n is a, c, g, or t
  misc_feature (623)..(623): n is a, c, g, or t
  misc_feature (639)..(639): n is a, c, g, or t
cagaaacacagatgcaagtttgcaatgaaagaaattgtccaattcatggcaagtgggcgacttgggccagttggagtgcctgttctgtgtcatgtggaggaggtgccagacagagaacaaggggctgctccgaccctgtgccccagtatggaggaaggaaatgcgaagggagtgatgtccagagtgatttttgcaacagtgacccttgcccaacccatggtaactggagtccttggagtggctggggaacatgcagccggacgtgtaacggagggcagatgcggcggtaccgcacatgtgataaccctcctccctccaatgggggaagagcttgtgggggaccagactcccagatccagaggtgcaacactgacatgtgtcctgtggatggaagttggggaagctggcatagttggagccagtgctctgcctcctgtggaggaggtgcctgtcccggagacactactcaggtgaccaggtgcaatgtacaagcatgtnncagtgggccccagcgagccagaggaaagtgtatggganatattaatgatngtgaaattggaattgctttcttaanntgcacanntactgatagccctaactctgatactagataatacgtgccnaattaccatgtacctngtagtcttggtta

SEQ ID NO: 255985 - DNA, 788 bp, Homo Sapiens
  misc_feature (69)..(69): n is a, c, g, or t
  misc_feature (224)..(224): n is a, c, g, or t
  misc_feature (296)..(296): n is a, c, g, or t
  misc_feature (300)..(300): n is a, c, g, or t
  misc_feature (306)..(306): n is a, c, g, or t
  misc_feature (317)..(317): n is a, c, g, or t
  misc_feature (319)..(319): n is a, c, g, or t
  misc_feature (739)..(739): n is a, c, g, or t
ctgcagtagggtcatttggtcatcccaggtgtaagttcctgaaacctggtattgcctttgcccatttcnctgctgcaatcacttgccgccctcctaacatgttgagcgtagtcatgatcctccaagttgagtctggaacagagctatcatatcctgcatataacacttcaggttcaataacctccaacagtgacaccagggtaggggtgagttgtggtaacgtngcaggaactattgttttgttaccaggattttcagaggtttcttgtgagactcctgtagtggcctgctgaatncctnttatcnttttctttgtntntcgagcttccaggttcattccagcctgaagacattttcgatagcggcatgctgggcagttttttcttcgaattttatcgatgatgcaatcattccttccagcacataggtaattgtgctgtccttccactgctcttttgaagaaaactttacagcttccacaagttaagactccataatgacatcctgaagcttcatcagagcacaccaggcagagtttgggaggtggtcctgttgttgctgttgaggagctggatggaggagagcttacatctggtctcatgctggggcttgaatagccattagaaaaaactgttcgaccagggaagttcagagtccccagagaagtcaagttgtcatctccagatccttggcacctattccaattttcggaaccaacgggaattggtggaatgacatnaaaaataggcttctgatcctgctgttgagaaagggatgctgtattcatg

SEQ ID NO: 255986 - DNA, 319 bp, Homo Sapiens
cagcaaaggctcctggggtcccgtctgatttcaacagttcctcttatagaaatttatcatgagaaaaaaccaaatgagtacaaaatgtatgtacagatgtgttcccttcactcttgtttattccaactctcctcacccccaccaccaagagaaaacctggaaattcatcaacagaggacagactaaagtaggagtcttcatatgatgaactgctaaagactcatttaaaaaacgataatacaaacctgtatttactgaccaggaaagacatccatgacatattgctcaataaaagtttaaaaggagattataaaacagc

SEQ ID NO: 255987 - DNA, 585 bp, Homo Sapiens
  misc_feature (445)..(445): n is a, c, g, or t
  misc_feature (454)..(454): n is a, c, g, or t
  misc_feature (475)..(475): n is a, c, g, or t
  misc_feature (481)..(481): n is a, c, g, or t
  misc_feature (507)..(507): n is a, c, g, or t
  misc_feature (521)..(521): n is a, c, g, or t
  misc_feature (547)..(547): n is a, c, g, or t
  misc_feature (560)..(560): n is a, c, g, or t
  misc_feature (574)..(574): n is a, c, g, or t
agagaaaacagtggaagaaaggattcagaatttgggcaagggtgaagtaactgttcatgcaagttaaaaatacctaagtaaagtttttgaagataaaattgtggtttcagaataatgctgattgttggagactgtaagaatcaggtgcacttgattttgcatataagcaaatggtaaatctatcagagtcctaaaacagacaagcatgaactcttcccattgctggaactaagtgcccacagtgtcagacgaagatggaaaggttagcaatacctgagtgtcagttagaatttgagaattctatatgtttacatatttaaatgtgcatcttgatctggtgggcttcccatgtggagacttgcactctaattaactaagaagaatattgccttgttggatctcagtccacgtgcttgcactgcgatggcaatggcctcttcttcanaatactaanttgtgtgccaaattgtttaanattatntgaaggcagttcagcctaatctcagntgtctctttctggngtagatgagatggattcttaatattnctgggagtacttnttaatgagagaatngtcaaatttgg

SEQ ID NO: 255988 - DNA, 437 bp, Homo Sapiens
tgatacaatggaggcaaaattaactcttgtcaggtaagtcatttgccataaacgaaaggacccataactgcattaagcagagagggactgtaaaaagtctctaatgcaaaatttagttcaagtatcaaaggtctgatcaattttaaaaggcattagttttatttttaataaattgaactggccttagatgaaagatatagttctgttcacatattttatacattatttacagagaaatgaaaaatcctgctgcctttgttatcacttgtcatttgcgaaattcttactaaaataaaagaaaatggaaagataatttgacctctgacttccaggagaatgttcaggccacatctaaaatttaccaaagaatggggaaaaaacttttttcaagttggaaggtaccagagtgattagctggtctaacctactcattttac

SEQ ID NO: 255989 - DNA, 907 bp, Homo Sapiens
  misc_feature (45)..(55): n is a, c, g, or t
  misc_feature (58)..(59): n is a, c, g, or t
  misc_feature (66)..(66): n is a, c, g, or t
  misc_feature (89)..(98): n is a, c, g, or t
  misc_feature (104)..(104): n is a, c, g, or t
ccactgcactcccagcctgggcgacagagggagactccatttccnnnnnnnnnnnaanngaaattnattatctcatttcggatgtagtnnnnnnnnnnttttcntttaacattcttcataaaatgtgattaaggctattaaatataaagcttggatgagggtgcagataattttacaaaacagctgtattttggcaaatattttattattataaatgaaaatacagagttttaaaacggcacttaatctgttctctctctcagagtctgccaaataaatcagatttcttggaaaatattcaaacttgatacaatggaggcaaaattaactcttgtcaggtaagtcatttgccataaacgaaaggacccataactgcattaagcagagagggactgactgtcaatgaagcttctctatttgcaatttattcagcaaaagcgaacaatttttaaaaagtctctaatgcaaaatttagttcaagtatcaaaggtctgatcaattttaaaaggcattagttttatttttaataaattgaactggccttagatgaaagatatagttctgttcacatattttatacattatttacagagaaatgaaaaatcctgctgcctttgttatcacttgtcatttgcgaaattcttactaaaataaaagaaaatggaaagataatttgacctctgacttccaggagaatgttcaggccacatctaaaatttaccaaagaatggggaaaaaacttttttcaagttggaaggtaccagagtgattagctggtctaacctactcattttacagattagaaaactgagatatggccgggcgcggtgggagtgggggaatgtgggataatgttaggaatgctgtattcaacgatgagccatatgtattaatacataatttctta

SEQ ID NO: 255990 - DNA, 588 bp, Homo Sapiens
  misc_feature (467)..(467): n is a, c, g, or t
  misc_feature (508)..(518): n is a, c, g, or t
gggatttcaggaaagaacattctctaggcgcttctgaggcattggatgaatatggccacagtggtgtgaggggccaggagccccatgccaggacacccacccacaccacatagccattgccctaggaacctggacttgcccgtttcaaagactgggaggccaaagacagcatggttttcagctgcagctcactcctgcagggaagcctcgcgcttaacgccagtgggcttaacccagctcagcctggctgcccctcaggatgaaaggcaagttctgaacgcagtctgagcaaaggcccgtgggcgctcccagtctcctagcatggaatgcatgtagctctggaagtcattcctgtgtctggagggttttccggaagctgccttgtgccttgttgtgggtactcgctgtgtcttgcagaggatgggacagtggtcctcgtggcgccagggccgagctgttcccagttncccgggactatagacagaaatatgtatatttggtggtgggnnnnnnnnnnnggtaacagctatactgagatgtaattcacatacaatttagccccttaacgtgtacgattcggtggtttaa

SEQ ID NO: 255991 - DNA, 574 bp, Homo Sapiens
ctgttcctccaccacatcatcattcacacgattttggaatagcaaaacaacagtatgtggtattccaagaagactgaagcaaataatttgagaaatcttttttcttatggaaaagttctctaaggattgtgaaatatttgaaacagaaaatttcagttaccttgtattcaaatatttattatcttaaagcccaaagccttctaaatgctaaaactctactgtgtatcagataggtcagcaagacaatattcacattaacaacaggaaaatgaatcgggacaaaatctgcagaagtgcacatgaaaaatggatgacagaaattagtttctaaccaaaagggaatggcttgatatgaaattggtaagaaattgttttccccatgaccttgaaaggtcatgaataatttgtatacttaatcctggaacaatttcttatacctctttaactactcccactcctgccatacttagtaccagtgtcttatacataatgataatggacactcatacactgattgattcagcttatggagattgggagcttttattggcctttgccaaacttacctttaaat

SEQ ID NO: 255992 - DNA, 699 bp, Homo Sapiens
  misc_feature (687)..(687): n is a, c, g, or t
agagtggtagtaaaaggaacagacccaattatgacaaggcgatccagggacagaaaaatcaagttcctcaggaaaagagagtataatattagagattcaaacacatttattcagccctattccagtcttcccacaaattatgctgttaaatggactcttcagttgataaaggcttgactgcctcatctgaagtgctcttgcctggccctctgaaatactggatatttcacttttataaaacagcctttttggttctttatgtagatttattttaattacttgataaaagaaagggtagttgattagcattttccatcccaacatcacctatctgcacagctaaaaattcttcattcaatctgcttcttttacaatctcttatttgctaaaattggcgaaatttgcaaaggcatcttgcttgggttgcacagttccagaagtcatggctatgttgggcatgcccattcccattgtgcctgtcaagcccatcccagcagcggacatccctatgttcatgttcatgcccatcatgctctggttcatcatcggagtatttccaagaggggccattcccatggtgccagtcatcacattgggcatgctcataggcatgggtccccctatcaaagcattagtttggggccggacaggaagcatgttcgatggagaactgaggttcacagctcnaaaactttgcag

SEQ ID NO: 255993 - DNA, 984 bp, Homo Sapiens
  misc_feature (547)..(556): n is a, c, g, or t
tggggacataacagctggtttaaaagcaagggctggtacggtccggaattctcgggatatcgtcgacccacgcgtcgatttttagctgtgcagataggtgatgtgggatggaaaatgctaatcaactaccctttccttttatcaagtaattaaaataaatctacataaagaaccaaaaaggctgttttataaaagtgaaatatccagtatttcagagggccaggcaagagcacttcagatgaggcagtcaaaatcatttttttccagtgaggatagaccacaagtgggtggtgagaccattgaaagcctttatcaactgaagagtccatttaacagcataatttgtgggaagactggaatagggctgaataaatgtgtttgaatctctaattttatactttcttttcctgaggaacttgatttttctgtccctggatcgccttgtcataattgggtctgttccttttactaccactcttgagtccatatatgaaatcattaaagttggatgaccagttttttataaaaatatatattttgtccaagnnnnnnnnnngcatacatatgtgattatggctaaatcaaaggtaactggaatgtatatactttgctaatgttccagcaaactgtattatactatccaaaatttttattgtaacaaaactctttaagcaattggtgatgccatgggactttccccatgtcttctgtgtaattatcctgtgcagaactaggaagaaatttttcgcaggactgctctagggttcctttttaaaagaaaaacaacttctggtgttttagcggccatcatttacaattggcgggacttaacttgggaaaggtcctttcgggttatcccgtagcattctttaggtcggacacggcggaaaaattttttatctttgggggttggaggacacacctcaaacgttgtcagatagaggtccccaggtggtcaaaatacgagatgggggcggagggaca

SEQ ID NO: 255994 - DNA, 741 bp, Homo Sapiens
  misc_feature (13)..(13): n is a, c, g, or t
  misc_feature (649)..(649): n is a, c, g, or t
  misc_feature (706)..(706): n is a, c, g, or t
tgtgaaagttacngaggtccagcatgacgacagactggacttgtgaaaaggcagccttctgattaatacctcggagcaccatagggttggacggatactcatctcgtgtaacggtcatagaaagattctgagtgctccatgtctgtacatagacctgtgcataggtcccactgcagatcactgcattccacttagacacatttacacagcttggatggcggatcaggtagttgtccattcttcccacataagcatccttgtatcctgtcacagagccatcaatgtcatggaatatggagttcttatcaccatccatctcacaatcttcaaaccagggaccaggctttccaaaaaagacattcagagagacatgtggaccaaacttcacgagggagatattattcctgggggttattctgccaggaattcttcatgaggaagccaattgcactgctgtacctatctggagttggcacatattttttgaaagtgctccttgtgagatgaatgggcccatcataaatctgaaagcctctaattgggaacgtcctgttcctgggtaatgttcgaggcttctggtctattcctccagtgcctacaactgttctgaccacctgaaacgtatccgagcgtggtcgcatatcccggnattcggcgtcagctgcttttatttaaacaaaacccaaaagcgggtggttttcttaanttgagggtgttcagcccccaataaagagtggcatt

SEQ ID NO: 255995 - DNA, 597 bp, Homo Sapiens
ctcataagataatcgttatgtaccttcaggtgttagagtgtgagcgtaaccaacacctggtccagacctcatgggtagcctctgagggtaagtgactaagacttctcctctgctgtccaagcgctttggtgcagggacagcggcatcttcagccaatccagtgcaggctctccaccgaaggctggctctagactggtgttggcagcggctctgatgagcccgagaagaggcctgcccttgggtgcggagtctccctgcgcacgatgctcccacgcgtccaacttgcacccaaggggcttttccctcttccaagtggactccttcaaggaagctgcagctcggtcagcagagaaggggcctgccgccagcgccctggaggaagaggaagaggaacccaagaggatggcttgtctcccagcagccacaccggctatgggctcaaccagatcatttgaagttgcatgattctctgcactatggattttgagcaattaaaattctttaatcaaaagccgtttactgaactcaggagacattttctttctgaggcatcatggcttgcatgataacaagccatggttgttgtggccaccttct

SEQ ID NO: 255996 - DNA, 1672 bp, Homo Sapiens
  misc_feature (17)..(17): n is a, c, g, or t
  misc_feature (220)..(220): n is a, c, g, or t
  misc_feature (297)..(297): n is a, c, g, or t
  misc_feature (706)..(714): n is a, c, g, or t
  misc_feature (911)..(911): n is a, c, g, or t
atttaatagactaaaancagaccctacactagctttatgaatactgcaaaaacagaaagggtgattccatgaggacagttgaactgttttatatttactgctcctcacataccccaataacggggagccttggagtggggctgcacccgcagacgaggtggtttgtgagggaatctgacccatgaccttccagcaatatctctgtcctaaataaacctgnagaaggtaacatacaaacccactcaagagatttctaaatgggaagtcctacaggtgcctcttggagacacccggctnctggaagcagctccaggcatcacgggggaatctgtgtggcggccgtgtggccccagcccctgatgcaagcgtgccagtgcacagctctaacacagatacattcaacaatcagtaacctttcggtgtctaatcaacaactgtcagtattcaagtagtgatattaatccacgaacttaaaattcttaaaaacaaatgaaatcttgagaacatataaacttattgctgtatttgaagtgatacaatatttttcaaagtatccatgaaataatttaaagatgcacaccttttaccagagcgtgtcatgcaaagctgctcaaaagagcaacttcagggcttctagaaatcatgacataaccccacactgacacagccaatttgtctcttcaattctcacagctttccatagcannnnnnnnnaagagaaaggtactgcatctttatcatacaggtacagcagttttaaagggacaaaattcaagtcaagacagttaccaactctaatcaatacgattaccaaagcacgacagaggattaacaagaagcacaatcgtcagagaaccacagcaggagtcggccatggctatgctatgtgcgtaccaccagtctagagccangcttcggtggagagcctgcactggattggctgaagatgccgctgtccctgcaccaaagcgcttggacagcagaggagaagtcttagtcacttaccctcagaggctacccatgaggtctggaccaggtgttggttacgctcacactctaacacctgaaggtacataacgattatctgaatgaggatgcttcacatggacgcagaaacccaactctttgagaactcgtctttccgccttgtataatttggttctgtaaattaacataatcttgatccagtagtagaggcacgggcttcttgttgtctctcagctgtcgaagccggtgaaacacattgatgacgtcccgtatgcgtcttggggcctcttctatcttggaagccaggtggacacaggccattgacacatgctccatggagtgcttcacgaaggacttggtataaaagaaccgctggaacaacacctgcccggtagccatggccacctgcggcaggcggagcaggataccggccgcctggatgagctcgcagcccaccacgcggaggtcggtctctgtgtcggtgtcgaggccgctcgacatggacggcgtgaaacggagcttgtcgtcaggcaggaggcagttctccaaggtgatgagcaccccggagtacagcctgtccccgatcagcaccccctgcgaccctgagggtgcgcccccagatcccggggcgccggccgctgccgcgggagctgccgaccctgcagcaccagccgccgccgccgcc

SEQ ID NO: 255997 - DNA, 784 bp, Homo Sapiens
ctgtctcggctgttgtgggttgcaggttgggtgctgctgttgtggtccttcccagaaactgccagtagagggcagcctgggcatcctaatgcttactctggttgttacacaaaggtccccctaacaaacagcccttcacttcctctcccacttcagcaatttgtattttgatgccattggcctcagatcagagtgttttaaatcatcacgccctggcttatccctggtcgagccaggacacggggtgcttcagtgggtctgtcaccctctctccttgaagcatgttgcttttatttatttacttttactctcaccctgctcctgtaccagcaggggccacttcaaagccaaggtacagggtgataacttgtggtccagcatcagttttctccacttctttctcccactcacccccagcaaggtgcctggggagacttgagcagatgtttcattttggcctggccagtggctgaaagccaggcctccaatgcactgtgacctctggcttccccagcagctttcccagagaggcagaggggccttccacagcccgggttctcctgctgcctcctgcctgctgcagctgcaggcattctgaggggcaacgtggaggaagggccacggatgcatgggattttaattgtttcatcacaccttccccgtggcaaagaaacagtcagtcctcttcaggtgtcttctggatttctggtgatggacagagaaatctttttacagtttcaaattatgttcaacaaataaaaatcgcattttttattctgcaaaa

SEQ ID NO: 255998 - DNA, 984 bp, Homo Sapiens
gggggccgtcgggtagaggctgaataccagtttccgagcggcaaggcagcgatggcgatttttagtgtgtatgtggtgaacaaagctggcggcttgatttaccagttggacagctacgcgccacgggctgaggctgagaaaactttcagttatccgctggatctgctgctcaagctacacgatgagcgtgtgttggttgctttcggccagcgggacggcatccgagtgggtcatgcagtgctggccatcaatggcatggacgtgaatggcaggtacacggccgacgggaaagaggtgctggagtatctgggtaaccctgctaattacccggtgtccattcgatttggccggccccgcctcacttctaatgagaagcttatgctggcctccatgttccactcgctctttgccatcggctcccagctgtctcctgaacagggaagctcaggcattgagatgctggagacagacacattcaaattgcactgctaccagacactgacagggatcaagtttgtggttctagcagatcctaggcaagctggaatagattctcttctccgaaagatttatgagatttactcagactttgccctcaagaatccattctattccttagaaatgcctatcaggtgtgagctctttgaccagaacctgaagctagctctggaggtggcagagaaggctggaacttttggacctgggtcataggctgaacctgttatggacccccaaattctgagagttcctgcaacaagaatactgctgttgacactccagtggaaatcccagcagccttgttagtgcacttgaaagtgggagaatgctgaccctgatgacttgtactgattcctgagccttaacactgtgctctttccttctgtatataccatggtcttactttccaactctgtacagatttatttatggaggagctaggtccataaatgttgtaataaatattcctttgatcttggtgtttgc

SEQ ID NO: 255999 - DNA, 419 bp, Homo Sapiens
  misc_feature (104)..(104): n is a, c, g, or t
  misc_feature (298)..(298): n is a, c, g, or t
cctcaagactttgccccctaaaaaaaaccccattcctatccccctaagaaaagcccctatccaggtgtgagcccctttgaccccagaaccctgaagcctagccnctggaggtggccagagaaggctggaaacttttggacccctgggtccataggctgaaccctgttatggaccccccaaaatcctgagagttccctgcaacaagaatactgcctgttgacactccagtggaaatcccagcagccttgttagtgcacttgaaagtgggagaatgctcaccctgatgacttgtactgantcctgagccttaacactgtgctctttccttctgtatataccatggtcttactttccaactctgtacagatttatttatggaggagctaggtccataaatgttgtaataaatattcctttga

SEQ ID NO: 256000 - DNA, 1239 bp, Homo Sapiens
  misc_feature (806)..(838): n is a, c, g, or t
acaccaaacaggacaagaactgtggaaaggcccagggaaaatgcctgccctggtaaagtgcctcaaactggcctactgggccaagtccctctgggggttcctagagctgataggaagaaggagtcccattttgatagtcctgcctggagacttggacctagctgatactaaggtattttataaagctacagtggatgtttttcttaagagaactgaaagttggaaaaggcacaagtatatataagaatttagtaaaatgataatggtggtctttcaaatcaaagagtgatctttaaattgttcttgggaaccacagggttcctggccatgtctggcggctgagaggaggccaggatggggacttcaacccaagcagctgtggttttgcctttgataaggttcctggtaaaaatcatcttgaataaatgttgctgagaaactggtaaagcattcgggggagaaaggattttgctctttgctctgccatgtttttccgggctctttcttcggggagaaagagggctctaacctttggtcctcattcagataggctaattaggggtctcgggtgtccccaaagggcagcaactttgacccctccccttgtgggtaaaagggcttttcacagtttcccagcagttggtttttggtttccacataaggctaaaggtgttaaagtttggtctgcacctcgttggttttaatccagggaggagctcctggatttctttttctcccccacagagggaaaccttttgtttgcggtgggccagagttaaaacggggcctttaccactcactcagannnnnnnnnnnnnnnnnnnnnnnnnnnnnnnnnggtgaagtggcgactggcatctggtatgtcatgaattgagacctataatgatttgccagggtgtcttggctctggcctgagtcgggtatgtgaaagccttttggggcaggaaggggcaaagtgatacctggccgtcccaccctctggtcccagaaggagctctcgctggagccaggcagcctccagtccccctcctttcagccttgtcattctctgcatcctgcccaggccacaaaggagttatctggggctgaacccctctccttccacagcagaggaccaggggtctcctccctctgaccagcctccagtctggggagctgtgttttcctttttcttaagctaactcctgatcccacctcgtgccgaattcgccacgacaggcggctcgcccatcgctc

SEQ ID NO: 256001 - DNA, 450 bp, Homo Sapiens
ctcccctcccccgggaagcctttgccccctcgacttgaaatacagtcccccggtgccatccaaagcctgtaagttcctcagcctgctggccctgcacctcatcaccctcctcccctacaaataaacatttggaaaaaagtcccatccttcaatatgccttaaagagaagggtaggagataaggagaaagaacagatacagtttttttcccctttaaggcctttagattttgaggtactgtaaggggcctagaaggacaaaaggctttcattccctcttccttttggcaggcaggttatcagtccttggcaggaaggcccagccctatccttttctgtatcaaacaaaatccttgaggttggtatacaagttaaggctgaaaaaaggccttaaattcccagtaaagaatgtgaaagcaagcatgtaaaataaactggtcttcatgaataaa

SEQ ID NO: 256002 - DNA, 742 bp, Homo Sapiens
  misc_feature (48)..(48): n is a, c, g, or t
ggtcccaagaacaatttaaagatcactctttgatttgaaagaccaccnattatcattttactaaattcttatatatacttgtgccttttccaactttaagttctcttaagaaaaacatccactgtagctttataaaataccttagtatcagctaggtccaagtctccaggcaggactatcaaaatggactccttcttcctatcagctctagaaccccagaggacttgcccagtaggccagctgagcacttaccaggcagcatctccctggccttccacagtctcgcctgtctgtctctggccttggtggacctggctccctccctaggaggcttttgccctcagcttgaatacagttcctggtgcatcaaagctgtaagttctcagctgctggcctgcactcatcacctcttcctacaaataaacatttggaaaaaagtccatcttcaatatgcttaaagagaagggtaggagataaggagaaagaacagatacagtttttttcccctttaaggcctttagattttgaggtactgtaaggggcctagaaggacaaaaggctttcattccctcttccttttggcaggcaggttatcagtccttggcagaaggcccagccctatccttttctgtatcaaacaaaatccttgaggttggtatacaagttaaggctgaaaaaaggccttaaattcccagtaaagaatgtgaaagcaagcatgtaaaataaactggtcttcatgaaa

SEQ ID NO: 256003 - DNA, 1254 bp, Homo Sapiens
  misc_feature (504)..(504): n is a, c, g, or t
  misc_feature (608)..(608): n is a, c, g, or t
  misc_feature (781)..(781): n is a, c, g, or t
  misc_feature (1238)..(1240): n is a, c, g, or t
  misc_feature (1244)..(1244): n is a, c, g, or t
  misc_feature (1246)..(1246): n is a, c, g, or t
gaagcaaggctaggcgtgaggctggggaggacgaggagggattcctttccaaacttaagaaaatgtttacctcatgatatcccagccgaggaaaaagatccactggaaactaggccgggaagcagcagcccctccaagggccagggcacctgggagacgggaggattccagaacagcagcactgagctcccacccgcagagcctctggacggccttggcaacagcaaaatcatgggacaacacctctctccacggaaaggtcacagtggacagcccgggcagtaggatgcagccccagaggctggtggcagtttcctgtccattggtaggtgacggcccctggctcaggcagagggagatggttagactcttgcagggctacagcttagaaatgaagccttaagctgcatcaagttacgaagtgattaatttccttctcagcaaacctccgggaggttccagaatgagttcttcctgacaggttgtcttcactgggagcgtggngcccccaggccccaccagcaccgtcctcccctaatgaggggccctgccgaggcatcagctgctctgctcagttagtttttattcccggggtaccaagcagctgnacagtcggtgcctgggaggcacgtagaggcccagagagtccctgggggttctgctctgaccgtgtgggtggtgatccttgtcaggatgtacagtcctggctcccaccccatccaggatggccgcctgtccctgactattgagtcctgttgttgtaagccaggcatggagggcncctgcccttctgctgagccacagcccattgcagcactgtgactggccagacttcagactgccttgggaactgaagccctgccactgttgctagtcaggggcttggttctcccacttacactgttgacatctattttctgaagtgtgtttaaattacttcagtgctaatcattgttttttcctttgtaaatgttgattcagaaaaggaaagcacaggctaagcagttgaaggttccccaccattcagtgagagcagaacccccattccccagcctctgctggtagcatgtcgcagtttccatgtgtttcaggatcttcgggctgtcgttagacaggttaatgaagaacacttctcaacagtttcctttttgttttcctttataattcactaaaataaagcatctattagtgtctgatttaggaatgtaaaatgattctgtattaatgtaaataagatnnngtantngaaaaaga

SEQ ID NO: 256004 - DNA, 996 bp, Homo Sapiens
gggtacggccggaagacgggatatgtcgacccagcgtcgagcataagtataatttaatcccataatcgagttaagtttagtgtgatgtccatcattctggacctcccaggagttgtttaagaatgaatctcttacacctctactttgcccctctactgtatattaagcccataggcttgtgggaggaaggagaatttccattaggcaagctgtatgcagtggaattttccttttaggagacacacaattaagactctctggttctgtccttgctttggagactttaagacatttcctaaagcacaaataaaagcctcgtatttccccattgagagttttgttccaaggaatatgaagtgagacatatgggtgagtcataataatcaaaataatttatgaagagctgggtctgcaatagctagtctaaaaactacttgtgtgtcagtcctctggttatagtatataagagcctgaggaggtctggcaagatagatggtgtattatttatggatcaggctgctgcatacaaaccttgcatactattatgcagcttacctaactctcagactattctgagtaatgcttgcttgctaatgaatgtataggagaccacattgtaattgttcttagatgatggagtccatgcagtttcttagaaatcggtctcagtgcatgctgtgctttttcacatttgctctgcgttatcctgggaaagtatcagggtcctgggagggaacagattaagtgataagaaagggaccctcttggaaggcaatcttgtaaaagggaaagtcagaactggaaactaagggttcttctgcgagaaagggagttgcggttgaatatgggaggcttgggaaaagaccaaaggatctatattggagtgaaaagagatggggtaaagagaaagaggaggagtaagggagtgggtcacatggaaaaaggggttcgggggtaaacaaatgggtagaaagagcgcacatagtgggggaaaaa

SEQ ID NO: 256005 - DNA, 352 bp, Homo Sapiens
tccccatgttctttaaaatgcatttgaaaaacactagccctgtggctatttctctgtatttgaataatggcaactgctttaaaggaaatggtcaaataggcatgttttcctctggcagggtcaatcatgcttagctgcaggtgatttaaattagattactagtcaccttcacttacgatcctgccagtttttgctctctatatactttaaaactctttcacattagatatgattagtatgcatttacatacattttaaaagagtatgaaaacatctggaggcttttaataagactttccaattcccttttgcagcaaagaggcagaatcagttcaacacaccgatgtaagag

SEQ ID NO: 256006 - DNA, 917 bp, Homo Sapiens
  misc_feature (117)..(117): n is a, c, g, or t
ggagggattggcctcccctgccagctgctcggcccggctttattgtgagccaggagcagccgcagcgactctccacatgctggccctcctgggggctcagtccccagtaggctcccncaggctgagccccagccctaacactgatgcttggcagcgaccacaccttgggcggtggggccgctgtcctcggggcatccagggcctgcctccggatgagctcggcgtatagcccgcctttcttcaggagctcttcatgtgtcccagcctcccagacacggccatcggccatgacgacaatgcagtgggccccacggacagtgctgagccggtgggcaattaccagcaccgtgcggcctgcactggcccggtccagggcctcctgtacaacccgctcggactctgcatccagcgcgctggtagcttcatccagtatcagcaccgtgggctgcttgataagggctcgggcgatggccaggcgctgcttctggcccccagacagggtagtgccccgttcaccgacgaccgtgttgtagccctcggggaagctggtgatgaactcgtgagcattcgcttcccgggcggctgtgtacacctcttcatcggaagcttccagcttcccaaagcggatgttttccatgatggtcgtcccaaacaggacgggctcttggctgatgaagccgacaacctggccccggagccaggaggggtcaagggtgcgcaggtcccgcccatccagcatcaccacgcctgccgtggggtcgtagaagcgctccagcagggaagccacggtggtctttcctccgccagactggcccacgagggccacgatcttgccagggggcagcgtcagggtgaagtctttcagcacctcgaagccggggcggcaggggtagctgaagcagacgttctgaaatgta

SEQ ID NO: 256007 - DNA, 586 bp, Homo Sapiens
  misc_feature (222)..(222): n is a, c, g, or t
  misc_feature (224)..(224): n is a, c, g, or t
tctgccaatctccatggaggagaccttgtggccaattatccatatgatgagacgcggagtggtagtgctcacgaatacagctcctccccagatgacgccattttccaaagcttggcccgggcatactcttctttcaacccggccatgtctgaccccaatcggccaccatgtcgcaagaatgatgatgacagcagctttgtagatggaaccaccaacggtgcntntggtacagcgtacctgggagggatgcaagacttcaattaccttagcagcaactgttttgagatcaccgtggagcttagctgtgagaagttcccacctgaagagactctgaagacctactgggaggataacaaaaactccctcattagctaccttgagcagatacaccgaggagttaaaggatttgtccgagaccttcaaggtaacccaattgcgaatgccaccatctccgtggaaggaatagaccacgatgttacatccgcaaaggatggtgattactggagattgcttatacctgggaaactataaacttacagcctcagctccaggctatctggcaatacaaagaaagtggcagtccttt

SEQ ID NO: 256008 - DNA, 422 bp, Homo Sapiens
gattgattggcagtcagtgatggaagggtgttctgatcattccgactgccccaagggtcgctggccagctctctgttttgctgagttggcagtaggacctaatttgttaattaagagtagatggtgagctgtccttgtatttcgattaacctaatggccttcccagcacgactcggattcagctggagacatcacggcaacttttaatgaaatgatttgaagggccattaagaggcacttcccgttattaggcacttcatctgcactgataacttcttggcagctgagctggtcggagctgtggcccaaacgcacacttggctcatggttttgagatacaactcttaatcttgcagtcatgcttgagggtggacagccttttcagctttaacccaatttgcactgccttggaagtgtagcca

SEQ ID NO: 256009 - DNA, 367 bp, Homo Sapiens
ctattccagtactaagcatggtcagagccttggccaggagaagatgattgagcacctgatggcctctgggcaacctctttgaaaggttctattccctgttccccatgccttgcttaaaaactgactggaagtgctcaactctcctgtttaaaggtctgagtccattccagaaatgacctcttacttgtggccccacaaaagtcctctttgttggtggtgaggttgtggctgctggtgtgtggtgggtttggggtctctgttggacttggcctggagtccctgacccattctcaagccctcaaaaccagccagaccagggttatgacaaagagaaactttgggaaatgtgtgactggacttaggtcac

SEQ ID NO: 256010 - DNA, 705 bp, Homo Sapiens
caagatcaggcatggtatgtggggcagtagcccgccagaagtgagctggccaaagttccttacattctgggtgctgatgctctgagaccttggcagaggcagctccacttccaaggaccctccagtcctgtcaccaccgtgacccagatctagcatggctgaagcgcaggcttcgtcgtcactgtctcccagggcgctatctgagctttcatttcggggaatgtctccttcagtcctgaagttggccttcttgttgtcatccccacaggggatattcgcaccagccacgaggccagggccccgctggacacacctgggggcaacaggctccagcacaggtccttccgcagccttcacatacaaacctctagtggcctccagcctcctccctcccgttcctcctgcaccgtgggaggctgtgcccaagtcagcagcgtggctgagctgcccagcaatatctgctgccatgtcgtttctgctgcctctgtcctctgcaaaacccttgtcagactcgccttcatccccctctgaaagccgattctgaggacagcaaacattctcctgaaagccaggtttaaaagggctcctagaaacctgcgggtcctgagccacatcagcagcctcactggcctccaaggaggggccacaggccttcacccgttcctccatttttttcctgcggctttcaaagtcagactctggaga

SEQ ID NO: 256011 - DNA, 488 bp, Homo Sapiens
agttgtatattatttcatttaattgttaaaatgaccttctgatgcaggtatttgtagctttgccattccacagatgaagaaacagatgaaaggactgaattgttcaataggaaggagcagaatcaggatatgaacttgggttggcctgattcttggggctgcattctttccataacataattgcttgctgtgatgtcctgggctactctgccaggggtggttagtggagtgaatggagaataatttagacaaggtcagtaactcccatgccatctagaaattaaaagtttaaaaggcagagtctgcaactctccttgatttctacagaaataaagatgatccctcctgtgacagtgctaagtgacaattctgagtgtaaatgcgctttttggcacaaattgtcctgtcctaatagtcttgattataattataaaataatgggtttctgaaaggcgcaagcagttctgggaatggcaataaaggtttag

SEQ ID NO: 256012 - DNA, 368 bp, Homo Sapiens
cacaagctgaagttcggtctcgccagatctcagtctcaagccctgggtcaagcactgacataaacgttaagttggtggaatgggctaaatatattcctgccttctgtgaattaccattggatgatcaggtggcactgttgagagctcacgcaggggagcacttactgcttggagctacaaagagatccatgatgtataaagatattttgcttttgggaaacaactatgttattcaccgcaacagctgtgaagttgagattagccgtgtggccaatcgtgttctagatgagctggttagaccatttcaagaaatccagattgatgacaatgagtatgcttgtttaaaggcaattgtattttttgatcca

SEQ ID NO: 256013 - DNA, 401 bp, Homo Sapiens
cccccctggacagtgtgttgttaaataatttaccaatataccattgtagtttggtcagaaaagagagtgcatacatggttcagtttacaatgggagcaataatcaattatttagaataccaaagttagagaaaaagaaactttttggcaatttggccaataagtttataaatagtcttaaatatcacctgtttttctaattaaatgttttaaaagtaaatgatagagtctagtacatttcttaatcattaaatatgttttataacatttgtacaaagctgttttgaaacatttgttgactttttttaatcaaacgctctgtacttgttttttaaataattgcagaactataagttaaacctaaatattaataaaaatgaactatatgaaactatatgaaac

SEQ ID NO: 256014 - DNA, 1111 bp, Homo Sapiens
ccaacattgacaagaagttctctgcgcactacgacgcggtggaggcagagctcaagtccagcaccgtgggtctcgtgaccctgaatgacatgaaggccaagcaggaggctctggtgaaggagcgggagaagcagctggccaagaatgattttatccaaggagctgcagatgaagctggagaagcttcgagagaatgatcgtaagaaggaagccaagcggaagatctccagcctgtccttcaccctggaggaggaagaagagggaggcgaggaggaagaggaggcggccatgtatgaggaggagatggaaagggaagagatcaccacgaagaagagaaaactggggaagaacccagacgttgacacaagcttcttgcctgatcgagaccgtgaggaggaggagaatcggcttcgggaagagctgcggcaggagtgggaagccaagcaggagaagatcaagagtgaggagatcgagatcaccttcagctactgggatggctctgggcaccggcgaacagtcaagatgagaaagggcaacaccatgcagcagttcctgcagaaggcgctcgagatccttcggaaagacttcagtgagctgaggtccgcaggggtggagcagctcatgtacatcaagggaggacttgatcatccctcaccataacagcttctacgacttcatcgtcaccaaggcacgggggaagagtggaccactcttcaactttgatgttcatgacgatgtgcggttgctcagtgacgccactgtggagaaggatgagtcccatgcaggcaaggtggtgctgaggagctggtacgagaagaacaagcacatctttcccgccagccgctgggaaccctacgaccctgaaaagaagtgggacaagtacacgatccgctgagcatccagagaggtgcgcggccccggctcctcagctccctcagtgtgccccgtggtgtcaccgggactccaggcacccgctcccctgcgaccatgccaggcacgctgggaggaggacggcagctgctcgtgtcctgcccctgcaacatcagtgactgctttattcttttccaataaagaagtgcacgtgtcagagctggagcgcctgcattgtgag

SEQ ID NO: 256015 - DNA, 1025 bp, Homo Sapiens
tgatgcagcacaacaaaagagcctgacagaaacggagtcagcccacgccaggccaaaccacaaaaagaagaaagcaggcttagatgggaagcccccttcatagctccctccccaaaaatcccttctacccatatctattgagtgcttgttatgaagaaagagagcagcacaccggccctctgtctgctgggggagactgacgagtgaacagattattccagaaacctggggtaagcaagatagtggataggggacagagggccaaagcttcctagactgatgattagctgagctgagtgataaaagagaagtcagataattacacaaaaatgagagcggcagcccagcccatgcaaaagcatggccctgaccggaagctaccaggaaggattctgatgtgcctggcctgggtggtgcctgctcccagagcctgcaagctgggttctggggaagcatcctctaggtgatagagcaggctgtagagcaagccctgttctgagtgaggaggacaggccctgtgtgtgatggccccacctgagccactggcatgggcagtcagttcccaagacggagtccaggacagacaaaaaatgaacagctgaaaagtgcaagtagtgtaggttcaaggaagtggtgtaggaagagggagacggaatgggatctgaggagggctgcacagcacacagtaggcggcacaaaagtctgctcagttaggtcacatgctccagaggcactcactgcaaaagagcctgaagattgaactgaaatataccatcggctttgctgagtatgaatgccaagaggagcagagagaagtcaagccctctaggtgataggcaggaacgagctgaaagaaggacataaatcttggtttgctcagacgggcctggattatacttacgttaattatgtttagtgcccttttcatgctaagaagtgtcctactttggatgataaattgtacagtcactctaggtttaagtgatactcaggcagtctggcttggaaagtcaagtcaggagaag

SEQ ID NO: 256016 - DNA, 770 bp, Homo Sapiens
attgaatagaaataaccacctatgaagtaggaggcatcttctaaattatttttacttaactcttgccacaatattatgaaatttctacttgatatcttcattgatgaaatggtgggtttaagtatcttgcctaataccacatagataggaaaagctagaacaagataaaaacccagatctgactggtttgcaaatgtgagtgctttctcactgaaccataacatctctctgactgtttttgtactgttttagccctacctcagtacctgtcctaactctgaaggaccaaacttgtcttccaagacctggagcatactaagatagaaggaagcagccacgtgacccactcaggagcttagctgtgccgtggaaggaacaggacctcaaagcagatgccagactcctctctgtaatgtgtcctttagctacaaagaggccaacactggtataatgtaactcaagctacagcctctaacctcacttgttctgattttcagtctcttgattctttcctgtttagctctcggttctacttcagctactcatctgtgatgttcccctgcctccctattccagtgatcagccttgactttcttagtttctggctagtctctgttagagcctctgcaggaagggccagccccagcatacgccagggttctacagcatcttacacaagtggtgcaaatgcagctccaaggaactcttgtttttataatcctctaaccacaggaagtctgttgatgttgctattagcaaaataaaataaa

SEQ ID NO: 256017 - DNA, 1135 bp, Homo Sapiens
  misc_feature (152)..(152): n is a, c, g, or t
  misc_feature (270)..(270): n is a, c, g, or t
ccaatgctacaacagattgtcctattcggggtgcacagggtaccctcatttatccacccgtggtatgggatctcccaggcccttgggcccacttcaagactgtgaaccagtaggccccacaagtcggtgcaagtcacagctgtggacactancttcagagcgctgaggttgaactcgtacgcgttgtcccagaagagcaccttgctacgataatccttatcagcactgcagggcacaaggtgcaacgcagccatggtgggccaaatgacnccgtcctccttcagccaggcatcccgggcatacaggatggactcgatcatgaactcaaacagcaggcaggtccccatccactcagacaccagcacgtccaccttctcgggcagcaccacatcctccaccttctgctggtacacggtgatgatgtcagcaaagccgttctgcaggaccagctgccccgtgtgctgtgccatctcactggcctccaccgcgtacaccgctctaggccgcgcatagtgtgcacagaagagactgatgatcccagtcccacagcccacgtccaggatgactttatccgtcagggattctttattctgcaggatgacactgtggtatttagttgttcgtggctggtctgccaacatctccaagtggagtttcagagttccatagctgccgaagtactcttcatcctgccacgtgtcctcggggtcgtactcatccacgtgcttccccacatggtttgccggaatgtacccacagcagcccgcacgctcaccccaccaccaatctgcagtggtttgtctcaggataagaattttttctcctctcaaaaaactgagctgggtctcatcggtggcagcgtagtccgcgatggccacaaactcctctggctgtactccctcctgcaggagacccgcctcactgcactcagcaggctcttctccctgcgattcacttctgggacagtcacctgatgttgccatagttctcttaggctctgcctcataactgctgatttatttcattttcttttccatttctactcaatcgcgtttctccgctgagttccgcgtccacaccgccagcgcggaggggtggacggtcctttccaggagcctgagccaccgccctcccc

SEQ ID NO: 256018 - DNA, 429 bp, Homo Sapiens
tggaggctgtagagttcaatgtcagggggacatctgacgagtgccttcttactggtggggcctcttgccgtcctgaggcggcaaagggaatcacatggtgaggcggctaagtgtgttcactggggtctctcttctctttataaaaccaccagtcccactcccatgatgacccattcattcattcactcattaatccattaattcatgagggctctcatgacccaactaccttttaaagactctgcctctcaatactgccgcattgggggattaaatttcaacatgacttttagagggggacattcaaaccacaggcagccacattaaggaaatttttgaaaaatttaatttttagacagctctgtacatttcttgcttattattcatccagttggaatcacagaatacatgaaacacaattacaatctt

SEQ ID NO: 256019 - DNA, 485 bp, Homo Sapiens
aatgtttttagctttgtttgtagaattgctttaactggtttcatctctgggagctacactttgaaatataactttagcaacattttactatactttttcacaacccagagcagtactattttatgcttagtggttaaactaattccataaatcttttgcaactatcctctattctttttcttgtaatttttacctgggaaggtttttactgataatcatcctatcctgagtcatcccacaaaccaatctgtctcactaatcattgcttctaacctacagactaagcataacttctgctaaatgatctttgataagatgctatgactctataaagtctttgatattcatgtctaaatttaatcacttgtagattttcatagaatcaatctttcacttctacaattgggagtatttataagttgtttatcttaaacagttcctctatcacgcttttcacgttaaataaagcaatcccttcaaatcaa

SEQ ID NO: 256020 - DNA, 722 bp, Homo Sapiens
  misc_feature (668)..(668): n is a, c, g, or t
  misc_feature (687)..(687): n is a, c, g, or t
cacaacttgtgtagcagcacagggcccacacttagaaggaccccacacttggttcaaggctctgctatagcggaaattcttaataatgtttgaagaagggccccatgatttcattttgtgctgagccctcaaaattatgtctgtttcgtggtgggaaatatcctatgttttcttgctcaaacacctttctctctgaaagcagaaaaaggcactgatataaagggaagagaaggaggctcaccggaggaaagagaacatagtgaagattcccgcctttggggaggtctggaccacccagggcctccactgccaccttggctggcaagggagaaatgtgttgtgttgtcttagctttaaaacagtcacagttcttgctctatcatagatgaacaaatactttcttgatcattctgtaagaccaggaggttggtaagagtgactaaccagcctaactttaatacacatgtataaagatgttcacagagaaagatgctctgtagagaatttgctaccgaagttggctcaagaatttgtttttagtgttatttaccaagattaggacgtcagtgggcttaaattctttgaattcttttcaaggactgcaagattatttgataaagagtagcctgaatcttgtgctctaatatttacacagtaagtttcaaagnaagggtgtaagtcaaaganttgttacataggggggaaatgggctggggtagagg

SEQ ID NO: 256021 - DNA, 1952 bp, Homo Sapiens
  misc_feature (1716)..(1716): n is a, c, g, or t
  misc_feature (1718)..(1718): n is a, c, g, or t
gccgacaagatgttcttgctgcctcttccggctgcggggcgagtagtcgtccgacgtctggccgtgagacgtttcgggagccggagtctctccaccgcagacatgacgaagggccttgttttaggaatctattccaaagaaaaagaagatgatgtgccacagttcacaagtgcaggagagaattttgataaattgttagctggaaagctgagagagactttgaacatatctggaccacctctgaaggcagggaagactcgaaccttttatggtctgcatcaggacttccccagcgtggtgctagttggcctcggcaaaaaggcagctggaatcgacgaacaggaaaactggcatgaaggcaaagaaaacatcagagctgctgttgcagcggggtgcaggcagattcaagacctggagctctcgtctgtggaggtggatccctgtggagacgctcaggctgctgcggagggagcggtgcttggtctctatgaatacgatgacctaaagcaaaaaaagaagatggctgtgtcggcaaagctctatggaagtggggatcaggaggcctggcagaaaggagtcctgtttgcttctgggcagaacttggcacgccaattgatggagacgccagccaatgagatgacgccaaccagatttgccgaaattattgagaagaatctcaaaagtgctagtagtaaaaccgaggtccatatcagacccaagtcttggattgaggaacaggcaatgggatcattcctcagtgtggccaaaggatctgacgagcccccagtcttcttggaaattcactacaaaggcagccccaatgcaaacgaaccacccctggtgtttgttgggaaaggaattacctttgacagtggtggtatctccatcaaggcttctgcaaatatggacctcatgagggctgacatgggaggagctgcaactatatgctcagccatcgtgtctgctgcaaagcttaatttgcccattaatattataggtctggcccctctttgtgaaaatatgcccagcggcaaggccaacaagccgggggatgttgttagagccaaaaacgggaagaccatccaggttgataacactgatgctgaggggaggctcatactggctgatgcgctctgttacgcacacacgtttaacccgaaggtcatcctcaatgccgccaccttaacaggtgccatggatgtagctttgggatcaggtgccactggggtctttaccaattcatcctggctctggaacaaactcttcgaggccagcattgaaacaggggaccgtgtctggaggatgcctctcttcgaacattatacaagacaggttgtagattgccagcttgctgatgttaacaacattggaaaatacagatctgcaggagcatgtacagctgcagcattcctgaaagaattcgtaactcatcctaagtgggcacatttagacatagcaggcgtgatgaccaacaaagatgaagttccctatctacggaaaggcatgactgggaggcccacaaggactctcattgagttcttacttcgtttcagtcaagacaatgcttagttcagatactcaaaaatgtcttcactctgtcttaaattggacagttgaacttaaaaggtttttgaataaatggatgaaaatcttttaacggagacaaaggatggtatttaaaaatgtagaacacaatgaaatttgtatgccttgatntntttttcatttcacacaaagatttataaaggtaaagttaatatcttacttgataaggatttttaagatactctataaatgattaaaatttttagaacttcctaatcacttttcagagtatatgtttttcattgagaagcaaaattgtaactcagatttgtgatgctaggaacatgagcaaactgaaaattactatgcacttgtcagaaacaataaatgcaacttgttgtgcaaaa

SEQ ID NO: 256022 - DNA, 781 bp, Homo Sapiens
aagggaatttcccaagaagacggggggcctcgtccagatcctttgggccaacattgaggaaatgatccccattgccctgtccctcaatccaaagactggggttctgatatggacctcggttttactactagcacttttgagattcttctcaataatttcggcaaatctggttggcgtcatctcattggctggcgtctccatcaattggcgtgccaagttctgcccagaagcaaacaggactcctttctgccaggcctcctgatccccacttccatagagctttgccgacacagccatcttctttttttgctttaggtcatcgtattcatagagaccaagcaccgctccctccgcagcagcctgagcgtctccacagggatccacctccacagacgagagctccaggtcttgaatctgcctgcaccccgctgcaacagcagctctgatgttttctttgccttcatgccagttttcctgttcgtcgattccagctgcctttttgccgaggccaactagcaccacgctggggaagtcctgatgcagaccataaaaggttcgagtcttccctgccttcagaggtggtccagatatgttcaaagtctctctcagctttccagctaacaatttatcaaaattctctcctgcacttgtgaactgtggcacatcatcttctttttctttggaatagattcctaaaacaaggcccttcgtcatgtctgcggtggagagactccggctcccgaaacgtctcacggccagacgtcggacgactactcgcccc

SEQ ID NO: 256023 - DNA, 447 bp, Homo Sapiens
  misc_feature (241)..(241): n is a, c, g, or t
gatctacaccaactatgaggcgggcaaggatgactatgtgaaggcactgccgggcaactgaagccttttgagaccctgctgtcccagaaccagggaggcaagaccttcattgtgggagacccaggtgagcatctggccccatgctgttccttcctcgccaccctctgcttccagatggacacaggtatctccttcgctgactacaacctgctggacttgctgctgatccatgaggtcctanccctggctgcctggatgcgttccccctgctctcagcatatcgttggcctcagcgcccggcccaagctccaagccttcctggcctcccctgagtacgtgaacctccccatcaatggcaacgggaaacagtgagggttggggggactctgagcgggaggcagagtttgccttcctttctccaggaccaataaaatttctaagagagct

SEQ ID NO: 256024 - DNA, 1134 bp, Homo Sapiens
  misc_feature (23)..(23): n is a, c, g, or t
  misc_feature (39)..(39): n is a, c, g, or t
  misc_feature (50)..(50): n is a, c, g, or t
tccagaagagcgaccggcgcctngagctcagcactgggncggaggggcgngaccacccttataaggctcgtaggccgcagacgtcaggctggagtttcgccgccgcagtcttcgccaccatgccgccctacaccgtggtctatttcccagttcgaggccgctgcgcggccctgcgcatgctgctggcagatcagggccagagctggaaggaggaggtggtgaccgtggagacgtggcaggagggctcactcaaagcctcctgcctatacgggcagctccccaagttccaggacggagacctcaccctgtaccagtccaataccatcctgcgtcacctgggccgcacccttgggctctatgggaaggaccagcaggaggcagccctggtggacatggtgaatgacggcgtggaggacctccgctgcaaatacatctccctcatctacaccaactatgaggcgggcaaggatgactatgtgaaggcactgcccgggcaactgaagccttttgagaccctgctgtcccagaaccagggaggcaagaccttcattgtgggagaccagatctccttcgctgactacaacctgctggacttgctgctgatccatgaggtcctagcccctggctgcctggatgcgttccccctgctctcagcatatgtggggcgcctcagtgcccggcccaagctcaaggccttcctggcctcccctgagtacgtgaacctccccatcaatggcaacgggaaacagtgagggttggggggactctgagcgggaggcagagtttgccttcctttctccaggaccaataaaatttctaagagagctaaaacaaacaaaagggggccgtctagagttatccctcggagggccagttagcgtacccagttctgttcaaaggctccctatggagtcgattttaagcaagactggcggttacaacgtgggacgggaaccgctgctgggactgggcagacctatccgcgggctaatggccaccacctcgaattaagctaaggaataactgcggttaggtaaccagctgcgccggtaatgtgctgtattatattgctgcgtgtaaaaagagaaggaaccacgagatcatgtcacccgccctcccctcctgcttctctgt

SEQ ID NO: 256025 - DNA, 681 bp, Homo Sapiens
  misc_feature (25)..(25): n is a, c, g, or t
gcactctcaccatgtaaaagtcttnccatagatgccatcattgccctgaatcgtctctgaacttggagactgctggtgcaaatcttatcacttgatccagcggcaatgcctatcaaaaggtcacagcagtggcgaagaactgatgacttctcaagggcaataaagttaggcatatctttgaatctgctagcataaggagtacccctttcctcgttctcattcccaaccacagtattagacctcttgctcacaccaacactcagtaatgcctggtgtaacccatcaaatatgaaacacaagaatactaaacttggggtcttaatgtccttaatatccccaatgctgggttggggttccaatgcatccagtggatactgtctgtttttcccagatagctcaaatcttccttgaaggtcagggagcccactcctgtccattgcgtcatctcctgggctgctgggctgtgagtcctttcttagatgagacattgtggaaaattggttccgacttaattctttaattttgttaagaatcataggtctaaaagatcttttgtaagatctgtcacagacccaaacaaaaagactgtgagaattaacataagcatacaatttaagaaaataacccattattagtcgctatgacttgactctgcacttctttaccatttttccaaaatac

SEQ ID NO: 256026 - DNA, 513 bp, Homo Sapiens
ggaaatgggagcacagtactgggaaatgggagcacagtactgggaaatgggggctcacagcactgcaaaatgggagcacagtattgggaaatgggagcacagtactgggaagtgggagcacagtactgagaagtgggagcacagtactgagaaatgggagtacactactgagaaatgggagcacagtactgggaaatgggcatacagtactgagaaatgggagcacacagtactgggaaatgggagcccacagtactgggaaaggggagttcacagtactgggaaataggagcacagtactcggaaatgggagcatagtactgggaaaccccagacctggattctgagtttttcagcctagcccagacttcttatcttagtagacaaaaagagtcaataccagagaaccagaggcatcctctgtattttaatgaactctgcattttaatctgtttagtagtcattttttaaaagataatcagttttccaaatatatctataagttactacgtg

SEQ ID NO: 256027 - DNA, 618 bp, Homo Sapiens
  misc_feature (34)..(34): n is a, c, g, or t
  misc_feature (62)..(62): n is a, c, g, or t
  misc_feature (202)..(202): n is a, c, g, or t
  misc_feature (221)..(221): n is a, c, g, or t
ttctccagtttgagcaagctctgtgcatggctgnagaccttaagagtgtatctctgaaaacnccagacaaccccttgattacctgaccaagatccacacctactcccacctcggaatgtcagacatcataatttggatggaatctagagaagagactcccctgcaggttgggctcatagtaatctcatctagagtaggttanatatttctgaaggaagagnagaagtaaactataaataaaccatcgctattcaggcctcccatcagttgctttcactgaagatggagaaatgtataacccactgctttaaatcagggctcttgtcacctgagctagaaatgtgataaataccaaagtccagttatataccttgatttatgctttttatgcttatgttacctctcaaattgttaagagtttagcactttgaccattctgtcctgaattaaaacatatctatttcaaaactgcaaaatttcatattctatttttcctagcctacctatattcttataaaaaagaactaaattccaaccctttattcttattaaacatctcttagagctttagataaaagtataggataaagtcccactattcggcacgagcggcacgag

SEQ ID NO: 256028 - DNA, 514 bp, Homo Sapiens
ctaaggcagctgcatctagccaaaatatgactctgaactctcacctctccttctccagtctgagcaagctctgtgcatggctggagaccctaagagtgtatctctgaaaaccccagaccaccccttgatttactgaccaagatccacacctactcccacctcggaatgtcagacatcataaatttgatggaatctagagaagagactcccctgcaggttgggctcatagtaatctcatctagagtaggttaaatatttctgagggaagaggagaagtaaactataaataaaccatcgctattcaggcctcccatcagttgctttcactgaagatggagaaatgtataacccactgctttaaatcagggctcttgtcacctgagctagaaatgtgataaataccaaagtatcctaaaaaggattatttaagaaagagttaaaaatatatagagaatatattttccagttatataccttgatttatgctttttatgcttatgttacctctcaaatt

SEQ ID NO: 256029 - DNA, 691 bp, Homo Sapiens
  misc_feature (524)..(524): n is a, c, g, or t
  misc_feature (600)..(600): n is a, c, g, or t
cgggctgcaggaattcggctttaggaactcccagactgaagctatccgaccaccttggcttcccaaagggctaggattgtaggggtgaaccaccacacccagctcttcatgatggagttgtggttgcctctctaagaccactttgtactgtctatctgctaccctactatgctccagctccacaagtcttctgtatctccaacacatcaagtttgcattaatgcttacatccattagtggccccactgggacactggagtgtacttctaccactctgtgtatggctggctcctccttgctagtcagatcccagcctaaatgccatcattttagagaggccatctctgaccgcacaatctagatacccagtcactgttgatgacatcattcattttaattctcagcatagcagttgtcaccatgtgatcatttattctggcttatttatatagttttgtctctccttggctgtcttattttctggtatagtcacatcttctagagtagtgcctaacacttagtangcatttaatagatatgttaaatcagcagttgaaatcagtcttttcaatgtatagcaagtaaaactctgtcatgaanctgactctactacattctgtacttgacagaagacagtaaatactctttgttctaacagagtgaaagtgattctcaaatgagtctttagcac

SEQ ID NO: 256030 - DNA, 605 bp, Homo Sapiens
  misc_feature (25)..(26): n is a, c, g, or t
  misc_feature (59)..(60): n is a, c, g, or t
tctttaaaggagtcataaactcagnnatagtggcaaggtgtaacacatgaatccataannccatattagtgatactttcgttcttgagtaaggggtttcttgatcttcatttcatttacttaatggcactaacataaattttgggtggggttgtctgttactaacaaactaccctcaaacttaattagcttaaaataacaaccatttcacttgcctcaatgctgtgagttgataggaatcagctgggtggttttgcgccacatgatggtgactttagctgcagttatctaggggctggattgggcttgaaacatctgagatactcatgcacatgattggcagttaatggtggctatcagctgggaattcagctgccacatctcagtttatgtggcttctccatgggacttggagttcttccagtcgtggtggctgggcttgctatcatttatggctgggatccaagaagcagcatcccaagtataagcatttcaagaagaggaaagtagaagctaagtccttttggggccttagcttggaaatcccagaacattattttcaccacattgtattggtcaaagtaatctacagggtcagcctagatt

SEQ ID NO: 256031 - DNA, 805 bp, Homo Sapiens
  misc_feature (73)..(73): n is a, c, g, or t
  misc_feature (128)..(128): n is a, c, g, or t
gcttctggtccccttctctcatcctgctgattgtgctctgagtttcccctgttcttattgccactcccttaanaagtgcttgctattgatgaaaggcttcaccactgagtcctctctggggcaatacnttcaacatgtgggcagaccctacagttacgttagtgcctagagtttgaaaggccaaatcctcctttaggggctttgtggggcttggtgtgtgattcactgattcacttccagggcaactaagtcttctcttcaacctttgatgtctttaggtttctaaaacgaacatcctctcggaagacaaatacaatttgcaaggcacactagtgtgagaacgcagtgcttggtcaggaggtccaactgcagttcagactaatgttccaggctttgaatcttcatgccaaaagagtctctgctcactactctccaggttgtcttccagctggtttccatctgtaccatccagttgactgatttctgtgtattgtctgcttggagagggtaaaggattatagacattgccatagcagctggtgtaagaagaatgtgctggagtctcgtaatccgacagccctatggttaactgggtcctccagttcccagaagcatttgtagaagacactgaagagtacaaggatgcacgactgcttggagaacaaggtacttgcagccccgcaaaccccaggcatctctgtgatcccctgtctgagtcaaagctggtctgcgggctgtgtccctgatccttctgcccagaggcccgctggtaccagccacgcaagtgctcggcaactaaggcccc

SEQ ID NO: 256032 - DNA, 633 bp, Homo Sapiens
  misc_feature (475)..(475): n is a, c, g, or t
  misc_feature (490)..(490): n is a, c, g, or t
  misc_feature (610)..(610): n is a, c, g, or t
ctgcaggaattcggcactagtttggaaacaaacatccagaaaaaagagagagagaccaggagagaagggtagcagtgcacagatcttctccaaaatgggaaccgtccaccaaggacgtctgctgtaaggatcaaagattatgttagtctagatcccctcagccaccactcctcccacctccccaccaccaacactcacacactctgccaggcccctaaagaagagtaggtggcagttgctggtgcagccactcaacccgacagcactgcccacgaccacggggactggtgtaccacagtcctcctgcagagcagcacttagagggtccaagaggagaaagctgcccccgcaactggggcctttgtccctgaggactgcagtgcatctgactcagaaacgtgcacctgatgatgatcattctgttcgctgtgagaattttgtccacagtaagaacttgggaagtttcaacacattntctcttggttccatnccttattccacagcttgtaataatcccctttatcctctttctccctgcactgtactaataggctgggcattccacatctctcatcatattctactgaccttcttctttaggagagagganagagagagaggaacatgtacaga

SEQ ID NO: 256033 - DNA, 617 bp, Homo Sapiens
  misc_feature (560)..(560): n is a, c, g, or t
aaaaaatggagcatcatcccaaaattgtaatttcaagaactcttgtcactgtaaacgaatgctatttgtgaattagattgcagtcagcatttaaaggcaggcccctgatgatttttcaaatcataagctttccctgcattgtttgtccaacaataattcttcaaaggttgaataatcattttggggttgacaaagatggcatggaacagcactgggtagggtggatgggtagagagataaggaggatgactgagagggagggagaactggagaaattcaggctatgagaaagacactagacaataaagaaaggcctttaactggatggctagctaatccagtctttcaatggggaatcttttaagggctctcaggggacccctggaggaatacatttgtttcagacatctagagttatttttgcgggacataaccatctaatataagtatactatctaggacacaggctaccttgtcaaggaaagtctacctatcacagaataaacatgttttacgaaaaactatccctcaaaccactgctaataaagactcagccacangtactcttttttatgtgaagacacatttaacctaataagccctgtcttaatactaca

SEQ ID NO: 256034 - DNA, 288 bp, Homo Sapiens
ctgcctgggatcatccaggaaggatctcagccctattcatgtttctgctctacagagcactatattctccttgttgagagctgttggcttcacaaaggagagttgatgtggccaagcctttccctccctacctgatcactgcttaacggcatgtataatggatacttcctcatgcagaacccccagaggagtgactgtacgccattctctttgccaagtaatagaaaaccaatctaaatgtcaaaaatcagataaaattgcctggggatacattacttgttgactttc

SEQ ID NO: 256035 - DNA, 948 bp, Homo Sapiens
tgtctaattcattattcaagggataatctccctgcccagtcttcttactttgactgactagctgctttacagccaacccttgatactttaccaaaagagcatgctgatcctctggaattttactattaagaaaagcaatgatctgtggaacacatcttccaggtgcatggagcatgctgtgggttgaaaactgaagccaaaaggactgatgtgaggtgcagaataagagcaagggtctcctgtgacctttagctgtcaagccagtgcttgtcgatgttgaaacagtatctgtctttccctttttttgtctccccttttcaccataatatcacaagcttctgctgcagaatccagacaagaaataaaatcttctatgctcttttcattcagagagttatggagttttgtaagagctactttggtttcttctgataatttacttaaaattttctttcttatttcacttgtaatggctgcaggatcgtctactgccatcattaaatccgaagctaagaagttgaaaatgaggttagtgatatcagtacacactgacttcagcaagtgtttggtaagagcagcctgtgtgtcatctgcaaaaaacttcatccctttttcaaataacctaatgttattgtacaggtttgaaacttcttcttgcaagtccttgattgtgcgttttctgcccgtcccagaagcagaagttgttgaagacatgaatactgaacgtaccacctcgagataagttttattaagaggttttattaagtactcagcaagttccgaaataaactcctcaggggcatcttgtatgtgttttcttaaaaaatcttcaatctcatcctggaacataaaactgatctctggcttcttctttccagtgtgggatgattgagattcatcatcactatcatcatcttttcttcctttcttcttgacttttttaatttt

SEQ ID NO: 256036 - DNA, 424 bp, Homo Sapiens
  misc_feature (176)..(184): n is a, c, g, or t
gtaggaaattacctccttaattacctggtagaattgtcagcagacatgttcatccgatgatagtactgcagttttctattaataatttgcagacttttatctaacctgcactcatgtacagattattaaaagttttaaaatgtaactgatcagtattgatcaatcattgtcttgannnnnnnnnacagcgtatatttctaatcatattttttaaagccaagagaactggttgaatgaatgtttattttcctgaaggtatttttaagataaagcttcctaatggcgtgtaaactttgcatatgtatgtagtttgatacatattgtcacatttgaaaatcttgtgggttgtaactggttttatacaaaatatcgaatagtggaaattgtataattacaatcatgtaattaaaagtattaacccaac

SEQ ID NO: 256037 - DNA, 1392 bp, Homo Sapiens
  misc_feature (1357)..(1357): n is a, c, g, or t
ggtaccggcccggaattccgggatatcgtcgacccacgcgtcgagccttatgcatgcgtggagtgtgggcaaagctttaggagaaagtcacagctcatcatacaccagaagatacactcggggaaaagctttagaggtgcaaggagtgaggatgtgattttagcaacaagtcagccatcagccacaccagcggaaatgcttagggagaagccttgtttgtaaggtaatgtggacagagctgtacgtggacatcattacttgtcacgtgtcagaggacacactcgggagaaaccttcatggagtgagagtaaggtgtggctggaagtggccccttaagagatacttggagtcaaatctatccactgtacgcccaccccactcttgttctaagagcttggggacagtcttttgaccccttacattcctttagatgtgaagatgacagagatctaacttctgagagcagaggtgtcaagtgacggtccccttggaggaatggtcttgcatctgactacttccttctgcaactgtgttcttccattagcttccatgacactctcctgctttatttttttctacatctctagcctttgctgtttcctctcctacccaactttagattttactcagagttcagtctccagccctacaatctgagggacacctttaccaggtccccttcctaaccctccagtcccaaatccaagattctttaaccacactctaaaagttcttcagactcaggacttaaacatagccacgccaccttggccttcaatgacagggatctagcaatgctgcatcatcagccttccaataccaggtttaagggtattttaaacacagctcctcttaaatcctccaatctcagtacccagtgttttagccatgctcgggtggctaaattacatccaggaatggtgccagggcctttagccatttgtctctcctcacactccagggcccatatggcccaggttctgacagtttgccttactcccttggcctggggctagccctacctgataccctgtgtcaatgagtgtaccttggagagctatccactcaggccccagtgcctctatttgctaagggactctgccacagaaaagaaggggagagatgttcatgtaacctcaaaatacttaggcttggttttgatgctagagaggaagaaggacttggagagagagaaggaatggctggtccagaggcttttgtccactccctctcactggaagtggttgatctccagggaatccccaaggttagcctgcttaggggaagggctaggggtacctggaatgtaggatctcccccatgcctggcctaccaccctaatgtgtccggaattggngggttcttggtcttgctgacttcaagaatgaagcc

SEQ ID NO: 256038 - DNA, 732 bp, Homo Sapiens
  misc_feature (672)..(672): n is a, c, g, or t
  misc_feature (678)..(678): n is a, c, g, or t
  misc_feature (685)..(686): n is a, c, g, or t
  misc_feature (688)..(688): n is a, c, g, or t
  misc_feature (695)..(695): n is a, c, g, or t
ctgagaagatctctatcaaccaccagagagccaggaagcaccccctaggaggaagggtgaaaatccgtgtctacccagagctcaccaaggcactggttatgctgtgcccaaagacccgggacccaacgtaggcattgttcgcaataagacctacccccagagcatgcctgtgaggccacgccaggtgggcaggacggccgctggccgaggcttctcatcagtgcatgggtggagagggaagcccagcctgcctgcacgctatgacgctattgtgtacacagggaggcaggaccagccccagcactgaatgttcaggtcaagctgatagtgcctgttggggacctcagcctgggaaggtgacagagaagacctaggttgccctctagctccaggattcagagctctagaggccgggaaaatgcagggctggtcagccaggaaaatgcaggtctggtcagcatcgtcagcatcgagtcagctgcctgtcagcctcgtcgatgccgaggtatgaactgatctcaaatgggcaggatcttccactccctggatgtctggtgagggtggcctgtgagtgcacagtcaccaccagcctcagtgccaggcacagtgcagcacacacacacgcgtagaccagaaaagcaggcagtcctcacttctctacaggcatttcangaaccntgtgctnngngcagggntgcttcgtttctgtggtgttcatttcaaatctctgca

SEQ ID NO: 256039 - DNA, 1063 bp, Homo Sapiens
  misc_feature (213)..(222): n is a, c, g, or t
  misc_feature (729)..(729): n is a, c, g, or t
  misc_feature (773)..(773): n is a, c, g, or t
  misc_feature (791)..(791): n is a, c, g, or t
  misc_feature (880)..(880): n is a, c, g, or t
  misc_feature (942)..(942): n is a, c, g, or t
  misc_feature (955)..(955): n is a, c, g, or t
  misc_feature (963)..(963): n is a, c, g, or t
  misc_feature (993)..(993): n is a, c, g, or t
tggaagactcagcatgagtcaggcctggcagccagagctcctctctcagagtctgccgcagacgttccctcagctggttatcatccctgtctgcagggtcactggctgggggctcagcaaagcctctcaagtcagattgggtgatatatttcctgcaccacttacacactcctggaacccactttgcctttggagcctggagctttttagtcnnnnnnnnnncacagtgttctctgcaagccttgtccctgtcctgacaggctctgcttgctagaaagaatgaccctttgcaagtacaaagggcataggtgaatggttatctacatttctttttttggatttccaaggccaaagtatagatgccataaaggtaataactatgccttattaatgtcatcctgcaaagcaggggctgctatcctggcttgcctcctgtgttcttttgtttactaaaatcttgactgcaactaacttttggaaatcacccaaatctgatcactttcttcctctgcagcagtttctcattgccgcaggatgtctatgtctccctcccactctggccactctcctacttgtgctcttctccccagccacaatgaatctttttaatgttttctggaacacgggaaaccttctctagtcctctcagctttggtacaggaatttcctccacccatatcactcttctgagccccactctcgtcagttcttcacacctgtcagacattnctactcagccatcaagtttcagctgaggtgtcacttagttcttnccaaagcctccacttggngcttctctaagtttgcatgagggactcccgatgagtgtacaaagcactctgcctcccctgtcatggcactcaatgcactgtgctgcaanctgccctgggcccaaccccagcatctgtgacctccttgagaacaggctaggggatacaattnccaataaaactgnccaaacanggaaacaacaataacatctaccttttcaanactgggtggctcaatcaatcattttggaataaatgcataagatggtagagatatagcaatattgactgct

SEQ ID NO: 256040 - DNA, 1607 bp, Homo Sapiens
  misc_feature (969)..(1079): n is a, c, g, or t
  misc_feature (1149)..(1210): n is a, c, g, or t
agtaagtccgtgaggttaaaaagcatcttacctggagtccataggtatttcggatgagcaaagcagtatgttggccagtatgtgtgtttaccaaaatggccgccacagtgattaaagctcagagacgtataagaactgctggtttcaactgaaggcaacatggatggcatttagtgttctgtgactggtctggcaccctactttggttgaccaaagatgggaaggggtctaaaagtcatgtcacgttataaaagagcttgggaggagcttttttcgaaagatccaaagattttggaaggagagattacagcagaactaagaccacgtagaagataggtagatttcagctcaatataaggaatggttttgtaatatcagtgcagttccaaatggaataagctgtttgaacatggcttagcagaagctgaatgacaacctgttagaaattctagggaattctgcactgagtacaacattggattatttctttgggctgtttccaactcaagattctgttatttcattataagcattttgaggaaggcagttggtataaaggtgaccttagtaataaaagtcagtgtgaagtctaaagaaattccacaatgaatttaaagacaagaattttagggacaaggatacagaaaattgcctagtaacttgcacacagcagatggtaaatatttattgactcaatggagtaatgttaaaaataaggtttcccatggactgtgtgagggccaggcatacttaacatcctttgtgagagagaggatggaaacggagtctactgtgaaagccacaagttttggggaaatacactcctgcaaagaagctggaggttaacaaccaaggcaaaggggccagaccacagggagatcttccaggtccaagagcactgcagggcagatgagaagcagggatgattatgttgaaagtgcaagataaggccaggcgcggtgtctcatnnnnnnnnnnnnnnnnnnnnnnnnnnnnnnnnnnnnnnnnnnnnnnnnnnnnnnnnnnnnnnnnnnnnnnnnnnnnnnnnnnnnnnnnnnnnnnnnnnnnnnnnnnnnnnnccaggaatggtggtgggcacctgtaatcccagctcttcaggaggctgagaacaagaatcgcttgaacatnnnnnnnnnnnnnnnnnnnnnnnnnnnnnnnnnnnnnnnnnnnnnnnnnnnnnnnnnnnnnnagactccatctcaaaaaaaagtgcaagataatgaatttggggtaaataattcacagtcaagagctctgagcacttggattcaaaaagagagcatgagggacattaaatatggttctccctggaaatgttggtccactgtactgatgtgggctgagagagccaaccaaatccaagtggggttttgtcaggaacggtattggaaactctgaactagataaataattcaaaggatattagctaaagtgatcagggaccaggacaggaaggtactgttacaaacggagagaataaaagggcaaactgaaataatagatcctggaatagcacagacactgacctctgaccacagaccaaaagttagggcctagttgtatttcttagaaatacaaagaaaaca

SEQ ID NO: 256041 - DNA, 1509 bp, Homo Sapiens
  misc_feature (90)..(90): n is a, c, g, or t
gagtggcaatgctatcatcatcgtggtcgggggtgcggctgagtctctgagctccatgcctggcaagaatgcagtcaccctgcggaaccnaaaggctttgtgaaactggccctgcgccatggagctgacctggttcccacctactcctttggagagaatgaagtgtacaagcaggtgatcttcgaggagggctcctggggccgatgggtccagaagaagttccagaaatacattggtttccgccccatgcatcttccatggctcgaggcctcttctcctccgacacctgggggctggtgccctactccaagcccattcaccaccgtcgtgggagagcccatcaccatccccaagctggagcacccaacccagaaagacatcgacctgtaccacaccatgtacatggaggccctggtgaagctcttcgacaagcacaagaccaagttcggcctcccggagactgaggtcctggaggtgaactgagccagccttcggggccaactccctggaggaaccagctgcaaatcacttttttgctctgtaaatttggaagtgtcatgggtgtctgtgggttatttaaaagaaattataacaattttgctaaaccattacaatgttaggtcttttttaagaaggaaaaagtcagtatttcaagttctttcacttccagcttgccctgttctaggtggtggctaaatctgggcctaatctgggtggctcagctaacctctcttcttcccttcctgaagtgacaaaggaaactcagtcttcttggggaagaaggattgccattagtgacttggaccagttagatgattcactttttgcccctagggatgagaggcgaaagccacttctcatacaagcccctttattgccactaccccacgctcgtctagtcctgaaactgcaggaccagtttctctgccaaggggaggagttggagagcacagttgccccgttgtgtgagggcagtagtaggcatctggaatgctccagtttgatctcccttctgccacccctacctcacccctagtcactcatatcggagcctggactggcctccaggatgaggatgggggtggcaatgacaccctgcaggggaaaggactgccccccatgcaccattgcagggaggatgccgccaccatgagctaggtggagtaactggtttttcttgggtggctgatgacatggatgcagcacagactcagccttggcctggagcacatgcttactggtggcctcagtttaccttccccagatcctagattctggatgtgaggaagagatccctcttcagaaggggcctggccttctgagcagcagattagttccaaagcaggtggcccccgaacccaagcctcacttttctgtgccttcctgagggggttgggccggggaggaaacccaaccctctcctgtgtgttctgttatctcttgatgagatcattgcaccatgtcagacttttgtatatgccttgaaaataaatgaaagtgagaatcctc

SEQ ID NO: 256042 - DNA, 699 bp, Homo Sapiens
  misc_feature (38)..(38): n is a, c, g, or t
  misc_feature (236)..(236): n is a, c, g, or t
  misc_feature (517)..(542): n is a, c, g, or t
ttcacgccattatatatccacttcatgagaaagtttcnaacactttctcaatgatcacgagttaccaagaaaataaaagattaaatttgtacagatattgatctatatatcaaatacatacagaaatgatgtaaaaaccttatgcagtttactttgacctctgtcctcaaaagatttgcccagggacagatgcttttcttttgtataaatgactgtggctttatttaaaatatganaatcaaaggaagaaacccagtttaatcacagtatttttaaaatcccttcccaatattaaaggatcattaccaatatatagcaccataatacaaatattgatgggagagggtattcacatcacgcaaaattaataataataataaaaacaaacaaacactgaaaacccgtgttagtatcgtagaataagaagttgataacagctttagctttcctcatacacggcaaggaaaaggttaaagagtttaaactaccaaaagtccccaaataaatcctaacaggnnnnnnnnnnnnnnnnnnnnnnnnnnccaaggtcagcagtacattttgaaccgtaaaagagaatggggcgattgagttgtacaactggagttatggctaagacataaatctcctctgcattaattatttttcggttcgtcggcagtaggagttagtgtgtgaacaatgaaagagggctttagg

SEQ ID NO: 256043 - DNA, 2440 bp, Homo Sapiens
  misc_feature (2074)..(2216): n is a, c, g, or t
  misc_feature (2233)..(2268): n is a, c, g, or t
  misc_feature (2280)..(2292): n is a, c, g, or t
ttcgccctcccacccgcactgcagactccagcctgagccatgggccgccgagccctcctgctcctgcttctgtcttttctggcgccctgggccaccatagccctccggccggccttaagggccctcggcagcctacacttgccaaccaaccccacatccctcccggctgtagccaagaactattcggttctctacttccaacagaaggttgatcattttggatttaatactgtgaaaacttttaatcagcggtacctagtagctgataaatactggaagaaaaatggtggatcaatacttttctacactggtaatgaaggggacattatctggttttgtaataacacggggttcatgtgggatgtggctgaggaactgaaagctatgttggtgtttgctgaacatcgatactatggagagtctctcccctttggtgacaactcattcaaggattccagacacttgaatttcctgacatcagaacaagctctggctgattttgcagagttaatcaaacacttgaaaagaacaatcccaggagctgaaaatcaacctgtcattgccataggaggctcctatggtggcatgcttgccgcctggtttaggatgaaatatcctcatatggtagttggagctcttgcagcttctgcccctatctggcagtttgaggatttagtaccttgtggtgtatttatgaagatcgtaactacagattttaggaaaagcggtccacattgttcagagagcatccacaggtcctgggatgccattaatcgactctcaaatactggcagtggtttgcagtggcttactggagcccttcacttatgcagcccattaacttctcaggacatccaacatttgaaagactggatctctgaaacctgggtgaatctggcaatggtggactatccttatgcctctaactttttacagcctttgcctgcttggcctatcaaggtagtgtgccagtatttgaaaaatcccaatgtatctgattcactgctgctgcagaatattttccaagctctgaatgtatactacaattattcgggccaggtgaaatgcctgaatatttcagagacagcaactagcagtctgggaacactgggttggagctatcaggcctgcacagaagtagtcatgcccttttgtactaatggtgtcgatgacatgtttgaacctcactcatggaacttaaaggaactttctgatgactgttttcaacagtggggtgtgagaccaaggccctcctggatcactactatgtatggaggcaaaaacattagttcacacacaaacattgttttcagcaatggtgaactagacccctggtcagggaggtggagtaactaaggatatcacagacactctggttgcagtcaccatctcagagggggcccaccacttagatctccgcaccaagaatgccttggatcctatgtctgtgctgttagccccgctccttggaagttagacatatgaagaattggatcagagatttctatgacagtgcgggaaagcagcacttgagaaacttttgattgttttcaatttcttcttttattgttcacaccaccacattcccattcactttgattttctacatgtaattaccttcttttgtttatcattagatttgatggggccaaagttgagatagaatagagggtgatgacggtaagagcaagtgtcccatgaatgtgatttcctggggttctcactgtctttgcaccacgtctaggaagaatcttcttgatagctctcccacaccatcagtggccctcataactggagtagagttcctggttgcttttcataagagggagagttactttctttgtatctctgcaagcagagatttctctttggttttgaggttgaagtgtctttggcccatttgtaagtccccatccctaccctacacaaagtaaaagcagaagatagataaaaaatgatgtaattgcagctggtaggatgtctggtgccaatccaggaagtgagagccatttcttttgtaccggatttaatgactttgaactgtgctgtaaataaataatacagctggaccttnnnnnnnnnnnnnnnnnnnnnnnnnnnnnnnnnnnnnnnnnnnnnnnnnnnnnnnnnnnnnnnnnnnnnnnnnnnnnnnnnnnnnnnnnnnnnnnnnnnnnnnnnnnnnnnnnnnnnnnnnnnnnnnnnnnnnnnnnnnnnnncacacgaaccctaaacnnnnnnnnnnnnnnnnnnnnnnnnnnnnnnnnnnnntttttgttgggnnnnnnnnnnnnnacaaaaaaaactttttaaacaaccttctcgtgggggcgggcgggggcccaataaaaggaaaaagagaaagtgggcgctcctttcgtgttccccccaagaaaaacacgtcgcaaaaagaaaaaacagggttgtgtaatctccacacaac

SEQ ID NO: 256044 - DNA, 645 bp, Homo Sapiens
ttcgccctcccacccgcactgcagtctccagcctgagccatgggccgccgagccctcctgctcctgcttctgtcttttctggcgccctgggccaccatagccctccggccggccttaagggccctcggcagcctacacttgccaaccaaccccacatccctcccggctgtagccaagaactattcggttctctacttccaacagaaggttgatcattttggatttaatactgtgaaaacttttaatcagcggtacctagtagctgataaatactggaagaaaaatggtggatcaatacttttctacactggtaatgaaggggacattatctggttttgtaataacacggggttcatgtgggatgtggctgaggaactgaaagctatgttggtgtttgctgaacatcgatactatggagagtctctcccctttggtgacaactcattcaaggattccagacacttgaatttcctgacatcagaacaagctctggctgattttgcagagttaatcaaacacttgaaaagaacaatcccaggagctgggtttaggatgaaatatcctcatatggtagttggagctcttgcagcttctgcccctatcttgcagtttgaggatttagcaccttgtggtgtatttatgaaa

SEQ ID NO: 256045 - DNA, 396 bp, Homo Sapiens
aagtgtctggaatccttgaatgagttgtcaccaaaggggagagactctccatagtatcgatgttcagcaaacaccaacatagctttcagttcctcagccacatcccacatgaaccccgtgttattacaaatcttccagtatttatcagctactaggtaccgctgattaaaagttttcacagtattaaatccaaaatgatcaaccttctgttggaagtagagaaccgaatagttcttggctacagccgggagggatgtggggttggttggcaagtgtaggctgccgagggcccttaaggccggccggagggctatggtggcccagggcgccagaaaagacagaagcaggagcaggagggctcggcggcccatggctcaggctggagactgcagtgcg

SEQ ID NO: 256046 - DNA, 388 bp, Homo Sapiens
ataggccaagcaggcaaaggctgtaaaaagttagaggcataagaatagtccaccattgccagattcacacaggtttcagagatccagtctttcaaatgttgaatgtcctgagaagttaatggcctgcataagtgaagggctccagtaagccactgcaaaccactgccagtatttgagagtcgcctaaaatcggtagttacgatcttcataaatacaccacaaggtactaaatcctcaaactgccagatagggccagaagctgcaagagctccaactaccatatgaggatatttcatcctaacccaggcggcaagcatgccaccataggagcctcatatggcaatgacaggttgattttcagctcctgggagtgctcttctcgcgtgcc

SEQ ID NO: 256047 - DNA, 631 bp, Homo Sapiens
caacctcccgacttctagtaaattacccagagccctatcgttctcagatattggattatctctttaagccgaattttggtgcctctttgcatattttaaaagtggaaataggtggtgatgggcagacaacagacggcactgagccctcccacatgcattatgcactagatgagaattatttccgaggatacgagtggtggttgatgaaagaagctaagaagaggaatcccaatattacactcattgggttgccatggtcattccctggatggctgggaaaaggtttcgactggccttatgtcaatcttcagctgactgcctattatgtcgtgacctggattgtgggcgccaagcgttaccatgatttggacattgattatattggaatttggaatgagaggtcatataatgccaattatattaagatattaagaaaaatgctgaattatcaaggtctccagcgagtgaaaatcatagcaagtgataatctctgggagtccatctctgcatccatgctccttgatgccgaactcttcaaggtggttgatgttataggggctcattatcctggaacccattcagctttaaatagtgacatgggtgcaggctgctggggtcgcattttaaacaa

SEQ ID NO: 256048 - DNA, 1025 bp, Homo Sapiens
cggatgggtgctattgtgaggcggttgtggaagagtttcgtgagtgctcgcagctcatacctgtggctgtgtatccgtggccacagctggttggcgtcgccttgaaatcccaggccgtgaggagttagcgagccctgctcacactcggcgctctggttttcggtgggtgtgccctgcacctgcctcttcccccattctcattaataaaggtatccatggagaacactgaaaactcagtggattcaaaatccattaaaaatttggaaccaaagatcatacatggaagcgaatcaatggactctggaatatccctggacaacagttataaaatggattatcctgagatgggtttatgtataataattaataataagaattttcataaaagcactggaatgacatctcggtctggtacagatgtcgatgcagcaaacctcagggaaacattcagaaacttgaaatatgaagtcaggaataaaaatgatcttacacgtgaagaaattgtggaattgatgcgtgatgtttctaaagaagatcacagcaaaaggagcagttttgtttgtgtgcttctgagccatggtgaagaaggaataatttttggaacaaatggacctgttgacctgaaaaaaataacaaactttttcagaggggatcgttgtagaagtctaactggaaaacccaaacttttcattattcaggcctgccgtggtacagaactggactgtggcattgagacagacagtggtgttgatgatgacatggcgtgtcataaaataccagtggaggccgacttcttgtatgcatactccacagcacctggttattattcttggcgaaattcaaaggatggctcctggttcatccagtccgctttgtgccatgctgaaacagtatgccgacaagcttgaatttatgcacattcttacccgggttaaccgaaaggtggcaacagaatttgagtccttttcctttgacgctacttttcatgcaaagaaacagattccatgtattgtttccatgctcac

SEQ ID NO: 256049 - DNA, 644 bp, Homo Sapiens
gtaataggggccccagccaaggaacctaaagtgggtagaaggaaaaattattttttctttccctacaaactgaacatggattattagaactcaaggttttcattgacaatatagaaaagaaacactgaatcattttattttattgcccaatttttatttcttatatgactctagtgtttcatcttcataattaatcatgtttgaaggatttctgagtgactcagcagcctgttaaagaaggatgaaccaaagaaaacatttcactaaatgtgcttttaaaaatcaagtgtattgctggttctgctgcagtatgtagtcgaagaataaattagtaaattgcttctgagggtctgaaattgaataaagtaatggctttgtatttctataaaagttgtctccccttgtttcctttccattctggcacatgtagacatttaatttatgaataaaaccctttcctgtccttcacttagtatgatattaatagcctttttcttatctttagagggtaactctgggctggcagcggtggctcacaactctaatccctgtactttgggaggctgaggtgggcagatcacatgaggccaggagtttgagactggcctgggcagcatggcaagacccggtctctactgaaaaat

SEQ ID NO: 256050 - DNA, 677 bp, Homo Sapiens
  misc_feature (212)..(245): n is a, c, g, or t
  misc_feature (474)..(474): n is a, c, g, or t
  misc_feature (528)..(529): n is a, c, g, or t
  misc_feature (575)..(575): n is a, c, g, or t
  misc_feature (602)..(603): n is a, c, g, or t
  misc_feature (626)..(626): n is a, c, g, or t
aagagatcgagctccctggctgccggctcgccttctgcgtggagttctcgcggtctgggtttcgctgtctgctcttggcccggggtcattttgtcggcgtcgggtgccctctcttgcccagctggggcacagcgaggcggccccttctcccgacgacgttcgatggagtagggtcccagaccgttgtcccgaagagcgagatcgagcttggnnnnnnnnnnnnnnnnnnnnnnnnnnnnnnnnnntccgccgcaacatggctaacaacagccccgcgctgacaggcaactcgcagccgcagcaccaggcggctgcagctgcggctcagcaacagcagcagtgcggcggcggcggcgctaccaagccggcggtctccggcaagcagggcaatgtgctcccgctctggggcaacgagaagaccatgaacctcaaccccatgatcctgaccaacatcctgtcgtcgccttacttcanagtacagctctacgagctcaagacctaccacgaggtggtggacgagatctactnntaggtcacgctacgtgaaccatgggagaaaggaagcagggaaatgntctacagcattttgcctggtatacaannatattacccctgaagtaactcgnaagcaagtgatgggtctttatacacacacagactcttcatatattagagcg

SEQ ID NO: 256051 - DNA, 1152 bp, Homo Sapiens
  misc_feature (212)..(245): n is a, c, g, or t
aagagatcgagctccctggctgccggctcgccttctgcgtggagttctcgcggtctgggtttcgctgtctgctcttggcccggggtcattttgtcggcgtcgggtgccctctcttgcccagctggggcacagcgaggcggccccttctcccgacgacgttcgatggagtagggtcccagaccgttgtcccgaagagcgagatcgagcttggnnnnnnnnnnnnnnnnnnnnnnnnnnnnnnnnnntccgccgcaacatggctaacaacagccccgcgctgacaggcaactcgcagccgcagcaccaggcggctgcagctgcggctcagcaacagcagcagtgcggcggcggcggcgctaccaagccggcggtctccggcaagcagggcaatgtgctcccgctctggggcaacgagaagaccatgaacctcaaccccatgatcctgaccaacatcctgtcgtcgccttacttcaaagtacagctctacgagctcaagacctaccacgaggtggtggacgagatctactttaaggtcacgcacgttgaaccatgggagaaaggaagcaggaaaacagcgggccagacagggatgtgcggaggggttcgaggtgttggaacaggaggaattgtttctacagcattttgcctgttatacaaattatttaccctgaagttaactcgaaagcaagtgatgggtcttataacacacacagactctccatatattagagcgcttggatttatgtatataagatatacacagccccctacaggatctgtgggactggtttgaatccttccttgatgatgaagaggtatgtcaacaagggtaataatttgttttcttctgattatctccatattgtaatactttaattattgggggttatgcgtcagaactctgtagtagattatctcgtggaacttggataagcgtttacggactgagcgttaagatttaggtaatcgagatgtatctggttaattgtaaatggtggacaggaaaatcctctagagacctgggatgtgtgcccgatgatagcgttagtggcagcacgaaaacgaaaatgagttttgaaggccgagctaagcctcgaggaaaggtaacggggcggaatctccgcgaaataccctaaatcgggcaacggccaa

SEQ ID NO: 256052 - DNA, 374 bp, Homo Sapiens
ctgtccgagcatcagctgtatacatacatattttgccgtttgtattatagtagctctgtgcatggggcatgtctccgcaggaagagggactgtcctgactcttttgggcctggtggtgattgtctggggcacttctgccagagccctgactactgacaggtcacttcaagaatcatagaacctcgactatgatgtcatttttctgtaagccctggactactataaattatgctatatctgtcataattaagacttggagactaccaagctgtcttcgaggagaaaggcctgtacctatcttcagagaaatgattaatggctagagtatatgcgtcttgaagatttactgtaagataaagactgtgatcttattt

SEQ ID NO: 256053 - DNA, 387 bp, Homo Sapiens
tgcacctgggtttacaggcgcttgccaccacacctggctagatgttttatattaaagccagagaattgaaaaagaaatgcctcctgtgattgaaattattttatagctcttagcccgttctaccaaagatcacattagcagattacccctccctcctgtgatattatctttcttaaacctgaaccaaatatcattgaagttattgaaagacctagaaattttctttttgagagaaagggtaaagaggtgagggttcatgtcacttaacccctacccttttgggcaaattttgtctcaggtagtgtttcattccctaaattaatacctgtgcttccttgcctctcaccttcccagttacttctttggggtattactgtggcacattgt

SEQ ID NO: 256054 - DNA, 636 bp, Homo Sapiens
aaaaattcctttaaaaggcagtcagtacttttagttaatgctgtctcttactgaggtgtccaactctacttgtttttgtcctgtaaatacagcattagttttgacagtggctagctagctaccccctccaaatatatttcaaaagaatcaagtatttcccacaaaataatcactgtatgtgccttttctgggtgtacaatgtgccacagtaataccccaaagaagtaactgggaaggtgagaggcaaggaagcacaggtattaatttagggaatgaaacactacctgagacaaaatttgcccaaaagggtaggggttaagtgacatgaaccctcacctctttaccctttctctcaaaaagaaaatttctaggtctttcaataacttcaataaaccaaaatccctatgtatatatttcatcctaatcatgaaacttgtatcttttgatatttggttcaggtttaagaaagataatatcacaggagggaggggtaatctgctaatgtgatctttggtagaacgggctaagagctataaaataatttcaatcacaggaggcatttctttttcaattctctggctttaatataaaacatctagccaggtgtggtggcaagcgaaagtaaacccaggtgca

SEQ ID NO: 256055 - DNA, 398 bp, Homo Sapiens
ccggaataaaggcttatgcccagttccctgtttaaagttgctacttattcagtgggaaccttgatgagattatgttttttaaattcttggtgtctcatatttctcatctggaatgtcagtaatgtttgtactacctcagaagttccctaaatgatataaagagttttgcacagtctctagcatatgcatggagctcgaaaatgttaactgttattcttaattcagtatactccaagatggtcatcatactgtggagaagaccaaataggaggaggaaagtcaaaggtgtgagagctgcagctgggctcttgagggatgaagtatgagccccatgcagacagaggcaccaatcaggtgaaggagggagcacccaggaatttaaataaggccagagggag

SEQ ID NO: 256056 - DNA, 451 bp, Homo Sapiens
ggctgcaggttgcagtcttgggggtggcagagcatttcaaacctgtgggtcaagtgtatatacttctcagctgcgataaaaggaaaaaatttaatgcaagagttttatcagaaggagatattatagtgtcttctttctagaaggctttaaagctagcagatgacattgcttgggataataatttatgaaatcttagaacaagaattatgaactggtatattctaactctttgtgtagatcactgattgaattgatgtttctaggaagtatgaatttttttaattctagtggcagattatcctcttagtagcaagatattcttatcaacctttatgtgtagttattattggtgactaaagttttaaatgtaaaggcttatccttatgagggatcatttatataaatactctggtttttttcccatttattttctgtaaaatatttggagttg

SEQ ID NO: 256057 - DNA, 938 bp, Homo Sapiens
aaatgtagctcatgttggaaaagcagtcagggaagtactttaagagtatatcctagtactccttagcctgaagcctctgtaaaagggagcccagataaggcactttgggaaatttgctgcaaggctgctggggagaggaagcgccctgcctcactctcagtatagtcaaggctcagcgttttgaataacctctcggtctcaaaacaactgctgtgatttgatccaatgtggtagtagctctctgggtctctaattgggttccccgagctctctcaatgcttagctctttttttctttctgtaaagggagttttcagttaatttgcaggcctgccgttctgtgcccaagagctgaactcttgaggcgtccgcctgggacttggcgggctcactttagttttgttttctgttctctttgtggtggtcttagttataagcgcctggaaacatgcccttaactgcagggcaagtgcttgcttcacaagccctgctagacaggaaaaaggaggaagaaagcacactggggtttatgacatagctacaaactatcctcaatttttaaatagccaaaacctggacacatcctacatacctgtcagcataagaatagattttaaaaattgtgatattcacacaatagaatactactcagcaagaaaaaggagtatgtttctaacacacatcatggataaatctcaaaagcatggtgagcaagataagttagatataaaataaaatgtggagttctagaaaagacaaaatttctggtggtaaaaatcacaatagaaattacctttgaatggtgaagacagacaagacagcatgaggaaggaacttttctagagtggcaaaaatgttctgtatactgattgggagtggtgtttacatgagtataaacatttgacaaaaaagtttaccaggcaaggtggggtgtacttg

SEQ ID NO: 256058 - DNA, 636 bp, Homo Sapiens
  misc_feature (331)..(347): n is a, c, g, or t
  misc_feature (575)..(575): n is a, c, g, or t
gtaagtgcactcccaagcaaaggtgtggtaggagagtagcagccacagaggacccaagcccaagtcttggcctgagttaagttagtgctattgctcccattgacgtgctatgatgtgaagccgtttctggtacagtgttcctttgctcagcaccttaaaagcttggatttaatagtaactgggtaaccttaatcagtagtcagaattatcaacactttgctttatttgacacaaccagactttctcagttcctgttctgtatctagagcaacgtcttcatactgttttttcacaaaatttttatttaaaacagttgtgacagccgaaggannnnnnnnnnnnnnnnnacaaaattaaaatgaaataacttgtacaactggtgcgtaccatggctccagccagatgcccaaagcactggctattaattcctggagttcagatggtcagttgagtctatcctagttttttgcttcacttgttcaatcatggaactttctagaacgctgccactcttcaaaagcttctcaatttcaaatttgaaaacttaattctctccctcttagtttcaaaagtgntacagtggtatctatgtgaagtatgttgttcggcgcctgtgctcaggccttgaatccaaga

SEQ ID NO: 256059 - DNA, 885 bp, Homo Sapiens
  misc_feature (309)..(325): n is a, c, g, or t
  misc_feature (779)..(779): n is a, c, g, or t
  misc_feature (788)..(788): n is a, c, g, or t
  misc_feature (792)..(792): n is a, c, g, or t
gcctcagcttccaaaagtcttggaatacaaggcttgagccaaagcgcccgacccggaagagctgttcctaaatctgcctgaaggaaaatcccaagcccccaccttcccacatacttcaaatttgaaattgaaaagcctttgaagagtggcagcgttctagaaagttccatgattgaacaagtgaagcaaaaaactaggatagactcaactgaccatctgaactccaggaattaatagccagtgctttgggcatctggctggagccatggtacgcaccagttgtacaagttatttcattttaattttgtnnnnnnnnnnnnnnnnntccttcggctgtcacaactgttttaaataaaaattttgtgaaaaaacagtatgaagacgttgctctagatacagaacaggaactgagaaagtctggttgtgtcaaataaagcaaagtgttgataattctgactactgattaaggttacccagttactattaaatccaagcttttaaggtgctgagcaaaggaacactgtaccagaaacggcttcacatcatagcacgtcaatgggagcaatagcactaacttaactcaggccaagacttgggcttgggtcctctgtggctgctactctcctaccacacctttgcttgggagtgcacttacacagctttctttgtaatgatacaaaaagttgctgccttttggtagttaggctccagaaaggggcttccaaaccaaaatgcacttttaaatagaaatgcaactgactgcagggaggcacagaatnctgattgcntgantagcatatggtgctcagggattaaaaccaagtatgcaaacctcacatttgcacatttccatggtgattcagctcactttcaaggtagctgaaa

SEQ ID NO: 256060 - DNA, 389 bp, Homo Sapiens
ctcatggtacttgtgtgggaagcagcatcgtttatactgaaggtgctgttctcccttgtcagaggggtccggtccaggccgtggctctctgtctccaaagtccgatctgccatggagattacttcactggagctgtgccataggggtgccactttctccttgcctggccctgagcgaggtgacgatgtggcagcccccagcgaggctgtgctgccgtggctggggccataagaggtggtgtcaatgccactgtcagcagaggtgccttgcagatagttatagctgttgagttcggattctgtgcggtccccatcgtaccacttctcatcactatgggcacttgacgcattgctggagagagtattgctactggagtgactcgagtagtg

SEQ ID NO: 256061 - DNA, 846 bp, Homo Sapiens
  misc_feature (745)..(745): n is a, c, g, or t
  misc_feature (765)..(765): n is a, c, g, or t
  misc_feature (774)..(774): n is a, c, g, or t
  misc_feature (792)..(792): n is a, c, g, or t
  misc_feature (829)..(829): n is a, c, g, or t
cactactcgagccactccagtagcaatactctctccagcaatgcgtcaagtgcccatagtgatgagaagtggtacgatggggaccgcacagaatccgaactcaacagctataactatctgcaaggcacctctgctgacagtggcattgacaccacctcttatggccccagccacggcagcacagcctcgctgggggctgccacatcgtcacctcgctcagggccaggcaaggagaaagtggcacccctatggcacagctccagtgaagtaatctccatggcagatcggactttggagacagagagccacggcctggaccggaaaacagagtcttccctgagcttagacatacacagcaagagccaagccggctcgacccctctgacaagggagaacagcaccttcagtataaacgatgctgcttcccacacaagtaccatgagctcccgacactctgccagcccagtggttttcaccagtgcccggagttcacctaaagaagagcttcatccagctgccccctcacagctcgcaccatccttctcctcctcttccttctcctcctctggtcctaggagtttttaccctcgccagggcgctactagcaagtacctgattggatggaaaaaacccgaagaaccataaaactccgtggggatttatgggacacgagaaagcgtcatcagagcgatggcaattgaaatagcccacaccagggttgcgttgccttcaaccagaggacctncggggcattttccttaaggnccaaccttnccaagttccaccatttgnaaggaggatttttaaaggaaattaatttgattctttngaaaaggccccaatttc

SEQ ID NO: 256062 - DNA, 435 bp, Homo Sapiens
  misc_feature (27)..(27): n is a, c, g, or t
  misc_feature (45)..(45): n is a, c, g, or t
  misc_feature (52)..(52): n is a, c, g, or t
  misc_feature (92)..(92): n is a, c, g, or t
  misc_feature (113)..(113): n is a, c, g, or t
  misc_feature (131)..(131): n is a, c, g, or t
ttggggaacaaaaagggtaacgtgccnaactgaaataggaacgtngttgggnccagggcttggtccccagaaatgaacgcccccggaggtgnaaaaagtgactcccctctggnctattggtaaatgctccncgtcccgaacaatgttcctgtgcaaaggcccgcccgtgaaggtgggggtgctggggaaaggagactgaggagaggagagtgcgtggaacttaaaactcttctgtgattcagcagttgggctttcaagatcaattagtttctttagatcttcttcaatggtggacttggaggttggcttaggagatgcccggaggtctctggttgaggcacgcagcctggtgtgggctatttcattgccatcgctctgatgacgctttctcgtgtccataaatcccacggagtttatggtctcttcgggtttttt

SEQ ID NO: 256063 - DNA, 708 bp, Homo Sapiens
aaaggatatcaatatgtcttcctgttgcaattattttgactataagctcccagagagtgaaaatcaccaaccctgtgacagtggcccttaataagtgttcatgaataaatgaattgaacctgtcaagattgaagtttggatgtgatgcccactgtggtggccactcagtgctagtctgtcattctggagacccagaaagctcgttatcttctgtcccccttgtgtatcctgcctttgtgggcgaggcattcaaaaccctgaggtttttagatctccctctacaggaagtacccagagagctgctgggggtgttattaccctgtctctgccaggcttaaagtatcctcccaaattcagcacgcaaaggtcacacaccacccccatcttaagagtaggttttctcttttgtttcaaatcttgaagatttccagaaaataataatactagccaatgtttgtggagagcttactttgctcctagattcttcattatatgttttgacccatttaatttccacaacagtctgatgaggcaggcacccccattttcagatgaggagactgaggttcgggtagaaattaagtgactcaggtttgccttcagtctcttgaccagggttttgaaaagcaggagccaagcttgagacttgtgcttccagaggtgttctttcaagcactccgctctatgcttctcactcttggttggcac

SEQ ID NO: 256064 - DNA, 636 bp, Homo Sapiens
  misc_feature (46)..(46): n is a, c, g, or t
  misc_feature (175)..(175): n is a, c, g, or t
  misc_feature (178)..(178): n is a, c, g, or t
ttgcaaaagtgcgagcacattatgtagaaccacaagtcgcccaganctagtaaagccagactcccactgaggccactaatcctgaagggatgagaagggagcagttacaaaatccagaggtggagaaggctgtgtgaaaaagagggtcccctctcggagctaagaccctcagggnagnccagcccgaggcatcccgcaagggaatcagggaagaacacctccacctactacctcctccgaccccagctccagctctccggctccccactgaccaacatccaaagggcaagaaagcttgatgacttggcctttacaagtcagcccctgggcatggagcaaggaagagggatgggcagcgggtctggaggggtgagccgggagagctttaacccagtcatcgtccggcttagtctcagatccaggtgttcattgttcagtagtcgactattcagagtcttggacacgggtgcttaagcataaactataaaatgagaagaataaggtactttattcttctgtggcagggaacccaacacttgggtttacgttgcagggcaacacctgtgatgaacaaaacacatggtagcgatagcccattcatgaaaaactaacagctactcgtgccgaatcctgcag

SEQ ID NO: 256065 - DNA, 596 bp, Homo Sapiens
tggacgactgcaacaagtggcatagcagattcctggcagctgcccagaaccctgctgatgagcccactccaggggcccccgccccccagtagcttggggctactgacaagcccagggtagtgagtagagtcctcaggcacagtgggcacgcaggagcaggggagggctcccacagcaccctgcctccctctctccaaagatctttgtgaggtgagccttgccagcagtggggagtctgcacaaggagaggcggggaagcattctccctgtgacaaccccactgagcagcagatcatgcaactgcttcatgagatgcagaacctccaggagcacccaggcttgggcagcagcccttgcattccttttttgtaccagactgatgagaacaatgaggtgaagatcaccatcatctaaaagccggccactgtcagcaaaacctggggaagtggggctggagctctgcccctaccatgtccctaccaccccttcccagtcaaccctttaccctcacagtagcaagcataagacccctgtctaatgtggggagacaggtggagatgaggtgaagatcaccataatctaaaaggccactaaat

SEQ ID NO: 256066 - DNA, 662 bp, Homo Sapiens
  misc_feature (100)..(110): n is a, c, g, or t
  misc_feature (410)..(410): n is a, c, g, or t
  misc_feature (412)..(412): n is a, c, g, or t
  misc_feature (490)..(519): n is a, c, g, or t
  misc_feature (526)..(526): n is a, c, g, or t
gccaggacacctggacccagcctgctggtttgtcctctccctccgtctcagaagcctcttcaccgctccacgcccatctgtggaaatctttcatcctgannnnnnnnnnngagtctgggttgccgacatcaaaacccgttaggagttcatcacagcttccagttgccatgaaagcctcccgtgacctgtgagaatggtgctggtgctgatggagaagttacttgggctgagcacacaggccgtgatttcatcacgccggggacatgctcaaaataacaagccaggaagggagcagccggctgtgctgtcagcggggcctggcggtggaagcgcctccagtgtgcatgagcgtgtctgaagatggggggctcagggggcacgtttgcgtttggacctgtctgtgcgttctncngcgtggcagtcctgatttccatacttctggagaatccatttcgttaacactgaaagccagttctcttttcctggcagnnnnnnnnnnnnnnnnnnnnnnnnnnnnnncaagatnccgttcgggaaaggcttttgaaaggacggaagcgtattcactgtgcgccagtactcctggctgtgctgtggtttctcccgacgtgcacatcgatctcgtatgtgtggcatctgatattaaacgggaggttttaaga

SEQ ID NO: 256067 - DNA, 1101 bp, Homo Sapiens
  misc_feature (108)..(172): n is a, c, g, or t
  misc_feature (279)..(290): n is a, c, g, or t
ggatacgttttcaaccagactcctttgccgggacccagcccgccaccctgctcgcctccgtcaaacccccggccaatgcagtgagcaccatgtagctcccttgatttnnnnnnnnnnnnnnnnnnnnnnnnnnnnnnnnnnnnnnnnnnnnnnnnnnnnnnnnnnnnnnnnntattctaatgaatgtatctttctaaaggactgacgttcaatcaaatatctgaaaatactaaaggtcaaaaccttgtcagatgttaacttctaagttcggtttgggannnnnnnnnnnnaatagaaatcaagttgtttttgtttttaaggaaaagcgggtcattgcaaagggctgggtgtaattttatgtttcatttccttcattttaaagcaatacaaggttatggagcagatggttttgtgccgaatcatgaatactagtcaagtcacacactctggaaacttgcaactttttgtttgttttggttttcaaataaatataaatatgatatatataggaactaatatagtaatgcaccatgtaacaaagcctagttcagtccatggcttttaattctcttaacactatagataaggattgtgttacagttgctagtagcggcaggaagatgtcaggctcactttcctctgattcccgaaatggggggaacctctaaccataaaggaatggtagaacagtccattcctcggatcagagaaaaatgcagacatggtgtcacctggatttttttctgcccatgaatgttgcagtacagtacctgtcctccgtgtttctctatttttggttatgaatgttggggttaccacctgcatttaggggaaaattgtgttctgtgctttcctggtatcttgttacgaggtactctagttctgtctttcaaccaagaaaatagaattgtggtgtttcttttattgaacttttaacagtctctttagtaaatacaggtagttgaataattgtttcaagagctcaacagatgacaagcttcttttctagaaataagacattttttgacaactttatcatgtataacagatctgttttttttccttgtgttcttccaagcttctggttagagaaaaagagaa

SEQ ID NO: 256068 - DNA, 1256 bp, Homo Sapiens
aaaaacctcagcctacaaagactctcagaaatgccaaagattttcaaggaaattcatattatatatttcaaaaatgatttatcaatgttatctaccaaaagaaataattttatttttcccctttggggagatattatcctctaatatgagaatcagatccctagattctatttctacctatactattaaactcaaccttgaacctgagcttggttgtttctgtgccttagtttctccactcgtaaacaatttcctataaaaattgtttaaacaccaaccaaaatttaccatatgtattcattctcttgccttaaagatcacttcttaacttacatttggctctcaccctctaaaaatttgtagtttggagagtaactgaaagcacaattttaagaaacatgttttcctcacaaaatatattgtaatctgattttcctatcttgtattcatgcagaaaattggagaaaatgtgtattgtcttgtgccattctgcaatatgaatttctcaggaaaaagatgtttcaatggcaatactttcttaaataattcaagatgggtgtgaggacctatcttattagtttagtgctgtgttaaccatttgtgaattacttcttgtttaaaggaagttgtcaaaaaattttaagattctaaatggaatacacgaataaagtaagccttagaatagaaacctcacaaaaagttgtcatttgcggttgataattaacataggtgttttattctctcaactccttagtaccagagccaaatacaatttagttttcagaaatcttatcaatattgttctatttacctacttataaatctgcagataaccacttgaaccaggcaaatacactgaagataaaggttatttctttttttagctttgaatttgtcatgaccattttagtcttgcagatagcagggcagccccttggggcaaggatttactctgggaggtaccgttaagagccttctttccccctttgaaagatccttttacaatgttaaagtatactagttgcaagaacaagcaggatttgcaggttgctttaccagcatgagtctcatttttctggcttaaaatctgggactgtgaaattattccataggaaagtgaatgttattttgcagaattagcctcttacataaaagtatttgttgaagtgtctttaaaattgctatcatgagcaaaactggttgctgtaatgcttgattttctgtatttataaacacattaaattcttccccaatac

SEQ ID NO: 256069 - DNA, 1850 bp, Homo Sapiens
ggtgactggtggacaggaacagtgggcgacaaggccggagtcttcccttctaactatgtgaggcttaaagattcagagggctctggaactgctgggaaaacagggagtttaggaaaaaaacctgaaattgcccaggttattgcctcatacaccgccaccggccccgagcagctcactctcgcccctggtcagctgattttgatccgaaaaaagaacccaggtggatggtgggaaggagagctgcaagcacgtgggaaaaagcgccagataggctggttcccagctaattatgtaaagcttctaagccctgggacgagcaaaatcactccaacagagccacctaagtcaacagcattagcggcagtgtgccaggtgattgggatgtacgactacaccgcgcagaatgacgatgagctggccttcaacaagggccagatcatcaacgtcctcaacaaggaggaccctgactggtggaaaggagaagtcaatggacaagtggggctcttcccatccaattatgtgaagctgaccacagacatggacccaagccagcaatgaatcatatgttgtccatccccccctcaggcttgaaagtccttttgtggctttcctagttactcaaattgactttcccccacctttgcacaggtgctttcaatagttttaaaattatttttaaatatatattttagctttttaataaacaaaataaatgaaatgacttctttggctattttggttttgcaaaaagacccactatcaaggaatgctgcatgtgctattaaaaattgttccaaatgtccataaatctgagacttgatgtattttttcattttgtccagtgttaccaactaaattgtgcagtttggggcttttcccccttaccatagaagtgcagaggagttcagtatctctgttttaaagacgtatagaatgagcccaattaaagcgaaggtgtttgtgcttgtttgtgtgtatcagctgtaccttgttgagcatgtaatacatcctgtacataagaaattagttctttccatggcaaagctattaccttgtacgatgctctaatcatattgcatttaattttattttgcacagtgaccttgtagccacatgagaaagcactctgtgtttttgttcggtctcagatttatctggttgagttggtgttttgtttggggtttttaattttgcgtgtttgcatagcataaaatcagtagacaacaccactgaggtcgttacgatcaacgatatccacagtctctttttagtctctgttacatgaagttttattccagttacttttcatggaatgacctattttgaacaagtaattttcttgacaagaaagaatgtatagaagtctccctgcaattaatttccaatgtttacattttttaactagactgtggaatttctacagattaatatgaaatggagctcatggtccgtttgtgtgttagatatgctgtagctgaagccctgtttgtcttttaaacactagttggaagctctcaataaaaatgcctgctgctcacagcacagaaaatggggcagggggagcctcaagcacaatctagctgtcctcctaaagactctgtaatgctcactcccctcgcgttctcccggcgctgtcgggaggctgtgctggtggtcgtgtagaggtccttctcctttcacatggtgcagagagcgaggacctctcctcctcgttcagttgcacttcagtattttcacggatatgaatgtaaaatatataaatatataaactgcggctttaacaactgtaatacaaccttttgaattagttccgtgtatagataattaaattcttcatacaaaagttaaaa

SEQ ID NO: 256070 - DNA, 658 bp, Homo Sapiens
  misc_feature (94)..(94): n is a, c, g, or t
  misc_feature (186)..(186): n is a, c, g, or t
  misc_feature (208)..(208): n is a, c, g, or t
  misc_feature (310)..(365): n is a, c, g, or t
aatgagagataatcttgggtgggccctaaaatgccatcacatgatcccttataagagaaaggcagaggaatattagagaccagacccaaagagnagaaggtcattgaagacagagcagagaatgctaccacaaggcagtgaatgccacaagtcaccagaagctggaagaggcaaggaaggggcttntgttgccttaagccatcaagtntgtggtaatttgtcacagcagacctaggtaataagtaaatactctatcatattctagaacctatcatagtttctaccatctgttctcttaatgaaaaaatannnnnnnnnnnnnnnnnnnnnnnnnnnnnnnnnnnnnnnnnnnnnnnnnnnnnnnntgatactctgttcttgataccatctccctcactggcattagaggaaatggacaataagcatgtaaacaagtaagataattttagacagaagcacagtgaagaaaataaaggagtgaaaggaatagggaaagaatgagtgggaagggggctcctttagctcatagggtcaaggaagcactctcagaaaccatgatatttgagctgagcatcacaataatgagtgataaatgctcagataaataacaggagaaagatgctcctgacaaagagaatagcagggaaaaagtcttgcg

SEQ ID NO: 256071 - DNA, 695 bp, Homo Sapiens
  misc_feature (129)..(129): n is a, c, g, or t
  misc_feature (133)..(133): n is a, c, g, or t
  misc_feature (208)..(208): n is a, c, g, or t
  misc_feature (347)..(402): n is a, c, g, or t
aagagtcttggcagaatgtacttaagatccttgagatgaagagataatcccgtggtggggccctaaatgccatcacatgaatccgtataagagagagcaagaggaatattaggaccagacacaaagagnaganaggtcattgaagccagagcaaagatgcttacacaaagccagtgaatgccaaaagtcacaagaagctggaagaggncaagaaaggggcttttgttgccttaagccatcaagtatgtggtaatttgtcacagcagacctaggtaataagtaaatactctatcatattctagaacctatcatagtttctaccatctgttctcttaatgaaaaaatannnnnnnnnnnnnnnnnnnnnnnnnnnnnnnnnnnnnnnnnnnnnnnnnnnnnnnntgatactctgttcttgataccatctccctcactggcattagaggaaatggacaataagcatgtaaacaagtaagataattttagacagaagcacagtgaagaaaataaaggagtgaaaggaatagggaaagaatgagtgggaagggggctcctttagctcatagggtcaaggaagcactctcagaaaccatgatatttgagctgagcatcacaataatgagtgataaatgctcagataaataacaggagaaagatgctcctgacaaagagaatagcagggaaaaagtcttgcg

SEQ ID NO: 256072 - DNA, 1533 bp, Homo Sapiens
  misc_feature (822)..(830): n is a, c, g, or t
  misc_feature (968)..(994): n is a, c, g, or t
  misc_feature (1243)..(1264): n is a, c, g, or t
tggagccaaaacctgtcccagtttttccctgaggccatttctttcatagatgaagcccggggcaagaactgtggtgtcttggtacattgcttggctggcattagccgctcagtcactgtgactgtggcttaccttatgcagaagctcaatctgtcgatgaacgatgcctatgacattgtcaaaatgaaaaaatccaacatatcccctaacttcaacttcatgggtcagctgctggacttcgagaggacgctgggactcagcagcccatgtgacaacagggttccagcacagcagctgtattttaccaccccttccaaccagaatgtataccaggtggactctctgcaatctacgtgaaagaccccacacccctccttgctggaatgtgtctggcccttcagcagtttctcttggcagcatcagctgggctgctttctttgtgtgtggccccaggtgtcaaaatgacaccagctgtctgtactagacaaggttaccaagtgcggaattggttaatactaacagagagatttgctccattctctttggaataacaggacatgctgtatagatacaggcagtaggtttgctctgtacccatgtgtacagcctacccatgcagggactgggattcgaggacttccaggcgcatagggtagaaccaaatgatagggtaggagcatgtgttctttagggccttgtaaggctgtttccttttgcatctggaactgactatataattgtcttcaatgaagactaattcaattttgcatatagaggagccaaagagagatttcagctctgtatttgtggtatcagtttggnnnnnnnnntctgatactccatttgattattgtaaatatttgatcttgaatcacttgacagtgtttgtttgaattgtgtttgttttttcctttgatgggcttaaaagaaattatccaaagggagaaagagcagtatgccacttcttnnnnnnnnnnnnnnnnnnnnnnnnnnnttgtgctcttttctaatccaaagggtatatttgcagcatgcttgactttaccaattctgatgacatctttacggacactattatcactaagaccttgttatggcgaagtctttagtctttttcatgtattttcctcatgattttttctctttatgtagtttgactatgccttacctttgtaaatatttttgcttgtgttgtcgcaaaggggataatctgggaaagacaccaaatcatgggctcactttnnnnnnnnnnnnnnnnnnnnnnccttcagctgtgctaaacagtatattacctctgtataaaattcttcagggagtgtcacctcaaatgcaatactttgggttggtttctttcctttaaaaaaatttgtataaaactggaagtgtgtgtgtgtgagcatgggtacccatttgataagagaaatgcatttgattgtgaagaagggagagttaaattctccattatgttcgtggtgtaaagtttagagctggaatttattataagaatgtaaaaccttaaattattaataaata

SEQ ID NO: 256073 - DNA, 484 bp, Homo Sapiens
  misc_feature (17)..(17): n is a, c, g, or t
  misc_feature (22)..(22): n is a, c, g, or t
  misc_feature (35)..(35): n is a, c, g, or t
  misc_feature (43)..(51): n is a, c, g, or t
  misc_feature (60)..(60): n is a, c, g, or t
  misc_feature (84)..(84): n is a, c, g, or t
gggccccacacacaaanaaaancacccccactgangctgcccnnnnnnnnntgcctgaanggcccaaaacacatccccaccaanggaagggtgtgggggtccttttccacgtaagattgccaagaaaagccccaccctggtaaaacattcctggttggaaaggggtgggtaaaaataacagcctgctgtgcctggaaccctgttgtcaacatgggcctgctgagtccccagcgtccctcctcgaaagtcccagcagctgaccccatgaagttgaagttaggggatatgttggattttttcattttgacaatgtcataggcatcgttcatcgacagattgagcttctgcataaggtaagccacagtcacagtgactgagcgctaatgccagccaagcaatgtaccaagacaccacagttcttgccccgggcttcatctatgaaagaaatggcctcagggaaaaactgggacaggttttggctcca

SEQ ID NO: 256074 - DNA, 400 bp, Homo Sapiens
  misc_feature (31)..(31): n is a, c, g, or t
  misc_feature (66)..(66): n is a, c, g, or t
  misc_feature (243)..(251): n is a, c, g, or t
agccccctcccccatgcagggacctgggaantccgagggacctccccccagcgcataggggaaggnccccaaatgataggggtagggagcatgtgttcctttaggggcccttgtaaaggctgtttcccttttggcatcctggaactgacctatataattgtccttcaatgaagactaattcaattttgcatatagaggagccaaagagagatttcagctctgtatttgtggtatcagtttggnnnnnnnnntctgatactccatttgattattgtaaatatttgatcttgaatcacttgacagtgtttgtttgaattgtgtttgttttttcctttgatgggcttaaaagaaattatccaaagggagaaagagcagtatgccacttcttaaaacgccacaa

SEQ ID NO: 256075 - DNA, 737 bp, Homo Sapiens
gcacgagggagcagcaagtgcagagtctctgtggtcagagcacacagggctggggctgaggggtgggcagttaacaggacatgcccaggagattgcaggagctagacttgcagagcctttggcccttgtgcacactagaattgtgctctgagcaagggtctgagcacgggccgggcgtaagctaagccccttcaccaggatcgctctagatgctgtgttaaccatagcagggccaggtggaggcaggggaccagtctggaattggaggctggctcctggccaggatgatcgtggacaggatgcgtagcctccctgttgatggttcttcccaggtttttatattcagtgctcacacatctctgagcacataaataagcacttctctgcaatggattcctggaggtgggaagagtatgcagattataaatgttgctgggaactcaaatttctctccagaaataccctattactacaccaccacacacaagagccactcttctccacctgagcaacgctgagtgtgatcagtcctgttaatttttggcaacctgatgggcaagataacctcgtcctttgcattttcctgatgctaatgaggttgagcctctttctacaagttcacaaatcttttggtgtctctctttgtgggaatggcctaggcagtcttcttgcttagtctctctgttcccaaaaggtattaccattcatctttcattgaatttgctagaactgccatt

SEQ ID NO: 256076 - DNA, 637 bp, Homo Sapiens
  misc_feature (140)..(140): n is a, c, g, or t
gcttcacattccacaagacttgtggtacctatgctagccacaaagattatttgttgactcaaatgtaactgtaccagtaatgatcaattagtatgctcagcgatgctcaggagagccgctccaaaaacttacattattcnccagacaaacgttctctaggggcagccttgcgtatttctacaccttagtagacctaagttaggcgttcaacaccttgtcctggtccaagccagaaagaactcagtagttcagacttttcgcaggtcagaaaaccacgaagggcctcctcacaccctgattaaacgttggaagcgggccctgtgctgtaataacgctctggccactcccaaaaaagcgaatcttcgggaggaaagcaggctcccttattagggctcacagcactccgctcaacttactgtaggcgtcggctccagcaagactcgtccctccaagcctttaaattatctgactgcgggccagtagcaaatgaacggcactggtggcggtgggggatggctgcgcgagtgaaatgacctccgtgtgtttgctaaccccgctattatactgccccgcttagaaacttaaagcgcttcagacatcagatctcactcgcttcccaaataggcttccgtccgcg

SEQ ID NO: 256077 - DNA, 685 bp, Homo Sapiens
  misc_feature (87)..(87): n is a, c, g, or t
  misc_feature (90)..(90): n is a, c, g, or t
gagaagggtgcagttagctaaaatcgtgccattgcattcaagcctgccacaagagcaagactcaatcttcacattaatattaatagntantaataatcatcatcatcatcagagaaggttcgatattatgaccatggtcacaaggtaataagtggtagatcctgaagacaaattcacattattcaagttatacactgctccttaacatactggagaggtagtaagaaggaagtaaagctacagttatcatgacattttctatggaattctctttggttaaccaaaatactcctattattctgggttttatgttggggagtaggcaataaagatttttaaaaagctgacaatgtagttgaagaaataaacaatctcagaaattaacagagaaccattcgaaattaagacatcaagaatgcaaaatgatactacaaattgaataaataatttccatggaaagtattgaataaatttattcattttaatgcagtatttattaactacctactatatactaggattacattaagcactgaggatctaaaattaattttaaaaaatagactgaggttagggactctgagggagacaacacaaacatttatgtataaaacaaaatgataagcactatgtttatataaaacgttacaggaacagctacaggagaaaatggggttagtcaaag

SEQ ID NO: 256078 - DNA, 1007 bp, Homo Sapiens
  misc_feature (897)..(897): n is a, c, g, or t
agagtctgagagctcacaactaatttctccgccacttgcccaggcaatcagagattatgtcaattctctgttggtccagggtggggtaggtagtttgcctggaacttctaactctatgcccccactggatgtagaaaacatacagaagagaattgatccagtctaagtttcaagaaactgaattcctgtctcctccaagaaaagtccctagactgagtgagaagtcagtggaggaaagggattcaagttcctttgtggcatttcagaacatacctggatccgaactgatgtcttcttttgccaaaactgttgtctctcattcactcactaccttaggtctagaagtggctaagcaatcacagcatgataaaatagatgcctcagaactatcttttcccttccatgaatctattttaaaagtaattgaagaagaatggcagcaagttgacaggcagctgccttcactggcatgcaaatatccagtttcttccagggaggcaacacagatattatcagttccaaaagtagatgatgaaatcctagggtttatttctgaagccactccactaggaggtattcaagcagcctccactgagtcttgcaatcagcagttggacttagcactctgtagagcatatgaagctgcagcatcagcattgcagattgcaactcacactgcctttgtagctaaggctatgcaggcagacattagtcaagctgcacagattcttagctcagatcctagtcgtacccaccaagcgcttgggattctgagcaaaacatatgatgcagcctcatatatatgtgaagctgcattcgatgaagcgaagatggctgcccataccatgagaaatgccgacttgaagtcgtcgatacctctggctgaaggattgcacnaattaaactagctgctaagaataagctggcttcccactccctgtaaaggggtaaacatatttggaggagaagtatgcaaagtgatcaaaaagcgtggaaataacactagt

SEQ ID NO: 256079 - DNA, 1665 bp, Homo Sapiens
  misc_feature (1280)..(1280): n is a, c, g, or t
gggatggcggtttgggcggcgacgtgagcggctccgcggaccccgagcggggccccggccgcgacctgagccgccgccgagcgcccggggccatgcgaccgacgctgctgtggtcgctgctgctgctgctcggagtcttcgccgccgccgccgcggccccgccagaccctctttcccagctgcccgctcctcagcacccgaagattcgcctgtacaacgcagagcaggtcctgagttgggagccagtggccctgagcaatagcacgaggcctgttgtctaccaagtgcagtttaaatacaccgacagtaaatggttcacggccgacatcatgtccataggggtgaattgtacacagatcacagcaacagagtgtgacttcactgccgccagtccctcagcaggcttcccaatggatttcaatgtcactctacgccttcgagctgagctgggagcactccattctgcctgggtgacaatgccttggtttcaacactatcggaatgtgactgtcgggcctccagaaaacattgaggtgaccccaggagaaggctccctcatcatcaggttctcctctccctttgacatcgctgatacctccacggcctttttttgttattatgtccattactgggaaaaaggaggaatccaacaggtcaaaggccctttcagaagcaactccatttcattggataacttaaaaccctccagagtgtactgtttacaagtccaggcacaactgctttggaacaaaagtaacatctttagagtcgggcatttaagcaacatatcttgctacgaaacaatggcagatgcctccactgagcttcagcaagtcatcctgatctccgtgggaacattttcgttgctgtcggtgctggcaggagcctgtttcttcctggtcctgaaatatagaggcctgattaaatactggtttcacactccaccaagcatcccattacagatagaagagtatttaaaagacccaactcagcccatcttagaggccttggacaaggacagctcaccaaaggatgacgtctgggactctgtgtccattatctcgtttccggaaaaggagcaagaagatgttctccaaacgctttgaaccaaagcatgggcctagcccactggctccctggaagagatcaagccatcggagctgctagagttctgtctggactttccagagaccagtattcccttttgctgcctctaaaaggcctgtccctgcagacatgagagacagcaggtctcatgggggtgacaagcttttttgttnttccttaaagaattttcaaaatcaaattccagaatgattttacggagatatcccaggaaaattaaggcttctcttaaacactaaaaaggcatgtaattgcttgttagcaaaatggatatgacacatctctgatacttttttcattattggttgggctgagcagtcagaagacctggtcgtcgtcttgactttggcaaatgagccggagccccttgggcaggtcacacaacctgtcccagcgagggacaccgagtggcccttcatgtacatccatggtgtgctggcttaaaatgtaattaatcttgtaaatatactcctagtaatttaagattttgtttttaaactggaaataaaagattgtatagtgcatgttttttaaagtcta

SEQ ID NO: 256080 - DNA, 405 bp, Homo Sapiens
ctgcaggattcggcacgagctccaattgtaaatgggaacaaactctctgagcctaaatgccatttgaacaaatacagatgtgtggtgtaggtactgcaccaatagctgaataggggcagttttatttttgaaaagaataacctttcaaatgtcatttgatagcatttattatgtaattgtcaggaccaatttattatgcatttaattagttgtaatctatgacttagtccaaaggtgattcagtatatgtaccttgactgaaataaggctttctatgagttttgcttgtagaacaatctttctttatatcctgcctcggccttgcctccttttttactgccgtgccttgcttgaatcttctaaccccagtcctcctcctcagtttgacttgaacttagatgcaaa

SEQ ID NO: 256081 - DNA, 693 bp, Homo Sapiens
  misc_feature (562)..(562): n is a, c, g, or t
  misc_feature (577)..(577): n is a, c, g, or t
  misc_feature (592)..(592): n is a, c, g, or t
  misc_feature (599)..(600): n is a, c, g, or t
  misc_feature (652)..(652): n is a, c, g, or t
gtgacctattattaataaatatatgaagtcaaagtactaattttacaatttaattttggaaagtctgtcaaatgtcagaagtttaaaatacttaatatgataatataggctcataggtcattgtaaaagaaatcattcatttagtcaaagtgataactcaaagtttttttaaaaaaggcaaaaatctttattttttgagagaggagacttaatttcccaaacaatgagccctaagagagactgcatgaggccaattaaatctgtctctcaaatcttataaacaaatctattaaattttaatcattttgaccataagctataatttccataaacctttaaataaccttttaatgtttttttaaattaaaaagtgggttaatgctataagaaccttgtttatctaacgcaggggccctgatgctggtctttcatcaaactataatattaatgtgtaatttatatggaaactctgaactaagtttatctctcaaaattggccttataatttcacagacgcatgtcttctgtgacagtccctgggattagagggggtcagcagttntaatttctgcactgngtctcatgaatgcangttattnntgatatcatcttttcctgggtctgaagatgagggtttgacttggtgtacggnttaagattaagcagacttgtgtgctttttagacccccgagt

SEQ ID NO: 256082 - DNA, 395 bp, Homo Sapiens
taaaatacttcctggtttcacaaaggcatgtccatacaatttcctcaacttgtatttcaaatgaacaagtcagaacattaaagcttgctttatatttcatccaagaaacagacaaatcacctaaaaattgctttctgcctatgtatgtacgcctgaaacatttgcatgagagctaaacttcaaaatcaaaacatcaaaggaaataacagttaacagtaccatcttctggacagttctgacaccagaagttgtagaagttttacagaaatgcaaacacggttgtcaagataaaatggggtgggaaataacttctatgatatagaccacaaactagtaattaagcggaaacacaatcttgatctcaaataaaaccaaaaagcaccttttggttgctg

SEQ ID NO: 256083 - DNA, 594 bp, Homo Sapiens
ccaaaaggtgctttttggttttatttgagatcaagattgtgtttccgcttaattactagtttgtggtctatatcatagaagttatttcccaccccattttatcttgacaaccgtgtttgcatttctgtaaaacttctacaacttctggtgtccagaactgtcccagaagatggtactgttaactgttatttcctttgatgttttgattttgaagtttagctctcatgcaaatgtttcaggcgtacatacataggcagaaagcaatttttaggtgatttgtctgtttcttggatgaaatataaagcaagctttaatgttctgacttgttcatttgaaatacaaaaaagtaagtgaattttaatgttttgcattaactaaagaaatctgaagattaatgttgaggaaattgtatggacatgcctttgtgaaaccaggaagtattttaagttaaaaatgaaaaaggttttaattgctttgtgtgtgttttaatggagccccattttagaattattttttccgtctccctttaccaacaaaaggaacaatgccaccgtgaatggaatagtttggggaaagctttgccaaacacaaccc

SEQ ID NO: 256084 - DNA, 338 bp, Homo Sapiens
  misc_feature (99)..(146): n is a, c, g, or t
aattcaaattccagaattttatggatccagtagattaataaaacctgaagggatgataaaaggggataaggaattcagtccattatttaataccacacnnnnnnnnnnnnnnnnnnnnnnnnnnnnnnnnnnnnnnnnnnnnnnnnccatgaagggccaactatttcacaattggcagggttgccctcctatcagaggcatccttctggtgtaagggcagacattttagcacctttgaagattaagggtgcccaggagtaaacactaggtaagatacacaaggggaagagcccatttaactctccaacaaatggggacatcaagaaaatgacaccacc

SEQ ID NO: 256085 - DNA, 666 bp, Homo Sapiens
ccggggtggacgcattcgggtagccgaagaagtcccaggattgccgaagaagtcccaggatttccgaagcgagccgaagcatcgcgacagttttcagagacagctgatcggttggagctcttgcgccgagcagtcatggcggcggctagagctactacgccggccgatggcgaggagcccgccccggaggctgaggctctggccgcagcccgggagcggagcagccgcttcttgagcggcctggagctggtgaagcagggtgccgaggcgcgcgtgttccgtggccgcttccagggccgcgcggcggtgatcaagcaccgcttccccaagggctaccggcacccggcgctggaggcgcggcttggcagacggcggacggtgcaggaggcccgggcgctcctccgctgtcgccgcgctggaatatctgccccagttgtctttattgtggactatgcttccaactgcttatatatggaagaaattgaaggctcagtgactgttcgagaatatattcagtccactatggagactgaacgaatgcacgatgaagacctcattcatggtgatctcaccaccttcaacatgcttctgaaacctcccctggaacagctgaaccatgtgctcatagactttgggcttgagttcatttcagcacttccagaggat

SEQ ID NO: 256086 - DNA, 969 bp, Homo Sapiens
agaacatgacttagacacatagtaagctcttgagtgaagtgcagatgataatgacacgatcacataccacttaaaaatatcttaacacctttacttagatctcatctcatacttgtagcatttcttcaaatttactttgaaaaaaagagcttcactgtgtgtggttgtcatacacattcttctacccaaccatggacctctttcttcctctcaggcgcacttcatctaatttttttagcactggcctggcctttttggaggaggtggagtagctcttcagaaaggcttcaaacacagtttcagtgttgggatgggtactgaggaaggccttctccaggacatagaggtctactcccttatcctctggaagtgctgaaatgaaactcagcccaaagtctatgagcacaatgttcagctgttccagggggggtttcaggagcatgttggaggtggtgagatcaccatgaatgaggtcttcatcgtgcattcgagccaaaacctgcccaattgtcttggctaagttggagagaccctggggagttttttcagtctccatagtggactgaatataatctcgaacagtcactgagccttcaatttcttccatatataagcagttggaagcatagtccacaaaaaagacaactggggcagatattccagcgcggcgacagcggaggagcgcccgggcctcctgcaccgtccgccgtctgccaagccgcgcctccagcgccgggtgccggtagcccttggggaagcggtgcttgatcaccgccgcgcggccctggaagcggccacggaacacgcgcgcctcggcaccctgcttcaccagctccaggccgctcaagaagcggctgctccgctcccgggctgcggccagagcctcagcctccggggcgggctcctcgccatcggccggcgtagtagctctcctcgtgccgaattcgccacccaggcctcactacgcga

SEQ ID NO: 256087 - DNA, 939 bp, Homo Sapiens
gggtggcaattcggacgaggagactactacgccggccgatggcgaggagcccgccccggaggctgaggctctggccgcagcccgggagcggagcagccgcttcttgagcggcctggagctggtgaagcagggtgccgaggcgcgcgtgttccgtggccgcttccagggccgcgcggcggtgatcaagcaccgcttccccaagggctaccggcacccggcgctggaggcgcggcttggcagacggcggacggtgcaggaggcccgggcgctcctccgctgtcgccgcgctggaatatctgccccagttgtcttttttgtggactatgcttccaactgcttatatatggaagaaattgaaggctcagtgactgttcgagattatattcagtccactatggagactgaaaaaactccccagggtctctccaacttagccaagacaattgggcaggttttggctcgaatgcacgatgaagacctcattcatggtgatctcaccacctccaacatgctcctgaaaccccccctggaacagctgaacattgtgctcatagactttgggctgagtttcatttcagcacttccagaggataagggagtagacctctatgtcctggagaaggccttcctcagtacccatcccaacactgaaactgtgtttgaagccttttctgaaaagctactccacctcctccaaaaaggccaagccagtgctaaaaaaattaaatgaaatgccccctgagaagaaaaaaagaggcccatgggtggggaagaaaaatgtggtatgaaaaccacaccccggtgaaactccttttttccaaagaaaatttgaaagaaatgctaccaagaatgagaatgaaaacctaagtaaagggggaaaaaaatttttaaaacggaaaggggatcccggccattaaacaatggcacttccactcagaa

SEQ ID NO: 256088 - DNA, 503 bp, Homo Sapiens
ccgctttgaatgtagagacccgtgggcacttttcccttttgtggtgggggctccggaggaggtaccccccacccctggcacagccgcctggaatgccaggactgtcactgctgttcgggtgatgacctcgttgccaagctcctcctgtccccttgttctgggggcaggcgctgtgcttctgtgaggtggtttagcttttgctttcgaaagtggccagctgcggccaccaggtctcagcacaagagcgcttcctttgcacagaatgagcttcgagctttgttcagactaaatgaatgtatctgggaggggtcgggggcacgagttgattccaagcacatgcctttgctgagtgtgtgtgtgctgggagagtcagagtggatgtagagcgcggttttatttttgtactgacattggtaagagactgtatagcatctatttatttagatgatttatctggtaaatgaggcaaaaaaattattaaaaatacattaaagatgatttaa

SEQ ID NO: 256089 - DNA, 348 bp, Homo Sapiens
  misc_feature (41)..(49): n is a, c, g, or t
  misc_feature (92)..(101): n is a, c, g, or t
  misc_feature (261)..(261): n is a, c, g, or t
cttctcctgagttcttcatgtgagattgagcttgcaaaggnnnnnnnnntgtgaaatgttatagacttgcagcgtgccgagttccatcgggnnnnnnnnnnagcattgctatgctaaaatagagaaaaaaaatccctcatgaacctcccacaatcaagcctgcatcaaccttctgggtgtgacttgtgagttttggccttgtgatgccaaatctgagagtttagtctgccattaaaaaaactcattctcatctcatgcatntattatgcttgctactttgtcttagcaacaatgaactataactgtttcaaagactttatggaaaagagacattatattactaaacaa

SEQ ID NO: 256090 - DNA, 680 bp, Homo Sapiens
  misc_feature (661)..(661): n is a, c, g, or t
acgagaccacttcttcgtccaacactgcctgctgccccggctcttcaccggcagcctcctccactccagcagcaggctcggttcatccagccccggccaactttaaatcagcctccaccacctcttattcgccctgctaattccatgccaccccgtctaaacccaagaccggtgttgtccacggttggtggtcaacagccaccatcacttattggaattcagacagattcacagtcctcactgcactaaaaattaaattggacacagctgcagtaacttttcaccccatcattataccagtgctcatctgactgatgaaaaagaggaaagaataatcatttctagatactgaggctgcgaactagttctgtggcagtggactagcataagtggatgtctaagaaatttttcagttcactagactaaaatgttttacaacaaaaagcctccagttagccctactttctagagtatatgttcagcaatgtgatctcataaaaggaaaacacacgattaaggtatctatataccaaggttttggtttgttttactggatttatttaatggaggtctttattatcctggctctcatagtcaaggctctagtacaggatattgcttttaggatgtgaaacctcttaaggtcttaaggtaggatgtnggctttttctttaattttt

SEQ ID NO: 256091 - DNA, 670 bp, Homo Sapiens
  misc_feature (16)..(16): n is a, c, g, or t
  misc_feature (203)..(220): n is a, c, g, or t
  misc_feature (486)..(502): n is a, c, g, or t
ggcccagataaaaganattaagctttgcacacactctcaattctttacttgcaggcaacttcactctttattatctgaaactcttccattctcagcctcttagaggcacagagggctcaagttcaagtggcaaaaagtcttttttccataaccaaaatagagcaaatttggaattcagtctgggactaaaacgtcacagcagnnnnnnnnnnnnnnnnnntaatttgcttttttctttctttcatttagcagcataaataagtttggccactgggagtacagtacagggttgggacaacaatcccatatttgaagacctacttctagcaccagcatcaagaattaaatccatctcaggactcacagaacccaggacaacttgccacctttgagcaacatatgcattgaagaatgtatatggaagcaacagtaaatagattaacagaggctaatactgtgattgattgacattggcaatggttggcnnnnnnnnnnnnnnnnngcttttcatgataactgtacaaaaacaattcacagtaatttttttaagcttttccactccagaaaaatgactttttgttgcagatgctctctaattagaaagtcaaccagtacttgttttgatattattgcagttcctttctaggtgtctagctgtcagtggtaaaag

SEQ ID NO: 256092 - DNA, 1137 bp, Homo Sapiens
  misc_feature (1073)..(1073): n is a, c, g, or t
  misc_feature (1137)..(1137): n is a, c, g, or t
gggctagtaagagacctgagagggatcgctttcgctttcaatgccaagaccagcttcatgatgctctttgaatggatatatccatcctatatgccaattctccaacgggcaattgagctctggtaccatgatccagcctgtactacacctgtactcaagttgatggctgaattggttcataataggtcccagcgactccagtttgatgtctcttcccccaatggcatcttactcttccgagaaaccagcaagatgataacaatgtatggcaatcgcatcctgacactaggagaggtcccaaaggatcaggtctatgctctgaagctcaagggcatctccatctgcttctccatgctgaaggctgctctcagtgggagttacgtcaatttcggagtctttcgtctctatggagacgatgccctggacaatgctctgcagaccttcatcaagctgctcctctctattcctcacagtgatctcttggattaccccaagctcagccagtcttattattcactactggaagtcctgacccaggaccatatgaactttattgcaagcctggaacctcacgtcatcatgtatattctctcttccatttctgaaggacttactgcacttgacaccatggtatgcacaggctgctgctcctgcctggaccacattgtgacatacctcttcaagcagctgtcacgtagcaccaagaagaggaccacacccctggaaccaggagagcgaccgctttctggcacatcatgcaggcagcatccagagatgatccagcagatgctgtccacggtgctgaacatcatcatctttgaagactgtaggaaccagtggtctatgtcccgaccactacttggcttgatattgcttaatgaaaagtatttttctgacctaagaaacagtattgtgaacagccagccaccggagaagcagcaggccatgcacctgtgttttgagaacctgatggaaggcatcgagcgaaatcttcttacgaaaaacagagacagaaacaagcctgttaattttttttccttctcctctggcgactgtgtgatgaatcctttatngcgtgatcaggttgcggatagacttgtaagggtgtttgctgaaaacagtgtaagcattgtgacn

SEQ ID NO: 256093 - DNA, 447 bp, Homo Sapiens
  misc_feature (11)..(11): n is a, c, g, or t
  misc_feature (25)..(25): n is a, c, g, or t
  misc_feature (403)..(403): n is a, c, g, or t
tcaagaagatntcgcacgatgcctncccatcaggttctcaaaacacaggtgcatggcctgctgcttctccggtggctggctgttcacaatactgtttcttaggtcagaaaaatacttttcattaagcaatatcaagccaagtagtggtcgggacatagaccactggttcctacagtcttcaaagatgatgatgttcagcaccgtggacagcatctgaaaatggaatggagaatttcaggcagtgacctaatgtattgctacccaagataaaacgacagattccaaatacaggagtatattaggctgaaggccttttctgtatagggtaaatcagacaaatagtttgtgaagcttcatctgagtcttctatttcaaggttaccttttcttctaagatattcatntcctttcttgttcttaaaattggtttgaacttcacttaccaatg

SEQ ID NO: 256094 - DNA, 756 bp, Homo Sapiens
tatctcccacccctcttcccctactttgccttacccctcacccctcagacagatgccctcttgccttttaaaagttggatttaacgaccgtgttgtagggttccttggtcctgtgtgaaggcagagacccagagagaaggaagtgagccccactgctctccctgggagcaatgtgggtgagtcccacccagaggccctgctgtgtgtggccaataaattttagtcttccccagccctcgaggcagtgtgtgtggatgtatgcgtgtggatatttatatatgtaccctgcactcatgaatgtatgaactggaggaagttactacagtggaagggttcttaataacaaggtctacctagcatgaagtatttaacattctcccatcccttaaaaaatatacatttttataaaatgaaaaccataataaatgttttgaatattaaaaaaaataataaccctacagaggaaaattaatggagacagctatttgccttgtactttttccacaaatgttgctgctagttgtacacatctctagttcagctcttgcccacgggacactcatcaaataggttttaattttaattctttcctctacccccagaaacaagcctgttaaatttttttccttctcctctggcgactgtgtgatgaatcctttcttgcgtgatcaggttgcggatagacttgtaagggtgtttgctgcatacagtgtaagcattgtgaccgccaataaacttcaatggtttctactgaaa

SEQ ID NO: 256095 - DNA, 1111 bp, Homo Sapiens
  misc_feature (28)..(28): n is a, c, g, or t
  misc_feature (35)..(35): n is a, c, g, or t
  misc_feature (42)..(42): n is a, c, g, or t
  misc_feature (111)..(112): n is a, c, g, or t
  misc_feature (479)..(479): n is a, c, g, or t
ccgccttggctgatcctggctcttttcnccagggntgtgggnaaggcagcaaaggtcaactagctgcttccccagggaatagggtggtgagtactactcactagggggcgnngctctgctggttcctgggggactgggtgggaagggtgttgggaggagataagagatacaaactgagactccagcctctcctcctggggccaccaaagtggggagaacccctagtgtcctgccacaacctgccttgtataaacatgtacattttttcataacattttgaacaaggtttatattgactcaagtttaaaaacaaaaagtgtgactgaaaaatttttacagagtctagtgcaccaatgctgatgtgaggggttgtgtatgcgagtgaagaaaatgtgtattctggtggcctgaagctttactggacaaggatgtgtgagagtgcagagatatatttagtgacacagtagagaggcaaaaanaaagctaaaattccaaatgtatattttttcgtattgccctgtcctcacccagaaatgatcaattcctgttactgtattaacccttgttattaggaactctaagccatgccagaacaccgtccctccccttggaccgtatagattctgccctgggtccctagccccttgcagtgataaataactccagctaaaagtgtttggtgttcttatctccaccctctttcctactttgcttaccctcatcctcagacagatgcctcttgcttttaaaagttggatttaacgacgtgttgtagggttcttggtctgtgtgaaggcagagaccagagagaaggaagtgagcccactgctctcctgggagcaatgtgggtgagtccaccagaggccctgctgtgtgtggccaataaattttagtcttccccagccctcgaggcagtgtgtgtggatgtatgcgtgtggatatttatatatgtaccctgcactcatgaatgtatgaactggaggaagttactacagtggaagggttcttaataacaaggtctacctagcatgaagtatttaacattctcccatcccttaaaaaatatacatttttataaaatgaaaaccataataaatgttttgaatattaa

SEQ ID NO: 256096 - DNA, 694 bp, Homo Sapiens
  misc_feature (668)..(668): n is a, c, g, or t
taggagtaacacattcacatttactgtctattttcttgtgtgccttatgagatggcttttctgactgtatctcaatagtctttctctctatgcaggtttataatcagtacaactactgttttctaaaatactactactcaaggctcggagtttgtatttaaattacactgaccaagtaacaacgtaatccatttcaggaactgaatatttgactgttaacctttttcccatacgtccagtgtggcatggagcatatggacttgacagacatctctcacccagacgcccacgtgtgaacacacccacatccacatctctgggtggaaaccagcctagagtggggacgacgctaatggtgttgctttagaaccgtcttttcttacccttttagactcgtgttttgtatgagacaccattgcaagaaaattttatccctccagaagtattttattactaaagaacaaaagcaaaaaaagcttaaattgcactggttaaagtacagtttccaacagctgtccttcctcagtactctaatggccactccaccgcgagtggaagtcactgttgtgtgtacacaggtggtcccaatccaaaactccatcttttgaggcccaattatggtccattttgtttataggactaaattcaggggtttgtttctacaagancaatacatgttttaacccttttcctt

SEQ ID NO: 256097 - DNA, 921 bp, Homo Sapiens
  misc_feature (358)..(358): n is a, c, g, or t
  misc_feature (555)..(555): n is a, c, g, or t
cggatgtgggtctcctgtgggcctcaactcttgaacactcatgacatggagactgttctaatgaatcacactggttaagtaggcatgggaagagcctttcttggctaaagggctggccatggagcagacaccaagtagtgtcactcatgctgagaggagggcaatctatataccttgtcatgtcctttgtggctcaattgctctgagagccttgggtaggagggtcaagctctatgtcttatatttccagatgagtgatgtagaagctggtggtgccaccgtcttccctgatctgggggctgcaatttggcctaagaagggtacagctgtgttctggtacaacctcttgcggagcggngaaggtgactaccgaacaagacatgctgcctgccctgtgcttgtgggctgcaagtgggtctccaataagtggttccatgaacgaggacaggagttcttgagacccttgtggatcaacagaaagttgactgaacatccttttctgtccttccccttcctggtccttcagcccatgtcaacgtgacagacacctttgtnatgttcctttgtatgttcctatcaggctgatttttggagaaatgaatgtttgtctggagcagacggagaccatactagggcgactcctgtgtgactgaagtcccagcccttccattcagcctgtgccatccctggccccaaggctaggatcaaagtggctgcagcagagttagctgtctagcgcctagcaaggtgcctttgtacctcaggtgttttaggtgtgagatgtttcagtgaaccaaagttctgataccttgtttacatgtttgtttttatggcatttctatctattgtggctttaccaaaaaataaaatgtccctaccagaagccgaaaatctaaataggctacccaacaatatatcttg

SEQ ID NO: 256098 - DNA, 650 bp, Homo Sapiens
  misc_feature (75)..(75): n is a, c, g, or t
  misc_feature (151)..(151): n is a, c, g, or t
gtcactggctaataggcataagaattaaagaccgaattcaagtaaactgtgtttcacgggtgagaaggaaaggangaaggaaaagaagttaatagaaatgaggttgggagaagacatgtgctgagaccagtgagtaccagagtcttggagnactcccgaaagctcagagagtgtctgtcacaagctctatcggagatcccatagtctggttgttccccctgtggatggacatcaagactgctgcccatttttcactgtttcgagcaatgcagaaacaagcattgtatgagcatcctggttctttgtgcacaaacatatgaatatatttcttacccgtgacaactaaaagtggaactgctgggtcttagtggtaggcacattaaaaattttaatagctacttccaaattgccctcccacaaggctgtcccggtttatgcttttacccccacctgtctttaaacaagtttatggggactgtaaagtatttacacacacattcaaacactcaggctggtttctccatatggcttcagagagagcaaagtatatcccctgaaacagaagtgcatttagtaaaagcctcagagaacctgggttaggctgctagtttaactacactcaagggtgtaaatgaggaggtgggtatctg

SEQ ID NO: 256099 - DNA, 685 bp, Homo Sapiens
  misc_feature (584)..(584): n is a, c, g, or t
  misc_feature (642)..(642): n is a, c, g, or t
gtgagcgcagccactcaggctggtcctgggggtggggctgtaggggaaagtgctaaagccgctgagtgaagtaagaactctgctagagaggaaatggctgcttcatcatcatcctcctcagctggtggggtcagtggaagttctgtcactggatctggtttcagtgtctcagaccttgccccaccacggaaagcccttttcacctaccccaaaggagctggagagatgttagaagatggctctgagagattcctctgcgaatctgtttttagctatcaagtggcatccacgcttaaacaggtgaaacatgatcagcaagttgctcggatggaaaaactagctggtttggtagaagagctggaggctgacgagtggcggtttaagcccatcgagcagctgctgggattcaccccctcttcaggttgatactgcctggatggtcacctctggtgcgcagcaagttgcaaagccaagtggggactttctcacagcttacatagccatccagagatccacagctacgtcacttgaatggtaatgcacatttgtactaggtttctctggatctaatcacaagcacacanatacttatatgggtgatctttcagggaatggtttgcttatttgtttttaaagtatggngaatcagattaagacaatcagtttcagagaacctagagggttg

SEQ ID NO: 256100 - DNA, 982 bp, Homo Sapiens
  misc_feature (747)..(777): n is a, c, g, or t
gggctcgtcgtggtgagcgcagccactcaggctggtcctgggggtggggctgtaggggaaagtgctaaagccgctgagatggctctgagagattcctctgcgaatctgtttttagctatcaagtggcatccacgcttaaacaggtgaaacatgatcagcaagttgctcggatggaaaaactagctggtttggtagaagagctggaggctgacgagtggcggtttaagcccatcgagcagctgctgggattcaccccctcttcaggttgatactgcctggatggtcacctctggtgcgcagcaagttgcaaagccagtgggggactttctcacagcttacatagccatccagagatccacagctacgtcactgaattgttaatgcacatttgtacttggtttctctgtatctattcacaggcaacaaatacttatatgtgtgatctttcagggaatgttttgtttatttgtttttaaaagtattgggaatcagattaagacaatcagtttcagagaaccaggaggtttggggttaagagatactcaaaaattttcacaagccaagtagggcatatatcagatttggccaactgaatggcgtctgtcctgtcatccatatggtgcctggaaatatttaccagtcaaggtcaatgtcagcatctgtggttaaaaatatagcattctgacctaaaaaagttattttgcagatgaatgtgttttcaactcaggacctatccaaatgaggaannnnnnnnnnnnnnnnnnnnnnnnnnnnnnnagacatcaattctatagattctgactttttctaacctcttatagacatgccaaatgctggcaaaaagaagtgctttttggatatggcagcacttgtaaaaataaagcagtaagcaaaatccttttaaacacagaaatcctgagttcttctcattggtggactcaagcaattctgtagcaaataaatcctttgaaagagctccata

SEQ ID NO: 256101 - DNA, 1163 bp, Homo Sapiens
  misc_feature (72)..(363): n is a, c, g, or t
ggtaccggccggaatttcgggatatcgtcgacccacgcgtccgggggcgaacacgccgcggtcctcgtcgtnnnnnnnnnnnnnnnnnnnnnnnnnnnnnnnnnnnnnnnnnnnnnnnnnnnnnnnnnnnnnnnnnnnnnnnnnnnnnnnnnnnnnnnnnnnnnnnnnnnnnnnnnnnnnnnnnnnnnnnnnnnnnnnnnnnnnnnnnnnnnnnnnnnnnnnnnnnnnnnnnnnnnnnnnnnnnnnnnnnnnnnnnnnnnnnnnnnnnnnnnnnnnnnnnnnnnnnnnnnnnnnnnnnnnnnnnnnnnnnnnnnnnnnnnnnnnnnnnnnnnnnnnnnnnnnnnnnnnnnnnnnnnnnnnnnngaagagaaaagaaaacataagtttcagccaggcatgtgaagtaagaactctgctagagaggaaatggctgcttcatcatcatcctcctcagctggtggggtcagtggaagttctgtcactggatctggtttcagtgtctcagaccttgccccaccacggaaagcccttttcacctaccccaaaggagctggagagatgttagaagatggctctgagagattcctctgcgaatctgtttttagctatcaagtggcatccacgcttaaacaggtgaaacatgatcagcaagttgctcggatggaaaaactagctggtttggtagaagagctggaggctgacgagtggcggtttaagcccatcgagcagctgctgggattcaccccctcttcaggttgatactgcctggatggtcacctctggtgcgcagcaagtgcaaagccagtgggggactttctcacagcttacatagccatccagagatccacagctacgtcactgaattgttaatgcacatttgtacttggtttctctgtatctattcacaggcaacaaatacttatatgtgtgatctttcagggaatgttttgtttatttgcttttaaaagtattgggaatcagattaagacaatcagtttcagagaacccaggaggttttgggggtaagaagataactcaaaaatttttcacaagcccaagtaggggcaatatattcagatttgggccaactggaatgggcgtcttggtcctggtcattccataatggttgccttgggaaaatatttttaccagtccaaggggta

SEQ ID NO: 256102 - DNA, 645 bp, Homo Sapiens
aagtctttacaaaactgtatgctggcccttacagcagctagaatgaaatgttgtcactctcacttccataaacttgccaattgctgtttttctttctctgtagtgaagtaagaactctgctagagaggaaatggctgcttcatcatcatcctcctcagctggtggggtcagtggaagttctgtcactggatctggtttcagtgtctcagaccttgccccaccacggaaagcccttttcacctaccccaaaggagctggagagatgttagaagatggctctgagagattcctctgcgaatctgtttttagctatcaagtggcatccacgcttaaacaggtgaaacatgatcagcaagttgctcggatggaaaaactagctggtttggtagaagagctggaggctgacgagtggcggtttaagcccatcgagcagctgctgggattcaccccctcttcaggttgatactgcctggatggtcacctctggtgcgcagcaagtgcaaagccagtgggggactttctcacagcttacatagccatccagagatccacagctacgtcactgaattgttaatgcacatttgtacttggtttctctgtatctattcacaggcaacaaatacttatatgtgtgatcttttttat

SEQ ID NO: 256103 - DNA, 622 bp, Homo Sapiens
  misc_feature (13)..(13): n is a, c, g, or t
  misc_feature (95)..(95): n is a, c, g, or t
ttcgtgactgaancagagcagtcatcaccttgaaagctctcgtcgcagatgcagatggcaccggtcgtgcagtatccgtgcccgctgcagagctnggggcaagcttctccaatgtacacgtggtcaattgcccagctttgcttctcagtttcttctcccttctggatccagcgccagcttgagctgttgacagagttgtagatggtggcttcatggaactggaaaggggagcagccaatgctgttagaagaggaaggaaggcactgggtctgtacgagctgccaggaatccgatcttgcatccttagtgtattccagcattacggaatgaaggtcaccacaagaagtggcttcacaacccaccacaattttaaactgcatcatgtatcctggctgtataatgagttctcgggaggagagagcattgtgagtcttgtccttctttttatttggccaatagaggtgaaaggatggattgccacaaaatcctgctgtccttacagcattagggtaaaaactccagttttcttcatgggaagtgccttcatcatcaaaagtgtccaccaattggctgggattgatttctgctccaccaatcaaaatgttgtccagtgcccactgag

SEQ ID NO: 256104 - DNA, 978 bp, Homo Sapiens
caaaaatgaaggtacattttctgttctctcctaggttagagaggggtggcctggggtgcttcatgagaaatgtcttcctggatctgcggtggtcaggtttgcctctgcttttgttccctgcctttccgccacatcacacggcctcactgggcttcctaccagtttctcagaattacacgcacgaccatccaaacattggctccatgccagggctgtgactgcagcctgtgtaggaccatggggagttcagagtcatcatacaaggcagccaagaactgccataaacactacacagatggagggcatgggataggacaggagaggaggtgatgtacacttagaggtaactaaggctagtttgaaaaccgtgaattaagatattcttatcagtataaaaacactgagattgcttacctcccaaattgctttattgtattaactctcatgcttcagctcttggatttgttgtttctaactaacatgtcatgtacaccaaacattttataaatcaatcagtaaatattttgtaagacccaaaatcctggcatattgccaggtctgtggatttgcctgttgggtgttgggatgggatatcagaggaagaagcatacaagtgggaaaaactgtgattagaaagggaaaaataggcatatccacagtactattaagagaggcatgataatgccatatttcctcttctgtacaactggtcagacttcaataaataatcattgatggcttaagaagtggacaatagaactagcagcttgacctcgagccgaattcggtacgagcccaaacccacttcaacttactaccagacaaccgtagccaaaccaattacccaaataaagtataggcgatagaaaattgaaccctgctgcaatagatttagttcctacgggaaagatgataaatttgaccatggcatactttgcaaggactaacccgtatacttgtgaataatgaataacttga

SEQ ID NO: 256105 - DNA, 898 bp, Homo Sapiens
aatcagttttgtcgttttcctcatataaatctcatgcatattttgttagatttacctaagtatttaatttcttgcatgctattataaatggttttgtgctttaaatttcaaattccacttgtttattgttgatatataggaaaaaagcaatgtgaaacccaagcaaggattttaggccaaagaacagacacagctgaattttgttttcaaactagaacccagttgatgttcagaatggattaaaggagaataggtgcttgggacaacgggaaaataccaactgttaatcctgaccttctagggcagcacaccaacacttggatgtgtatattcatcacctggcgattccgttacagtagaagatatgctacagcaggcctgggtggaatccaagagtcagcatgtccaacaagccccaggtgatgccaatgttgcaggctctcagacaaccccgagtcaagagggtctgggggaaagcagatggggctctgagctcaggcagagaccgtgaggaggggaggatggactatgttccagagaaaatacactgtcttgccactcttgtctttctccctcactgtatcagaagtaggtccgaagcaggaagtaggggcacgaaggagtcagtgggagcagatgagtaaaaagcacctgcctttggtatccttcgttgatctcagatgcattatccgagcccgggatcctgcagctctggcccttgactacatcgacttgacggatgcccttgactgcctgtcagcagggcatgcatcagacgcctcttatgcaccgcctttctccttccaaaatgcgaacatggctcatcaaaaggagcgagaggtgcggggtcacataagcacttagatatcccctgggctcacttctatgctctccgaac

SEQ ID NO: 256106 - DNA, 640 bp, Homo Sapiens
ggattttattgccattgaaagtggctctcagcgggagggagagagctggaaaatggggatggagtgggaacgtattcttcccctgaagtactgccatcaagcagtcccgctaaagtcaagctgctgctctccgactcagactgcagtctccgacgtgcagctgcttctcctcttctctgctctgtgccagtggagcctgggatttttatgggtacaggatacggggtggggtaggccaggggtggttttggaaaaggcaatatttgagcaggaaaacaggaatgtaaagttctcactttgggcttgagagtgggtcttggccagggaccctgccctttttctgtgtacaatttctgtgcctcctgtccctctcagtctctacagaatgtctcagaaatctccatagtagaggatcatcattactctgcccctggcttctggtttattctgctatagtttaagcatctttatgaattttatttgacccagtttttgaattgtctgtcttacacttctgtaacctctctttcaatatcattttcttccagttccatttacaaaacagtccactattcttttaggattaataattttatctgcctgacctcatcttcatagttttctgattcttctggtgtat

SEQ ID NO: 256107 - DNA, 1407 bp, Homo Sapiens
  misc_feature (358)..(377): n is a, c, g, or t
caaggttaggaagaatcaatcagccttaactataaatacctgcactgtctctgaggacttactattttatgttctttttaatcaataccgatcagaagtttaggttataaaaacaattctacttcatgctttggtgcttggtaatttttggtgcgtctttaagcattactcttatatatcatatattaaaataccataaaaatgaaattcagacaaaatcactggcaccaaaaatggtttattctgagctgtcttcactttgactatttggggggcttctctcaagtacagatgtgggttggggtcccctggagcaggcaggattggcagtaagagatattggccactcaagtctacnnnnnnnnnnnnnnnnnnnngtttttttttttaatctttactttgaatttgttccccaagtgtacttaatcaccttagtgccagtttaatccagttatgcagaagaaattcatattggttgcctgatgtagagctcagcaccaccctaccacaggccttgtctggtgtatttgggaagtggaaaagagccctcagttggagggagctgacaacccttggtggagggagggtgcccttgaatgtattaaaactatcacccaaagaaggtatgaaaacagggtaaggtggtcagttgtttgccaggtcaatagacagaaagtacattagaaaacaggacttaggccaaacaaacaatactggatactgaatacaaaacagtatgatttatattaaaggtttccaaaggttgcctgcaaaggagaatattactactagtcagcaggaaaaaaatgcattcagaacccaagcagaaactgccaaatgtaattaggttaagaaaagttacccttgggcagtgtattagttttctattgctgtgtgacaaattaccccaaatttagcagtttaaaaaacaatacccatagcagttctgtagctcatgagtctggcacagtgtggctggattctctgctcagggtcttaaaggctgaaataagggttggcaggacaacattccttcatggaggctctggggaagaatctgcttctaagttcattcaggttgttggcggaattcagttctttgctggctctcagctggaggcccctctctcacctcaaggctgcctgcattccttcttatgtggtcccctccagcttcaaaccagccttcctgctctttctcatgcttcatatctctctcccgtcctcctgttttaggggcatatattagctcaagcccacagatatattttaaggttgattgtgcgatagaacataattgcaggagtactgtctcatcttcatcatattcacggggttctgggagatttaggttcattgaaagtggggagggggcatttttcaaattctggcctaccacagggcaat

SEQ ID NO: 256108 - DNA, 413 bp, Homo Sapiens
  misc_feature (304)..(323): n is a, c, g, or t
  misc_feature (325)..(335): n is a, c, g, or t
caaggttaggaagaatcaatcagccttaactataaatacctgcactgtctctgaggacttactattttatgttctttttaatcaataccgatcagaagtttaggttataaaaacaattctacttcatgctttggtgcttggtaatttttggtgcgtctttaagcattactcttatatatcatatattaaaataccataaaaatgaaattcagacaaaatcactggcaccaagtacagatgtgggttggggtcccctggagcaggcaggattggcagtaagagatattggccactcaagtctacnnnnnnnnnnnnnnnnnnnngnnnnnnnnnnnaatctttactgtgaatttgttccccaagtgtacttaatcaccttagtgccagtttaatccagttatgcagaagaaatt

SEQ ID NO: 256109 - DNA, 811 bp, Homo Sapiens
  misc_feature (780)..(780): n is a, c, g, or t
  misc_feature (786)..(786): n is a, c, g, or t
ggcggccaaatatttatatactgattacatagagtcttgtacatatgtgctctaaaaacaaaccacccagaattgatactgttggtaaccaggagtataaggcagtggctctggggttcttaattcattcctaacttctttgatacttcacaggattaggaaagtggtcatcatacatcccacacagtctgtattacttcaagcttgtgggcaaggttaggaagaatcaatcagccttaactataaatacctgcactgtctctgaggacttactattttatgttctttttaatcaataccgatcagaagtttaggttataaaaacaattctacttcatgctttggtgcttggtaatttttggtgcgtctttaagcattactcttatatatcatatattaaaataccataaaaatgaaattcagacaaaatcactggcaccaaaaatggtttattctgagctgtcttcactttgactatttggggggcttctctcaaatacagatgtgggttggggtcccctggaacaagcaggaatggcagtaagagatattggccactcaagtctactgtgtgtgtgtgcctctggaagagtgaaaaatggacttcaaaagtaacatcaaaaatctaactgccaccatcctggagacattttgcagggctttcctttcaagtctttcaagtacaggatattaccacaacagcagctgaactgttgtaaccagcatgtttttcctatttccactgtgaccctgcaagctgactcaaaagccttgcgtgancttganccagggtgcaagagacaggggggaa

SEQ ID NO: 256110 - DNA, 795 bp, Homo Sapiens
gatcccccggtctgcaggattcgcacgagcaggcgtgagccaccgcgcctggccgcaagcttttattcagaaacttttacgcattcatttcccctgataggctgagtttttagaaagctcatactatatcttattcctcttcgtgttcctggtaaacagcctgctacatattggatgctgattaaatacttgctaaacagagagtaaacttagattattaaagtccaatgcggacttaatataaacatcctaaaagtatcttttttcaccccatactgtaatactgggtttctcagcctcaccactgttgacattttggatgggataattctttgtcataaggccgtgagctgtttagcaacatctcagcctttatccactagacaccagtggcaatccctcccctgtgctgtgacaaccaaaaacgtctccagacactgcccaatgtccactgcgaggcaaaatcacccctgattgagaactgctattgtaagataacttgttaatcatctcacccaccatacattttcaattaaacttttatccactccacagaatatcctgacttccttttcttaattagtagtatggactccctggatcccaatgactcaagcttaaaaccctaaagacttctgtgacttctttttgcctttgtttctcgcatcagatcagtgggtaaagtcttgaagctctacactcaggcagcttgataaaatagtaaatttgattcagagaagcaataataatatttttgtgtagtatgtttcatcgttgccgggagaggtaacttaa

SEQ ID NO: 256111 - DNA, 637 bp, Homo Sapiens
  misc_feature (115)..(368): n is a, c, g, or t
gacaccccataatatccatcatcaagttcaagtggttaagattttgccccattcctttcttctatcctctttttttcccttttaaaaaatttactggctgggtgtggtggcccannnnnnnnnnnnnnnnnnnnnnnnnnnnnnnnnnnnnnnnnnnnnnnnnnnnnnnnnnnnnnnnnnnnnnnnnnnnnnnnnnnnnnnnnnnnnnnnnnnnnnnnnnnnnnnnnnnnnnnnnnnnnnnnnnnnnnnnnnnnnnnnnnnnnnnnnnnnnnnnnnnnnnnnnnnnnnnnnnnnnnnnnnnnnnnnnnnnnnnnnnnnnnnnnnnnnnnnnnnnnnnnnnnnnnnnnnnnnnnnnnnnnnnnnnnnnntctatttccaagtaatagtaatagtaatgataataataaatttacttatttttttgcttcatattttaaagcaaatctcaattgtatcctttcatgttgtagcatgacatttaaaaatcacgatttttggatgtaaatacaatacattaaaactcctaacatggccaacaggcatacaaaaagatactcaatatcatcattcatcaggaaatgcagaacaaaactccagtgagataccacttcacactaagatgactgtatagtcaaag

SEQ ID NO: 256112 - DNA, 733 bp, Homo Sapiens
  misc_feature (169)..(169): n is a, c, g, or t
gcccaaggcatttccatgcgtgaaagttcactctaaaataggcctttgaaggctcaacaacttgcttaaatgctgccaatgcatacacgttccaactgctatcgcatttgataaattcataattagtaagatacttgttcattgcttatctcttctctaggcatgtcanctcgacgacgggcaaagatctctgatactttggtatgctaatgtattacaccctagaagtgtgcctgtcttttagtagctattaaatgagtttaatattgcaaagaagaaatctaaccatttcattctgagagttgagcctggccagagatccataacttctgcagttttctcagccattgatccacgttgtttcatgttcagattgaaagaagcaattattattgattcagttccagccttgtggacacatagtcaaattttctaggcatgtcttgtttctaaggtgccttggaattccaactgaaattaacaggtaatagagaaaaagaataaagaaagtatcaaagaaagaaagagtgagcttcagagtaaaatattattatatagctcagactaataaaatgtgttttacttacatattcaatttgaatgacttaactttaaacatcaattcaaaaaaattgaatatcgagaagagaacatgaaaggaataagcactggagaatgagagctatgaaaaatttaaaaactcaataacaaacttacagaaattcagtatctt

SEQ ID NO: 256113 - DNA, 940 bp, Homo Sapiens
  misc_feature (836)..(836): n is a, c, g, or t
gtcacctgctctgtatgtgtggctttctgtttgaaaaaaacagaagaaagaatggtgttcttggaaaaacaagtttggtaaccccgggctagaccccggcccctctggatttctgatgtattacctccccaccctgtgggacgcatctgccctacacactaagtctctcctccccacccctgcctcactccaggcacaggctgcatgtgattgtggatgaggtctacatgctgtccgtgtttgagaagtctgttgggtaccacagtgtcctaagcctggaaaggctccctgacccccagaggacccatgtgatgtgggcaaccagcaaggacttcgggatgtctgggctccgctttggcacgctgtacacagaaaaccaggatgtggccactgccgtggcttccctctgccgctaccacggcctcagtggcttggtccagtaccagatggcacagctgctccgggaccgtgatgaggaaaatgaggaccagatactaccccactcaaaaccatgcccggctcaaggctgtccacacctatgtctcagaagagcttaaggcattggggatccccttcttgagtcgtggggctggcttcttcatctgggttgacttgagaaagtacctgcccaagggcacctttgaggaggaaatgctgctctggcgccgctttttggacaacaaggtgctgctgtcctttggcaaggccttcgagtgtaaagagcctcggtggtttcgctctgtcttctcagaccaggtccaccggctttgcctggggatgcacagggtccagcaggtgcttgcaggcaaatcccaagtggcagaagacacccgccntctcagagccaggagccaagtgaccaacgcacgtgagctgggcattgtctcgtgggccagagggcccaggagccactgtggacctgtggcgttctggggctgcc

SEQ ID NO: 256114 - DNA, 1109 bp, Homo Sapiens
  misc_feature (617)..(634): n is a, c, g, or t
  misc_feature (911)..(924): n is a, c, g, or t
  misc_feature (1077)..(1077): n is a, c, g, or t
ggcctgggtggcgaattcggcacgaggctcagtaacagcccaaattatgaggagatcaccaagtggtacctgggttggaagtcgatgttctcagaccaagtgctggcacatccatctgtcaaggacaaatttaatgaggcacttgatatcatgaaccgggcggtgtcctccaacgttggtgcctacatgcagccaggagcacgggagaacattgcctatctcacccacacggagcggaggaaggacttccagtacgaggccatgcaggagaggcgggaggctgagaacatggctcagaggggcattggcgtggccgctagctctgtgcccatgaactttaaggacctcattgagaccaaggctgaggagcacaacattgtcttcatgcccgtcattgggaagcgacacgaagggaagcagctctacacctttggccgcattgtgatctacatcgaccggggagtggtctttgtccagggcgagaagacgtgggtgcccacctcactgcagagcctgatcgacatggccaagtgaactgtggcaggtccagaaccagtcagagacttgcccctaagagggatgtactgtaaataaacagtatttttagatcaccttcnnnnnnnnnnnnnnnnnnctcgaaggcatctattggcgggtgcgcgagaaagaagggaatggaaatgggcccatgggccatagcctggtttcctggaccccggctttttcttgtaacaaaagggggggaggaatctggcccgggtcctccccctattaggggggggtccccaatttaattttccccaataaaggcccaggggctaaacccttgggaatttaagtggaatccgcgctgtgccagtaaaccccgggggaaaattttaaaccccgcccccaaaagggagccggggccnnnnnnnnnnnnnngtgggagccaccacgagcaactctctcgtttgaagaaatcgcctttttcttttcccgcgcgcaagaaaatcctgagctagccttgtggaaaaaacagaaaaagaaccaccaccgcgttaccaaaaggggggggagacttttgttttttcccgnggttctccagagaccccaccgccattcttttc

SEQ ID NO: 256115 - DNA, 644 bp, Homo Sapiens
accatgtaccccagtcagcagggtgagagtctgttgctatgtgcaaaagtgtgacctaaggtttaggctgcctacaggaaccagaaaactctgattctgtgtcatttacatgtgtaaaatctgaaacttggggccaggacatccaaaatgggaatcctcacttaccaacgttggaggacaccgcccggttcatgatatcaagtgcctcattaaatttgtccttgacagatggatgtgccagcacttggtctgagaacatcgacttccaacccaggtaccacttggtgatctcctcataatttgggctgttactgagccaagagcacagcacctgccaaaaagaaaaattacttgcatccatcgtggcaacaaatgaaggcaagatttctgaagtggccatttgttttgttttgatcctggtcctacaggctagtgacactactttacagggatttatagtagctaaacagtctagcacttatgaatatggattttggagtcagcctggtagctaaagtgcccttgcatgtaaactctctgagcctcagcttccatgtctacacaacagggataccatatcccctaccccatagggttgctgagaggagctgagataaagcaaataaagtgcttggaacagcttc

SEQ ID NO: 256116 - DNA, 358 bp, Homo Sapiens
tggtgctgagaagatcggctggatatactgtcccagcattattcaccacgattgttacatcacccacttctttcttcacctgatttagagagcgatagatccggcactcagctgcagtttcctccacaccgcgcttattaatatcccacagaaccaatatgctctgtcgttttgcaaattcataagtagtctgcctgcctattccatgcccagctccagtaatgagaacaatctccacagccacagattttctcctctgaggaatgaaaaacttcaccaacgactccaagtaggagtagatgatggtgatcagaagcagaaggatttctaggatgatgctcatggctgtgctctgtcc

SEQ ID NO: 256117 - DNA, 726 bp, Homo Sapiens
gtcaaaacctgtgaaaagctaattagcagtattaagcaacacaaacattagtgccaaatgcatgataaaggctaaagaaggccagagcatatattactgtagagtagaatagtaagggaagactttgtcctttagtaaagagataggaggtggcctggcccttgaaatagtagtgtttaggtagatgcttgtgtaggattcctgataagagcaactgaaaagaaggagaggggaagtagtaaagggacaagaaacaatgaatgttatgaggaaccataagcaaattatagtttgacaagacaagattgggggacatatatggttaccagggaattacctcttatgtgttatatctttatattatttatctctggaaaagagtaccctgcaaaattccctacagctgcaagcagatgtcacttgatggacagagggggaattctgcccctccggtatcgggaaatacatactaaagacattgcgaaacgctgaacctcttcccataaataaaaggttttgtttgtaaaatgcgaaatccacccataataaatggacattagcacttgcagtttaggcctgttcatgaatgcatctgcatgacagcattttcgtttaacaaacatatctgtgatttgatacattattcctattacaatattgttaagtggtagaaattctatgctttctacaaggaaatcgatggtaacaaataaaactgaaaatatt

SEQ ID NO: 256118 - DNA, 748 bp, Homo Sapiens
  misc_feature (577)..(585): n is a, c, g, or t
  misc_feature (596)..(597): n is a, c, g, or t
  misc_feature (609)..(609): n is a, c, g, or t
  misc_feature (666)..(666): n is a, c, g, or t
caagggtgtgaggcacgtgagggcatcgccatgcgtattttacaggcctctttctctggactgtccttcaaagggaatgacctttgtctttccaggacctacccagtgagatctgcctgccattttcctatgagtcaaaaatctgaactcactactgctcctttcctggttcataagccagagtagggctggttggcagtcactggcttgtggccctatgtaattatctcagccatcacacactggctctttcacaagggctggtcacacgcctcgagtgattcttcagaaatctgttgaacagcctgacacccagccctaggacgctgtgctggggggattccccagctactgagtggggccagagactctactgcctctgtgaccacatccctttccatactggtatctcgtttgttctaatgagtgtgtccattgcttttaatagtgaattttctgagcaatgagaatttgaccaaattgaaaagggggatttccatgcatttgaaattgccatgtgtttcttcttctgatccatttgctctaagaaatatagtctaagtttaggactgagggnnnnnnnnnacagaatactnngatgatctttgntttgattttttattgcaaattcaaaatatgacctgctttcacaggactctctaacanaagtgaagagaaatttaagaaggctatgctttcattgtcagcttgccatgaaaggccaacctcatgtccccagtggaacctt

SEQ ID NO: 256119 - DNA, 420 bp, Homo Sapiens
caagggtgtgaggcacgtgagggcatcgccatgcgtattttacaggcctctttctctggactgtccttcaaagggaatgacctttgtctttccaggacctacccagtgagatctgcctgccattttcctatgagtcagttggcagtcactggcttgtggccctatgtaattatctcagccatcacacactggctctttcacaagggctggtcacacgcctcgagtgattcttcagaaatctgttgaacagcctgacacccagccctaggacgctgtgctggggggattccccagctactgagtggggccagagactctactgcctctgtgaccacatccctttccatactggtatctcgtttggtctaatgagtgtgtccattgcttttaatagtgaaatttctgagcaatgagactttg

SEQ ID NO: 256120 - DNA, 775 bp, Homo Sapiens
  misc_feature (366)..(616): n is a, c, g, or t
  misc_feature (628)..(654): n is a, c, g, or t
aaaaattctattttcactgaaaaatgcttttggcgaagcagtaaaaattattaattttattaaatcttggcccttgagtacatttaaaaaatatattctttgtgatcaaatgggaagtatgcataaagcattttagtttggaaaccaaagtatcatagttgccttgaggaaaagtatttgtatgattgttttagttctgagctgaaccatcactttttttatggaacattatttttatctaaaataatctctgaaagacaactgtggccatacagactagtctatttaacattctctagaaaataaatcaagagacttagtcactttaaagaaatcagctattggctgggcacagtggctcactcnnnnnnnnnnnnnnnnnnnnnnnnnnnnnnnnnnnnnnnnnnnnnnnnnnnnnnnnnnnnnnnnnnnnnnnnnnnnnnnnnnnnnnnnnnnnnnnnnnnnnnnnnnnnnnnnnnnnnnnnnnnnnnnnnnnnnnnnnnnnnnnnnnnnnnnnnnnnnnnnnnnnnnnnnnnnnnnnnnnnnnnnnnnnnnnnnnnnnnnnnnnnnnnnnnnnnnnnnnnnnnnnnnnnnnnnnnnnnnnnnnnnnnnnnnnaactccacctcnnnnnnnnnnnnnnnnnnnnnnnnnnncagctatatcagtatttgttgccagtgattcaattcaagctttcaagcaaaaattcatcctgtgtaagacttcagtttgccatcatgagcacaatagtttcccaacacttcaagacctttc

SEQ ID NO: 256121 - DNA, 716 bp, Homo Sapiens
  misc_feature (124)..(143): n is a, c, g, or t
  misc_feature (163)..(329): n is a, c, g, or t
  misc_feature (378)..(411): n is a, c, g, or t
gaaaggtcttgaagtgttgggaaactattgtgctcatgatggcaaactgaagtcttacacaggatgaatttttgcttgaaagcttgaattgaatcactggcaacaaatactgatatagctggannnnnnnnnnnnnnnnnnnngctttgaggtggagtttcannnnnnnnnnnnnnnnnnnnnnnnnnnnnnnnnnnnnnnnnnnnnnnnnnnnnnnnnnnnnnnnnnnnnnnnnnnnnnnnnnnnnnnnnnnnnnnnnnnnnnnnnnnnnnnnnnnnnnnnnnnnnnnnnnnnnnnnnnnnnnnnnnnnnnnnnnnnnnnnnnnnnnnaccaatgtggccaggcctgtcttgcacttctgacctcaggtgatctgannnnnnnnnnnnnnnnnnnnnnnnnnnnnnnnnnagtgagccactgtgcccagccaatagcttgattctttaaagtgactaagcctcttgaataatatctagagaatgctaaatagactagtctgtatggccacaagttgctttcagagattattctagataaaaataatgatccataaaaaagtgatggttcagctcagacttaaacatcttacaatacttttctcaagcactatgatactttgtttccaactaaatgcttatgctacttcacatgacacaaggatatatctttaatgcctaaggccacgattaataaattaatatttttatgttccc

SEQ ID NO: 256122 - DNA, 737 bp, Homo Sapiens
  misc_feature (122)..(148): n is a, c, g, or t
  misc_feature (160)..(410): n is a, c, g, or t
  misc_feature (527)..(527): n is a, c, g, or t
  misc_feature (556)..(557): n is a, c, g, or t
  misc_feature (596)..(596): n is a, c, g, or t
  misc_feature (659)..(659): n is a, c, g, or t
  misc_feature (700)..(700): n is a, c, g, or t
  misc_feature (712)..(712): n is a, c, g, or t
gaaaggtcttgaagtgttgggaaactattgtgctcatgatggcaaactgaagtcttacacaggatgaatttttgcttgaaagcttgaattgaatcactggcaacaaatactgatatagctgnnnnnnnnnnnnnnnnnnnnnnnnnnngaggtggagttnnnnnnnnnnnnnnnnnnnnnnnnnnnnnnnnnnnnnnnnnnnnnnnnnnnnnnnnnnnnnnnnnnnnnnnnnnnnnnnnnnnnnnnnnnnnnnnnnnnnnnnnnnnnnnnnnnnnnnnnnnnnnnnnnnnnnnnnnnnnnnnnnnnnnnnnnnnnnnnnnnnnnnnnnnnnnnnnnnnnnnnnnnnnnnnnnnnnnnnnnnnnnnnnnnnnnnnnnnnnnnnnnnnnnnnnnnnnnnnnnnnnnnnnnnngagtgagccactgtgcccagccaatagctggattctttaaagtgactaagtctcttgatttaatttctagagaatgtaaatagactagtctgtatggccacagttgtctttcagagnattatttagataaaaataatgttccatannaaaagtgatggttcagctcagaactaaacaatcatacanatacttttctcaagcaactatgatactttggtttccaactaaaatgctttatgcatacttccnattttgatcacaagaatatattttttaaatgtcctcaaggnccaagatttaantaaattataaattttactgcttcgc

SEQ ID NO: 256123 - DNA, 696 bp, Homo Sapiens
cacaaggtgggtcatacccctagcatcctcatacctacctctcagacctcaaggcttccctgccccactggagatggcttttcttccccagagtcctcacaacccctcctgggtgtcatgtgatctacttgaatgctgtcaggcactagctattgagcttgtgccaggaccagaggccccagatgtgatgaactgaaatgatcacaccctgtttctgatgtaggtcacccgcacgccttatactccactcaagggtggacatccaaggggcaatgggggtttggggattcgccagaacacgcgcagcgattctttttgctgaggtacaggtgcattctgaatggggaagacgctgccagggagtgagggtccccacatttccgtggcgagcggacgtgcccctgtcggacaccctcctcctgcagcatgtaagccacccctccagctgaccaccaatctgacttccccaagcagtggatactgcggctatactggaagcggctgaaggagggtcctcaaagcagcccatgatagggttgaggaatctttaatctgaaaggctacaatccagaagtcactccaggcacagatgaaggcctcccctgaaagcagggccaccacctctttggctcacagattccggatgactccccatgcctgacattggccagattggcctttacctggctctggccc

SEQ ID NO: 256124 - DNA, 718 bp, Homo Sapiens
  misc_feature (480)..(480): n is a, c, g, or t
  misc_feature (508)..(508): n is a, c, g, or t
  misc_feature (519)..(520): n is a, c, g, or t
  misc_feature (535)..(535): n is a, c, g, or t
  misc_feature (537)..(537): n is a, c, g, or t
  misc_feature (587)..(587): n is a, c, g, or t
  misc_feature (598)..(598): n is a, c, g, or t
  misc_feature (600)..(600): n is a, c, g, or t
  misc_feature (604)..(604): n is a, c, g, or t
gccaaatcgcgagcggtgcggggcgggcgcgaccttcgaatgtaatatatgtttggagactgctcgggaagctgtggtcagtgtgtgtggccacctgtactgttggccatgtcttcatcagtggctggagacacggccagaacggcaagagtgtccagtatgtaaagctgggatcagcagagagaaggttgtcccgctttatgggcgagggagccagaagccccaggatcccagattattccagccatttggtgataccgggggcttccacttctcatttggtgttggtgcttttccctttggctttttcaccaccgtcttcaatgcccatgagcctttccgccggggtacaggtgtggatctgggacagggtcacccagcctccagctggcaggattccctctttctggttctcgccatcttcttctttttttggctgctcagtatttgagctatgtctgctttctgccctacttcagncagagaagaatcagtattgagggtcccntgctgaccttnncgtactcttgacccncnttgaccctctaattctggtggctaaggccaagccttgacaatggtccagnaaggccttggnangaanagtgaatctgtccaataattggaaagcctttggttaaaggctcattaagtacgtgggtaatttttttccctggggaaggaagattgatgggtagatgctttttcctttctaagg

SEQ ID NO: 256125 - DNA, 1520 bp, Homo Sapiens
  misc_feature (1131)..(1167): n is a, c, g, or t
  misc_feature (1169)..(1170): n is a, c, g, or t
  misc_feature (1175)..(1203): n is a, c, g, or t
  misc_feature (1440)..(1449): n is a, c, g, or t
gggaggaaaccttgaagcctgcccaacgatcgtgggcaggaggtggtttctggtttgttggggcgtgtgtatgtgtatttggggggactgaagggtacgtggggcgaaacaaaaccggccatggcagcagcggaggaggaggacgggggccccgaagggccaaatcgcgagcggggcggggcgggcgcgaccttcgaatgtaatatatgtttggagactgctcgggaagctgtggtcagtgtgtgtggccacctgtactgttggccatgtcttcatcagtggctggagacacggccagaacggcaagagtgtccagtatgtaaagctgggatcagcagagagaaggttgtcccgctttatgggcgagggagccagaagccccaggatcccagattaaaaactccaccccgcccccagggccagagaccagctccggagagcagagggggattccagccatttggtgataccgggggcttccacttctcatttggtgttggtgcttttccctttggctttttcaccaccgtcttcaatgcccatgagcctttccgccggggtacaggtgtggatctgggacagggtcacccagcctccagctggcaggattccctcttcctgtttctcgccatcttcttctttttttggctgctcagtatttgagctatgtctgcttcctgcccacctccagccagagaagaatcagtattgagggtccctgctgacccttccgtactcctggacccccttgacccctctatttctgttggctaaggccagccctggacattgtccaggaaggcctggggaggaggagtgaagtctgtgcatagatgggagagccttctgctcagaggctcactcagtaacgttgtttaattctctgccctggggaaggaggatggattgagagaatgtctttctcctctcctaagtctttgctttccctgatttcttgatttgatcttcaaaggtgggcaaagttccctctgactcttcccccactccccatcttactgatttaatttaatttttcactccccagagtctaatatggattctgactcttaagtgcttccgccccctcactacctcctttaatacaaattcaataaaaaaggtgaaatatannnnnnnnnnnnnnnnnnnnnnnnnnnnnnnnnnnnnannaaaannnnnnnnnnnnnnnnnnnnnnnnnnnnnccctcaaggatctttgccggggcgcgaaaaaaaagctattgaaagggccccagggtcatagtggtttcccggaaccccgtttttctggtaccaaaggggaaaaaacttgccgggccccccaaataggggaggccgaatttaattttccaaaaaccccggcgctcaccccggctttaaaatgaaacccgcgtggcaagtccccgggaaattttacccccccctaaaatgaggggggcnnnnnnnnnnggcgccccaaagggtcccttcttagaaaatccttctttttctcggcaaggaatcctgcgggctgtggaaac

SEQ ID NO: 256126 - DNA, 703 bp, Homo Sapiens
  misc_feature (41)..(41): n is a, c, g, or t
  misc_feature (49)..(49): n is a, c, g, or t
  misc_feature (105)..(105): n is a, c, g, or t
  misc_feature (118)..(118): n is a, c, g, or t
  misc_feature (138)..(138): n is a, c, g, or t
  misc_feature (187)..(187): n is a, c, g, or t
tggattctccatgaagcacattgcttcattatgtagaagcnacaggcanttcctccctaatgcagcaacatgagctctcaccattgcaaacacttcagcaattanagcatggagaaanccactgactcctccttcctnccgaagagatgctccaggaataaaagaaagaggtgtcatcttaacaacnccaactgtggaatttgcacaaggtgaagcagaacgattccggaaatttccatcacccactggacttgctttttcaactgtcatggctttagctggtggaaaaggatgagaaggaagtgaatctgaacacagttccagtggaaattgtaaaagttcttcattatctgttgaggctctttgcaatgacttttcaacaggggtttatgtggtttgtaaagcctgatttttgtcaaaagtgattgcgactgccgtgactgtaacctgaattaattcatcttcaggcagagatactgtaaaatttacatggcaaaggcagcaggggatcatagatcgtagtttaaagtacaggctcttgagcaaattttcacagagatcattaaagttcttattgagagcttgattagtcaggttgaggctgcttaatctgattactcttactgaagtgaacatctgtatttcagaggtccaattatttataccgggcataatttctgtattacaactataaaagcctgaa

SEQ ID NO: 256127 - DNA, 1418 bp, Homo Sapiens
  misc_feature (40)..(40): n is a, c, g, or t
  misc_feature (674)..(685): n is a, c, g, or t
  misc_feature (1224)..(1224): n is a, c, g, or t
  misc_feature (1235)..(1235): n is a, c, g, or t
  misc_feature (1290)..(1290): n is a, c, g, or t
  misc_feature (1311)..(1312): n is a, c, g, or t
  misc_feature (1329)..(1329): n is a, c, g, or t
  misc_feature (1335)..(1335): n is a, c, g, or t
gggatgcgcgcggctgaggcgaggtcgctcggcgcactgnttgcggggccattgcggggaccgcgctcaagaggctgatggccgagtacataacaattaacactgaatcctccggaaggaattgtagcaggccccatgaatgaagagaacttttttgaatgggaggcattgatcatgggcccagaagacacctgctttgagtttggtgtttttcctgccatcctgagtttcccacttgattacccgttaagtcccccaaagatgagatttacctgtgagatgtttcatcccaacatctaccctgatgggagagtctgcatttccatcctccacgcgccaggcgatgaccccatgggctacgagagcagcgcggagcggtggagtcctgtgcagagtgtggagaagatcctgctgtcggtggtgagcatgctggcagagcccaatgacgaaagtggagctaacgtggatgcgtccaaaatgtggcgcgatgaccgggagcagttctataagattgccaagcagatcgtccagaagtctctgggactgtgagacctggcctcgcacaggcgcgcacacaccgccaagcagctcagcattctcccccggcacacttagtgacagtgatgctctgtgctggtaccaaacaaggcagacttgcaagaaccacggcatcnnnnnnnnnnnncaaacctttcctacttcaaacaggcttctcttctgaaatgatgacttaatgtcgaatattgacagcttactgcagttttacagtattcctcacaaagggcttcaggtagattatcagagctgtcagcactacctctccccgctgaaaccagcagttcatggcttcctgtggattccctccctccctggagtgttgagggggtttgtacctgccagacttccaggggacgatggaatacccagaacgctccttctgaagaaatggggccctgtagctgcagcacaggggaagggcccggcaccctttctgggtccttcctggttccctgtgggccccatgaggagtccattacttcctttcttccttcatattttacaggcagatgcttttcttataatctaattacatcttttcatttgttatatattacaaaccatcacacttagaaatacttccaggaaatgctttttttgaaagtgtgaattaataaagaaatgggggtaaatagagaaagaaatttattgctgattggccaaggntgccggtgggnttcgtgccttgtaattcccaggctctttgggaaggcccaaggcagggtaaaatcncaaaggtcaaggaaatttgannaacatccctgggctaantacagnggaaacccccatgtcctggcttaaattacccaaaaatttttcttcttgggggcctggtgggggtgccccccccttgtaaaatc

SEQ ID NO: 256128 - DNA, 304 bp, Homo Sapiens
tttataggcgtgtgccactgcacctggcctcctttctttttctttaaaaatggtcataagctttgtaaaaagctagtttgctttaaatagaaagtagtgatttacctctgcattttattcactcaggttctataaaaaaagtctcagcagattttacaacattgaccttacctaagaaattgaaagcaattggagctaaaaagtcaaatcacttttcctctctattgtgttctgccaagaaactgagccttaatgacacagtcccccaaatacctagaagaatatatacttcagtggaaccccg

SEQ ID NO: 256129 - DNA, 722 bp, Homo Sapiens
attagcaaaacacagactttacagatctcattactatatttagagaataaatcttagagtaaaatgactttgtttcttggcttgaaccaaattatgtggagtttttataattagaaaactttattgaagagcttcagaaataatttaagtatcaatattcaatcttcaaaaactcttccagtacagtctatgacagctgcacagtaatacatattgtcttagattttcttaatattcacatctgccttctgttctttgaaattctttttgtgtttatgtttaaaaatagatatacaattcaaatatgttctaggtgaggactggttatttaaataacatatatatgctttacttacacctctctcggggttccactgaagtatatattcttctaggtatttgggggactgtgtcattaaggctaatggtggtttaatctaagaggaaaaaaatacatgcataccaaggaatatttttcagtttcttggcagaacacaatagagaggaaaagtgatttgactttttagctccaattgctttcaatttcttaggtaaggtcaatgttgtaaaatctgctgagactttttttatagaacctgagtgaataaaatgcagaggtaaatcactactttctatttaaagcaaactagctttttacaaagcttatgaccatttttaaagaaaaagaaaggaggccaggtgcagtggcacacgcctataaa

SEQ ID NO: 256130 - DNA, 419 bp, Homo Sapiens
  misc_feature (397)..(397): n is a, c, g, or t
ggctgagctaggtttgccatgaatcaatctgctgagtatatttcttggtaactagttcatctttccttaattcagtcaacaaatatgatatcaagtttagtaagatgatgacagatgtcatgtaatactccatctggaagattgtatgcttctcagcttccctaacttttcttaatctaccttaagcttcctttctgaaaggtttctgtctttcctaacagtctcttctttccgccagctacctcttgtgtttaagaattgagggaagatgagctaggaatcaagaaatacgcagaactgattcctgtcactggcgccaccctgccacttgcccagagctgtggtataaattgttttaataggctgaaataacacctgctctcaaccatgttaattntttattattgggattaataaat

SEQ ID NO: 256131 - DNA, 1158 bp, Homo Sapiens
  misc_feature (392)..(392): n is a, c, g, or t
  misc_feature (394)..(394): n is a, c, g, or t
  misc_feature (437)..(437): n is a, c, g, or t
tcctgctctgccggcgcttcctccagctgggtgacaaggcagttcagatccaacttgtcctgagcaaggctctcgttgagggcgctcagcttggacagggagtcctgcaggtaggcctcctctgccctcagcttggtcacggagagctcgagctccatgcggccagcctcagccttggtcagcgcctcggccacctcggtcttcttggcctgcagcatgtcccgttgcagcgtggcgcggctcagcgcctccctcacctccaccagctccttggccaggactgagcgcttcccttccagctgctctagttgtcttatggctgcgctcaagctcccggcgaacccgtgcgccattctgcaccgcctcttcctgctcttcctccagccggtccncntggcgctgcagctcctcctgggcaacctgcagcttctcccgcntctgcggcagctcctcggcctgctgctgggccacctgcaggctgtggaccaggttgctcttctccctggaccttcagctggcaaaagtgcagggcggagagaatcagggcaagcgagcgtggagtcgtctgagcaggccggggaggggcctctgcggggcgaacggcctcggcccggcgaggagcgccgcggtggagacggggtccgctggcccgagagcccccgcaggctgcggtcggacgctgttggacgcaggctgccgctctcagcgtcagacaggacggctgtgccaggtcccttaggtccgctgtagcccctctccgtcctctgtctccagggccgcctgctcctgtagccgcagggattccagggcctcaagcttctcggtgaggtccttgtcgacctgatccttctccagattctgcttctgaagacgcttcactgccaggcccagctctgtcactcttctgcagtgacgcctgcctcatgcagcacccaccagggaccctcctggcactgaggtcagccttgtccaggtcgctttgcatctgctgctgggacaggtccttctcgtggagcaccttgtcccgcagctgctcctccagctgggcctgcttctccagggctggctcgacccggctctctgccagccgcaggcctgtgctcattcccaggccggcctcctggacagctcccctcgccagctgcagcgggtccaaaa

SEQ ID NO: 256132 - DNA, 421 bp, Homo Sapiens
ccgtgtaatgaaaatggctagctccacttgtcctggccattcctaatggagaaggattccaaatgcagtacttagagtagttcttgctttagatctggaaatataggtagccagatacagtactatcagaaactctggttaaaatacacataaaagcttataaaaatggaaccttgaaatagtctcttaaaccacagaccaaaacatgtaggtggatgtgtatatacacgaatatgggtgtatctctgttcacacacacccagttttgaccattttgcttcattactacattatgataaatggtaaagcaaaaatcttatttaaaaaaagctgtagtaaacgacgcaatcagcagccaggtatagactctacatcccaaaccaaacacgatgctatatatttacaaagaaaatcattttcc

SEQ ID NO: 256133 - DNA, 503 bp, Homo Sapiens
  misc_feature (406)..(406): n is a, c, g, or t
gcaccaggtctctctgcaactccatcatctccttgaacactacaattagctgttctgaagcccagaaaattccatggacaccccctggaactgctctgcagttttactccaacctacacaatgctgaaacctcttcttgggtgaatttggtattgtggtgtgtggtcttggtgctccaggtcgtgcagtggaagtctgaagccaccccataccggcctctggagaggggtgaccctgagtggagctctgagacagatgctctcgttgggtcacgcctttcccattcctgaagaataagcggagtgcttcctgcagccgaagactccatgcccaagtgcctgtaatcccccccctcaaggccctgtttatgttgggagtcttagttttcctttcgttggggggtggnggggaaacataatgacaggcccccctccacctcttcctgcagctgtttttgtaccaaaatattatattactgtcttcatcttaatagataaaaagga

SEQ ID NO: 256134 - DNA, 1218 bp, Homo Sapiens
  misc_feature (1000)..(1000): n is a, c, g, or t
ggagttcaagcagatgtatggctaaccggaaacaggtgggtcacctcctgcaagaagtggggcctcgagctgtcagtcatcatggtgctatcctctgaacccctcagctgccactgcaacagtgggcttaagggtgtctgagcaggagaggaaagataagctcttcgtggtgcccacgatgctcaggtttggtaacccgggagtgttcccaggtggccttagaaagcaaagcttgtaactggcaagggatgatgtcagattcagcccaaggttcctcctctcctaccaagcaggaggccaggaacttctttggacttggaaggtgtgcggggactggccgaggcccctgcaccctgcgcatcaggactgcttcatcgtcttggctgagaaagggaaaagacacacaagtcgcgtgggttggagaagccagagccattccacctcccctcccccagcatctctcagagatgtgaagccagatcctcatggcagcgaggccctctgcaagaagctcaaggaagctcagggaaaatggacgtattcagagagtgtttgtagttcatggtttttccctacctgcccggttcctttcctgaggacccggcagaaatgcagaaccatccatggactgtgattctgaggctgctgagactgaacatgttcacattgacagaaaaacaagctgctctttataatatgcaccttttaaaaaattagaatattttactgggaagacgtgtaactctttgggttattactgtctttacttctaaagaagttagcttgaactgaggagtaaaagtgtgtacatatataatatacccttacattatgtatgagggatttttttaaattatattgaaatgctgccctagaagtacaataggaaggctaaataataataacctgttttctggttgttgttggggcatgagcttgtgtatacactgcttgcataaactcaaccagctgcctttttaaagggagctctagtcctttntgtgtaattcactttatttattttattacaaacttcaagattatttaagtgaagatatctcttcagctctggggaaaatgccacagtgttctcctgagagaacatccttgctttgagtcaggctgtgggcaagttcctgaccacagggagtaaattggctctttgatacactttttgcttgcctccccaggaaagaagggaatgcatccaaggtatac

SEQ ID NO: 256135 - DNA, 1080 bp, Homo Sapiens
  misc_feature (1047)..(1047): n is a, c, g, or t
cggaaggacacggcattaagatcatcagcgacggcatcatggtggcacggggggacctaggcatcgagatcccagcagagaaggttttcctggctcagaagatgatgattgggcgctgcaacttggcgggcaagcctgttgtctgtgccacacagatgctggagagcatgattaccaagccccggccaacgagggcagagacaagcgatgtcgccaatgctgtgctggatggggctgactgcatcatgctgtcaggggagactgccaagggcaacttccctgtggaagcggtgaagatgcagcatgcgattgcccgggaggcagaggccgcagtgtaccaccggcagctgtttgaggagctacgtcgggcagcgccactaagccgtgatcccactgaggtcaccgccattggtgctgtggaggctgccttcaagtgctgtgctgctgccatcattgtgctgaccacaactggccgctcagcccagcttctgtctcggtaccgacctcgggcagcagtcattgctgtcacccgctctgcccaggctgcccgccaggtccacttatgccgaggagtcttccccttgctttaccgtgaacctccagaagccatctgggcagatgatgtagatcgccgggtgcaatttggcattgaaagtggaaagctccgtgggcttcctccgtgttggagacctggtgattgtggtgacaggctggcgacctggctccggctacaccaaacatccatgcgggtgctaagcatatcctggagacgcccctcccttcctctggcccagcctacccttgtaccccatcccttcctccccagtctacgttctccagcccacacccctccaaagccccacctttaagtcctctcttctctattcctgaccctccctacctgaggcctatctgagactataactgtcatctagccccttcgaggttgccccttccccatctcaatttcaaacaggtcctgaaagtctgtgtccaattatgcactggccacccaacagcaccaattgtacattccctgcatccaantctgctcagcaggccctaagatgccttgagtct

SEQ ID NO: 256136 - DNA, 1066 bp, Homo Sapiens
  misc_feature (26)..(26): n is a, c, g, or t
  misc_feature (74)..(74): n is a, c, g, or t
  misc_feature (76)..(76): n is a, c, g, or t
  misc_feature (80)..(80): n is a, c, g, or t
aatatgttggttttaattcaaaaganacgatgatgccaatggtttggattgacagcagcttaaggaggaaaaananaaanagaaaaaaagacaaggctggtgacacccccctggcgtggttgacctggtcccagtcgcagtccctatgggacagcagagctgtcaaaacagaacccaatgatgacggctgaaaatcaagccagactgctgtgcggtcagcttgccgccgtggaatgccttgtgtcttggccatgtccagccaagggtacaacgtgcttgttcccgatcacccaggtttgccattggaagtcaaagacagaatcgcttcatggcactacagatgtggaaaaataaaaatctcagctagaaagaacgtccgatttggagatagcgggaggacacgaaggagtgggggccattttggtgctgagaggagggtgccccaacttcaggaggaccatgtgacggctgtggttgttttcggggtcacttgcagcacacacagcgtccccttgatgctcgatggggaccgcagacgggcctgcagacctaacccctggctgtggacaggagaggctgctccaggcttctttccttctcaatgctttacacaggatttccttcatttgtgctttcctttggtttaacagttaaaaaagaagagtgagggggcaaaatggtttgtcacttgtccaaaactgagagaagaggtggaagtgggcgccaaatctcctgggtgatgcttcctggtcctggcgatcggttgccttgctcagggtttgggagctgttgctcctggaaccaccgctggccttctgggacctcgcttccgtggtaggggacgtgaaccagcctcctggtggagctttgtgttgcagtgaggccacaaagcaaaggcccagaggcagaggcctgacactggctatggtcgacggtcacaccttgactccctctctctctctgaatatacaacgtgtgggtgggcccgttcagcagatgttacaggaaaaatagcaaatttttaacttattccatctccaaagttgaaaaagatcagacagttact

SEQ ID NO: 256137 - DNA, 601 bp, Homo Sapiens
  misc_feature (396)..(426): n is a, c, g, or t
gggaccccgaaaacaaccacagccgtcacatggtcctcctgaagttggggcaccctcctctcagcaccaaaatggcccccactccttcgtgtcctcccgctatctccaaatcggacgttctttctagctgagatttttatttttccacatctgtagtgccatgaagcgattctgtctttgacttccaatggcaaacctgggtgatcgggaacaagcacgttgtacccttggctggacatggccaagacacaaggcattccacggcggcaagctgaccgcacagcagtctggcttgattttcagccgtcatcattgggttctgttttgacagctctgctgtcccatagggactgcgactgggaccaggtcagccacgccaggggggtgtcaccagcnnnnnnnnnnnnnnnnnnnnnnnnnnnnnnncctccttaagctgctgtcaatccaaaccattggcatcatcgtttcttttgaattaaaaccaacatatcagcaatagtctgctctccccgggaatctctaacatgctctgtttacatcgataaatgcacttaaggaaaacaaacaaattaaagctcatcttaaagtccatcaaaaa

SEQ ID NO: 256138 - DNA, 713 bp, Homo Sapiens
gttcaataatagattcaataagctgaagcctgtttttctggtttatcaaaacaagtaaagcaatggccattacattctaatttgtaagcattttgtttgatggctttgagtagaaagtacttagctttgcctgtcctataggaggtccagccaccatctaaagtcagcactaaactatatctgttgccatttacgatacttttttccatttgtggaaacaagttatttgttataaccaaacatatattcaaatacagagggagcttttgctaaaagattagaaagtcaatatttcctaattggcaaggagaaggatttggtcaaagccaatgagaatttcttctatgatcagtctttccccaggagcttgctcctgtgaagattataactcacctgctgcagatgcgagtaaagttgacactgtgaagcaaagcatactagtatatatcaccatctcagggtaccccagatgaaaaggtttaatcaagactccctaaaccatgatttctcaacttcagcactattgactttgagggtagataattctttggtgtaggcgcttgacctatgcattgtcaatgcttagcagcattcctggcttgacacccactagatgctggtaacaatctcctgaccagtcatgacaacaaaaaatgcattcagacattgccaatgtcccctggggaagatcccatgagtgacttgccaggtca

SEQ ID NO: 256139 - DNA, 426 bp, Homo Sapiens
  misc_feature (403)..(403): n is a, c, g, or t
aatttgctattaatcaagtccttcatgagcaggtagccaggcaaccatgctgacacggtttataatgccaagaaagcatgcttcgaggccataagagctagcactctccggaggatatccgtattaataatgtagttctttatgtggtaggtatggtgctccacacaaaatgttaacaattccaatacaagtgccaatagttggacagtctgaaaatcatctttactaggtttgtcttctgttgtatttgctagtaaaggagctgttttattggcagtggctagcatgttctctgggtcaactaaagttcgaagcaggcccataagctggactgctcctccaagttcaggatctgtatcacaaatcatatgttctataatgaggttgatgagcaaaatatccntgcataattattttttgctctgt

SEQ ID NO: 256140 - DNA, 644 bp, Homo Sapiens
tcagaaagtatatgtgagatcaataataattccgaacatggagccaaactaactcagcaacaagacattagaaaggacagtaagacatcagaaagtatatgtgagatcaataataattccaaacatggagccaaaaacatgtttgctatatctaaacaaggaagtaatttggtacaatcaaagcatttgaatccaggcagcatttcagtgcagacatctttgacaaatagctcacaaatagataagccaatgaagatggagaaaggggaaatgtatggaaattctccaagatttttaggtgccacaaatttgactatgtattctaagatctcaaactgtcagataaataatctgcatgtgtcttatactaacactgatgttccaatacaagtgaatagttccaaattggttcttccaggaagttcaagtttgaatgtaacttcagatcatatgaatacagaaattactacttataagaagaaattgagtactaatcagccatgccataagactgtaacagatgaagctcagagcaaccttaacacaacagttggattttcaaagtttacatttaccacgatgaaaaattctcagattctttctcagtttaatcaaaattgtataactggaagtatgtctgatac

SEQ ID NO: 256141 - DNA, 1034 bp, Homo Sapiens
  misc_feature (659)..(659): n is a, c, g, or t
  misc_feature (692)..(692): n is a, c, g, or t
  misc_feature (877)..(947): n is a, c, g, or t
gctgactaccacccagggcagcggccgagcccatagtggcgtcagtgccgccggcgtccttggggtccagcggtcaaggctcagcccgctgaggggacccccccggagttggttccagcactggtccaggactggagagtttctcaaggaccttgaggaccccagaagcccttgcagcaggaaaggctgtaagggggggtcagcctagggcaggacctagggaggggaactttcttgatacgtatttgccttttcatcccatctagcaagcacagtgttaattttagaaattatagaagaaaaaatcagcaaggagtgtgggtgggccgaggcacaccaggcagctgatctgggtgcatgtgggccacagaccactctcacaaggttaaatctttaacaagagcctcatgtttgttaggagaaggtgggaccccagcccaagcacttccccattgcagcctggcatgaaatctttgccttttagtggggatcactcctgcccgagtcctggctgtggtggggactctgcaaggtgctaacccagcgtccatttctctttcctccgtactaacagaaccccggtgcctctgcccagttccaatagccggcagacgagagccatgtcccggggctccccttgccagccgggggtgtgcaancttgtggcctggaaggtgggttgggtgcttggnaaaaaactttgcagggaaagcctcccttgtgaaaggggaactcaacttgccccaattgagggacccctttcccccttttggcctttttttccctgcccggggaaaacatggaattgtgaaaggggcttgggggccctgggaaaaaaccttgttccctttaaaaaaccttgagggaaaaaggggtnnnnnnnnnnnnnnnnnnnnnnnnnnnnnnnnnnnnnnnnnnnnnnnnnnnnnnnnnnnnnnnnnnnnnnnggccctttttggtttggaaccccaaaaaacccccggggaaaaaagaaaaccccttggggcccctcttttggtttggaaccaaaaaaa

SEQ ID NO: 256142 - DNA, 506 bp, Homo Sapiens
  misc_feature (40)..(40): n is a, c, g, or t
  misc_feature (399)..(422): n is a, c, g, or t
tagctcaggcctgcagactgggctggtgcctcctccggcnttcagggtatgggagttggtgaaggggctttcaaaaaataataaggaaaaaaaggtaaagtctttggtagcttctatccactcagatcctggaaggcagcaaggttttgtggatctagattcattaggaatgtcttcttgtcagccaggccaggacccgggcttgccaagagcagaggccctcccagcaaccaggataccaccactttgggggctttgtgtacagaggtccgggtctgagacctcataggctgcagaaatctggggcagccaccatcaagaagcccctctcaggggccagaactcctttgccagcgtggatttctcaagtcgggactgcataattaaagcagttgcagnnnnnnnnnnnnnnnnnnnnnnnncccaaaaatgatttgtagttgtgtgtgcagcacttcgccctgatatgtgtgctctacaataaaaaccaaatctaatatattttg

SEQ ID NO: 256143 - DNA, 757 bp, Homo Sapiens
gagcgagacagccagcaccttgcagactgactgcgtgggaggcgaagtcccaggacagcccagaggggggctacagagaggagtcggctgcagcagagggcaggagccccagcttagccctgagcgccagcgcgaggaccagggcctgccactaagcccgccccgctggccgccagctgcccgtccccagagccactgcagcaggagtcgggccctgcctccctcccagcagggaaaccccgcccgctgccaggccatcctctctgccagaggctttcatgagccccaaggctgaggccacagctcctacccctgcccagcagccctgagctcagctgcaggaaggacatcccagaagccatggctcctggggcgcttccaggcattctgacctgccccgacaccagaaccctggtgctggtgggccactagcgtctgcagactaagcaggtgctggctcagggttcatcggtctgccttggccactgggggaccagccctgcagaccactctgacaagtcttcagcccacaccctgccagccccacagattttatttttgcacataagccataaccaatcctcaaggctggcacaggcctttggggaagccctggaaccttgtgaagaccctggaaacctcatgaggctgtggccaacccctggcccttgccccacacagaccaagccctaaatgtcggtccaggccctgtgcaccttaccccagagacagaccttttttgtaagaatttgttaat

SEQ ID NO: 256144 - DNA, 806 bp, Homo Sapiens
  misc_feature (218)..(246): n is a, c, g, or t
tcttaaggggacccacaagtattgccctttaacaagacttcaaagttttctgctgtaaagaaagctgtaatatataataaaactaaatgttgcgtgggtggcatgagttgaagaaggcaaaggcttgtaaatttacccaatgcagtttggctttttaaattattttgtgcctatttatgaataaatattacaaattctaaaagataagtgtgtttgcnnnnnnnnnnnnnnnnnnnnnnnnnnnnngggacaagcatgttgattctaggttgaaaatgttataggcacttgctacttcagtaatgtctatattatataaatagtatttcagacactatgtagtctgttagattttataaagattggtagttatctgagcttaaacattttctcaattgtaaaataggtgggcacaagtattacacatcagaaaatcctgacaaaagggacacatagtgtttgtaacaccgtccaacattccttgtttgtaagtgttgtatgtaccgttgatgttgataaaaagaaagtttatatcttgattattttgttgtctaaagctaaacaaaacttgcatgcagcagcttttgactgtttccagagtgcttataatatacataactccctggaaataactgagcactttgaattttttttatgtctattctgtagtatttttatttggatatttctagtatggcacatgatatgagtcacttgctttttttctatggtgtatgacagttagagatgctgattttttttctgataaattctttctttgagaaagacaaatttaatgtttacaa

SEQ ID NO: 256145 - DNA, 1122 bp, Homo Sapiens
gagacaaaatatcagacagcaatgaccaagagtcagcaaattgtgatgcaaaagcaatatttgctgtgctcacaagcgtcttgacaaaggatgactggtggaatcttctgttgaaggccatatactccttatgtgacctatcccgatttcaagaggctgagttgcttgtagattcctcattggaatattactcattttatgatgacaggcaaaaacgcaaagaactagaatactttggtctgtctgctgcaattctggacaaaaatttcagaaaggcatacaactatatcaggataatggtaatggaaaatgtcaataaaccccagctctggaacattttcaatcaagttaccatgcactcccaagatgtacgacatcatcgcttctgtctccgtttgatgctgaaaaacccagaaaatcatgccctatgtgtcttaaatggacacaatgcatttgtatctggtagttttaagcatgcgcttggacagtatgtgcaagcctttcgcactcaccctgacgaacctctctatagcttctgtataggcctaacctttattcatatggcatctcagaagtatgtgttacggagacatgctcttattgtacagggcttttcctttcttaatcgatacctcagtttacgtgggccctgccagaaatcattctacaatttgggccgtggctttcatcagttggggctgattcatcttgcaatccactattatcagaaggcccgggagctccctccacttgtggttaggagggtatagaacttgaccagttagacttacgaaggagatattgcctacaacttgtctctcatctatcagagcagtgggaataccggaatggctcaaacgcttttgtatacctattggtctatataaagcaccgcaactgagaacagagcaatggcagctgctgtgtgaggaccagtgtcttctgtctcagggcttattatttgtaactccaaaatagaaatgacaatttcagaattacctaacaaacagtgtatttatttttaatatgtgataatgatcttgtggtatatatgcaaaattattcctacaaaaatttgtatattgggtctgtcattttcctttcacattctatagtgaattg

SEQ ID NO: 256146 - DNA, 302 bp, Homo Sapiens
  misc_feature (111)..(111): n is a, c, g, or t
  misc_feature (123)..(123): n is a, c, g, or t
  misc_feature (126)..(126): n is a, c, g, or t
  misc_feature (147)..(148): n is a, c, g, or t
  misc_feature (160)..(160): n is a, c, g, or t
  misc_feature (167)..(167): n is a, c, g, or t
  misc_feature (207)..(207): n is a, c, g, or t
  misc_feature (210)..(210): n is a, c, g, or t
  misc_feature (214)..(214): n is a, c, g, or t
  misc_feature (217)..(217): n is a, c, g, or t
  misc_feature (225)..(225): n is a, c, g, or t
  misc_feature (228)..(228): n is a, c, g, or t
  misc_feature (231)..(231): n is a, c, g, or t
gaaaaatagtgtattcgaccccaagctagctcaaaggcttacacgtccatttcaacattgggaacaattcactatagaatgtgaaaggaaaatgacagaccaatatacaantttttgtaggantanttttgcatatataccacaagnncattatcacatnttaaaantaaatacactgtttgttagggaattctgaaattgtcattnctntttnggngttacaantantangccctgagacagaagacactgggcctcacacagcagctgccattgctctgttctcaggttgcgggggcttt

SEQ ID NO: 256147 - DNA, 451 bp, Homo Sapiens
aatttaaagtatggacatttagcctttcctttttaacatcgaatgagtttattacacttgagagatttagattggaaaatttcattttatttgaaaagtatattttcaattagattgctgtccagtgttacttcatgagtctttttcaattcagccaaattttatataacataatgcaaatgaagttattaccttttgcatcacaatttgctgactcttggtcattgctgtctgatattttgtctctcgatactttaataagataaagatgcctctctccagacttggaactggatatcaaacaaacttgggctcgattcattgctacctgaattaaagatgaagatttcagggtctttaaacaataactgtgttgtttagagacaaagtcttgttatgttggctcaggctggatttgaactcctaagctcaagtgatcctctcaccttag

SEQ ID NO: 256148 - DNA, 963 bp, Homo Sapiens
  misc_feature (65)..(65): n is a, c, g, or t
  misc_feature (68)..(68): n is a, c, g, or t
aacataaaataagaagtcatctatcatttcatatttaccaaccaccagcggaacatagatgcacncanacataaaaggacttaccaatgacgtgaaaaggtgaccaaaatcaattcccacatgacacattcaaccacactaagtgctgcactgtatctaagggtaaacggctggggtgctgatttccaaacgatggtggtgtgacgcggcctcatgtgaaagcatcactcaagaagtgacctctgtgtgataccgacagacagacaggttttaaaaataatgtacccacaagaatttagcaagactttatagtatgtgctagacttaccaatactttggaattcaatgcaaaagtctaatccaatttggacctccactgtgtaatactgctaaaaatattatcaacataatgtttgaacataaagttggcctatatttttaaaccacaggttgttagcagatgctttttgtcctgaaggataatactaacaattatatctaccgaaatgaagtgacccaatcttaagctactactaatataaaatacataattgacagatttattgtattttaatgccataaagtaaaaataaatgagaattcaaataagcaacagatggatggaatgactattgtaagggcagttgagtttttgatgtcacctcccaaactttgcaagtaacaactttttaggaggtcaatggtatttccattcttcccccaactcccctcagtaccgcaaaacctccaaatctaagtacttgtcagtattgtatcttcacatatatattaagaaataggaaatacaaatcatatccacacatttagtcaaaaactcccaaatgctgagaattaggctactccctttaaagacagggcacttggcataattgtaccaagcaccttggtgttctgaacgtcctttttttctctgattatccaacagtgacggagaaatgtccc

SEQ ID NO: 256149 - DNA, 917 bp, Homo Sapiens
atgagcaccgcacccggccaataaaatatatttctgtagttgaattgaaaatagatatatctctattgctgaattctaataatcttattcactctttaaattgtacatacaggaaaattaccagagttcttttgaacttgctttctcaaaattcatataaaattctcaaaattcatataagctatccaagtaacactattaaagtcttaagtacaataatcttataaagcaccttgtttcaatatatctcccaagttaagaagaaaagccaatatatggcttctcttttactattttacaaggcagggttttatttgtatatgttggttgtttcaagccttttcacgtaatagtggttctataatcaatgtaggcaagattgacagtaagatgtgtaagtatggatcagcagccatgttgagactcaggccctttaaggatgcaagagagatccagttaagttttcattcctcaggttggataaaaactaaacatacatacattggagggaaacaaacaccaacattatgatggctttgttgaccactgtggtgtttagctctattttaagacttttctacatgtagccctctcaactcaaggtgcagcaaatcacttccttgttaataatgtgtgtgtggatcttatcttggctgtgtctgttttgtaaccaatggtccaaagcctcaaggccactgccagcacactgccacatgcacttcgttgtcctgttaacccttaaagaactcagattaccaacgctactacccagattcataaattacttgttgtcatatgttgcctttgatgtcttttctgaagtgtaatttttttctgtctggaatctagaagatactgatctgaaaaaattagttgataatttcctaagagttatttcaacagattttaatattttt

SEQ ID NO: 256150 - DNA, 628 bp, Homo Sapiens
gaatttacactgaggtgcagccctcgtgtccacaatgctccgtacccgagtgtggctgccgtgtggatggcacagcctcaggggccccccttgtaaagttaacaaattccgaaggaaaagacttctgtggtggtgttataatacgggaaaattttgtactgacaacagcaaaatgttcactgttacacaggaatattactgtagtccatgtgcacatgcggtatgacgcggacgcgggggagaatgacctgtcactgctggagctggagtggcccatccagtgcccaggacctactgtgagagaagcagcgtggcggccatgcactggatggatggaagtgtggtcaccagagaacacagaggctcctggtttctcacgggggtcctgggctcgcagccagtaggagggcaggctcacatggtccttgtcaccaaggtctccaggtactcactctggtttaaacagatcatgaactaactgaaactcagctagccagaatgaacaacacaaccggaagcgggattccaagctggcactgccactgtggagggcgctgaaacttcatcacacactgagaagccgtcacagccccagaccacccgcttggcccacgcagcagcagagccg

SEQ ID NO: 256151 - DNA, 913 bp, Homo Sapiens
  misc_feature (274)..(274): n is a, c, g, or t
tttaaaggtaaagttaacaaattccgaaggaaaagacttctgtggtggtgttataatacgggaaaattttgtactgacaacagcaaaatgttcactgttacacaggaatattactgtaaaaacatattttaacagaacgagccaagacccgctgatgatcaagataacgcacgtccatgtgcacatgcggtatgacgcggacgcgggggagaatgacctgtcactgctggagctggagtggcccatccagtgcccaggtgcggggctccccgtngtgcacccctgagaaagacttcgctgagcacctcctcatcccacgcaccaggggcctcctcagcggctgggcacgcaatggcactgacctgggcaactcgctgaccacgcggcctgtcacacttgtggagggggaggagtgcgggcaggtcctgaatgtgactgtcaccaccaggacctactgtgagagaagcagcgtggcggccatgcactggatggatggaagtgtggtcaccagagaacacagaggctcctggtttctcacgggggtcctgggctcgcagccagtaggagggcaggctcacatggtccttgtcaccaaggtctccaggtactcactctggtttaaacagatcatgaactaactgaaactcagctagccagaatgaacaacacaaccggaagcgggattccaagctcgcactgccactgtggagggcgctgaaacttcatcacacactgagaggccgtcacagccccagaccacccgcttggcccacgcagcagcagagccgccgtttgctgggttgtttaccgagcactgtgacctttctttccctggaactctttatctcaatagagaccttaaaagaaaacatgagatacgttaaataataaaataagataatctgtcagtcat

SEQ ID NO: 256152 - DNA, 938 bp, Homo Sapiens
  misc_feature (689)..(689): n is a, c, g, or t
ctgtgtctatgaagaagcaagagaagtgtttgaaaatgaagtagtcacttattaattcctcgggatgaggtgcgtgggtgggcttaggacgcttcacgaccccagctcagcggatgccaagcctctggctccaggacccacggtgtctctccagggaagggcagctccgactctccccaaggaccaggcggctccccgtgcatctcccagccctgcctccacaacggctcttgccaggacagcatctggggctacacctgcacctgctcccccggctatgagggcagcaactgcgagctggctaaaaatgaatgtcacccagagcggactgatgggtgtcaacacttctgcctcccaggacaggaatcctacacgtgcagctgtgctcagggctacaggcttggtgaggaccacaaacagtgtgtgccccacgaccagtgtgcctgcggggtgctgacctctgagaagcgtgcaccggatctacaggacctcccgtggcaggcctctaacacaattatctcctgcctgagttgaggtgcagccctcgtgtccacaatgctccgttacccgagtgtggctgccgtgtggatggcacagcctcaggggccccccttgtaaagtttaacaaattccgaaggaaaagacttcttgtgggtggtgttattaatacgggaaaattttgttactgnacaacagcaaaatgttgcactgttacacaggaatattactgtaaaaacatattttaacagaacgagccaagacccgctgatgatcaagataacgcacgtccatgtgcacatgcggtatgacgcggacgcgggggagaatgacctgtcactgctggagctggagtggcccatccagtgcccaggacctactgtgagagaagcagcgtggcggccatgcactggatggatggaagtgtggtcaccagagaa

SEQ ID NO: 256153 - DNA, 395 bp, Homo Sapiens
gagccctgctcaggtttatcattgagatcatttttcttatttaagttatagtaataattccaggccacttctagcatcctaagtttagaacaatgatggacaattgtctcttttgtatgctcacatttaaaaaatatcagacctgtacagaaagtgacaacatacaattccagattcatgtctgaaattcctattagaattactatttagctacatgccctttaataggacaaatgataaagaagctatggaagatcactgtgctccatgacatcattttcagccttggttctgcacatttatttgcataaattacaaagacagggaaatacagttgttttattttctattaaggagtatctgggttgaaagtggttatcatggtgaattcattc

SEQ ID NO: 256154 - DNA, 402 bp, Homo Sapiens
ctgaagcccaaattccaagccattaaacactgctattcgtggctgatatttctgtaatttctgtactagaatacgtcctccttcacgaaattctttactggagagatctttgctgccgggcgtggtcctttccaccatgttggtaaatccaataccatacttccctggtagagtgtgatcatccatatggttcagctggacctcactgagccctgacataaacaaacacttccaaaaatggtttccaggtccagggtaatgatgccctttgtaagcagccattagtcccgggtttatgccaataatgacaatgtccagattgaaggtcaaaatatcggggagagtcttggtcagaagttcagcttctgaaacaccattaaaacggtctacttttcctctgcc

SEQ ID NO: 256155 - DNA, 382 bp, Homo Sapiens
  misc_feature (37)..(37): n is a, c, g, or t
cctgtattcaggcccaatcaataaaaaaggaaaaaanaaagtataaccagtggtgtgaagtgttccataactgtttttcaaataactgctctacgaacaaagaatctgaatgaaaaaagggtcttctctaaaccagcaatttaaggctttgcgcttatgcaattgatcctgtcactctatagaagaatatacatgttatctggaaacaggaattccacattggtgttttagcttccttatatttattgtactgaacattagaaaatatatctagagtctttcctcaaaatctaataatgttttaagagcctccctagcattaagtgtaaactaccctgggtttgactattttgcctcctccttttaacagggcacatcatct

SEQ ID NO: 256156 - DNA, 1078 bp, Homo Sapiens
  misc_feature (54)..(54): n is a, c, g, or t
  misc_feature (151)..(151): n is a, c, g, or t
aatatctcaaaattgagctaatgaagggttgaaagaggtaggagaacgcaggtnttccaatgaactccctcagggcagcagaatcctcaatcatctcgtccatgaagaccaaaagaaagatataagggaaaaaggaatggcagatctgttntgcatcctaatttaaccttctacacaaaatacttcattaaaagcaaataaccaaacacaagatagtaagcttagaaaacaagcctcaagaaaatgaaacttctgcttctgtaaaatcacatcttcatcaattgaatttaaatcacttagtgcattaacaatgttacaaattccaataatgtcagacatatggatgatattcaaaataaagtacaaaaatacatttcaaaatcaaatataaatgactttatggttatctgccatgctcccctttaatttggcctgatagtctacatttgactgtaattataataacatctgtaatttcaagtacaatagtacaatcataataattttgaagaacgtatgacctaggaccccaaaatgcaatccaatatacaatttggagtatggtttactttttagtgaagtttaatactaattgaagtactaaattgaacaaggcccagtactctgaagtactaatctcaagtatttgatcccatgtaagaaacagaagggaatttttaaggcaattttggtattccgaaatattggggatctaccttaattttctattattcccctcaagtctcaattgaatatttccatttttttaaaaaaggggaaatttcttaggttttttcctcactacaacaaagtaattcaccaaaaatattctcaagtacaaaaacccaaatggtcctctattacttagccaagatataattttctggtccctaataatggtcactttaggagtacttattcaaattctaaaatagcagcttttgaaattaaggcacattgctttattcttacctgtttttctattagctaactattttattaaagttcgtaagagcatttcagacgtaggcatcctcaaaggccttttgtaatgtaagaagaattagcatgaacattc

SEQ ID NO: 256157 - DNA, 686 bp, Homo Sapiens
ggggctgcggcgctgcggccgacgccgggtccgcaccaactgtctccccctcccagcttcttacctcggcttcctactccttcccccgcccgcccagcaccgccagcccgggagagctgccgggagttccccgggagcctcaggtggtgactatcctgttgagaagcaaaagatactttgcaagtaaaaaatatgcctcccaagtttaagcgccacctcaatgatgatgatgtcacaggttctgtgaaaagtgaaaggagaaatcttttggaagatgattcagatgaagaagaggacttttttctaaggggaccatctggaccaagatttggacctagaaatgataaaattaagcatgttcagaatcaagtggatgaagttattgatgtcatgcaagaaaatattacaaaggtaattgagagaggggagagactagatgaactacaggacaaatcagaaagcttatcggataatgcaacagcttttagcaacagatccaaacaacttcgaaggcaaatgtggtggcgtggatgcaaaataaaagccatcatggctttggttgctgctatccttttgctagtgattatcattcttatagtcatgaaataccgtacttgatttgatgacagagatcttcattaaacaagatctgggacagtaataaaagattgctgcataatcaaaaa

SEQ ID NO: 256158 - DNA, 953 bp, Homo Sapiens
ggcatgcaggtgtgctgagtggtgagggacaagtgaaccagaaaacagcaaagcaggaaagcaccaaaaggatgcaggccaggggccgtacagttagcaacctgcaactctgccagacctgcagaatggcaaggggagccgccagaggactagcaccctccctaaaaagatgggccaaccagacagtggaggacaaggggaggcaaggcagaggacaggcaaacggtcacctgagaaggacctagagtaccatactgagttctaccccagcctcagcagccttctaccatctgtcctcagtgaaagccatgctgtgccactgtaccactcaaaggttgcgttcctgcttctacaggggtggactgagcacttatttttatcatgatcaattggtatattataaataagagacaaaagtataccattcactcaaaatagtgacagatttttcctaacatattatcattcttaacattacaaaagcccatctccttgcccatgggaattactgcagcacaggcggtcatcaacacattagtctgctttgtctgtactaaaacctcttcaaaatacatatgtgaagcctttgcccccagcctcatgagaagacctgctcatagggaggagtccacaaaaatgagctctgtgcaagggattcctttgtttgcccagccccagcagtggagcatcagtttccttctgtaaatatcagcttttaaaaaatactggttttcaggaaataaatgactagtgcatagaagcaggtgtatttacacggaggaatcgacaggctgtaatttaagctaagcttgcctgaagcttccttcctaagattctggaaatttagggttgaggaactacagtctaccagaggaagaaagaacccttcctaagttggaaaagccggttttaaatgtaggcacaaggttcgtgtgacttaccaatttgccaaa

SEQ ID NO: 256159 - DNA, 353 bp, Homo Sapiens
  misc_feature (273)..(282): n is a, c, g, or t
ggtagactacacttttattaatgcagcctaaaattaagtttataagcagcaacattaaactattagctgtttgaatacatagctaaaatgtactccctcctcccctaacataaacatgtagccaactcttctcccctcagcctgtacttttccagttgatttttgtttagcctaattgtaggtttcacatttctgcttttttcttttactcatatgaaaacctctggccctttcatcgtggggcatgaaccggccaagacacctgataatagnnnnnnnnnntcatagacaaacatgtagcaaccatcagaccatggtgaatgtaaagaatagaccctcatgaggctgggcgc

SEQ ID NO: 256160 - DNA, 1033 bp, Homo Sapiens
  misc_feature (115)..(115): n is a, c, g, or t
  misc_feature (141)..(141): n is a, c, g, or t
  misc_feature (149)..(149): n is a, c, g, or t
  misc_feature (173)..(173): n is a, c, g, or t
  misc_feature (187)..(187): n is a, c, g, or t
  misc_feature (261)..(261): n is a, c, g, or t
  misc_feature (320)..(354): n is a, c, g, or t
ttacatggtttaatatctcattagaaagaaaacagagttcatagagaaagttccaaaatagattttcttaatacctgaacttaggtaaaaagctgtggtatttacttgtggtatngtcattagggagcccctctacccaancagaaagnaaggctcacaagagcacaggtgtntgttgtaatggaanataatcccgtcttattttcatactcagcaagttacactatcgaaagcttacagattattaaactagatattatngtaggatcaaagataggggcctcatagtatatattaaaaatattatataattagcatgnnnnnnnnnnnnnnnnnnnnnnnnnnnnnnnnnnnttattgctttgttggtgctgttagtgatcatttttagtgattgcccacaaaaggaacaatactggatatgaggaaattgatataatttatcttttcaagcatactgtgggcctgtgggttgcagtaaaaagacaaggagggcctgagtgatatgacccttcagatagggaactcacagacggccagatggcaggtggagcaggggacgtcattccactggccatttttcagtagcaatacacaatcttcatcagaaccagcattgttgggttcaccctcgttccagtttgtgtaggtcagtctatttcctgtcagatccacaaactgcccttctgtcttctcatcagtgatgcccaggaaggcttcctccttgatgagattctgaatggctccattctctgcagcatcaaaggtcattatttcaccattggtcaggaagaacttgttcccaacttgtttgcccagagagaaggtcagccactttttgatacgtgccatttctgtttgcagagcttttctttctgaggcagccaggctactatcaccatccggactttttccagggtctcctttttggccctttggtcctggtgacccagaaggccctggatttcctggaggccccaactttccaggggggccctgtaagcctctgagcccttggcctggttcccccttt

SEQ ID NO: 256161 - DNA, 722 bp, Homo Sapiens
  misc_feature (183)..(183): n is a, c, g, or t
  misc_feature (392)..(408): n is a, c, g, or t
ggtcaaggtatcatcagccattatacttgagttagaaacccggaattaccataaatttaaaaatatacctgctgttgaataaaacattgactaatatataagattctgatatataatacggcattctctcagaacagagggctgatgggcatttccataaatcaccacctagtcaccaattantttgaatgcctactatgtctcaggttctacatgaggttcctttttcaacagtctttgtaatagtatgatagggattaagaccagataatctgtacctcgaatttgagcaagttcctaaatcctactaatttaagctacttgcaaagaagtatgaataatacaaaaccaaaagaaagaaatagcaaatatcctttggtgttacaatgtgnnnnnnnnnnnnnnnnntgaaacaggacagtattaactccttccttctgaagctgtactctcccaagtctgacgtctgtgtgctgccatcttccattaacatttaaaacttctttcaccttaaaaattttgttactaaagactaattttacaaatgtgagactgtataaatcaaagagaacatgtaattaatttagtgtggtctgatttctaaatgtatgaaacctagaagagaagcagcttaatatggtagcattctgtatccatgttggatgttcaccatctctgcatgccagacatcagattattactgtggtgactcttgactttac

SEQ ID NO: 256162 - DNA, 1675 bp, Homo Sapiens
  misc_feature (516)..(516): n is a, c, g, or t
  misc_feature (1138)..(1138): n is a, c, g, or t
ccaggttgacaggttttattccacccccttccatccccatggccaccccaggcaggaggagacaggtgtgctggagtctggtcactttggggcctggcgtgggcagagcccactgggtttacattctctgtgggcaggtgtggacaccagagggctggggcaggaggagcgtgggagcgagcggccgacccccgtctctggcccggcccctgggtaaacgctgactcagatgcctgaaacagacctgggccgagcaaggaaggctgatggtatttccaaccaagacagaaatacaaagtgaccaaggccagtgacgaggccgacagggctggcgggacgggacgcagtaaaaaagtctcactcacacacacgccacatggacacccccgcacacagggacgtgtcagtaaaaactcaaggccagctgtgaggcctcacacgacactctgccggcccccagagccctccaagtcggacatgccagagccccggccccggccaaagtcaatgaaaatnccttcagaatccgagtccacggactccaggatctggtccaccaggttctccgggctggagcggggcagggagctgcgggtgggatccaagccctgctcagggggctgggtcgtggggtacagtctgctggggcagggcctgagtggggcgccggggaggacctgaaggtcccggtggggccctggccgggcgggtcggagaagccctgaggctcggggcaggacgtcatctccgacacagagtgcctgcggatgctggtaccgccggccgccgcgccctccgccctcgtgctcctgcacggggttcagcagaggcgtgttgtagctcttggagcgcaccacagggttcttggccagcacgtcccccgagcgggagcggcgggaggaggcgcttttccaggatgcaggaatgggtgaagggcccctcgctggagtggaggccgtaggtgcccaggtatggcgacaccaccttctggaccagcgtctccaggcgcaggtagtcctcagtcacgcccctggactcatgtaccccctgcagcaccagcagcatctgcacgatggcagggggcacgcgggcatgagcccgggccagcgcatcctctagcttcacactgagggtgatngcattccggaagtgcagcagggccagctggcgcaccgatggctccttgccctgcaccgggtagaagatggcctgcagcatgggcagcacgtcactgaagaagaagtcccaggtctctgccagtgagtccagcagcttctgtccctcatagaagcgaatcttgtcccgaaggatcaccatgccttttgtcagcagctggttctgcaggtactccgtgaagaaggaccccagctctgtcttcaacagctgctgttccaggtggcgttggcgcaggcccggcgctgctgcgtgccccgctcgtccgcggcggcggccggctctctcttgcccaggtcactgaggctgggcgaactcatgaacttcaaccttgctgggtgccgagaggactcaggaggtgggatgctgccagggtgggcacaggtggaatcccagcccacgggtctcctctgctctgcgaccttggctgaggtctgcaccctcctgggggtgagctctgaaaccctgctcagcactaagcacactggatgcctggccttgg

SEQ ID NO: 256163 - DNA, 1211 bp, Homo Sapiens
  misc_feature (1196)..(1196): n is a, c, g, or t
  misc_feature (1202)..(1202): n is a, c, g, or t
ggcctgggtggcgaattcggcacgaggagcctgcggcggcctcggagcgcggcggagccagacgctgaccacgttcctctcctcggtctcctccgcctccagctccgcgctgcccggcagccgggagccatgcgaccccagggccccgccgcctccccgcagcggctccgcggcctcctgctgctcctgctgctgcagctgcccgcgccgtcgagcgcctctgagatccccaaggggaagcaaaaggcgcagctccggcagagggaggtggtggacctgtataatggaatgtgcttacaagggccagcaggagtgcctggtcgagacgggagccctggggccaatggcattccgggtacacctgggatcccaggtcgggatggattcaaaggagaaaagggggaatgtctgagggaaagctttgaggagtcctggacacccaactacaagcagtgttcatggagttcattgaattatggcatagatcttgggaaaattgcggagtgtacatttacaaagatgcgttcaaatagtgctctaagagttttgttcagtggctcacttcggctaaaatgcagaaatgcatgctgtcagcgttggtatttcacattcaatggagctgaatgttcaggacctcttcccattgaagctataatttatttggaccaaggaagccctgaaatgaattcaacaattaatattcatcgcacttcttctgtggaaggactttgtgaaggaattggtgctggattagtggatgttgctatctgggttggcacttgttcagattacccaaaaggagatgcttctactggatggaattcagtttctcgcatcattattgaagaactaccaaaataaatgctttaattttcatttgctacctctttttttattatgccttggaatggttcacttaaatgacattttaaataagtttatgtatacatctgaatgaaaagcaaagctaaatatgtttacagaccaaagtgtgatttcacactgtttttaaatctagcattattcattttgcttcaatcaaaagtggtttcaatattttttttagttggttagaatactttcttcatagtcacattctctcaacctataatttggaatattgttgtggtcttttgttttgtctcttagtatagcatttttaaaaaaatataaaagctaccaatctttgtacaatngtaaangttaagaat

SEQ ID NO: 256164 - DNA, 779 bp, Homo Sapiens
  misc_feature (708)..(708): n is a, c, g, or t
ggatactaaaattaacacaagaggtgcccgagaatatcatgtccagttttttagcaaccagccagagagggcgtgggttcatgaaaaacgggtacgagagtataaaggtcataaacagtatgaagaattactggctgaggcaaccaaacaagccagcaatcactctgagaaacaaaagattcggaaaccccgacctcagagagaacgtgctcagtgggatattggcattgcccatgcagagaaagcattgaaaatgactcgagaagaaagaatagaacagtatacttttatttacattgataaacagcctgaagaggctttatcccaagcaaaaaagagtgttgcctccaaaaccgaagttaaaaaaacccgacgaccaagatctgtgctgaatactcagccagaacagaccaatgcaggggaggtggcctcctcactctcaagtactgaaattcggagacatagccagaggcggcacacaagtgcggaagaggaagagccaccgcctgttaaaatagcctggaaaactgcggcagcaaggaaatccttaccagcttccattacgatgcacaaagggagcctggatttgcagaagtgtaacatgtctccagttgtgaaaattgaacaagtgtttgctcttcagaatgctacaggggatgggaaatttatcgatcaatttgtttattcaacaaagggaattggtaacanaacagaaataagtgtcaaggggcaagacaggcttataatttctacaccaaaccagagaaatgcagtagaaa

SEQ ID NO: 256165 - DNA, 406 bp, Homo Sapiens
agtatttcagcaggatctgctggcagggtttttttgatatatttgtttgcttatttttaaattaactgttttgagctttgaatacttaaggctttagagggagaacccaattttcaattatgttggctttttataaagcttgagttatgtaagatttaaataaaagtttgctaccaagatgattgccttattgaataggtcactattaaattcctttaaatgttgatatctgccatttgtggaaacaacgtaaattctacttaagtgtaaacaaggcaagcctcagaccagcaataaattactcagtttggataacattattttgtgcagttaatcaaatttgccaaagtctttatctgcccctataacaagttgagtaaaaataaaaggtattttttagccgccc

SEQ ID NO: 256166 - DNA, 1128 bp, Homo Sapiens
aaaagattaatctttaaaccactaaaatacatagactgattgattattcaacacattggaattgatgtcggtcatagtttcctgaagcatttagttacaacctgaaggaataaaatgatttgtggaaatgcttaaaatagacctaactgaatacagtctcatcttgccgcgcctggcttacctatctgtggaaagctaggcttcccaggctgggctctgcctgtctggtgcctggaggtgtgggagggaagatgagttatttaactggtaagcgatttgaaacactatttttatattaaagtaaatggcatggagtatagtgcaaattcatttttaagatagaacacaaaacttgaaagaagttttatgcgtgtgacagtgtatggggctgcagttggtctccctggaggggacttccacacctcctgcctttaggccatgggtggaaagtgctcagtgaagtacacctgtgtggcccagttctgaaagctttatacagttgaattttaagtggggttgataacaccttggactgttagtgttaaaaatctagtgggttgacctttaaatgcaacagtttttaaaatatattgctgcattttatagaatagtaaaggtacgattatacttgagattttcctccctttttatttcttcgtgaacatagagtttgggggccgaaaatgtttttaaagtatgtgtttgagttaaatataaagttggttcacttcaaagctaaaaaattgttaaacttgcagcttggtattgcagagaagattttataagaattttgctttagagaatgccactttggctgaactacaagtgtaggccaccattataatttataaatacagcatacttcaaaactgtttgttatctcttgttaccatgtatgtataaatggaccttttataaccttgttctctgcttgacagactcaagagaaactacccaggtattacacaagccaaaatgggagcaaggccttctctccagactatcgtaacctggtgccttaccaagttgtgcttttctgttttcaagtgtaaatgatgttgagcagaatgttgtacttgaaaatgctataagtgagatggtatgaaataaattctgacttatgaatat

SEQ ID NO: 256167 - DNA, 447 bp, Homo Sapiens
gttggagtaaaataataaagtgggtccacctccaaagcctaaaaaattggttaaacctggcagcctgggtattgccagagaagattttaataaagaattttgcctttaagagaatgcccactttggcctgaacctacaagtgtaggcccacccattataatttataaatacagcatacttcaaaactgtttgttatctcttgttaccatgtatgtataaatggaccttttataaccttgttctctgcttgacagactcaagagaaactacccaggtattacacaagccaaaatgggagcaaggccttctctccagactatcgtaacctggtgccttaccaagttgtgcttttctgttttcaagtgtaaatgatgttgagcagaatgttgtacttgaaaatgctataagtgagatggtatgaaataaattctgacttatgaatatttt

SEQ ID NO: 256168 - DNA, 605 bp, Homo Sapiens
ccggttcatcacggccaatcagtatgagatggtgtaaggagaagtctttcaagaatgacggaataagagacctgttttacataatacacttgccctgctccctctaccccttaccccacaacgtgcaactgacactcccacccagtctctgctccacctttcagcccacgtcacgtgtagtgtccattttgtgaagccctgttgtgccacagagtgtagccaggtccccctgcagctagtcctagtgaacctcaccccgaggccctgcatgggccagaccctccatctgtacttggtccaactgcaactcatcatcggtgactgggtatcacaccatcgctggcccctttgggccctgcatgtagtgtgggaggctcctgttagctcctcactgtggtaaatgccacacacctttaagtagataagcagacgatagttatctggtcttttgacttaatctcatttggtttgattttccctctactaaggctttcctaccttcttcaggctgcctaagacatgtaacgaaacacttcaataattgtccatgaggagaaagacatacctgggtatgtgtaggcagtttagtgcatctttgcctctca

SEQ ID NO: 256169 - DNA, 1684 bp, Homo Sapiens
  misc_feature (385)..(385): n is a, c, g, or t
  misc_feature (389)..(389): n is a, c, g, or t
  misc_feature (398)..(398): n is a, c, g, or t
  misc_feature (1071)..(1071): n is a, c, g, or t
tcatcatctactccttcgtcttctggatcactggggtgatcctgctggctgttggagtctggggcaaacttactctgggcacctatatctcccttattgccgagaactccacaaatgctccctatgtgctcatcggaactggcaccactattgttgtctttggcctgtttggatgctttgctacatgtcgtggtagcccatggatgctgaaactgtatgccatgtttctgtccctggtgttcctggctgagctcgtagctggcatttcagggtttgtgtttcgtcatgagatcaaggacaccttcctgaggacttacacggacgctatgcagacttacaatagcaatgatgagaggagccgggcagtggaccatgtgcagcgcanctgnagctgctgntggtgtgcagaactacaccaactggagcaccagcccctacttcctggagcatggcatcccccccagctgctgcatgaacgaaactgattgtaatccccaggatctacacaatctgactgtggccgccaccaaagttaaccagaagggttgttatgatctggtaactagtttcatggagactaacatgggaatcatcgctggagtggcgtttggaatcgcattctcccagttaattggcatgctgctggcctgctgtctgtcccggttcatcacggccaatcagtatgagatggtgtaaggagaagtctttcaagaatgacggaataagagacctgttttaaaaaggaactgcagcaatctttgaaagacttccaaagaatgttagagcacagtacataatacacttgccctgctccctctaccccttaccccacaacgtgcaactgacactcccacccagtctctgctccacctttcagcccacgtcacgtgtagtgtccattttgtgaagccctgttgtgccacagagtgtagccaggtccccctgcagctagtcctagtgaacctcaccccgaggccctgcatgggcaggcccctccatctgtacttggtccaactgcaactcatcatcggtgactggttatcacaccatcgctggcccctttggccttgncatgtagtgtgggaggctcctgttagctcctcactgtggtaaatgccacacacctttaagtagataagcagacgatagttatctgttcttttgacttaatctcatttggtttgattttccctctactaaggctttcctaccttcttcaggctgcctaagacatgtaacgaaacacttcaataattgtccatgaggagaaaaaaagcatgtgtcatgcatgaagggaaactgaacttgaggtggcctccttgcctgttaacatacctgggtatgtgtaggcagtttagtgcatctttgcctctcagttgaaacctgtataaccctgttacaaagctgtgttgttgcttcttgtgaaggccatgatattttgtttttccccaattaattgctattgtgttattttactacttctctctgtattttttcttgcattgacattatagacattgaggacctcatccaaacaatttaaaaatgagtgtgaagggggaacaagtcaaaatatttttaaaagatcttcaaaaataatgcctctgtctagcatgccaacaagaatgcattgatattgtgaacatttgtgatatatgtattaataaatagagcaattacaagc

SEQ ID NO: 256170 - DNA, 1556 bp, Homo Sapiens
  misc_feature (1521)..(1522): n is a, c, g, or t
gaaatttaaaaagatatccaacaccatacccagatgagcttaagaatatggtcaaaactgttcaaaccattgtacatagattaaaagatgaagagaccaatgaagactcaggaagagatttgaaaccacatgaagatcaacaagatataaataaagatgtgggtgtgaagacctcagaaagtactactacagtaaaaagcaaagttgatgaaaggagaaaaatatatgataggaaactctgtacagaagatcagtgaacctgaagctgagattagtcctgggagtttaccagtgactgcaaatatgaaagcctctgagaacttgaagcatattgttaaccatgatgatgtttttgaggaatctgaagaactttcttctgatgaagagatgaaaatggcggagatgcgaccaccattaattgaaacctctattaagccagccaaaagtcgtagcacttagtaataacaaaaaagatgatacaaaggaaacagattctttatcagatgaagttacacacaatagcaatcagaataacagcaattgttcttctccatctcggatgtctgattcagtttctcttaatactgatagtagtcaagacacctcactctgctctccagtgaaacaaactcatattgatattaattccaaaatcaggcaagaagatgaaaattttaacagccttttacaaaatggagatattttaaacagttcaacagaggaaaagttcaaagctcatgataaaaaagattttaactttacctgaatatgatttgaatgttgaagagcgattagttctaattgagaaaagtgttgactcaacagccacagctgatgacactcacaaattagatcatatcaatatgaatcttaataaacttataactaatgatacatttcaaccagagatcatggaaagatcaaaaacacaggatattgtgcttggaacaagctttttaagcattaattctaaagaggaaactgagcacttggaaaactggaaacaagtatcctaatttggaatccgtaaataagggtaaatggacattctgaggaaacttcccagtctcctaataggactgaaccacatgacagtgattgttctgttgacttaggtatttccaaaagcactgaagatctctcccctcagaaaagtggtccagttggatctgttgtgaaatctcatagcataactaatatggagattggagggctaaaaatctatgatattcttagtgataatggacctcagcagccaagtacaaccgttaaaatcacatctggctgttgatggaaaaaatatagtcaggagcaagtctgccacactgttgtatgatcaaccattgcagggtatttactggttcttcctcatcttctgatttaatatcaggaacaaaggcaatttttcaagtttgattcaaatcataatcccgaagagcccaaatattataagagggccccacaagtgggcccacaatctgcaccctcaaatatatggggtcctccacagtataatatccnnattaccggttaccagtggctggcagtcaaaagaa

SEQ ID NO: 256171 - DNA, 1270 bp, Homo Sapiens
aaaaaaagaggtgtgggaagaccattaatgtgtgtcaaaagaaagcgcggtgtcaacacaacaaccgggtgtctccttcccccagaaggaaaaacaccttcccggtgagtccagcaagatgagtgaaactcgaaaaagggcgcaaattaaagacaacaggttgctcatgggaggaatctcgcgacaacctgcaggttggaagcaacaagaaaaacgctgtttagctaaaacataaagcaggtttgccagggaaattaagcagccaatggagaaaataaaaaaatgtaacccatagtaagtaagaaaaatacaagagaaaatcaaactttgttggaatcaagagaataccatgaacttaaaaacttcctaaatcagtagcatatcctgtattaccatgtgtagaaaactgtaattaattaatgtaaggtagtttttattagttgcataacctaaaaatacaaggaaattttggaatatacctctaaaaagaccacgaaattgtcactgaaatacacatttcttgagacaatgggcaaacttcccatttatgggaaatatcttctttttttcacacagtgaaacagagaaaaattatatcaaatgagaaatatttttctctaaaataatcttcttaaatacctcaataatgcaatacttgggaaatgtaaattttcaaaactcagacttgaaataggttattattaaacaaatatacataaatcttattgcttggcacgatttttcaaaaattagagaactatttaaaccatcatactgtgcttaaatcatatttcaaacttgtatacctagtgcttttatgttctgaatgtagactcttcaatttaatgacaatctagactgaaccctgcaatattcaaaaaagtcacagttcacttcaaaccaaacaaaatgatcaatcttctgtttttatcaaaatcataatattaagataactataaaatttaactaggatttatctgtggccaatgatggacccagagagcgttgtcttatggcattctgtggaaagtctttgtttgttccttctttactttcagcttcttcttctgaaacatcttcttcatccgcctcttgttcctcctccacttttttcaaaggttgtgcagattctgataataatttttttgaagggtatgggtatggctgtggtctgcgcctttttgaaggacaaaggcaatctgccacaaatatcatacagagtcctaataacagtccggaaaacagagttgctaaagcaaaaacagtatcc

SEQ ID NO: 256172 - DNA, 936 bp, Homo Sapiens
  misc_feature (18)..(18): n is a, c, g, or t
  misc_feature (342)..(350): n is a, c, g, or t
agtccgagaaatgtggtntgtggtagaaaggaatggtggcctactccatgagcagagcctgtgcgggctgaacctgacttcacttacagtgatgatggaggagattggggagctgctacctgtccttctagaagccacggtctggacaaactttctccaggatcacagaagaactgcagcttcctggggagcagtttcacctccacaggcatcgcttcatactcctcactgtcaatgctaaaagagcctcctgctccctgggcagaagagaatattcagaacagctcaatcacatcagtggcctactggagttggaggtctcacagcagcaccagaagaacnnnnnnnnnttcagtgcctactacgatgggcacagtgctggttctggaaacatcctaattctgccatccatgaaaaaggatttattttcttattttggcccctatctcctcccagagtattttgggatttgaacaacatggttataattttcaaatatgtattaaaaggcaagggtcctgccatgtcttaaggaactcatatacatagtctttctatattatgctaatccttctcaaataaaaataaagacagctaattctcttatgacatgctattgtatctgctggatcattttcattattctctaagacttgtttagcttgatatacccaaggtgtatcaacattaatatcattacagtctatgaaacccttccataactcatgcatttaattcaatatttatatcgaaactgtgacgccagtcattactggggataccttctgtttacctatagtcttgtctgaatacagtaatatatggccacatgtcttcaaaggctatatgaagagcctcctttttttccgtattgacaattgaataacctcccaattccagattctatttccaatttttttcacttacatagggtat

SEQ ID NO: 256173 - DNA, 1253 bp, Homo Sapiens
  misc_feature (69)..(95): n is a, c, g, or t
  misc_feature (107)..(107): n is a, c, g, or t
  misc_feature (109)..(109): n is a, c, g, or t
  misc_feature (123)..(210): n is a, c, g, or t
  misc_feature (650)..(650): n is a, c, g, or t
  misc_feature (824)..(824): n is a, c, g, or t
ccgggccggccaaacgaaatgggttctagaaaagcttctcggagggccgaagggcgcccggacatgttnnnnnnnnnnnnnnnnnnnnnnnnnnnagggaggaactntnattatcacaagtcnnnnnnnnnnnnnnnnnnnnnnnnnnnnnnnnnnnnnnnnnnnnnnnnnnnnnnnnnnnnnnnnnnnnnnnnnnnnnnnnnnnnnnnncccaccctcactttccagtgtgtgtgagggggtcaggaacagagggaggactattgtaagcggagccccaggcactgtagggtcctggagaaataagggggcagtggtgccaggagctcaacaggggtgtccctggccctggtgcctgggagaaggagccgatgtaggtggaggtgcaagggcagctgggcagcctgggagggggtcaggtggaggcgtctgaggagggcttcatccaggacctgtctttggggcttgttgttctcagctggcagcagaaatcgctggcccaggacagtgcccacacgggcagagtacatgtggtccccaagcacagggcagagctgtagtaccatgtgcacctgtagttgactggagaacactgtcagtggctgcagctggaccagggcacagccagaagcctgtggctaccacacganaagtgactgagagtcttcttgacacattcaaggatgtcctttcgggatggggccttcactggaactgtgagattgaccccatcaatgtgttccagtttcagggcagcctggatcttcccctcagaagcagctgggatcccatcagtgacagcacagtaggtggctgtgggcctntgggctctccgtgcatgggtgaagtacttctggaggcgactagctgtctggggacagctggagaggagtacaagcccagagctttctttcccagatgctcggacaacctgaagctcctgctccctgagccctcctgtcactggtagaccctgtggcttgttcaacgtcactagaggtcctttccggtccaccacggctgcccgcagcgcatcaaccagctcctcccgactggaggttttttggcagcagccccgcgaagggctggtccccgaggggccccgaccgttggcaggagccgcggggttgcctctgatgccgggcttcggtgccaaagcctgcgtcctcgggcactgggcggacacccaggccccgccgccagccactccagaaccggcccaaaacacggcggccgtccatctcccgagcccc

SEQ ID NO: 256174 - DNA, 2089 bp, Homo Sapiens
  misc_feature (428)..(428): n is a, c, g, or t
  misc_feature (1740)..(1740): n is a, c, g, or t
  misc_feature (1774)..(1774): n is a, c, g, or t
aagtagcgaggcctgggtggcggtgcactcggggtgtctgggccgcgggtctgagggatgaggaggggccatggccagcgacggggccaggaagcaattctggaagcgcagcaacagcaagctcccgggcagcatccagcacgtgtatggtgcccagcaccccccctttgatccactgttacatggcactttgctcaggtccacggccaagatgccgaccacaccagtgaaggccaagagggtcagcaccttccaggagtttgagagcaataccagcgatgcctgggacgctggggaggacgacgatgagctcctggccatggcggcggagagcctgaactccgaggtggtcatggagacggccaaccgtgtgctgcgtaaccacagccagcggcaggggcggcccacgctgcaagaaggggccaggngtttcaccaaaaccccaggcccaaggcaaacccgccctcaccccccagcggcgacctccggctggtgaagtcggtcagtgagaaccacacgtcctgtcctgcagaaagtgccagcgatgccgcccctctgcagaggtcccagtctctcccacactcagccaccgtcacgctgggtggcacatctgaccccagcactctcagcagctcaccgctgagccaaagaaaaacctcccggctcgacaagttcaagcagctgcttgccggccccaacacggaccttgaggaattacggaggttgagctggtccggaatccctaagccagtgcgtccaatgacgtggaagctcctctcaggttaccttcccgccaatgtagaccggagaccagccactctccagagaaaacaaaaagaatattttgcatttattgagcactattacgattctaggaacgacgaagttcaccagaacacatacaggcagatccacatagacatccctcgcatgagccctgaagcgttgatcctgcagcccaaggtgacggagatttttgaaaggatcttgttcatatgggcgatccgccacccagccagtggatacgttcagggtataaatgatctcgtcactcctttctttgtggtcttcatttgtgaaaacatagaggcagaggaggtggacacggtggacgtctccggcgtgcccgcagaggtgctgtgcaacatcgaggccgacacctactggtgcatgagcaagctgctggatggcattcaggacaactacacctttgcccaacctgggattcaaatgaaagtgaaaatgttagaagaactcgtgagccggattgatgagcaagtgcaccggcacctggaccaacacgaagtgagatacctgcagtttgccttccgctggatgaacaacctgctgatgagggaggtgcccctgcgttgtaccatccgcctgtgggacacctaccagtctgaaccggacggcttttctcatttccacttgtacgtgtgcgctgcttttctcgtgagatggaggaaggaaatactagaagaaaaagattttcaagagctgctgctcttcctccagaacctgcccacagcccactgggatgatgaggacatcagcctgttgctggccgaggccaaccgcctcaagtttgcttttgccgacgcccccaatcactacaagaaatgagcccagggcccacccgcagctggccttcactgtcccgggtggcgcgccccacctgcctggctggtggtaggcccctgtgagctggtcccgggctgctaaaaggccttgtgaggnggccccaccctccaggggagctggtgaagatggnccacagacctggtctagggctgacaaagacagggacagcctttgttttctgagataccaaagagagccaggggagggccccgggttcggcggccagaggcaggtcaggggtcccctctccctctccctgcaatgtccttgccaaatgactgcctactgctgcccctagtccggggcagcctaggaggccgaccctctttggagtcctgctgtctgggtgccagggccggaacgaggtagtggccatctcatacctactctgaaatgcaaaacttctattctgttgagtgaaagaataaaatgtagacaaaatctg

SEQ ID NO: 256175 - DNA, 481 bp, Homo Sapiens
  misc_feature (19)..(19): n is a, c, g, or t
  misc_feature (106)..(106): n is a, c, g, or t
gaacccataaggccatacngggaggcctttagaataaactacactcccccaaatatattacctatcctccaaatattgttaaaaagaaggatattccatccataanaactgcaatttaatgtcttcagtagttgagcatgtagattaaagacattttggaaagctgttgttgatgagaaaactattattctctaatattacctatcattaataacattacacttagtagcaattttcaatattgttataattatacatagtaacacacagcaagtccactaaagttcacgtttaatgtttgcaagaaatcttacctatgtattcacaaatgaagaccacaaagaaaggagtgacgagatcatttataccctgaacgtatccactggctgggctgcggatcgcccatatgaacaagatcctttcaaaaatctccgtcaccttgggctgcaggatcaacgcttcagggctcatgcgagggatc

SEQ ID NO: 256176 - DNA, 620 bp, Homo Sapiens
ttcaacagttcctcaagcttgaattccaagtgctcttatccctccatgctgcttctgtcagaaaataatactggaattccaattcctttggccagttctgcttttgaaagtaatactggaattccaattcctccattccctgtcctattcctaaaagtgctgtatcactttgataactctggcccctggatctcaccttgtagcccctcacttttattggccatgtggaattaaatgtggactttgctctgtgaccctgaacaaatcaattgtctaatcatagaaaaagttacctggaaggagattcctaagacctaacaagaagataattccagtcaaaccaatgtcttaagagcacctgcatagattctacatggttggcttctagttctcttccctgaatacccagttcagaccatcatcaatcactcagccacatcttcactctttggcaatctccctgctcaagttctatcttttccacccaaccaatacatgctgttccaattatcctggagaaaacagcagggcaataaaacgttaactaaataggtagatagcattggtaattataatgggattgactcaaaacatctaaccctgtaaaccatctcaatcca

SEQ ID NO: 256177 - DNA, 719 bp, Homo Sapiens
agttcggcacagaagatgactgccatcttattcctgaacttcctcattcaggacccccgtggaaacacagtgagcatccttatcagaggccctggccaggctggcccctttgctttgtttggagaggctggctgagtttcagcccctagtgctggagacccccttgttggagaggcttcctgtttatgcctcacaagaagaaaaaccacagggctctgggaggggaagaagcatgcactcccgctttggctggagtcccagcgcttgtcgccaccctcctccttgcctgtagtcttgacagcatccgtatgtacgtgtcctggcatttcccctccctctccctgatgactgatacccaccgggtctgacattccaagtaaccagtatgtaactggtagtttgatcccaatagccatagcgactccaggtgggagtgagggagcccagccccctgtcctggaagataccttagagtatgtgaccgcgctccagacccttgcttctctctcctgcagaggatgagtttctagggtgctaagtacctatcagaacagtgtggaggggcgggtccctcatacaggtgtgtgcttagccaaatacagtaactgtgactggcccagggatgttctctcctctattttcaaagatgaaaggaggttttaaaaaccatgtttgattcctaaccttttgctacctgaataaagcagagtctatttcac

SEQ ID NO: 256178 - DNA, 424 bp, Homo Sapiens
gtggatcccccgggctgcaggattcggcacgagaaattgtgtaggactctgtaatcttttgattagtttctgagaaaacacaatgaagcacttcacttttttttattcaaagccatttaataaaacacagttggtcagcccagtgcaaagcttgttatctgccaccagtacataccattggttctcttcattccttgggccagcttctcaggtggctttagacctcaacaagccgtatcttcaccagtgttctatcttgttcccctaaattaataaaatgtttttctccaggattttggtgagggttggctgtggctgtcgttttgcacctcccagatttcaaagaattactggttttaccatgactcaaatcttaagatctgtttctactattcagttcctcaaactgaagcttattgaaaaa

SEQ ID NO: 256179 - DNA, 804 bp, Homo Sapiens
gggggcggtgcgacagcagctggagggcagaggaggcggcgcggggtgtcctgtcctcgccatgaggccgcagcaggcgccggtgtccggaaaggtgttcattcagcgagactacagcagtggcacacgctgccagttccagaccaagttccctgcggagctggagaaccggattgataggcagcagtttgaagaaacagttcgaactctaaataacctttatgcagaagcagagaagctcggcggccagtcatatctcgaaggttgtttggcttgtttaacagcatataccatcttcctatgcatggaaactcattatgagaaggttctgaagaaagtctccaaatacattcaagagcagaatgagaagatctatgctccacaaggcctcctcctgacagaccctattgagcgaggactgcgagttattgaaattaccatttatgaagacagaggcatgagcagtggaagataaaccgaagaattaaagatcccacttccagccgggcccctcatgtatccactggccgaccgcagagtgtccctacctcctctccagagcatcattcctttctatctgctgccagagccacggtgccatttactccaaggactcactttctaaaattccacacctggagtgacctctagtcgctcagcatccactttgtgtctccaaattgtgtaggactctgtaatcttttgattagtttctgagaaaacacaatgaagcactttcacttttttttattcaaagccatttaataaaacacagttgggtcagcccagtgcaaagcttgttat

SEQ ID NO: 256180 - DNA, 444 bp, Homo Sapiens
  misc_feature (148)..(148): n is a, c, g, or t
  misc_feature (354)..(354): n is a, c, g, or t
  misc_feature (414)..(414): n is a, c, g, or t
  misc_feature (419)..(419): n is a, c, g, or t
tgcagcagctggagggcagaggaggcggcgcggggtgtcctgtcctcgccatgaggccgcagcaggcccggttgtccgaaaggtgttcattcagcgagactacagcagtggcacacgctgccagttccagaccaagttccctgcggantggaaggaaccggattgataggcagcagtttgaagaaacagttcgaactctaaataacctttatgcagaagcagagaagctcggcggccagtcatatctcgaaggttgtttggcttgtttaacagcatataccatcttcctatggcatgggaaactcattattgagaaggttcttgaagaaagtctccaaatacatttcaaggagncagaattgaggaagatcttatgcctccacaagggccttcttcctgaacagaccctatttnagccnagggatttcgagttttttaggttgg

SEQ ID NO: 256181 - DNA, 419 bp, Homo Sapiens
gagaaaggaaggaaggaaggaagttataccaggatgctgaaatggcgaagtagatcactggtctgtcacatcataaataagaactacaaaccttgtatgcgaatccactgaccacaccaggtgaaaggctgttgttcctttaactgaaggatgccaacgtggtggaagaggactgaagatcaattttggccatgacataattactacagttggatgcctctgtgatcataccagagtagtttggtgtttccctcattaggtagcttaaaagccctacaatccaatggctggagtttgatgttcagtcccattagatccttttttgttatttcagaattcagtgggcaaaggtgaacttacacatatgctactatttgttttgctatgcagttctctcaataaatactgtagcagaaaaa

SEQ ID NO: 256182 - DNA, 670 bp, Homo Sapiens
  misc_feature (29)..(29): n is a, c, g, or t
  misc_feature (43)..(43): n is a, c, g, or t
  misc_feature (93)..(93): n is a, c, g, or t
ggctgcatgcatccactagaggagaggangaggaaggagcacntgagtccaagtaccagagaatgggataaaataaagaagaaacgaaagganaatcagggaggacgcagggtacgaaaaggagaaaataagggaagggaggaaggagataatggcttggacaatatagagactcaaaatagttaatgcaacttgctccaaaagcgagagtgcaagaggtggtgggtctatcaattaaccttattgtcaaagggacaaggatgagcaagaaaaaattaggctcagctgcaacgaatgctaagctgctctgcacatcttttaaaaggtctaggaaataggcacagccatgggaaagttgctattccctcaagaactttttaaaagctagatatgtttatataggctcccataaattcttaggagttctgccaaaataatggacccagactcagctttttggaattgggagtttctgaagcagtcctttcctcctttgggttaaaggagggctgcaacaagccagaggcatttccaagtgtacagaggaaggtgatgttctcgcatgcgcagataaaaaaggacaggtcagtctaaatcattcttatagaggaatgagaagttaagagaaggacaaggaagcactgtgagaaaacatcagggctgctcgtgc

SEQ ID NO: 256183 - DNA, 728 bp, Homo Sapiens
  misc_feature (49)..(49): n is a, c, g, or t
  misc_feature (52)..(133): n is a, c, g, or t
tgctagtaccagcgcccctgagtacttcttgagaaagtgttaggtgccnagnnnnnnnnnnnnnnnnnnnnnnnnnnnnnnnnnnnnnnnnnnnnnnnnnnnnnnnnnnnnnnnnnnnnnnnnnnnnnnnnnngctgcaagcaggatctgtataacttcaagacctgcactggtaaccaatgtgttgacgctgtccccagcttcctggggtgaccactagctctattcccagctcagctgccccctctcccttccccaggagcatcttgagggcctgagccacctcagccctcagcagcacgtggtttacagtaggcgctcagccatgacgtcttcagtccctacagtgtgggacacagcagctccagatgccaggctcaggaatctggaagaagttcttacctggctgggctcagtcttccctatctgtaggggagactattgtctgccccggtgtcttttctagctgcacttatgggcacctggtgtaaagacatttcccagcctcccttgcagctggatgtggccatgtgactaagttcaggccaacgaaaggtaagtggaagtgttgtgtctgtctttgaaggttggagcatagccttctgcccttgcttccccatccctgccaaatggaatgtgggtgtgatagctggcactcaggcaaccattttggactgaaacactacatgctaaggataatggggaaacaaactcaagggacctggcgc

SEQ ID NO: 256184 - DNA, 1212 bp, Homo Sapiens
cacgagccccagctctgcctacattctgatataactgcttcaacactagggggtcctaaaggctttctatcttgctagtccctggggcctcaacatctcatactggttcccttaactctgcctatacctctgtaaataattccttcactaagttctcttgatgaagcaaaaacagacagctgaaaagtcctctatctcctacaagggccctaactggcaccccagatgacacagagcctgcctgcttatgctgtagtctgcctactctgctgtctcttcacatggtctcctcagaactgaactattgtatccatctcacactttatgcctcttctttcttaggcaccccgtccctccatccttccagaaccatctttgaggtctcatggctaataaaaacctaggctcaaccagtacactcaccaacccctcgcacgcaagtgtgggaggcagaggcatgctcagagctggctgccaggacctctgacttgccttcctttcacccacccccagtgctccacccaggagtcctgcctggaagctggaatgggcaagggctgctggagtgggacagggagaagaggaaggcctggatgaggagagggtggcatttgctctgagactgggtcctttttagacctttgcccgtcctcccccacatatcctccctttggctggacagtcctgaaccatgaggtcgataatgtctgcagcccaaggccgagtttgcgcaaaacccatgtgttctttggtaaacgtgatgtctgtgtttgctcagtttatgaccccctcctatgagggtaagaggtccctgaaataggaaccctagaggagaaagtctgaaaaggactgcctgggggactgtaaatctgagcttgagggcttcctgagcaacccatggaagttatcccacctttgacttgaggagaccttcatctaaggagaatctaaggaggccttctggtgtctcccccacacatccccgacccccagatctaacctccttcccaattacagcttagtctccagggctaggactggggtaaagcaaagtgagtcattcacctggggggactaaattttaagggggtggtgaacaatttattaatcaagataggactttaatgcaatattattttaaagtcaaaattaatgcaaaaaatccatgatgaacaaaatagcctacttttaaataaaaacaggatcagcatt

SEQ ID NO: 256185 - DNA, 905 bp, Homo Sapiens
  misc_feature (436)..(450): n is a, c, g, or t
ctttcgtaacatttttatggcctggtttgtcacagtccccatttctggagttatcagtgctgccatcatggcaatcttcagatatgtcatcctcagaatgtgaagctgtttgagattaaaatttgtgtcaatgtttgggaccatcttaggtattcctgctcccctgaagaatgattacagtgttaacagaagactgacaagagtctttttatttgggagccagaggagggaagtgttacttgtgctataactgcttttgtgctaaatatgaattgtctcaaaattagctgtgtaaaatagcccgggttccactggctcctgctgaggtcccctttccttctgggctgtgaattcctgtacatatttctctactttttgtatcaggcttcaattccattatgttttaatgttgtctctgaagatgacttgtgattcnnnnnnnnnnnnnnnaaaccatgaagagccgtttgacagagcatgctctgcgttgttggtttcaccagcttctgccctcacatgcacagggatttaacaacaaaaatataactacaacttcccttgtagtctcttatataagtagagtccttggtactctgccctcctgtcagtagtggcaggatctattggcatattcgggagcttcttagagggatgaggttctttgaacacagtgaaaatttaaattagtaacttttttgcaagcagtttattgactgttattgctaagaagaagtaagaaagaaaaagcctgttggcaatcttggttatttctttaagatttctggcagtgtgggatggatgaatgaagtggaatgtgaactttgggcaagttaaatgggacagccttccatgttcatttgtctacctcttaactgaataaaaaagcctacagtttttagaaaaaa

SEQ ID NO: 256186 - DNA, 377 bp, Homo Sapiens
cacaagtcatcttcagagacaacattaaaacataatggaattgaagcctgatacaaaaagtagagaaatatgtacaggaattcaacacagctaattttgagacaattcatatttagcacaaaagcagttatagcacaagtaacacttccctcctctggctcccaaataaaaagactcttgtcagtcttctgttaacactgtaatcattcttcaggggagcaggaatacctaagatggtcccaaacattgacacaaattttaatctcaaacagcttcacattctgaggatgacatatctgaagattgccatgatggcagcactgataactccagaaatggggactgtgacaaaccaggccataaaaatgttacgaaag

SEQ ID NO: 256187 - DNA, 2116 bp, Homo Sapiens
  misc_feature (1880)..(1897): n is a, c, g, or t
  misc_feature (2066)..(2066): n is a, c, g, or t
gtccccactgctttctggaattatgtctggaattttattcttcctggttcgtgcattcatcctccataaggcagatccagttcctaatggtttgcgagctttgccagttttctatgcctgcacagttggaatattctttttttccatcatgtatactggagcaccgttgctgggctttgacaaacttcctctgtggggtaccatcctcatctcggtgggatgtgcagttttctgtgcccttatcgtctggttctttgtatgtcccaggatgaagagaaaaattgaacgagaaataaagtgtagtccttctgaaagccccttaatggaaaaaaagaatagcttgaaagaagaccatgaagaaacaaagttgtctgttggtgatattgaaaacaagcatcctgtttctgaggtaaggcctgccactgtgcccctccaggctgtggtggaggagagaacagtctcattcaaacttggagatttggaagaagctccagagagagagaggcttcccagcgtggacttgaaagaggaaaccagcatagatagcaccgtgaatggtgcagtgcagttgcctaatgggaaccttgtccagttcagtcaagccgtcagcaaccaaataaactccagtggccactaccagtatcacaccgtgcataaggattccggcctgtacaaagagctactccataaattacatcttgccaaggtgggagattgcatgggagactccggtgacaaacccttaaggcgcaataatagctatacttcctataccatggcaatatgtggcatgcctctggattcattccgtgccaaagaaggtgaacagaagggcgaagaaatggagaagctgacatggcctaatgcagactccaagaagcgaattcgaatggacagttacaccagttactgcaatgctgtgtctgaccttcactcagcatctgagatagacatgagtgtcaaggcagagatgggtctaggtgacagaaaaggaaagtaatggctctctagaagaatggtatgaccaggataagcctgaagtctctctcctcttccagttcctgcagatccttacagcctgctttgggtcattcgcccatggtggcaatgacgtaagcaatgccattgggcctctggttgctttatatttggtttatgacacaggagatgtttcttcaaaagtggcaacaccaatatggcttctactctatggtggtgttggtatctgtgttggtctgtgggtttggggaagaagagttatccagaccatggggaaggatctgacaccgatcacaccctctagtggcttcagtattgaactggcatctgccctcactgtggtgattgcatcaaatattggccttcccatcagtacaacacattgtaaagtgggctctgttgtgtctgttggctggctccggtccaagaaggctgttgactggcgtctctttcgtaacatttttatggcctggtttgtcacagtccccatttctggagttatcagtgctgccatcatggcaatcttcagatatgtcatcctcagaatgtgaagctgtttgagattaaaatttgtgtcaatgtttgggaccatcttaggtattcctgctcccctgaagaatgattacagtgttaacagaagactgacaagagtctttttatttgggagccagaggagggaagtgttacttgtgctataactgcttttgtgctaaatatgaattgtctcaaaattagctgtgtaaaatagcccgggttccactggctcctgctgaggtcccctttccttctgggctgtgaattcctgtacatatttctctactttttgtatcaggcttcaattccattatgttttaatgttgtctctgaagatgacttgtgannnnnnnnnnnnnnnnnnaaacatgaagagccgtttgacagagcatgctcctggcgttgtttggtttcaccagctttctgccctcacatgcacaggggattttaacaacaaaaatataactacaactttcccttgtagtcctcttatataagtaagagtcccttggtactctgcccctcctgtcaantagtgggcaggaacctatttggcattattcgggagcttccttaaaaggga

SEQ ID NO: 256188 - DNA, 687 bp, Homo Sapiens
  misc_feature (32)..(32): n is a, c, g, or t
  misc_feature (65)..(65): n is a, c, g, or t
acttcactgtgggcaactccacggttcatgtntgctctgtaggaagtaatgaaatgaatcaacanctgatacaactggaaattcctagttactttgaagtagcacacaaacaccatccaaaatatgctacttgtagatgctgatgacagcagtaaagaatcttcagcatttgactttagggtaagacaagacttgttattatggttctatttgaaaaaatagttacaatgcctttccaaaagtttgttttctagcatgttgttttactgaataggaaaattcaaactgaaagagaaaacctacattttcttatatcatgagagcaaagtgaaaagccaaaagctaaatttaccaacataataaatttatattaaaaagaaaaagcagaactcaccgagccagtgtgtcaagtagtcagactcttatatttgacttaatgtatccataaagaatggtcagagttcagatcacttctttctgaatactcaatgtggaaggtacatgctgttgacataatgtggtgtaaaatttacatggtcaagggataatgtttgtttctcaattttgtgattagactaggtgaaaataaggagtcttctgaatatttctctagtcaaatcaaaaacttcagttttctttcttctttttaaaaaaggttttcccttctcctttccattgaagatggac

SEQ ID NO: 256189 - DNA, 384 bp, Homo Sapiens
  misc_feature (29)..(29): n is a, c, g, or t
  misc_feature (93)..(93): n is a, c, g, or t
ggggaaaattccaaactgaaagaggaaanccctacattttccttatatccatgaagagccaaaagtgaaaaaggcccaaaagcctaaatttancccaacataataaaatttatattaaaaaagaaaaagcagaactcaccgagcccagtgtgtcaagtagtcagactcttatatttgaccttaatgtatcccataaagaatggtcagagttcagatcacttctttctgaatactcaatgtggaaggtacatgctgttgacataatgtggtgtaaaatttacatggtcaagggataatgtttgtttctcaattttgtgattagactaggtgaaaataaggagtcttctgaatatttctctagtcaaatcaaaaacttcagttttc

SEQ ID NO: 256190 - DNA, 650 bp, Homo Sapiens
tcaggaaccacttcttctgaggcagaaaagaagtatgtatatccatcaattctgaagcagcatctatgtatttctcttcaaaggtgattctccacctacataaacgaaaaatacacggtgtctcttctgcatatgttcaaacatttgttgacttggaagtgttcgtggtcctctataattatatgccaagtccccttttaatttcacctatgaagaatggccaaaccccaatcttcaatcctccagggaatctaagcttaattgttggataacctcgaactccaaactctgaagcaatgctagaataggaagtagcatccatctttccaaccttaactggagaaccaatgcttttcatctcaagaccaacttcattccaaattggttccagctttttacaatggccacaccatggcgcataaaaatctacaagccaaatgtcatcatttcgattttctttaaacgattcatctaaatcttctacaaatcctttacagacgaccatatcaagtacaacaactgtggcgcagagccgcagggccgtccaactcttccacgctgccatgctagcccgggagagctgcagaagctgactgtgcaaaagagggataaagacactggggtccgccctcgtgccgaattcctgcagc

SEQ ID NO: 256191 - DNA, 661 bp, Homo Sapiens
  misc_feature (556)..(556): n is a, c, g, or t
  misc_feature (601)..(601): n is a, c, g, or t
  misc_feature (604)..(604): n is a, c, g, or t
  misc_feature (610)..(610): n is a, c, g, or t
  misc_feature (622)..(622): n is a, c, g, or t
  misc_feature (632)..(632): n is a, c, g, or t
  misc_feature (645)..(645): n is a, c, g, or t
acgaggacttctcaaatcagaatgggacaggtggagaaagtatttatggtgaaaaatttgaagatgaaaatttccattacaaggtaaagtagagaaaatgcatgttattgctgataaaaagattgttatatatctggaatacttgttggattaagacaccaaaaaatgtttcaagtgtgcttagattctccatttcttgtaataggaatcacttttgtaaataatggttctttaatatggaaaagttttcattcagtaatgattaattcagcattatttcattgtgatccagtttttatatgcttcagttaagccagtgagtttttaaatgcgaccagcatctggcaaaattgtttccaggaaaaatgtttccattggtggaaggatggtaacttgtgcatccttatccttgaatttgaagagcaacaaaaccatcactaatatccaggatgtcaggggatttgcacactagcagatattagtaaatgtccaagctcctaaaggacttcagtggtgcctgtcccttcttgctcttcgtgtccaagatgtaattggngtatattgcatcattcaaggtataagaatggacatgtagtcaaangtnagtgtnatttggaaatangatatgacanggtttaggatatngaagcctgtgcaagat

SEQ ID NO: 256192 - DNA, 1168 bp, Homo Sapiens
tcctcccgccaggcgctttctcggacgccttgcccagcgggccgcccgaccccctgcaccatggaccccgctcgccccctggggctgtcgattctgctgcttttcctgacggaggctgcactgggcgatgctgctcaggagccaacaggaaataacgcggagatctgtctcctgcccctagactacggaccctgccgggccctacttctccgttactactacgacaggtacacgcagagctgccgccagttcctgtacgggggctgcgagggcaacgccaacaatttctacacctgggaggcttgcgacgatgcttgctggaggatagaaaaagttcccaaagtttgccggctgcaagtgagtgtggacgaccagtgtgaggggtccacagaaaagtatttctttaatctaagttccatgacatgtgaaaaattcttttccggtgggtgtcaccggaaccggattgagaacaggtttccagatgaagctacttgtatgggcttctgcgcaccaaagaaaattccatcattttgctacagtccaaaagatgagggactgtgctctgccaatgtgactcgctattattttaatccaagatacagaacctgtgatgctttcacctatactggctgtggagggaatgacaataactttgttagcagggaggattgcaaacgtgcatgtgcaaaagctttgaaaaagaaaaagaagatgccaaagcttcgctttgccagtagaatccggaaaattcggaagaagcaattttaaacattcttaatatgtcatcttgtttgtctttatggcttatttgcctttatggttgtatctgaagaataatatgacagcatgaggaaacaaatcattggtgatttattcaccagtttttattaatacaagtcactttttaaaaaatttggatttttttatatataactagctgctattcaaatgtgagtctaccatttttaatttatggttcaactgtttgtgagactgaattcttgcaatgcataagatataaaagcaaatatgactcactcatttcttggggtcgtattcctgatttcagaagaggatcataactgaaacaacataagacaatataatcatgtgcttttaacatatttgagaataaaaaggactagcaaataaaactcattttgcattt

SEQ ID NO: 256193 - DNA, 1506 bp, Homo Sapiens
  misc_feature (1229)..(1229): n is a, c, g, or t
  misc_feature (1346)..(1346): n is a, c, g, or t
  misc_feature (1392)..(1448): n is a, c, g, or t
  misc_feature (1462)..(1462): n is a, c, g, or t
  misc_feature (1484)..(1484): n is a, c, g, or t
gggaggtactctgatattccgtactaaacacgtctgcaagtcaagatgtcgcacccgtccccccaagccaagccctccaaccccagtaaacctcgagtcttctttgacgtggacatcggaggggagcgagttggtcgaattgtcttagaattgtttgcagatatcgtacccaaaactgcggaaaattttcgtgcactgtgtacaggagaaaaaggcattggacacacgactgggaaacctctccatttcaaaggatgcccttttcatcgaattattaagaaatttatgattaagggtggagaattctcaaatcagaatgggaaaggtggagaaagtatttatggtgaaaaatttgaagatgaaaatttccattacaagcatgatcgggagggtttactgagcatggcaaatgcaggccgcaacacaaacggttctcagttttttatcacaacagttccaactcctcatttggatgggaaacatgtggtgtttggccaagtaattaaaggaataggagtggcaaggatattggaaaatgtggaagtgaaaggtgaaaaacctgctaaattgtgcgttattgcagaatgtggagaattgaaggaaggagatgacgggggaatattcccaaaagatggctctggcgacagtcatccagatttccctgaggatgcggatatagatttaaaagatgtagataaaattttattaataacagaagacttaaaaaacattggaaatacttttttcaaatcccagaactgggagatggctattaaaaaatatgcagaagttttaagatacgtggacagttcaaaggctgttattgagacagcagatagagccaagctgcaacctatagctttaagctgtgtactgaatattggtgcttgtaaactgaagatgtcaaattggcagggagcaattgacagttgtttagaggctcttgaactagacccatcaaataccaaagcattgtaccgcagagctcaaggatggcaaggattaaaagaatatgatcaagcattggctgatcttaagaaagctcaggggatagcaccagaagataaagctatccaggcagaattgctgaaagtcaaacaaaagataaaggcacagaaagataaagagaaggcagtatatgcaaaaatgtttgcttagaaaaggattcaagttttgcttattgtgtgttgattgtataaatgcaataagaaaatgtaaagggttttggncaatgaatatgatccctaatgtgtttcttttgacaccttagttccttactgtttacagtttaggagtactgataggggttcatgcttaataaacatgtcacaatacagtaagtaaangtgggttttgtttggtttctttgagatggagtcttgctctggtcannnnnnnnnnnnnnnnnnnnnnnnnnnnnnnnnnnnnnnnnnnnnnnnnnnnnnnnncggggttcaaagcnattcctcctggcctcaagcttnccaagtaagctggggaattaca

SEQ ID NO: 256194 - DNA, 501 bp, Homo Sapiens
  misc_feature (86)..(394): n is a, c, g, or t
cttactgtttacagtttaggagtactgataggggttcagccttaataaacatgtcacaatacagtaagtaaagtggttttgtttgnnnnnnnnnnnnnnnnnnnnnnnnnnnnnnnnnnnnnnnnnnnnnnnnnnnnnnnnnnnnnnnnnnnnnnnnnnnnnnnnnnnnnnnnnnnnnnnnnnnnnnnnnnnnnnnnnnnnnnnnnnnnnnnnnnnnnnnnnnnnnnnnnnnnnnnnnnnnnnnnnnnnnnnnnnnnnnnnnnnnnnnnnnnnnnnnnnnnnnnnnnnnnnnnnnnnnnnnnnnnnnnnnnnnnnnnnnnnnnnnnnnnnnnnnnnnnnnnnnnnnnnnnnnnnnnnnnnnnnnnnnnnnnnnnnnnnnnnnnnnnnnnnnnnntaaaatggttatgtgcattattcataaaaaataatggtgtccagtctttttaaacttgtaaagacacatcttattgaataaagagatgagagcttaagtttgtaaaa

SEQ ID NO: 256195 - DNA, 612 bp, Homo Sapiens
  misc_feature (18)..(18): n is a, c, g, or t
ttgaagaaaaacagtggnaatcaccatatgacaaaagggcatgtgtgatagttacttgtacttgtcactgtgacgagcacccagggtgccaggacatttggccaaacatgattctggttgtgttccagagagtctttcagatacgattaacattgggatgggcagactaagtgaagcagattgccctccttaataggggtgggcctcatgcaatcaatcaagggccaggagagaattaagaggcctaatgggaaacaaatgctttcctgggtatccagctttccttccatcttgggaatttcagcctccataatctcagaagcaaattcatgttacaagttcagccatgagattggtgaagccagccaatgaataagggtgtgttctattatacgattcagtcttcttttgtaaacgattgaagttctgcatttgaagtaggaggataggagggagcaagtccacctaggatgataacagctgaatttctcaacatacacttcagagccgtaggggtcaacttagagactcaaaaatctcacccataatcctgcccctaaacaccagggctagggaacactgtggccctcaggtgattttctaccaccaaca

SEQ ID NO: 256196 - DNA, 793 bp, Homo Sapiens
gcacgagagaaaatcacctgagggccacagtgttccctagccctggtgtttaggggcaggattatgggtgagatttttgagtctctaagttgacccctacggctctgaagtgtatgttgagaaattcagctgttatcatcctaggtggacttgctccctcctatcctcctacttcaaatgcagaacttcaatcgtttacaaaagaagactgaatcgtataatagaacacacccttattcattggctggcttcaccaatctcatggctgaacttgtaaaaatacaatcttagccacatacctatgaaatgtatatgtgtgtgtatatatatacatgaatttgcttctgagattatggaggctgaaattcccaagatggaaggaaagctggatacccaggaaagcatttgtttcccattaggcctcttaattctctcctggcccttgatggattgcatgaggcccacccctattaaggagggcaatctgcttcacttagtctgcccatcccaatgtgtaatcgtatctgaaagactctctggaacacaaccagaatcatgtttggccaaatgtcctggcaccctgggtgctcggtcacagtgacaagtacaagtaactatcacacatgccctttgtcatattggtgatttccactgtttttctcccaaactgcagcttatatttgttctcttaatactgttgagcaaaaacttttaatttttataaagtcgaatttatcaatgttttctttaatggtttgtgtttattgataataaagaacactttgcctaaaaa

SEQ ID NO: 256197 - DNA, 609 bp, Homo Sapiens
  misc_feature (542)..(542): n is a, c, g, or t
gcacgagaaataagcaacactgactttatgtaaccaagcattattaattctccaccccatatcactggtagatacctgtattcaagctatctggacatgaaagcagtcacattttagaagtcatgaagttgatgctaataagcctaatctacagaaacactcttgaaagcccttgagcgtttgttctgtgaacagaaaggtttgagattcggagcaagttcagagttggatggtctaagaatggaaaagccctccattccattagaagagccaggtagcaatttctggttatggaaccagaagctctcaggcttcaaataaaacagcatcacttgtactcttataaaactgtaaaaacagaaagaccaaaaccgtatctacatctgtcctataaggcagagagtacttgagatctcatggatttaaaaccagcttacaaactacattgcactatatgaagaaatatcactgtgggcaaagcatcaagcagagagcacagtatacagtgtgtggatgtaaatgttattccctagccttccatncttctgactcagcagggagagtcggaatgaggagtaacttgatgagaataaataagatatgcatagt

SEQ ID NO: 256198 - DNA, 387 bp, Homo Sapiens
gaatcaacattgtgaactatggctgccttgtatcctgctctctgtgcatttaaaacctttatatcaaaaactggtggaggcactatgggttcacaggcattctctggttttgagttaatcaaaaaaccctttaaaccttcagctggaagtctataaccaaatcttgcagggaggtcatcaaatgtctgagatgcattttcaaagttatatgctaaaatgtctgcttctacaggcagtaggtttaagaatgcaaagagctggacagtcaagatggtgtagacttgtgtggctgacagcatgagcatccctatggagagcagcatctcgttgtaaaatcaccttgaagtccggcccccgcaacacaaacagtcttgccagccgcgtcgc

SEQ ID NO: 256199 - DNA, 806 bp, Homo Sapiens
  misc_feature (36)..(36): n is a, c, g, or t
  misc_feature (40)..(40): n is a, c, g, or t
  misc_feature (45)..(45): n is a, c, g, or t
  misc_feature (61)..(61): n is a, c, g, or t
  misc_feature (81)..(81): n is a, c, g, or t
  misc_feature (88)..(88): n is a, c, g, or t
  misc_feature (98)..(99): n is a, c, g, or t
  misc_feature (101)..(101): n is a, c, g, or t
  misc_feature (118)..(118): n is a, c, g, or t
  misc_feature (122)..(122): n is a, c, g, or t
  misc_feature (127)..(128): n is a, c, g, or t
  misc_feature (136)..(136): n is a, c, g, or t
  misc_feature (145)..(146): n is a, c, g, or t
  misc_feature (148)..(148): n is a, c, g, or t
ctagtgatcttacgagtctgttctcaagtcatgtcnatcntgacnattttgtgatcatganaatgctatccagatgagcangatgccnctatgatagnnanggattagtagtatcccnaagnagctnnaattctgnactagatanngntgccccctttttcatatgtgaattcatctttcagagaattagctgatgattcaccaataaagacagatggaatgtcaattttctttagtacctcaatgtcgttggatcccatgctaatgaggtcatcagaatcaacattgtgaactatggctgccttgtatcctgctctctgtgcatttaaaacctttatatcaaaattacaatcaagtcttctaattaacacgatgaaagtgccagatgaattgtcttttactggtggaggcactatgggttcacaggcattctctggttttgagttaatcaaaaaaccctttaaaccttcagctggaagtctataaccaaatcttgcagggaggtcatcaaatgtctgagatgcattttcaaagttatatgctaaaatgtctgcttctacaggcagtaggtttaagaatgcaaagagctggacagtcaagatggtgtagacttgtgtggctgacagcatgagcatccctatggagagcagcatctcgttgtaaaatcaccttgaagtccggcccccgcaacacaaacagtcttgccagccgcgtcgctgcgggagaagtccctaccctgatttcatgactgaatatccgcaccgacccccacagcccggagtactagcagggacgacaacaccccc

SEQ ID NO: 256200 - DNA, 708 bp, Homo Sapiens
  misc_feature (589)..(589): n is a, c, g, or t
  misc_feature (664)..(664): n is a, c, g, or t
gtcgggattgggagggaagcgcgtgaaggatctgacgactgggggcacggcaacctcttgtccatgctgctgatcgcctgcgccttcaccctcagcctggtctacctgatccgtctggccgccggccacctggtccagctgcccgcaggggtgaaaagtcctccatacattttctccccaattccattccttgggcatgccatagcatttgggaaaagtccaattgaatttctagaaaatgcatatgagaagtatggacctgtatttagttttaccatggtaggcaagacatttacttaccttctggggagtgatgctgctgcactgctttttaatagtaaaaatgaagacctgaatgcagaagatgtctacagtcgcctgacaacacctgtgtttgggaagggagttgcatacgatgtgcctaatccagttttcttggagcagaagaaaatgttaaaaagtggccttaacatagcccactttaaacagcatgtttctataattgaaaaagaaacaaaggaatactttgagagttggggagaaagtggagaaaaaaatgtgtttgaagctctttctgagctcataattntaacagctagccattgtttgcatggaaaggaaatcagaagtcaactcaatgtggctcttaccagtttgcttgccntgcctaggttcagacgcaaggacagagctcatcgggaaatcagg

SEQ ID NO: 256201 - DNA, 542 bp, Homo Sapiens
ttaaaaaatgtaatgaccttatataagctagattactgagactatggtattaaacaatccatttgctcctctaaggaatatttacacatatataatacagaaaatgaaaataaatattaaccttatagtaaaggactcatctctgaaaacacatgttctgatgctttagataacgagttgagaatataatacagaaatgaattcagcttcaagttgtgcttgcatatatattttctgaagctttgctgccagcttgttaacaggaaaagaccacctatcacatccacatccattatgtgcttttctcatgcccctagggatcatggtgcttggtcaagtatatatttgagtcaaattctccaaagcataaattactctccgattttaggttagggccctttggaagccatggttatttgttcagaatgcaacatattattaatacaccaaggcaataatttaccaagtcattaggttgaaccatatgaaagtgtctatattcatttcacctatcattttaacctataaaaatgatcacttgg

SEQ ID NO: 256202 - DNA, 765 bp, Homo Sapiens
aaggaatctgtaaacagtggaaacactgtgggagtttcccatggtgttttgaagagtggaacgaaggcgatatgaactgaaggggtgaagacttgattttggagagggcaacaaaacaagggtgtgtgtgcataggagaatggcccactccaaatacgaagtgagatcctgagtctttgggtgcttcatgatttcctaccatattcaggcctaaagacattgaaaaagcatcttttcttgagatcatggtcatatgaggtcctaatgaagtactacagttttcattctttcaagggtagactaaaatatagtttataaatcggcagtacagtattatgaaaccaagaaagggtttcttgaaaagcttgtcggttcaaagaggaaagatgaatttcaatgtgaaaacacgttttgttgagggctgtactttttaccccctttaagtgctttaacaggatatacgtttgattttcctcatatcttatttacctaggagcatgtcagagaaagaagggagagaaaaggttgcatctgcaggatgccttgataactacacagtcccaaataaaaggcctttttctaacctacctctaatggggttatcagatatgtttttaaatctctcgccctgagtactcttcttgggagttgctgctgtttacagccacagtctcatctatcactaaatatgaaactgggccaaggagaaaattcagtaagttagcgttaaatggaagtaaatatatgtatacctaagagaatgtc

SEQ ID NO: 256203 - DNA, 1694 bp, Homo Sapiens
  misc_feature (10)..(10): n is a, c, g, or t
  misc_feature (13)..(14): n is a, c, g, or t
  misc_feature (51)..(52): n is a, c, g, or t
  misc_feature (82)..(85): n is a, c, g, or t
  misc_feature (92)..(94): n is a, c, g, or t
  misc_feature (103)..(103): n is a, c, g, or t
  misc_feature (115)..(117): n is a, c, g, or t
  misc_feature (119)..(119): n is a, c, g, or t
  misc_feature (429)..(429): n is a, c, g, or t
  misc_feature (827)..(827): n is a, c, g, or t
  misc_feature (852)..(852): n is a, c, g, or t
acagagtcancannagcgagcctgctccccgcactgaggacatcggcctgnnctgcagtgcctccaaatcaacacgcagcannnngggagtnnngggagggcnctgaacaccaannntnttgaaaggctaagggacgacagctccagctgtcccaggaaaaccagcaataaataaaagtgaggcacggccccacccacacatatcatctagtcacccgatcttcactctggaggtctgcaaaaaaagaacaggagaaatcaggcagggacagaggaataggtaaggcagtgacaaatgatagaagatgacatctagcacatggttggatggacagaccacaagagatatatgactaaccaggatggacacactgtgacagacaaggcagacagggacagacaaccacagagttacgctgtgggacaganggagagaagtggcatatggataaagctagtcactaagaatcaactcagtcaagcacccacagtcacactcagaccctcaggctgatcccttagtccacaaactcacacactcgctcagacagactatgtacacacacaatttagaacaatggtgtccctactgacaggcatgtgagagggagatacacatagctccgagagacagtcaaacacaccatgacagactgatatagacagacaaaattccattctagtctagatcacaaatacagactggagacatgaaaagcatggcagataaaatgagagaacagaaagagggaggactaagtgctatacagatacaacgcattagaaaggggggaaaaagaacagggctgttgtcagtgacaccaaantcagagacaaaaatagagagccccntgtaggagaaaaccagaagatggaaatgaggaggtggaagctgtttgggggaatctatagttataggtagagaaggagagcacttcagcttctccagaaggagggtaaggctaggttggggacaaggacacaaaggcttcccaaggggagtcatcacctgaagaattgcgacgatgaccccaaagaggccaatgcgctgccaaagatctccacgatgagaatctttacaaagaggctggggttctgagcatcggccagggcagccccactgcccacgatgcccacgcagactccacagaagaggttagacaggctacggtgaggccagccccaaacatggagtagcctgcatggtagttccgatgccgatggccttggggtctgtggcactgaaaggctcagccatgttgctaatgacaattgccatgatgatgccgtagatggccacagcctcacagaagatgatgctgaccaggttcttggtcttgatcctgggggccttcactcctccaccaatgatggaggagccggtaatatagatgccccaggctgccccaaccacagacagggagatagctaggccaatgcccaggttggaccacatgaagggcgaagtctccgtcaggaaccatgccacatcaaagcggaagcccaaatcaaaaatggtgtagcagactcccacggccagcgcgcaggcccagaaggccacgaagaccccggagtagagcagtgctagccccgtcatggcggcgacggcggcgggggtcggaacggcggggccggagctacaaacgcgtcccagcgtccaccgtccgtcccgcagtctgtccgcccgccccgca

SEQ ID NO: 256204 - DNA, 1015 bp, Homo Sapiens
  misc_feature (893)..(893): n is a, c, g, or t
gctgcggggcgggcggacagactgcgggacggacggtggacgctgggacgcgtttgtagctccggccccgccgttccgacccccgccgccgtcgccgccatgacggggctagcactgctctactccggggtcttcgtggccttctgggcctgcgcgctggccgtgggagtctgctacaccatttttgatttgggcttccgctttgatgtggcatggttcctgacggagacttcgcccttcatgtggtccaacctgggcattggcctagctatctccctgtctgtggttggggcagcctggggcatctatattaccggctcctccatcattggtggaggagtgaaggcccccaggatcaagaccaagaacctggtcagcatcatcttctgtgaggctgtggccatctacggcatcatcatggcaattgtcattagcaacatggctgagcctttcagtgccacagaccccaaggccatcggccatcggaactaccatgcaggctactccatgtttggggctggcctcaccgtaggcctgtctaacctcttctgtggagtctgcgtgggcatcgtgggcagtggggctgccctggccgatgctcagaaccccagcctctttgtaaagattctcatcgtggagatctttggcagcgccattggcctctttggggtcatcgtcgcaattcttcagacctccagagtgaagatgggtgactagatgatatgtgtgggtggggccgtgcctcacttttatttattgctggttttcctgggacagctggagctgtgtcccttagcctttcagaaggcttggtgttcagggccctccctgcactcccctcttgcctgcgtggttgatttgggaggcactgcagtcccagccgagtccctcantggcggggaaacaggctgctgctgcctgactccgggcaactgcgcacctgtgtcccccacctccaaccttaaccattttttcctaaggggtttgggaaattaaccttgggaatttgtctggg

SEQ ID NO: 256205 - DNA, 560 bp, Homo Sapiens
agtcccacagacccgcaaacgatcgcccatcgaaactaccatgcaagctactccaatgtttggggctggcctcaaccgtaggcctgtctaaacctcttctgtggagtctgcttgggcatcggtggcatttgtgctcccctggccgatgctcagaaccccagcctctttgtaaagattctcatcgtggagatctttggcagcgccattggcctctttggggtcatcgtcgcaattcttcagacctccagagtgaagatgggtgactagatgatatgtgtgggtggggccgtgcctcacttttatttattgctggttttcctgggacagctggagctgtgtcccttagcctttcagaggcttggtgttcagggccctccctgcactcccctcttgctgcgtgttgatttggaggcactgcagtccaggccgagtcctcagtgcggggagcaggctgctgctgctgactctgtgcagctgcgcacctgtgtcccccacctccaccctcaacccatcttcctagtgtttgtgaaataaacttggtatttgtctgggtcaaaacc

SEQ ID NO: 256206 - DNA, 1086 bp, Homo Sapiens
agcgccttcactgccatccccgctgtccttgccgcccccgccatgggcctagagctgtttcttgacctggtgtcccagcccagccgcgccgtctacatcttcgccaagaagaatggcatccccttagagctgcgcaccgtggatttggtcaaagggcagcacaagagcaaggagttcttgcagatcaacagcctggggaaactgccgacgctcaaggatggtgatttcatcttgaccgaaagcttggccatcctgatttacctgagctgtaagtaccagacgccggaccactggtatccatctgacctgcaggctcgtgcccgtgttcatgagtacctgggctggcatgccgactgcatccgtggcacctttggtatacccctgtgggtccaggtgttggggccactcattggggtccaggtgcccgaggagaaggtggaacgcaacaggactgccatggaccaggccctgcaatggctggaggacaagttcctgggggacaggcccttcctcgctggccagcaggtgacactggctgatctcatggccctggaggagctgatgcagccggtggctctcggctatgaactgtttgagggacggccacgactggcagcatggcgtggacgagtggaggctttcctgggtgctgagctatgccaggaggcccacagcatcatcttgagcatcctggaacaggcggccaagaaaaccctcccaacaccctcaccagaggcctatcaggctatgctgcttcgaatcgccaggatcccctgaagggtctgggatgggggccaggagattagcaacaaggattcattctgttacttacttgcccctttttatctttccctcttgccccagtcccttctctccagcttcatgtgaagctctgcacagacaagacactcagtgtccttggcagtgctgctactcctcaggtgcagcatacataaccagtaagagactaaatctgcaatatataaagagctcctacaaatcagtaacatgaagaacactcaaaaattggcaaatgtcatcagtgttttaaacagaataaagattccaaacactttgaatagagaa

SEQ ID NO: 256207 - DNA, 695 bp, Homo Sapiens
ggctgcaggattcggcacgagctgggcactgcaggcagggggagggggtgccacccaggcaaggccagctcggcagtctgaaggaacggctgggcagccacctctgaccacacgtgtgtccgtgccggcgtggttatctgggctgcctacacagttcacgctaacatcgtagctcacgctaacatcgtggctgttgatgccacgtgttgtgaggcctttgtcagctcttctcctgtattccagggcaactccaacaacattgccaccgtggacatctccgcaggcttcgtgggcttagacacctacgtggaaaccccagccgtgctcctgacagcgtttgggacgtacgcagggcctgtgctgtgggccagccacttagtgcacttcctgagctcagaaacacgcagtggttcagcactgagtcatgcttgcttctgctacgcactgatttgttctattccagtttccacgtacatcgttttggtgacatctctgcgttatcatttatttatatggagtgtattttctccaaaacttctctacgagggaatgcacctgctcattacagctgctgtctgtgtattcttcacggcaatggatcaaaccagactcacacagtcttagactaagctgaacactggaaaaataatacatgcttaaagtctgctgttattctaaaatggaagatatgtaat

SEQ ID NO: 256208 - DNA, 661 bp, Homo Sapiens
  misc_feature (27)..(28): n is a, c, g, or t
  misc_feature (86)..(86): n is a, c, g, or t
gggatctgtggggactggtacccaganngatgtgtaaagactaggagatcagtaggagaaatactgtaagggttaagtgtgctttnccataataccttaaaagcaaatgcctaacctgtccatatttacatgtaactatgaatggcaaaagcaccttcttacctcccaagcccctcatcaagcctgtgcttgttgtattcagaggccttgatgctggttctccgcctcagagaaccaaagtatctgagaattaaaaaaataatctatgcgctttcatgttagcattgtgtctagtggatgagcattcacttttgaagaagagagcatattagctactatctaaagcattatttctctgtattgttttagtttaaaacctgagtatttctgagattatccagaaattgtaaaagatagcaagaaaaagagagaagtatacttaagtacaaatgggcacctatttttcattgttgttttaaaccccatttagtttatgtgcagtagaagcctgcccaaccccagacacattgatttttttctagtggcttctcagaaagtggtggcaggaagctggttggattattttgaacaaaaattgaatccactcttggtgcattcattttggtcagtaatgctgattaatgcactagtgaagtttggt

SEQ ID NO: 256209 - DNA, 643 bp, Homo Sapiens
gaaaacacaacctttacgggtacacctgaaaaactgtccttaaccccaacaaaacttaaataattcttaaggtaaaacatctgtaacactttaagtgcccttgtagatatcctcatttataaagtctgcctcagtaaaatagtcctaaatattaaatagtaattataaccaaaaagagtctcacaagaatcacgtgagaatggtgacagctgtgataaaaggcagattccagccacagccagtaagaaatgctgctgaaggaaaaaggatcgtcctgaaatgtaacgggttcgtgaccctgacacaccagacggctcctcttatcaccaccagtgagagggaggctcagggcgtcttgcgctccctattcagcaaaactcaaaacaagccctgaaaacacccaagatgagatttttgggtttctgtttactgtgactcccaacaggaaaagccttgctgagaccagagaaccccatctgggtgtttgcttagatccaaaccaggccccttcaagtcagactgacttcagcctacaaggagagcgaaacgctcccatattcctccatggatattggtacagcgagtcctgactggaaaccttcctcagaagtaagagcgaacaaagcagaaaaacacattttag

SEQ ID NO: 256210 - DNA, 905 bp, Homo Sapiens
gcaggctggtacaggtccggaattacgggatatcgtcgacccacgcgtccgagcagaggaagctgagagtctggcgtgttcttgacgcttggtcttcagccttgcactggctcttctaaaggactttggagggcagataatttcatctgtgtttgagtttgctgaatagggagcgcaagacgccctgagcctccctctcactggtggtgataagaggagccgtctggtgtgtcagggtcacgaacccgttacatttcaggacgatcctttttccttcagcagcatttcttactggctgtggctggaatctgccttttatcacagctgtcaccattctcacgtgattcttgtgagactcttttggttataattactatttaatatttagactattttactgagcagactttataaatgagatatctacaaggcacttaccttaagaattatttaagttgtgatgggttaagacagttttcagtgtaccgtaaatgttgtgttttcagaaaaagacaaaacgatggtgctgactggttttctgtatattgcacaacagtcctcaaatacactgatgtatgaaactattcatacatcaagcagcatttttttcactctccttagaatgggaactatgcagttaaggcagataaaatgtacagatgtttcatatattacaggttacatatataaatcaaaatttcctatataaaactgatttgggatttggggtggaaatattttgaatattaatttatttttaaagatgcaagataggactttgtgcaatgtatttttgtaaatgcttttcaaaatatctgtctttggtagtgcttctgctgctgccaccaaattgataagatgctattaagaggtttaaataaagagttttaatttttaaaagggaa

SEQ ID NO: 256211 - DNA, 1297 bp, Homo Sapiens
  misc_feature (1063)..(1063): n is a, c, g, or t
  misc_feature (1108)..(1108): n is a, c, g, or t
  misc_feature (1121)..(1121): n is a, c, g, or t
  misc_feature (1133)..(1133): n is a, c, g, or t
tggtacaggcccggaattacgggctatcgtcgacccacgcgtccgggcaggaaacgtcttgatggtaaattacaatcagaatcaactaataatggaaaaaataagagagatgtagatttcgaaggtacagatgaacccatttttggaaagaagcccaggatagaagagtcaataactgaagacttaagttcggcagacctgatgcccagagtcaaggtacaatcagttgaaactgttgaagggtgtacacatgaggtatgccattgcatggccttaagggaaaagcagcgtgtaatatttaccagcccaattaaggctctgagtaaccaaaaataccgtgaaatgtatgaagaatctcaagatgttggtttgatgactggtgatgttactattaatcctacggcatcttgtcttgttatgaccacagagattttgagaagtatgctttacagaggttccgaagttcatgagagaagttgcttgggttatattcgatgaaattcattatatgagagattcagaacgtggtgtagtatgggaacgaaactattatctgcttcctgataacgtccactatgtctttctttcggctactattccaaatgcccgacagtttgctgaatggatttgccatttacataaacagccttgtcatgttatttacacagattatcggcccactccattgcaacactacatttttccagcagggggagatggcctgcatcttgtggttgatgaaaatggtgacttcagagaagataattttaatactgcaatgcaagtgcttcgagatgcaggtgatttggccaaaggagaccagaaagggcggaaaggaggaacaaaaggaccatcaaatgttttcaaaattgtgaagatgattatggaaagaaatttccaacctgtgattattttcagttttagtaagaaagattgtgaagcctatgcacttcaaatgaccaaattagatttcaacacagatgaagaaaaaaagatggttgaagaagtattcagtaatgcaatggatggcttatccgatgaagataatcaccatggtggtttnacttcctattttgaaagaaactatagaaatctctttctgaggatngataaggctattngcacgagacttngtatggaatacatgcagtagactgttaatacaatgccgcatttgatgaggatttcgatgatctctgtgatcatcaatgctgcgtctgaggaagatgatgatgagatgatctatgaatgaagtagcacatggaacatctaggctcgtgacttatagcgtcattgc

SEQ ID NO: 256212 - DNA, 934 bp, Homo Sapiens
  misc_feature (20)..(20): n is a, c, g, or t
  misc_feature (50)..(50): n is a, c, g, or t
  misc_feature (95)..(95): n is a, c, g, or t
  misc_feature (103)..(103): n is a, c, g, or t
  misc_feature (113)..(113): n is a, c, g, or t
  misc_feature (124)..(124): n is a, c, g, or t
  misc_feature (166)..(166): n is a, c, g, or t
  misc_feature (175)..(175): n is a, c, g, or t
  misc_feature (230)..(230): n is a, c, g, or t
  misc_feature (245)..(246): n is a, c, g, or t
  misc_feature (255)..(255): n is a, c, g, or t
  misc_feature (265)..(265): n is a, c, g, or t
  misc_feature (309)..(309): n is a, c, g, or t
  misc_feature (334)..(335): n is a, c, g, or t
  misc_feature (899)..(899): n is a, c, g, or t
  misc_feature (923)..(923): n is a, c, g, or t
gaagaagctagtccatatcnagttaagacagattgcagtacttaaccacnacaggtcagtcacactgatgtagagtagatgcaacttaccaatcnctgtaganttccagtacnctaagtctganactgctttgacagtcagtggacccctatccagtacatagccntgtaggacncagtgtctgtcttaacttctgctggtagtacagattgtttgtcatagcagctaanacttatcacatgtcnntaaagcctnatggtgaaanaaagcaagtgtcatagcatgggtgatcatatcttctctgacacnaacacaagaggcttcactagtattnntaaagtctctgatgtctcccattgcacttcaaagctcaattgagatgaaagcctttctccattgtagcagctagcaggcgctctctcatgatctcctcggaagaatattcaggcaacttaaggtaatgcacacatgtattgactgatggatagcttgcatcagtagcatcaaccttgcgtacaaccgtgagcctgggatgcaggttagccagtccacctgggggtagagttgaacaaccagtggtaaactgcaagaatgctttcctttcatcagaagacatgccacataaaaccctcacaaacctcaggaaaccagggctgtcacgtgtataacccagcttaggttcagtgtaattgataatatcctctgctgcccaggatggtgactggtttccacaaagaatcatttggacttcttcatggctgaaggaacttaatttctccattggaaaaactttattaaacccatctctaaaggcttccatttgtttctgaatacccgtatgcatacaaaagtcaaacatcaaatccacatattcttctgcattatccattgttatcatntcatcttcaccacttggcttgagnttctcagctgt

SEQ ID NO: 256213 - DNA, 456 bp, Homo Sapiens
actcttgtcaactaggctggagtgcagtgggtgacagagtgagacctagtcttcaagaaatatacaaaatagaccaatagggctggtaggatagtgggaacataagagtttttcttttcttatttctctaactttggtaatatgttattttcgtaatttaaaaataaaatttcaaatgcaaatttactcccatccattaatatctctgagaaaaatccacaagtccttattgtcaagtatatgactaataccctgttcagcagccctacaaaaaggtaattaaaaccatctagaggcctggtgaggtttgatttacttttctgggaaacttggaaaagatcttcctaagtatggacctgatttatcatctgactttgaagggtctccttggggttgatttctattaaccatctcttccacatactcaagcctctttccaactttcttgtgccgaat

SEQ ID NO: 256214 - DNA, 752 bp, Homo Sapiens
  misc_feature (640)..(640): n is a, c, g, or t
  misc_feature (647)..(647): n is a, c, g, or t
  misc_feature (651)..(651): n is a, c, g, or t
  misc_feature (653)..(653): n is a, c, g, or t
  misc_feature (675)..(675): n is a, c, g, or t
  misc_feature (682)..(682): n is a, c, g, or t
  misc_feature (692)..(692): n is a, c, g, or t
  misc_feature (713)..(713): n is a, c, g, or t
  misc_feature (733)..(733): n is a, c, g, or t
ggggcagaggcctgcgggaagccaagatggcgcataggggttctccaggctgcagttggcgccttatcagtatctaagcggagtgttttggaaggagttaaggggctgtggcaaacgccctctccgccgtcatggcccggcatcggaatgttcgaggctataactacgatgaagattttgaagatgatgatctctacggccagtctgtagaggatgattattgtatttcgccgtcaacagctgctcagtttatttattcacggcgtgacaaaccttccgttgagcctgtggaagaatatgattatgaagatctgaaagaatcttccaattctgtttcaaaccatcagctcagtggatttgatcaagctcgtctttattcatgccttgatcacatgagagaggtacttggagatgctgtgccagatgaaatattaattgaagcagttctgaagaacaagtttgatgtgcagaaggctttgtcaggggttctggaacaagatagagtgcagagtttgaaggacaagaatgaggcaacagtatctacaggaaagatagcaaaaggaaaaccagtagattcccagacatcgcgaagtgaatctgaaaatgtgcacaaagtgtatctgaagaaatgtcatagttncacacanctananaggaccgccattgagatgcatncgtcttncgatgtctgnactggtctaatctgtaatcanccaaccgattcagcttcgangacagagtcaacccagacc

SEQ ID NO: 256215 - DNA, 710 bp, Homo Sapiens
  misc_feature (602)..(602): n is a, c, g, or t
  misc_feature (621)..(621): n is a, c, g, or t
  misc_feature (666)..(666): n is a, c, g, or t
  misc_feature (696)..(696): n is a, c, g, or t
ccgggctgcaggaattcggcacgagagaaagaaagagaaggaaagaaaataattcatcatgaaattgtatagaatactagcatttatgtcatgacctcgtaggtttagctctttgttagaaaaggaaaccatagaaagagacaagggagaaactgacaaactagggtgtttccgaaaaaaggctctcagtatcgggctcaagggcttgtgcccacatctgagcatgcagggaaatagatgtcccccactggctgcacatgtgagtgactgcggcacaaggctgtgatgtgaagagtcgtgacaccatttcctcacacctccacgcaatgccagatatgattcgacaacattcttcctgtcttataaaaagtgtttatctagcccgttggtttggcagatgaaatcaactaggcttttggcttgcttttactgagcatattccggactgagtggctaaataacagaaatgtatttcctcacagttctggagatgggagtccaagatcaaggtgctggcagggtcgatcgcattctgaggcctctctccttggcttatagatggcgccttctccttgggctgacatgggcttttctcatgcatncgtgtctaaataccatctntctagagggtcaccaggcattggatcagggccaccctaatggctnatctaactactatatctgcatgacctattnctgacaatcacatt

SEQ ID NO: 256216 - DNA, 1074 bp, Homo Sapiens
  misc_feature (138)..(176): n is a, c, g, or t
gtctgccattagcatcttcaaagggaattttcgcaaaaaaattggagatgttattctttataccaatttcattaatgatactttcaaataccatatttgccggaggatcaaggccattttgaaaaattaaaattatannnnnnnnnnnnnnnnnnnnnnnnnnnnnnnnnnnnnnncaatcattccaaactttatcctccttattcatttgcagttggatgctcagcttttgataaactgctggaattgcttgaagaaacactacaggtaattttcggacattacaccattcacatttagttagatcagaggtatttaatataatctctacaggatcatggtctggttcgtctagctgtatcttgataaaatctaaacaaaaaattacaggctctattaacagccggaagagtgttcctactcgtatacttcgacagtttaaaatgacactgtcaaaggaactttggcagcttaaagctaaagcatctggaggttcttgagaaaacactttacgacgtttcagaggtgtgttgataatagaattgccaaactggtctttcattcttgcttatcttggcaatgtaactgtatttaactctgagtcttctggaatgcttcgtagttcacgctctgctctgcaagtattttcatttagcgctgcttctacttttccagtggatggtgcaggggaagaacatgctgaatcagcaggctgaggagatatgctttctcttctgttagttctgtcgttgtcatcatcatcatcactggacaaaatgattggatcatttaggtctgacaaacttgttttcctttctttcaagtttgtgattttgggtatttttgccccaggtaaaatgacttttccattagtctgtaaataagtgtgtttactgtcatcacaattcacaataatatcaattggaaccttttccacattgttgccataaaacttcttggttgttaatcctgtgttttgtgacttctgtcctccagaattctgatgaattgacgttcttaataatggtccagtagactcattcaaagtaatagcttgtctgcaatttctttgca

SEQ ID NO: 256217 - DNA, 641 bp, Homo Sapiens
ataaggaactgccaataacaaagaaataaagaaatcaaaacaccaaaacagaaatagaggtaatgtgaggtaattgaaagcactcctcaaaggactttaggaattacactatttcaaaataaaacttgaaatgtaaatccaggaacgttatatagagttacttacgtttcattatccattaggacacagtgctttatgatggccttaagtacaatttatagacgttattcaataaagaaagtctataaaaatacaaacaaaatttaaaatgccctgctcaaaaccaaatttttttcccaaagaatttcaactttcctcaaaacgtcaacaatctccaaaatttccatccaaataaaacagtttatataagacatgttaagtaatacagcactgttttatatatctgtctgcctcaaactcctgaatatacttcacaaatataaaacatctaatcaaacccaagtcttttcattatcaactaaaagactgagtgaatgttcaccaaaatatcactcacatctttatctctcctacccccaactccactctcccaactgcttccaatttccctttttctattaggggtactcctcctagtgccaatggctagaaatctcaattcaatcctgcttctttaaaat

SEQ ID NO: 256218 - DNA, 567 bp, Homo Sapiens
agacatttgggatgccacattccagaaaactgtcataataaatattcaaatttataatgtctatgatgtgactggctccccctagagttgtgcagtgtacagcctgcccaaccatatggaagagtcctgtcttggtcagtttccatctcattgcatctctttgcattaagaacttcccccttgtggggggccctactctcagttgcaaccttaaattgcagtattgattattgtctctttaccctcccatggtgtatataaagactctgtcgggctttatctatgtttggatccccaggacctaaagtagtgctttgttcaaacaaatcatttagtcaatgcttgaaaagcttttgctttaacactgctctaaaagtctccctcaaagagctctttctaagggggtctttccggacccccctatgcaccctggacccaggatgttccaattgtaacacaaatcccagtagggccattgcctgttttctttcccctattttattttaacccacccatcccctaacacaccagtaaactttaagctcctttaaaggagggggcatgccc

SEQ ID NO: 256219 - DNA, 788 bp, Homo Sapiens
  misc_feature (14)..(14): n is a, c, g, or t
  misc_feature (519)..(519): n is a, c, g, or t
agcaggaaagcttntctgacggctatggaataccgttagccaaggtccacttggcccagcactaagcaaaagatgcgtagtttgcacagaaggttttgtgatactgcctctcaacagccccagcagcttgggaactagcaagagcacatttcttgcctcatcagctgtcctgagatggaaaactcagtggatataggaccctgattccgatgaaaggggcacgtggtcccaatgctggagctcctctggcaggttctgtgagcactactcacagatccacacctgaccctgttgggtcgagtcaggctgggctttggtctgcactgtagcacctgtgttctttgagttcacatcatgaatgtggtgatttcccagataccatctcaggcttaacctagcacatcctatttcttttcttctatgatatccaaattggactgacctcacttcaaagttgctggcccattttgtcaccctatcttatctcggggaaatggcagactgatggccagaccaacntctgttgaaattcttgcatagagcaaacctgtgctcatttttaagtggcatgggagaggccccaagcctagtaaagcctagtctgggtcttcacagtgctggtagaatgtgtttgtgtgtataaatatatgatatagatttatatatggtttaacgccacatattgaaggccaacataactggtggacagcgtgggtgacagaaaatgaaagtctttttggtgattgtttaagcaagatgtgtataaagaaataaatagttttcctttc

SEQ ID NO: 256220 - DNA, 1919 bp, Homo Sapiens
gtaaaaagacaacactttattgtctccattgagagcatgtggccccctgcttagttcttactaatcagagcacttaatttacaatcaaatgacatgtcaccgtggagcctgtgttcctagccctggcccaagttctatcccaaaaaccagtggttccttgagagtcaggactctgaaatgtgagtgtggataactgcaaaaaaagctgctgtatcccaccctatgaggctgcaaagatgggatggagagggagagagtagcaagttgcagaaagccataggtaaaatccaatcagtagtcagtagagggcaagaaacgcccaggatgccaatgatcacagagaaaggaaaatgctgagaacaaaatctggaggagtatgaagagtgagagaggcctgggcaaggaggcagtctgggaccagagagagaggtcagcctgagtcaggaatcctagagactgtgaggtaaaggacaatgatcaagggactcagacatcatagaagagtcgaacgagctgatatcgaatggagaaggtgatggcactgcccaggatctgcagcagcagcaggagcaatgtgaggtttctctcatgtatgggcccaaggactttaagtagcaagttgatgagggtcatgttgttacattcagtgaattcaccatcttcagtctcactctggtgtactgtcaccagctggaggctctctgccacctttaaaataaaggtgcccaagaaagagaggctcttggtcttgaacttggaatagctcatctccagtttgcctgtcttgatattgagtctgggtatgcggtggcgagggcaggggatgatatgcaggagctgaggcagtgagtagaggaagttgaacacctggggcatgaagaatagtagcatggtcttgctgaagtgtcccaagatgcccaccacggcaaaggtcatgccagcaaagtaacagaaggtatctcccacaaacacccgtgatgggtaccagttgtggtagagcaatcccaaagtggtgaaaaaaaagggtatcatgaagtagagggaaaagacatgatcatcccgacaatcaccttccaactctaccaggttgaagacaatgatggaagcagaaatgactagtgactggccagcctctaggccgttaattcctgctaggatattgatggcattggtacagaacactgccagcagccccatgtagacatagtacaggattcccaagtccagatgcaggccaagtatcgggcggaagggcttgggcaccacaatggtcgtgttgccaaagttggtgaaatagaccatgaggagaggtagtgaggcagctgtaggtagcagcagcttatggcgccagcgcagattcagtacatcatccgcaaagcccaggaagatcatgcagcagatggcaaggagggcacctatcagggcccacaaattccatggggggggaatgccttacactgctcctttcacaaagcagttcaggaaggggaaagggatgaagcagaagaggatgataaggaaaacagcaccgctgatcactccccgggattctgggatctgctgtcggctggttttgttgaggtcctgaccacagaggcgcgcagcaatgaagtggccccggaaggccgggatgagggtgactgtggccacaaatcccagcagcgagacgatcaaattgatcagcagcggcatgggcaattccgagaaggcccacatggtgaccggtcaggggcccggctccgccgcctcttcaggtaacgggcaagctgagcagcagtcctgaggcctcagcagtatggagtggccgctccccacaggcaggctcttcccacaccaatctgagcaaaacccagcaactctgacttgagccgccgtcgggacaccggggaacctctctaaggcaacctatgttctgcccc

SEQ ID NO: 256221 - DNA, 1230 bp, Homo Sapiens
  misc_feature (157)..(157): n is a, c, g, or t
  misc_feature (300)..(300): n is a, c, g, or t
aaaaccattgatatcatatagggcgctagtatgttgttacctgaaggtacgaacgcatcgagatagtgagcagaaggaagcggccgtgataacattcgatatagcatacattactacgaatgttatcatgtcgacggtaccggacatatgcccgggnaattcggacattacgggcggtggtatttcgcgccacgggtacgatacgtattacacactcgtcattctatcgtcatttgtccctatggattataaacgacgggagctgtgttgttccttgcctgctacgcgtagctcagacanttcagtctcctgtcacgttgcaggtgtagagcgaagatgatttagccttccaatatagaggtatatttcgttctgaactggccgtcgaagagcgagataccgtcagtctagatatgtctttgaggtagaatatatgatggaccacatagtttaagattacaaggtactttccctcttctctcaggccatgcattatgaataaagtgcctcccttagcctgagctcctaaagacctcttgtacttggttgcaaacctcagatctctagtctagtctaagtctagatctagtctagtcatgtgtgacatgtgtactagagataccactagacccagtattgctgggtctctatagtttaggaagattgggggtttaataatatttaatgtctttttaggatcataaacataaataggtttgttgatattcaggccttcagaatttaagggttttaaatatagcattcagattgtaattggtatgtttttgccatctggtccactcaattgtatatttttattttgcaaaacaacccaaaacttactttacgttgctttgttcagtaccttttgaattcccccagaagagttgttttcaaaacaaacattccagaatgaatgtcgctcttcaatggaacgtctttattgtgcttgaagtatttcttctctggttgtaattctaaattacagagtcatttgagctttctcccctcccgctagtatctttacaggagcagggaagagcagtagaggatgtataattttgggcgaagttaaattacaatttatttgaggttattcctaaacctatttatttggtgttttggaggagatcacacactaagagaacgttgattgcctcggctattgtgctggctggacactttggtcacttttgaagcatgttaataaatgtcactgattaaaacaga

SEQ ID NO: 256222 - DNA, 1137 bp, Homo Sapiens
  misc_feature (1116)..(1116): n is a, c, g, or t
gggactgcgacggcaggctttgagtgtagcacttggtagttcttcctctgctctgcttcccttcggaggaaaatttcaggctgaaggtttagcgggtgccgcctctaaagagagcaatcactacacttatggctgggattttgcgcttagtagttcaatggcccccaggcagactacagaccgtgacaaaaggtgtggagtctcttatttgtacagattggattcgtcacaaattcaccagatcaagaattccagaaaaagtgtttcaggcctcacctgaagatcatgaaaaatacggtggggatccacagaaccctcataaactgcatattgttaccagaataaaaagtacaagaagacgtccatattgggaaaaagatataataaagatgcttggattagaaaaagcacatacccctcaagttcacaagaatatcccttcagtgaatgcaaaattgaaagtagttaagcatttgataagaatcaagcccttgaagttgccacaaggacttccaacagaggagaacatgtctaacacgtgcctcaaaagcaccggggagttagtagtgcagtggcatctgaaacctgtgggagcagaaagcacatgagtcctaatgccccagcagcttccgattggaaaatgcaaattgtttttatttaaagatgatacctggaggggtggggagaagtaagaattgtaagggaggttcagtagtggggaattctgtgacagctgattgaagatgatgatgaagaacctctgcattctagttaccctttgcttcccttcacctcttgtaaaatttggcttggcaacaatgacattgtcatgcttattgtcccaatatccatcctgtcgtagatcttaatgtttttgatcgttgcgttaaagtggaagtgccacccacagtgaaaccagatcccattaataaataagcttaaaggcaactgcagttttaattccatagttattgaatatccagtgtgtgtaaggcctggaggggagccaaaggacactaacttctaagagctccgtctagttggagagaaacctgtgtgccacaacatacagtgtccttgcttatgtggggtcgaagacatctgtgaaaataaaancagcctctgctaatttagcgc

SEQ ID NO: 256223 - DNA, 1647 bp, Homo Sapiens
  misc_feature (661)..(730): n is a, c, g, or t
  misc_feature (781)..(781): n is a, c, g, or t
gggccttcggaggaaaatttcaggctgaaggtttagcgggtgccgcctctaaagagagcaatcactacacttatggctgggattttgcgcttagtagttcaatggcccccaggcagactacagaccgtgacaaaaggggtggagtctcttatttgtacagattggattcggcacaaattcaccagatcaagaattccagaaaaagggtttcaggcctcacctgaagatcatgaaaaaaacggtggggatccacagaaccctcataaactgcatattgttaccagaataaaaagtacaagaagacgtccatattgggaaaaagatataataaagaagcctggattagaaaaagcacatacccctcaagttcacaagaatatcccttcagtgaatgcaaaatttgaaagtagttaagcattttgataagaatcaagccctttgaagttgccacaaggacttccaacagaggagaacatgtctaacacgtgcctcaaaagcactgggggagttagtagtgcagtggcatctgaaaccctgtggagcagaaagcacatgagtcctaatgccccagcagcttccgattggaaaaatgcaaattgtttttatttaaagatggtgagaaagtgttttcattaaaatatgttttcaaaaacattttcannnnnnnnnnnnnnnnnnnnnnnnnnnnnnnnnnnnnnnnnnnnnnnnnnnnnnnnnnnnnnnnnnnnnntcggactcctgggttcaggccatcctcccacctcagcctcccaaaatgctngggattacaggcatgagccactgtacccagccaaaattgttttcttttttaagtgaattcaacaatttctgtgagtggctctttgcatgaacactgtgcaaggtgttggagaaatccaaagctgaccaaaacatggtccccaccttttggagcttacagtctgttctggggaacagagattcagccaaagtcaagaaacactggatgccagctagattatctgttctgtgctttggtgtctataagtacatatgtggatatgggttcattctatccctaaacttagtaccaaaccagcatttaatatctaattataaatctaattgggcctaaactttattattgcacactgcctgaacaaaacctattggcctctatgtaaattttttcctcatggaacaagggtgtgaaatgaaaatattttaggatttattcaaaaacagactattctgttttcagcttcagaattgttctttgaaccctaaggaacctctgtcaacagttgaggttgctggtgaaaagaaagaagaaggaggcggaaatctctcagggagaattatttcctttcttttctatttcagataccctggaggggtggggagaagtaagaattgtaagggaggttcagtagtggggaattctgtgacagctgattgaagatgatgatgaagaacctctgcattctagttaccctttgcttcccttcacctcttgtaaaatttggcttggcaacaatgacattgtcatgcttattgtcccaatatccatcctgtcgtagatctttaatgtttttgatcgttgcgttaaaagtgggaagtgccacccacagtggaaaccagatcccattaataaataagcttaaaggc

SEQ ID NO: 256224 - DNA, 644 bp, Homo Sapiens
gcgagcagctggtgctgcacacagcccgggcaagggccatcgaggcgctggttgagctattcctgaatgagcttaagaaggactccggctatgtcatcgccctgcgcagctacatcactgacaactgcagcctcctcagcttccaccgtggggacctcatcaagctgctgccggtggccaccctggagccaggctggcagtttggctctgccgggggccgttccggactctttcctgccgacatagtgcagccggctgccgctcccgacttttccttctccaaggagcagaggagtggctggcacaagggtcagctgtccaacggggaaccagggctggctcggtgggacagggcctcagaggtgaggaagatgggagagggacaagcagaggcaaggcctgcctgagactgaggaaggaaaggggtttgaccactcccgaggctgccatgcggtgggaccaccctgctgtccgtctcctgtggctgcccctctgccccctcctgatggatcgccttgtctctccagcaagactgtgcactccttgcaggcaggggctgggctgggtgctgctcttgtgtcccacgtggtacttagttcaaggctgccccagcagatgcttaataaacagctcttcactttcca

SEQ ID NO: 256225 - DNA, 1287 bp, Homo Sapiens
  misc_feature (1176)..(1184): n is a, c, g, or t
tcagccccgaggtcctccagcagaatctccagggttatgatgccaagtctgacatctacagtgtgggaatcacagcctgtgaactggccaacggccatgtcccctttaaggatatgcctgccacccagatgctgctagagaaactgaacggcacagtgccctgcctgttggataccagcaccatccccgctgaggagctgaccatgagcccttcgcgctcagtggccaactctggcctgagtgacagcctgaccaccagcaccccccggccctccaacggtgactcgccctcccacccctaccaccgaaccttctccccccacttccaccactttgtggagcagtgccttcagcgcaacccggatgccaggcccagtgccagcaccctcctgaaccactctttcttcaagcagatcaagcgacgtgcctcagaggctttgcccgaattgcttcgtcctgtcacccccatcaccaattttgagggcagccagtctcaggaccacagtggaatctttggcctggtaacaaacctggaagagctggaggtggacgattgggagttctgagcctctgcaaactgtgcgcattctccagccagggatgcagaggccacccagaggcccttcctgagggccggccacattcccgccctcctgggcagattgggtagaaaggacattcttccaggaaagttgactgctgactgattgggaaagaaaatcctggagagatacttcactggctccaaggcttttgagacacaaggggaaatctcaacaaccaggggatcagggagggtccaaagccgacattcccagtcctgtgagctcaggtgacctcctccgcagaagagagatgctgctctggccctgggagctgaattccaagcccagggtttggctccttaaacccgagaccgccacctcttcccagtgcttgcgaccagcctcattctatttaactttgctctcagatgcctcagatgctataggtcagtgaaagggcaagaagtaagctggcctgcctcccttccctcagacctctccctcataattccagagaagggcattttctggtcttttaagcacagaataaggttgggaacagtccatcctttatccctccttctggcgttggggccctggaccccttaagtctttttcccacggatttatnnnnnnnnnccctccatttctcttttcccccccaaagaaaatcctctctgtagggcgcctttcctggcccgaattttgccccctggggggcctttttcccccaaggggggcc

SEQ ID NO: 256226 - DNA, 606 bp, Homo Sapiens
  misc_feature (42)..(42): n is a, c, g, or t
  misc_feature (137)..(201): n is a, c, g, or t
tgatcatcagtgccaatgagtaagtcagtcaggcttatgcantgaggcttctataaagcccaaatgggactgactttgaatagttacagcatagctaatacctatcttgtagggtgatgttcctgtacatggtatgnnnnnnnnnnnnnnnnnnnnnnnnnnnnnnnnnnnnnnnnnnnnnnnnnnnnnnnnnnnnnnnnngcctttgcagttagccagtaagtgtcctgtccagagttctctgagctgcttagctaattaacaaaacccatggagtgagttgtgagccctagatccctacaagggtatagaacctgccaaaggaattcactttgtagactggtgaaaccacctttgcaaaaattataactgaggaaattatgacagtgaaagagatcagacctaattgactccatcttgtatctaacctttgggctgttcttgttcattgctgggtgtaggtcgaaataaccttgggaaggaattcagtttacggtttgactctgaaacaaaactggtaacagccctttctcggaaagacccccttcttgcttggggaccagtctgcctttgaaggactaacaaattagctacaagattagaaat

SEQ ID NO: 256227 - DNA, 880 bp, Homo Sapiens
ggggccgaaacttccgccgccgcgtccgccgcctccggaactaaacggggtgaggtcacattcggttatctctaacgttggaaaacgatggagctaacacccattatggagattaaccacttttcatcaggtttttaacttaagtcgtgaggaatacaacggtgaacacaagattcattttattttcatcaccatgggacgtatcctgttgttgagttctctgggtcagacctctgaagacttctcagatggatcctagtctctgggcttgccctgaaattactcgctgctcagggagagagttgaaatggttggcatcctcccactctgttgctccggctgtgtcccctcgctctgttgttccagctatgtcccctctgttgctccaactgcagctcattctgttagagttcctcattcagctggtcactgtggccagagggtgttggcctgctcccttcctcaagtattcttaaagccatggatttttgtggagcatttttcttcctggctctcccttgagttattttcctttcttcgctatcttgggactcttctttgtgcttgcggtcatcggttgagagaaggacttcttcttccttgtctccttggtgttggctcgtggttgctcttcaacaactggactggaggctcttggttttctcttcatcttcaacaagtcagtctctctcaagggtctcacgttgcagcattcttaccagaggccattgggcctggagttccagttccagtgtctggagagtccacctcagctcagcaatctcatgccggttggcaattgtcagcagaagccgatgcctgcccatcagttctttactctgaggtgttagagtggaataaaaatataaataccggaaag

SEQ ID NO: 256228 - DNA, 476 bp, Homo Sapiens
  misc_feature (215)..(215): n is a, c, g, or t
  misc_feature (217)..(217): n is a, c, g, or t
  misc_feature (362)..(362): n is a, c, g, or t
  misc_feature (413)..(413): n is a, c, g, or t
  misc_feature (424)..(424): n is a, c, g, or t
  misc_feature (439)..(439): n is a, c, g, or t
  misc_feature (444)..(444): n is a, c, g, or t
  misc_feature (459)..(459): n is a, c, g, or t
tcggttatctctaacgttggaaaacgattggagctaacacccattatggagattaaccacttttcatcaggtttttaacttaagtcgtgaggaatacaacggtgaacacaagattcattttattttcatcaccatgggacgtatcctgttgttgagttctctgggtcagacctctgaagacttctcagatggatcctagtctctgggcttgctgnanaattactcgctgctcagggagagagttgaaatggttggcatcctcccactctgttgctccggctgtgtccccttcgctctgttgttccagctatgtcccctctgttggctccaactggcaggctcattctgtttaggagttcctncatttcagctgggtcactgtgggcccagaggggtgttgggcctggttcccnttcctcaagtntttctttaaaggccnggggntttttgtgggaggcntttttcttccggggttt

SEQ ID NO: 256229 - DNA, 1490 bp, Homo Sapiens
  misc_feature (1107)..(1185): n is a, c, g, or t
  misc_feature (1296)..(1296): n is a, c, g, or t
  misc_feature (1359)..(1360): n is a, c, g, or t
  misc_feature (1376)..(1377): n is a, c, g, or t
  misc_feature (1384)..(1384): n is a, c, g, or t
  misc_feature (1407)..(1407): n is a, c, g, or t
  misc_feature (1419)..(1419): n is a, c, g, or t
  misc_feature (1442)..(1442): n is a, c, g, or t
  misc_feature (1454)..(1454): n is a, c, g, or t
  misc_feature (1467)..(1467): n is a, c, g, or t
  misc_feature (1471)..(1471): n is a, c, g, or t
tccactctcccgccgccctgcgtggcgaattccgcacgaggcctacttggagagctggagggcggagacagaacttcgcgggaaactagacctcttggggcctgcggtgcatgcagtgtaagaccaacggggattgccgtgtggaagagtgcgccctgggacaggacctctgcaggaccacgatcgtgcgcttgtgggaagaaggagaagagctggagctggtggagaaaagctgtacccactcagagaagaccaacaggaccctgagctatcggactggcttgaagatcaccagccttaccgaggttgtgtgtgggttagacttgtgcaaccagggcaactctggccgggctgtcacctattcccgaagccgttacctcgaatgcatttcctgtggctcatcagacatgagctgtgagaggggccggcaccagagcctgcagtgccgcagccctgaagaacagtgcctggatgtggtgacccactggatccaggaaggtgaagaagggcgtccaaaggatgaccgccacctccgtggctgtggctaccttcccggctgcccgggctccaatggtttccacaacaacgacaccttccacttcctgaaatgctgcaacaccaccaaatgcaacgagggcccaatcctggagcttgaaaatctgccgcagaatggccgccagtgttacagctgcaaggggaacagcacccatggatgctcctctgaagagactttcctcattgactgccgaggccccatgaatcaatgtctggtagccaccggcactcacgaaccgaaaaaccaaagctatatgggtaagaggctgtgcaaccgcctcaatgtgccaacatgcccacctgggtgacgccttcagcatgaaaccacattgatgtctcctgctgtactaaaagtggctgtaaccacccagacctggatgtccagtaccgcagtggggctgctcctcagcctggccctgcccatctcagcctcaccatcaccctgctaatgactgccagactgtggggaggcactctcctctggacctaaacctgaaatccccctctctgccctggctggatccggtggacccctatgcccttccctcggcnnnnnnnnnnnnnnnnnnnnnnnnnnnnnnnnnnnnnnnnnnnnnnnnnnnnnnnnnnnnnnnnnnnnnnnnnnnnnnnacagctatctcacatagctgtgtgaagcagatgagaaaagctggaggaaggccgtggccaatgcgagaagctctggctatataagtatggtgccgctgctgtgtggtgtantaaataagtatcgatatagttagtctatacttacatacagattttgtcccagtgacatggccnngaaatcggggaggccnngtccaantggcctataggggcgattacatnactggccgcgtncaacgtctgattggaaacccgcnttccaactattngcttgagcatccntttngcagtgctatacgaaagcc

SEQ ID NO: 256230 - DNA, 940 bp, Homo Sapiens
  misc_feature (241)..(264): n is a, c, g, or t
gccgagccagccccttcaccaccagccggccgcgccccgggaagggaagtttgtggcggaggaggttcgtacgggaggagggggaggcgcccacgcatctggggctgactcgctctttcgcaaaacgtctgggaggagtccctggggccacaaaactgcctccttcctgaggccagaaggagagaagacgtgcagggaccccgcgcacaggagctgccctcgcgacatgggtcacccgccnnnnnnnnnnnnnnnnnnnnnnnnccacacctgcgtcccagcctcttggggcctgcggtgcatgcagtgtaagaccaacggggattgccgtgtggaagagtgcgccctgggacaggacctctgcaggaccacgatcgtgcgcttgtgggaagaaggagaagagctggagctggtggagaaaagctgtacccactcagagaagaccaacaggaccctgagctatcggactggcttgaagatcaccagccttaccgaggttgtgtgtgggttagacttgtgcaaccagggcaactctggccgggctgtcacctattcccgaagccgttacctcgaatgcatttcctgtggctcatcagacatgagctgtgagaggggccggcaccagagcctgcagtgccgcagccctgaagaacagtgcctggatgtggtgacccactggatccaggaaggtgaagaagggcgtccaaaggatgaccgccaccctccgtgggctgtgggctaccttcccggctgcccggggctccaatggtttccaccaacaacgacacctttccacttccctgaaatgctgcaacaccacccaaatgcaacgagggcccaatcctggagcttgatggatgctcctctgaagagactttcctcattgactgccgaggccccatgaatcaatgtctggtagccaccggcactcacgaaccga

SEQ ID NO: 256231 - DNA, 527 bp, Homo Sapiens
  misc_feature (123)..(123): n is a, c, g, or t
  misc_feature (130)..(130): n is a, c, g, or t
  misc_feature (133)..(145): n is a, c, g, or t
  misc_feature (239)..(239): n is a, c, g, or t
  misc_feature (390)..(390): n is a, c, g, or t
  misc_feature (392)..(393): n is a, c, g, or t
  misc_feature (439)..(439): n is a, c, g, or t
  misc_feature (446)..(447): n is a, c, g, or t
  misc_feature (458)..(458): n is a, c, g, or t
  misc_feature (474)..(474): n is a, c, g, or t
taagttttctctagctggatcctctgctgagcctatggaggcagacctctagatgcttactggagccagtgagttaagtccctttctctacatgtatgtgtatatgtatgtatgcatatattntttattntannnnnnnnnnnnngtttcacttattggtttcaacacaaaggcatacttcttcctggctatttgtgtgtatataaaacagcatgttatgtttggattgattagtacanggatgaagaaatcaaacctttttgtgaaggttttgatggatgattttcagttctggtacaaaaaatggtgtattttgaagggaacgaactaataaaaaagggtacatacagcctgggcaacatagtgagacctttatttctattaaagaanannaaaagaaaagccggtgtagtggtcatatgtgtagtccactactggngagttanngtgaggatggntgagcccagaagtcangctgagtgactatgatgtaccactgactcagctggcacagctgagatcccttc

SEQ ID NO: 256232 - DNA, 845 bp, Homo Sapiens
  misc_feature (640)..(640): n is a, c, g, or t
  misc_feature (664)..(664): n is a, c, g, or t
  misc_feature (683)..(683): n is a, c, g, or t
  misc_feature (758)..(758): n is a, c, g, or t
  misc_feature (770)..(770): n is a, c, g, or t
gggagaagcgggcggcgcgggggagatgcataagcttaaatcgtctcagaaggacaaggtccgccagtttatggcgtgcactcaggctggcgagagaactgctatctactgcttaacgcagaatgagtggagactagacgaggccacggacagcttcttccaaaacccagactcgctccacagggagtccatgcggaacgctgtggacaagaagaagctggagcggctgtacggcaggtacaaagatccacaagatgaaaacaaaattggagtcgatgggattcaacagttttgtgatgatctgagcctggatcctgccagtatcagtgtattggtcatagcgtggaagttcagggcagcaactcagtgtgaatttagcagaaaggaatttctagatggcatgacagaacttgggtgtgacagcatggagaagctaaaggctcttctgccaagactggagcaggagctgaaggacacagccaagtttaaagatttttatcagtttaccttcaccttcgctaagaacccagggcagaaaggtttagacttagaaatggctgttgcgtattggaaattagtgttatctggaaggtttaaatttttagatctctggaacacattcttaatggaacatcacaanagatcaattccaagggacacctgnaacctcctgctggactttnggaacatgattgcggatgatatgtctaactacgatgaagaaagagcttggcccgttcctatagatgattttgtanaatatgcacggnccagtagtcacaggtgggaaacgcagccttttctaggcagcaagttaagcaggaggtagattatgaaatgatttg

SEQ ID NO: 256233 - DNA, 319 bp, Homo Sapiens
gctgcaggaattcggcacgagctgaaaggaggtgtggtctatcaaaattaggaaacaaattaagaaagatgatacaggaaagaagaaatctattctgtgacagcatgtggttcatttttctgtaatgtagattgcttttttcctggaggattcaggcaacagaatcccatgaaatactgggcttttgttatagtacatagaccaggatccaagggggtattggagggaaggtacaggatgacagctgtacatcaggcctagacaggcaaccatccagattggcaggaggacaggggacttaaggagggaggtctctaag

SEQ ID NO: 256234 - DNA, 1007 bp, Homo Sapiens
  misc_feature (411)..(421): n is a, c, g, or t
  misc_feature (458)..(469): n is a, c, g, or t
gagggcctgaccttcctgaggccatgtgcggtttctgaggctgacatgtcagtaactgactggggtgcactgagaacaggcaagactttaaattcccataaaatgtctgacttcactgaaacttgcatgttgcctggattgatttcttctttccctctatccaaaggagcttggtaagtgccttactgcagcgtgtctcctggcacgctgggccctccgggaggagagctgcagatttcgagtatgtcgcttgtcattcaaggtctctgtgaatcctctagctgggttcccttttttacagaaactcacaaatggagattgcaaagtcttggggaactccacgtgttagttggcatcccagtttcttaaacaaatagtatcacctgcttcccatagccatatctcactgtnnnnnnnnnnnttaataaactgttacttatatttaagaaagtgaggannnnnnnnnnnnaaagataaaagcatggtcagatgctgcaaggattttacataaatgccatatttatggtttccttcctgagaacagtcttgctcttgccatgttctttgatttaggctggtagtaaacacatttcatctgctgcttcaaaaagtacttactttttaaaccatcaacattacttttctttcttaaagcaaagcatgcataagagtcatttgaagaccatgtgtcccatcctcaagccacagagcaactcacgggggtacttcacaaccttacctagtcaagagggcttaatatatagctttattttggtacgattgagactaaaagactgatcatggtttgaatgtaaggaaaacattcttttgaacagaaatagtgtaattaaaaataattgaaagtgttaaatgtgaacttgagctgtttgaccagtcacatttttgtattgttactgtacgtgtatctggggcttctccgtttgttaatactttttctgtatttgttgctgtatttttggcataactttattataaaaagcatctcc

SEQ ID NO: 256235 - DNA, 411 bp, Homo Sapiens
caccttacccattcataagtttggcttcagtactttggccctggttgaaaagtactcatctcctggtctgacatccaaagagtcactctttgttcgaataaatgctgctcatggattctcccttattcaggtggacaacacaaaggttaccatgaaggaaatcttactgaaggcagtgaagcgaaggcccaatgtcgccggtgacctggacagcactttggagagccagagcgcatgggagtgctgcctggtccgcgagaacagttcaagggcagacggggtttttgaggaggattcgcaaattgacatagccacagtacaggatatgcttagcagccaccattacaagtcattcaaagtcagcatgatccacagactgcgattcacaaccgacgtacagctaggtatctc

SEQ ID NO: 256236 - DNA, 2263 bp, Homo Sapiens
aaggagcgaggcctgggtggcgaattcggacgaggatccaagagtcactctttgttcgaataaatgctgctcatggattctcccttattcaggtggacaacacaaaggttaccatgaaggaaatcttactgaaggcagtgaagcgaagaaaaggatcccagaaagtttcaggccctcagtaccgcctggagaagcagagcgagcccaatgtcgccgttgacctggacagcactttggagagccagagcgcatgggagttctgcctggtccgcgagaacagttcaagggcagacggggtttttgaggaggattcgcaaattgacatagccacagtacaggatatgcttagcagccaccattacaagtcattcaaagtcagcatgatccacagactgcgattcacaaccgacgtacagctaggtatctctggagacaaagtagagatagaccctgttacgaatcagaaagccagcactaagttttggattaagcagaaacccatctcaatcgattccgacctgctctgtgcctgtgaccttgctgaagagaaaagccccagtcacgcaatatttaaactcacgtatctaagcaatcacgactataaacacctctactttgaatcggacgctgctaccgtcaatgaaattgtgctcaaggttaactacatcctggaatcgcgagctagcactgcccgggctgactactttgctcaaaaacaaagaaaactgaacagacgtacgagcttcagcttccagaaggagaagaaatccgggcagcagtgacactggcctccagcctcaatctgttccgtagctcagagcctgcctgccagggccaagtgccctagagcccacccggtgtcctgaagtcctcggggggaggccagccctggctcactggcacagggcaggtgggctctcggggaaggtgtcgggggccccctaggagggagcgctggggacattgccatgggacggaagtctgcttggcagtggctttgataagcgatgcttgggggtcagaccaccccctagaggagccacgtgccgcccagccaccttcaatgcctgccaccctgcccgaggatgtacagagccgtgcccacacatttccttgcaacttgatcaaatttcttaaagcaaacaacaaaaatgtacatttctgtttttccttttaataaacaggtgtactctttatcatggttggtatgatggaccattctttggggcggaggattgattatgttactctctttaaaatctgttcccatatgaacaggcagatggaaaagctatggttcgatttctcagaagaaatgtttaggtcttagtcaatagttttaactatgccatttgtttaaatgagtgcatttgcttcgagggtagtgtcttactaaaagttaggaacagagacctagtggtgtgtccaaggccgtgtcactttccccttcagcacaccccagcttctgacctcagagcccaggagctgcgtggacagtgtggggtgccaggaggaggggcggtggctggtcctcaggcacgctgcactcccagccagacatggtctttccgtttcttaagtagcaagtgtaggtttcagctggcagttccacctgcatgttctctgcttcgctgccttggaagggcccacattccccattcctcttctccttacagcgcctgcctcctttttcaagcaggcggaaagctgctgtttctcacgtttcagggagaggggtgagcggagggagacctgtgtccgtgccgtccggctccctgggtgggaacaggcaagggatcagatgcccctgacaccacgcctctggccacaccagatgcctctgcagtcctcgacagcctctcaagtgtccctcctgcggtgatgtccttactgtccccagccagggccggggaccggtgtttcactgaggacctgcattagaaacattttttaaattgttgtacaggaagagatgtgtctaaaacagcatcttaaagctgagtgtatttctttgcacaaggggtcatgctgatgaattcttctttcattctgatctttgttcagccaacaggagcgtccttttctaatgtcttccattcctaccccccacccaaaaacaaaagaaatatttgtagcttgctatctgtatttgaatttttagcaattttatatttagatactttgaaaaatgtaaatgactaatttggtcattaaatcttgtgacatattcgatattaaaatgatattaaaataaaagtcatat

SEQ ID NO: 256237 - DNA, 816 bp, Homo Sapiens
  misc_feature (13)..(13): n is a, c, g, or t
  misc_feature (41)..(41): n is a, c, g, or t
  misc_feature (46)..(46): n is a, c, g, or t
  misc_feature (104)..(104): n is a, c, g, or t
aaatgggaagggnagggagcccaaagggaaaatgagggttntggtnagtgcaaattcccagcagaaatctggccctgtgcccccagctcccggggctgggctgntgaggtcaggaggtgggctgcgaagttctctgcagccatcaagaccgaacaggatggggcacatatcaggctctgggcaccataatacaatcccgtttgattaaaagaaatttctggtaatgaattaaaacagacccaaggaaaaaaggacacagtggcaatatattctcctggcacccagcacacagaagagaagagaggggaaagagagaaaggagacataaataaaagggactactcactgggccttttctcctccagcaaggtccacaggccacagagcaggtcggaaaccgaattgaagatgggtttcctgccttaaacccaaaacttagtgctggctttctgaattccgtaacagggtctatctcctactttgtctccagagatacctgtaagcccaaggtgaggacacaaaagaaaacacaagaagtagaaggtgtaagtgatttcagggaaatcatttgacctgttttataaatctgaaattgcatgaacgtgagctctttcttagggctttggggaatgccacgggcttcctgagacaaacataaggacactccaaatggcacacacaagttgcatagtctggtttcctgggtgggtgagttgagggtggggaacccccccaaactatatgagagggtattaagaaacaagccttcttagatataacatggatccaacacagagaggctatttacagccgtac

SEQ ID NO: 256238 - DNA, 663 bp, Homo Sapiens
  misc_feature (31)..(31): n is a, c, g, or t
  misc_feature (38)..(38): n is a, c, g, or t
  misc_feature (350)..(350): n is a, c, g, or t
  misc_feature (419)..(419): n is a, c, g, or t
  misc_feature (435)..(435): n is a, c, g, or t
  misc_feature (452)..(452): n is a, c, g, or t
  misc_feature (454)..(454): n is a, c, g, or t
  misc_feature (476)..(477): n is a, c, g, or t
  misc_feature (490)..(491): n is a, c, g, or t
  misc_feature (496)..(496): n is a, c, g, or t
  misc_feature (504)..(505): n is a, c, g, or t
  misc_feature (515)..(515): n is a, c, g, or t
  misc_feature (517)..(517): n is a, c, g, or t
  misc_feature (526)..(526): n is a, c, g, or t
  misc_feature (528)..(528): n is a, c, g, or t
  misc_feature (544)..(545): n is a, c, g, or t
  misc_feature (588)..(588): n is a, c, g, or t
  misc_feature (592)..(592): n is a, c, g, or t
  misc_feature (596)..(597): n is a, c, g, or t
gcacgaggtccccacctgttctgaaaagttnttagttntgattaaatctgatttctgtattttttcttctgttgcatgtgcttttgttgtcgtatataagaatttaaattcaaggttgtgaaggtatgttcctgttgtttttttcctgagagtattacggttttagcccttacatttagcttttaatttcgagttaattggatatgtattggataggagtgcaactgcattcttttgcatggggagaatccaggtattgccagcaccgttgtgtgaagagagtaggcgggcctcattgaacaggtgtggcgtgcttgtgggaaatcaacaggctgtgggtgtatgaattntgtttctgtattcttaacactattctgttggtctgtatgtctgtccatattccaatgtcacactgtttntgattactgtagcttntgtatatgttttgaatngngaagtgtgtcttccactttatnngtgtcttaggatnngttangcatttgnngccctttaantncatatgatntngtagtgacttccattnnctctgacacttgacatatgctttcatcatgacacagatgcttncatnttcnntctttaatcttcagctggttgagttagagtcagctataccttgtaaatatccaatgttatcttaag

SEQ ID NO: 256239 - DNA, 979 bp, Homo Sapiens
  misc_feature (331)..(348): n is a, c, g, or t
  misc_feature (426)..(426): n is a, c, g, or t
  misc_feature (550)..(550): n is a, c, g, or t
  misc_feature (565)..(565): n is a, c, g, or t
  misc_feature (574)..(574): n is a, c, g, or t
  misc_feature (609)..(609): n is a, c, g, or t
  misc_feature (664)..(664): n is a, c, g, or t
  misc_feature (768)..(768): n is a, c, g, or t
  misc_feature (833)..(833): n is a, c, g, or t
gcacgagcacagtggcctgagttagaattctgactctgcctctttggaaggctctggaaggttaaaggagcttgtgtgttcaaatcttagcctggtacctggcatatactcagcatgtattttttcccctttcctgacaatgttccttgccccgaacacttgaatagtggagagaggaatgtttgcttttcctctccattgaaccaacactcgcccatccactgagcccaagattcaccttaggattgtctgttggactcggctcttttgtgacctaacagtgcaggggccttgtgctgagctgcacatgctcgctctcgctggtgctccnnnnnnnnnnnnnnnnnngtctgcattatttatagtaaaccatattagaacagagtgttaaagaggaaggatgagtcattcccatttgaaaccatngatgacataaataaaagcaaaatgctctactatgtgttttgtgcagtatttaaggccagggtgtgctaaattgaatgctcccaaactggatctgtgaaagcatacatatgtgggaaaaaatcangttaactagaggaangctattatngaaatccattcagatctgcttctcctctattactnagatcatatcatatatgcttgtgtctgctacgagagactgctatcatactaggtngtatctcgaggtcagatagccaaagtgctaggtctgtcatctcatgcacgtagaagcttcactgttagctgcttatggcagatcacaactgagctgacatatgntgcatgagaatgagccagttgttcatgcagagtagaacgacatcagctattctcactctagcacngtgttcagtgaatatcttaataatttgggtcgtagtgtctgcatatttgttgaaaaactgaacgctggtccatacaattagctaattttcagaattatcaatggttaactgccgtaaaaaccttaactcgtgtttatatactactc

SEQ ID NO: 256240 - DNA, 974 bp, Homo Sapiens
ggtaccggcccggaattcccgggatatcgtcgacccacgcgtccgaaatttgttatactgcccatcccctaaagccaacagagatttgtagatttaaagggatcatcgatgtgaagacaatagtgtttaacgaaagcaagcaagtcccttaccagtcaggtcataacgagggcacatttcatgaccgaaccctctcaaggcagaggaggagtttggtgggtttcatacaccctgacagaattccttgttggctctaaccctcaattacctaatcttatgctttaacacataactgcattggatgtgagagtaacgtaccgtatggtcatcgttctatatattaacattgaacactgctgcgattgctcaaggacattttatgttacggctttaaagcaaaggcatgattattagaaactatttaagctttcttctttgaaaaacaagctccttttacagaatataaacaacagtagtgcctgtggtttagcccaccaatcttgatgactaaaagtagctgatgcattgtgcatatgatgcttgagatggtttttgcaaaagcagaaatcgctgcaaggtaatcacaatagataaaagtggtattttaaacctttgaaataaatggatgtaactgtaccttggtacagcttttcacttgtttagtttttaaacgttagtataatctgaataaataaaatgttgccaaattcaatgtagaaagaatgtgacaacacaccttgggtagttctgcttgtgtttttgcatattgtaaaagcagtgtcacagctaaaaagaaagaaatcgtttctaacagtaaattattgtgctttagttgctagtttgtactgagagttgacctctccctgtgcagttttttgttctaaacttgtataaataacaattgtgtaatgtgtctccctcctacattgtaacaattgcttcagcctacgttataaataaagaaccactagatt

SEQ ID NO: 256241 - DNA, 1150 bp, Homo Sapiens
  misc_feature (832)..(832): n is a, c, g, or t
  misc_feature (975)..(975): n is a, c, g, or t
  misc_feature (1059)..(1059): n is a, c, g, or t
  misc_feature (1107)..(1107): n is a, c, g, or t
acacgagagtgaacagcagaaagaggcttcttggaaacataaccaggaattgcgaaaagccttgcagcagctacaagaagaattgcagaataagagccaacagcttcgtgcctgggaggctgaaaaatacaatgagattcgaacccaggaacaaaacatccagcacctaaaccatagtctgagtcacaaggagcagttgcttcaggaatttcgggagctcctacagtatcgagataactcagacaaaacccttgaagcaaatgaaatgttgcttgagaaacttcgccagcgaatacatgataaagctgttgctctggagcgggctatagatgaaaaattctctgctctagaagagaaagaaaaagaactgcgccagcttcgtcttgctgtgagagagcgagatcatgacttagagagactgcgcgatgtcctctcctccaatgaagctactatgcaaagtatggagagtctcctgagggccaaaggcctggaagtggaacagttatctactacctgtcaaaacctccagtggctgaaagaagaaatggaaaccaaatttagccgttggcagaaggaacaagagagtatcattcagcagttacagacgtctcttcatgataggaacaaagaagtggaggatcttagtgcaacactgctctgcaaacttggaccagggcagagtgagatagcagaggagctgtgccagcgtctacagcgaaaggacaaggatgctgcaggaccttctaagtgatcgaaataaacaagtgctggaacatgaaatggagattcaaggcctgcttcagtctgtgagcaccagggagcaggaaagccnaagctgctgcagagaagtaggtgcaagccttaatggaaaagaaacttcagaattacaggcccctgcgccaatatttaggaggggagagactccctgatgtcccaagcacccatctctaaccaacaagctgaagttacccccantggccgtcttggaaaacagactgatcaaggttcaatgcagatcccttccagagatgatagcacttcattgactgccaaagaggntgtcagcatacccagatccacattaggagacttggacacagttgcagngctggaaaaagaacctgagtaatgccaaagaggaacttgaact

SEQ ID NO: 256242 - DNA, 771 bp, Homo Sapiens
  misc_feature (23)..(23): n is a, c, g, or t
  misc_feature (76)..(76): n is a, c, g, or t
  misc_feature (473)..(473): n is a, c, g, or t
  misc_feature (499)..(499): n is a, c, g, or t
  misc_feature (508)..(508): n is a, c, g, or t
  misc_feature (536)..(536): n is a, c, g, or t
  misc_feature (542)..(542): n is a, c, g, or t
  misc_feature (573)..(573): n is a, c, g, or t
  misc_feature (645)..(645): n is a, c, g, or t
gcacgaggtgttgtgaggcttgngaagcattcaaaggaatgatgggcactggcttcagactgcggtggcgggtggnggtaataatctgaatctgtggtcctttactgcaggagaaggaaggcatccagtgggaagctaaagaggacaattcggagggtgaggagatcctggaagaggttgggggagacctcgaagaggaggatgaccaccatatggaattctgtcgggtctgcaaggatggtggggaactgctctgctgtgatacctgtccttcttcctaccacatccactgcctgaatcccccacttccagagatccccaacggtgaatggctctgtccccgttgtacggtgagtgactgatctcagccggggcaaaaaatgagaaagtgtagtctattctatgtaggctatcgtgaggctagggtgcaggagaggaactatgagctattcagccatgagaaaggtattctncttaatcctaatagtgtaggatactnctgacctgngaaaatataggactaacttcaaactganggagtngatgtttgcagctctctaagaagagatgaangcatgtactctagctgagaacattgtcctgtgttgacacctgctaaggtcttggagctacaaatgttcaatntttggtaaaaaaatttttttggagacaggtctatctgcatcggctgagtgcatggtcagcatagtcatgagctcactttgctaaggactcatctactttgcggactagtactgctcacaatcgtct

SEQ ID NO: 256243 - DNA, 1100 bp, Homo Sapiens
  misc_feature (31)..(31): n is a, c, g, or t
  misc_feature (154)..(154): n is a, c, g, or t
  misc_feature (220)..(220): n is a, c, g, or t
  misc_feature (351)..(351): n is a, c, g, or t
  misc_feature (399)..(399): n is a, c, g, or t
  misc_feature (424)..(424): n is a, c, g, or t
  misc_feature (442)..(442): n is a, c, g, or t
  misc_feature (457)..(457): n is a, c, g, or t
tttccaaatgagaaatttaggcgcgatcganatatagcgggaggctcccgcgttttaaaaaattataaagaggcccccccggttaaccccgtgtccagaaatgattgtcaacactgcacatgagcacctgagctgctcctgctgatgtcaaacngctacgcagattgtactgaatcgctcttgtcagtttgcacgatctgaacgcatggtcagcgcccanctctagaccgttgaagcaattaagtcacatgtgttccacatcgagagcatctagttctgaacatttcgcatcagcatttgtaaagacacctgccgtgacactcataatctgtccatcacatcctcgagtcnatgtacacgtgagagatgcccatcctccaccgaggtcagcactctgcntgatcctacggtggcatctggtttntgtagatcagatgaagcnggcagacacagctgngggcatctgacatagatggcccagtgtgtaaggcctaatcctgagttgaggcaaagatgcacttgccctggtccaagacccactctggggcagaatgggaaaggcctgctgaatcactgcaggccctcccgccttgatggttctctgctgctgggattctagaggtacacaggaagacagctctccaatggcttcagggttttgggtataaaatgaggattcaatgaggactccccagtcgcccccataccacgactgcttagctctgcaatgttccttcttttatctgttggataaagaggtttctctcatcttctggagtcctcccattctgagcccggacaatacacgtgggccgatgaaggttgagcatgtatatcaaatgctgcttctcgttcttgagctcctcaatctgagccttcagttcagcattcacactttccagcttctccgactctttctgcaggcactccgtcttctccttcttcttgtttcggcactttgcagctgcaatcttatttctttctcgtcgcctctttttcctttcatcttcttcaggggctacctcggcttttgtgatggacaccccgaggggtctgtcgctgacagtgactgattccagcgcagaggacatccggtggca

SEQ ID NO: 256244 - DNA, 808 bp, Homo Sapiens
  misc_feature (763)..(763): n is a, c, g, or t
  misc_feature (798)..(798): n is a, c, g, or t
cctgaatgtgccatttgtctgcaaacatgtgttcatccagtcagtctgccctgtaagcacgttttctgctatctatgtgtaaaaggagcttcatggcttggaaagcggtgtgctctttgtcgacaagaaattcccgaggatttccttgacaagccaaccttgttgtcaccagaagaactcaaggcagcaagtagaggaaatggtgaatatgcatggtattatgaaggaagaaatgggtggtggcagtacgatgagcgcactagtagagagctggaagatgctttttccaaaggtaaaaagaacactgaaatgttaattgctggctttctgtatgtcgctgatcttggagatataatagatataccaaagaagggagtagcaggaagactaaacgagatataatacatataccaaagaagggagtagctggacttaggctagactgtgatgctaataccgtaaacctagcaagagagagctctgctgacggagcggacagtgtatcagcacagagtggagcttctgttcagcccctagtgtcttctgtaaggcccctaacatcagtagatggtcagttaacaagccctgcaacaccattccctgatgcaagcacttctctggaagactcttttgctcatttacaactcagtgggagacaacacagcttgaaaggagtcataaggggagaaggagaagaagatcatggaatcaccatctttcagggcagggtaccaggcaccagacacctccctttgaaggaaantgaattcaggttgccagttgttgatagttgagggntgttttcttg

SEQ ID NO: 256245 - DNA, 686 bp, Homo Sapiens
  misc_feature (244)..(244): n is a, c, g, or t
cagtagtaaagacattttaagcccaaaaagttgtcttataccagaatttcttatactcaaaagttattgtctttcataggacaatatcagataagaatgagttcttggtatgattccctcccaaaaagaattttataattcattcactctagttagtgcctgtgctacagaaaaggtatcaaagcaacctatggtatatgtatggtatatagaaatgtaaaaagtgcatcacattcttgatttncaggtttctcatagcagcaggattaatctaagacagaaaacagttgtattttcattcttaaaatgcaacaatatctaatgaaatgtattcaagatcatgaaaggatcctcctctatgaaggataaatgaaaacagattaataatagacaaacagggtaaactaaaggcattcattcatatttacatattaaaaccacttttgttaacaccaaatctttacatctagcaaaagaaataagcattttaagaataaagcagacatcactaaagcagtatccattttcagagcctttgattagcacctgaggaaaaaagggtacatggaaagctatgtaatttgccctcaagttaatttgttggtctgaagagtacaacaactttgatatgcactgaaagtaaaactaaattggaaaataaatgtttgtagttagtttaataaggc

SEQ ID NO: 256246 - DNA, 662 bp, Homo Sapiens
gagacatttaagggcaaaaagtgtactattaccagaattcttatattcctaagttattgtccttcataggaataattcattcactcttgttagtggctgtgctacaggaaaggtatcaaagcaacctatggtatatgtatggtatatagtaatgtaaaaagtgcatcacattcttgattttcagtttctcatagcagcaggattaatctaagacagaaaacagttgtattttcattcttaaaatgcaacaatatctaatgaaatgtattcaagatcatgaaaggatcctcctctatgaaggataaatgaaaacagattaataatagacaaacagggtaaactaaaggcattcattcatatttacatattaaaaccacttttgttaacaccaaatctttacatctagcaaaagaaataagcattttaagaataaagcagacatcactaaagcagtatccattttcagagcctttgattagcacctgaggaaaaaagggtacatggaaagctatgtaatttgccctcaagttaatttgttggtctgaagagtacaacaactttgatatgcactgaaagtaaaactaaattggaaaataaatgtttgtagttagtttaataaggctgtagaaaagagatacttggccgggcacggtggctcacac

SEQ ID NO: 256247 - DNA, 334 bp, Homo Sapiens
  misc_feature (130)..(231): n is a, c, g, or t
cttttcacatgaatttttatttatttagtactttccaatgaggaaaattcaaaggccacatgaattgacttctcaagtttgtccagctgttgtcaacaccgggcgcatgctagaaacctctaaggagtannnnnnnnnnnnnnnnnnnnnnnnnnnnnnnnnnnnnnnnnnnnnnnnnnnnnnnnnnnnnnnnnnnnnnnnnnnnnnnnnnnnnnnnnnnnnnnnnnnnnnagactaacacacagccagagttaaggaactgctgaggtctatgggtcagggaatatggggaggaggaaggttaaaaaatggtttttaaaaaggttccatgcct

SEQ ID NO: 256248 - DNA, 647 bp, Homo Sapiens
ctgtaagtgattcttacacatctcatggcagaggttgagtgataaagctgaagatttttgctagccccgtagagaaatgggaagaaatttgcaaaggcatctttaacgtggctcaggaattagaaatattggaaataaagactaagactggaaattgggtttactaagatacttatctcacaaaacaaactctgttgtttattaaaaaaataaaactaacttttgttccctctttaggtgtcatgtatacataatcaaatctaaaagtatttctattagggaaaaaactgggccaattactgctaaattagctaagtatgtgaaaataaaatttatactacaggagggggaactgtgtttttttgttctgtaaatacggagttagctatattacataaagtttctactataaggtaatattaaagagtcacccctaagctctaggaatgagtgttataatatattaagaaagtctattccttttccttgctcatttatagtatttgtaattaaataagaaaaatatagaatttaaataacattcacaccaatacttaaagatttatcataaggtcataatttggttttaattctaggttatggaagcataaaaatagtctttgctttgtaatgttcctcgtgccgaa

SEQ ID NO: 256249 - DNA, 916 bp, Homo Sapiens
ccggaacggcgttcataagatagacacgtacctgaacgccgccttggacctcctgggaggcgaggacggtctctgccagtataaatgcagtgacggatctaagcctttcccacgttatggttataaaccctccccaccgaatggatgtggctctccactgtttggtgttcatcttaacattggtatcccttccctgacaaagtgttgcaaccaacacgacaggtgctatgagacctgtggcaaaagcaagaatgactgtgatgaagaattccagtattgcctctccaagatctgccgagatgtacagaaaacactaggactaactcagcatgttcaggcatgtgaaacaacagtggagctcttgtttgacagtgttatacatttaggttgtaaaccatatctggacagccaacgagccgcatgcaggtgtcattatgaagaaaaaactgatctttaaaggagatgccgacagctagtgacagatgaagatggaagaacataacctttgacaaataactaatgtttttacaacataaaactgtcttatttttgtgaaaggattattttgagaccttaaaataatttatatcttgatgttaaaacctcaaagcaaaaaaagtgagggagatagtgaggggagggcacgcttgtcttctcaggtatcttccccagcattgctcccttacttagtatgccaaatgtcttgaccaatatcaaaaacaagtgcttgtttagcggagaattttgaaaagaggaatatataactcaattttcacaaccacatttaccaaaaaaagagatcaaatataaaattcatcataatgtctgttcaacattatcttatttggaaaatggggaaattatcacttacaagtatttgtttactatgaaattttaaatacacatttatgcctag

SEQ ID NO: 256250 - DNA, 918 bp, Homo Sapiens
cccaggtgagcgggcgcgctgttccaggtgagcgggcgcgtgcccgcgacggcgctcttgtccgaggcgggtcacgtaaagacagcgagatcctgagggccacccgggaaggaggcgtggatatggagctggctgctgccaagtccggggcccgcgccgctgcctaacgcgtcctggggactctgtggggacgcgccccgcgccgcggctcggggacccgtagagcccggcgctgcgcgcatggccctgctctcgcgccccgcgctcaccctcctgctcctcctcatggccgctgttgtcaggtgccaggagcaggcccagaccaccgactggagagacaccctgaagaccatccggaacggcgttcatatagatagacacgtacctgaacgccgccttggacctcctgggaggcgaggacggtctctgccagtataaatgcagtgacgcttaacattggtatcccttccctgacaaagtgttgcaaccaacacgacaggtgctatgaaacctgtggcaaaagcaagaatgactgtgatgaagaattccagtattgcctctccaagatctgccgagatgtacagaaaacactaggactaactcagcatgttcaggcatgtgaaacaacagtggagctcttgtttgacagtgttatacatttaggttgtaaaccatatctggacagccaacgagccgcatgcaggtgtcattatgaaagaaaaactgatctttaaaggagatgccgacagctagtgacagatgaagatgggagaacataaccctttgaccaataactaaatgtttttacaacataaaactgtcttattttttgtgaaagaattattttggagaccttaaaataattttataatcctggagggtaaaacctccaaagccaaaaaaggggaggggagaata

SEQ ID NO: 256251 - DNA, 709 bp, Homo Sapiens
ctagtggatcccccgggctgcaggattcggcacgagctccccacgccccacccatacggtcactgcatttggtcagcctgcttcttcaggtcgatgccctccttctgatactccatctccttcaggggaggttggggccccactggactgggtgtcaagatgtgaaagcttatgggagctttaaggagacttcatggtggttccatgcaggtggttctgccatccctgctgatttagcctggtgcctgtgtgtgtccactcacgtacacgtggggtgggggaaacgtgtctacagatgacgctaaatcagttggggtctactctaaacagcattgtgtgtaagaagcatcctcaagctcccagttaagtaacttgactacttttatttgggaatttcagactatagaagctctcttatgttttatgtccagattctgtgaccactagttactgtatcagaactcatcaggtacccacttataaatagcactgatctggctgtatactgatccatcactaacctgttttctaggacccagcgtatgtagcatttgtattgcagtttccctggcttacttgtgttttgcactgatgaattttgacagggtaattgccactttacttgtgcaatactgctgtaaataactgcagatttttaaacaatcttttatgttaattttataaaaataaaactttcaactagttttaa

SEQ ID NO: 256252 - DNA, 429 bp, Homo Sapiens
gaaagggtgggacaggtggcccctgccctagggaccacctcgggcccactaaccccctgtggacaactgtgagtagctgggttttccccccaccctgctgtgcaacttccctgtgcctttgaggttggactaacttgtcttcaggagctaattaactgtacagccctccccacgccccactagttactgtatcagaactcatcaggtacccacttataaatagcactgatctggctgtatactgatccatcactaacctggtttctaggacccagcgtatgtagcatttgtattgcagtttccctggcttacttgtgttttgcactgatgaattttgacagggtaattgccactttacttgtgcaatactgctgtaaataactgcagatttttaaacaatcttttatgttaattttataaaaataaaac

SEQ ID NO: 256253 - DNA, 1494 bp, Homo Sapiens
  misc_feature (25)..(25): n is a, c, g, or t
  misc_feature (38)..(38): n is a, c, g, or t
  misc_feature (59)..(59): n is a, c, g, or t
  misc_feature (296)..(296): n is a, c, g, or t
aacctccccctgaaaggagatggantatcaagaagganggccatcgaacctgaaagaancaggctgaccaaatgcaatgaccgtatgggtggggcgtggggagggcctgtacagtaaattagctcctgaagacaagttaagtccaacctcaaagcacaggaagttgcacagcaggtggggggaaaaacccagctactcacagttgtccacaaggggttagtggcctgaggtggtccttagcagcagccacctgtcccacccattcacttgtcctgcctggccctagccctgaacanactgcaatgcagcacctctggaagtggcacattttatttcttttctaaacgctgagttgtcagggataaattttcaatagaaaaatctttcccacctgctgataatactttggtttttttgttttcctaaagataaagcctggagtcagcaaaatttgcttgcatgataagctagttgctttggaacaaacagaaggttgctgggtatttcttggagtagaattttgtagcctgccagactgagtttctcactggcatcaaacacacacttcatcataagggcggcaaagcccaagaattgaaacccacttgactggaaataccaggacccgaaggtggagagccaccctggaggaccacgtggtctgcaatgagctctccagtcacccccgacaactctcaggagttaacttcatgggacggcaggggagtgggagacagggatgttaatacttttcagaaattaagacattaaataagcagaaaataaatatacaatatttctacaagttacagcattatgaaacagtaggacacatcacacagaaaaagaatctacaatatttacaatccttgattttgaaaaagttgagaaaaacagtgatttttttacttatttatgctgtacaaaattttacaaggtaaaggaaacacaattgcacacagacatttggctcagttgataagtaatatgacctacgaatctaataaatactcacaatatatacattaagaaggggaaacggcagacaattgtattccactatatttttttaatcagaaggaattttaaacttgatttctccgcaacccccacccccaaaattcttgatcaactaaccagttaggaagggcatctgaagaatcactcatgaaactattttgtgtgtgtttattgcgtttctgtgttaagtcacaggacactttttacaaacctcacatagggagaggttgtcaaggcacaaaacctgcagtaagtttccaaaaaggggatttaattattttttctacaaaaatgttttttaaaaaaggtaaaaacgtatacccacgggaggcatactttctgcacagaggcatcttgataaccagatacatacagtacagagacatccagtcatcgctttaaggttctgggggcccacagcctgggggcttttaatactcccctaccaattcataggggatctcctaatttccc

SEQ ID NO: 256254 - DNA, 641 bp, Homo Sapiens
  misc_feature (84)..(84): n is a, c, g, or t
  misc_feature (96)..(96): n is a, c, g, or t
  misc_feature (99)..(99): n is a, c, g, or t
  misc_feature (146)..(146): n is a, c, g, or t
ccacttaaattcatgagtatacggctttatgcagatagcagctgtttcctcagaagctggggaaaatccaccagagaaccggcnatgcagagaagnggnagcctcttctgtcactttgagttcccagacgaagaacaccgactgcntgctgtagatgggctgctgggactgcgtgttcagtggtactagttgcaggtcggtactatcaccggtatctacaagataactatctgacagctgaaagtcaagttctgacaaattctggacacaaacttgaacatatttccgtgttcctgaggacaggaggctgtgtgtggtcctgaagggtacgctgaaggtcagtgcgatgactgtggagtagatggaccacgggcagtcaatcgacactttgtggtctgtggtaaccatgcagcggccagttctctgtttgtccttatgcttcctgtggggctctgccatccccagcatgtcactctcccctccgagtgctggggctgaaggtaaagagagaacttccagttcaaattcgatcacgtggtacgcaggcgcaacaggcagactgatgctcgtgaccttgtcggaggactgaatccggagcgcggcctcagaagactgttctctcgtgttggagtagaccacag

SEQ ID NO: 256255 - DNA, 787 bp, Homo Sapiens
  misc_feature (718)..(718): n is a, c, g, or t
gggatcgtgcgtcagagtgagcccggatggggcggcgggcttcgggagcgcccgggctgatccgagccgagcgggccgtatctccttgtcggcgccgctgattcccggctctgcggaggcctctaggcagccgcgcagcttccgtgtttgctgcgcccgcactgcgatttacaaccctgaagaatctccctatccctattttgtccccctgcagtaataaatcccattatggagatctcgaaactttataaagggatatagtttgaattctatggagtgtaattttgtgtatgaattatatttttaaaacattgaagagttttcagaaagaaggctagtagagttgattactgatactttatgctaagcagtacttttttggtagtacaatattttgttaggcgtttctgataacactagaaaggacaagttttatcttgtgataaattgattaatgtttacaacatgactgataattatagctgaatagtccttaaatgatgaacaggttatttagtttttaaatgcagtgtaaaaagtgtgctgtggaaattttatggctaactaagtttatggagaaaataccttcagttgatcaagaataatagtggtatacaaagttaggaagaaagtcaacatgatgctgcaggaaatggaaacaaatacaaatgatatttaacaaagattagagtttacaagttttgaacctttaacccanattcatttgacatcaagcactatagcaagcacaggttcaacaaaaccttgggggtattgccttcccccc

SEQ ID NO: 256256 - DNA, 625 bp, Homo Sapiens
gaaaattaggaagaataagagaagcagtaaaaataatgagagatttgatgaaagaatttcctcctcttaccatgttgaacatccatgaaaatctcttagaatcacttttagaattacaggcctatccagatgttcaggcagtcctagcaaaatatgatgatataagccttccaaagtcagcagcaatctgttacacagcagcactgttgaagacaaggactgtttcagaaaaattctctccagaaacagcctccagaagaggattaagcacagcagaaattaatgccgtggaagcaattcatagagctgtggaatttaatcctcatgttccaaaatatttattagagatgaaaagtttaattttacctccagaacacattctgaaacggggtgatagtgaagcaattgcctatgctttctttcatcttcagcactggaaacgaatagaaggtgctcttaatctgttacagtgtacatgggaaggcacttttagaatgattccatacccgttagagaaaggacatctattttacccttatcccagctgcacagagacggctgatagagagctattacctacctttcatcatgtttctgattacccagccatgatagccattctcac

SEQ ID NO: 256257 - DNA, 1801 bp, Homo Sapiens
  misc_feature (1743)..(1743): n is a, c, g, or t
gtgatgaccatggtaacacccgggtgggagttcgtgacatctccggcgcggagggactcgatgtctatggcaatggtcgcctggtggaagggacggaactagatcccttcgctcgggacgctcacattccaggcccttgtcctgcaggctgccgcgggcggacacgcagaggaggaggccggggaatggccgcggtgtggcagcaagtcttagcagtggacgcgaggtacaacgcgtaccgcacaccaacgtttccacagtttcggacgcagtatatccgccggcgcagcagctgctgcgggagaatgccaaggctgggcaccccccagcgctgcgtcggcagtacctgaggcttcgggggcagctgctgggccagcgctacgggcccctctccgagccaggcagtgctcgtgcctatagcaacagcatcgtccgcagtagccgcactactcttgaccgcatggaggactttgaggatgatcctcgggccctgggggcccgtgggcaccgtcgttctgtcagcagaggctcctaccagctgcaggcgcagatgaaccgtgccgtctatgaggacaggccccctggcagcgtggtgcccacgtcagcagcagaggcaagtcgggccatggccggggacacgtcactgagcgagaactatgcctttgcgggcatgtatcatgtttttgaccagcacgtggatgaggcagtcccaagggtgcgcttcgccaatgatgaccgacaccgcctggcctgctgctcactcgacggcagcatctccctgtgccagctggtgcctgccccacccacagtgcttcgcgtgctacggggccacacccgtggtgtctccgacttcgcctggtccctctccaatgacatcctcgtgtccacctcactggatgccaccatgcgcatctgggcctctgaggatggtcgctgcatccgagagatccctgaccccgatagcgctgaactgctctgctgcaccttccagcctgtcaacaacaacctcactgtggtggggaacgccaagcacaacgtgcatgtcatgaacatctccacaggcaagaaagtgaaggggggctccagcaagctgacaggccgtgtccttgctctgtcctttgatgcccctggccggctgctctgggcgggtgatgaccgtggcagtgtcttctctttcctctttgatatggccacagggaagctgaccaaagccaagcgtttggtggtgcatgaggggagccctgtgaccagcatctcagcccggtcctgggtcagccgcgaggcccgggatccctcactgctcatcaatgcttgcctcaacaagttgctgctctacagggtggtagacaacgaggggaccctgcagctgaagagaagcttccccatcgagcagagctcacatcctgtgcgcagcatcttctgtcccctcatgtccttccgccagggggcctgcgtggtgacgggcagtgaggacatgtgcgtgcacttctttgatgtggagcgggcggccaaggctgctgtcaacaagctgcagggccacagtgcacctgtgcttgatgtcagcttcaactgcgacgagagcctactggcctccagtgacgccagcggcatggtcatcgtctggaggcgggagcagaagtagggtcctgtcggccctgctgctgtcctccatcccacccctcttactccagcctcgtgttgtaaataaagtttcggtggtcatgctgagggccggctcccagntctgccggggacggacagggcagagggcagcgggcagctccaggaacaccggtgaaaa

SEQ ID NO: 256258 - DNA, 640 bp, Homo Sapiens
ggcaagcaggagcaggtctctctgcatctgttctctgaggaactcaagtttggttgccagaaaaatgtgcttcattcccccctggttaatttttacacaccctaggaaacatttccaagatcctgtgatggcgagacaaatgatccttaaagaaggtgtggggtctttcccaacctgaggatttctgaaaggttcacaggttcaatatttaatgcttcagaagcatgtgaggttcccaacactgtcagcaaaaaccttaggagaaaacttaaaaatatatgaatacatgcgcaatacacagctacagacacacattctgttgacaagggaaaaccttcaaagcatgtttctttccctcaccacaacagaacatgcagtactaaagcaatatatttgtgattccccatgtaattcttcaatgttaaacagtgcagtcctctttcgaaagctaagatgaccatgcgccctttcctctgtacatatacccttaagaacgccccctccacacactgccccccagtatatgccgcattgtactgctgtgttatatgctatgtacatgtcagaaaccattagcattgcatgcaggtttcatattctttctaagatggaaagtaataaaatatatttgaaatgtacc

SEQ ID NO: 256259 - DNA, 671 bp, Homo Sapiens
cccagacggtatctcctggatgccagtgagcggctgagagctgaagctccctggacactcaaggctcttgtggtgacagtctgacgtaaaggcgtgcagggaggcctagctctgtctcctggacttagagatttcagacacagaagtctgtccatggctccttgtcacatccgcaaataccaggagagcgaccgccagtgggttgtgggcttgctctcccgggggatggccgagcatgccccagccaccttccggcaattgctgaagctgcctcgaaccctcatactcttacttggggggcccctcgccctactcctggtctctggatcctggcttctagcccttcgtgttcagcatcagcctcttccctgccctgtggttccttgccaaaaaaccctggacggagtatgtggacatgacattgtgcacagacatgtctgacattaccaaatcctacctgagtgagcgtggctcctgcttctgggtggctgagtctgaagagaaggtggtgggcatggtaggagctctgcctgttgatgatcccaccttgagggagaaagcggttgcagctgtttcatctctttgtggacagtgagcaccgtcgtcaggggatagcaaaagccctggtcaggactgtcctccagtttgcccgggaccagggctacagtgaa

SEQ ID NO: 256260 - DNA, 558 bp, Homo Sapiens
ggacggagtatttggacatgacattgtgcacagacatgtctgacattaccaatcctacctgagtgagcgtggctcctgcttctgggtgctgagtctgaagagaaggtggtgggcatggtaggagctctgccctgttgatgatccccaccttgagggagaaacggttgcaagctgtttcatctctctgtggacagtgagcaccgtcgtcaggggatagcaaaagccctggtcaggactgtcctcccagtttgcccgggacccagggctacagtgaagttatccctggacaccggcaccatccagctctctgctatggccctctaccagagcatgggcttcaagaagacgggccagtccttcttctgtgtgtgggccaggctagtggctcttcatacagttcatttcatctaccacctcccttcttctaaggtagggagtctgtgatctctttctgtgtgtattggtcagaatagaatccattcagctgtagcagcaagcaatccccaacctttcactgcaatgacctttcaatgcaataaaagcttattgtccattcaa

SEQ ID NO: 256261 - DNA, 633 bp, Homo Sapiens
  misc_feature (606)..(606): n is a, c, g, or t
agacagctccatgatgaagctcgcaaatggtccagcaagggcaatgacatcattgcagcagccaagcgcatggctctgctgatggctgagatgtctcggctggtaagagggggcagtggtaccaagcgggcactcattcagtgtgccaaggacatcgccaaggcctcagatgaggtgactcggttggccaaggaggttgccaagcagtgcacagataaacggattagaaccaacctcttacaggtatgtgagcgaatcccaaccataagcacccagctcaaaatcctgtccacagtgaaggccaccatgctgggccggaccaacatcagtgatgaggagtctgagcaggccacagagatgctggttcacaatgcccagaacctcatgcagtctgtgaaggagactgtgcgggaagctgaagctgcttcaatcaaaattcgaacagatgctggatttacactgcgctgggttagaaagactccctggtaccagtaggcacctggctgagcctggctggcacagaaaacctctactaaaaagaaggatcctggcctggcacatcataaaggaatgggggcctcttcaattagaagacattatactctnttttcatggacactttgaaatgtgttc

SEQ ID NO: 256262 - DNA, 713 bp, Homo Sapiens
acaggagggtggggaccggtacctgctccaaggaactggtgccccagaactggtgagctggggtatgcatttagctcattcgtttaccagaatgcagtcaccacctgatgaaagaaatgactaatggcaggacttgaacagttctctataaatgagtacctgggagaaaaacaggtctccaggctccacaatacccaataaacacactgcctttagcccacttcaagctgcacttcttacatggaacccaacccaaccaacctcagaggtaagggtgagagcaggcaatgaacagctatgattctccattccctggccaggcagggagcctttccatccaccctcgtgagactgcttgtaacagaaataaggaaaccgactccaaggctcagtaacccacccaaggtcagaaccacggagtggcagggcctgtgagccacaaaggagactgaaaaccagaaagagcttctctctggtctgttattttaagaaaaacaatgcccagaggggccacctggaagcaaggctgtgtggcaccctcaccttcctaattaaacaacaacttcccaggagcaacgacagcaacaacagcctggcccagcagatgaactcgaatcaatccaagcccttcccctatacgggtcagtttgggcactactttacctgctgtgaagtctactgggatcttccaggaaagtcccacctcattagta

SEQ ID NO: 256263 - DNA, 809 bp, Homo Sapiens
  misc_feature (19)..(19): n is a, c, g, or t
  misc_feature (51)..(51): n is a, c, g, or t
  misc_feature (56)..(56): n is a, c, g, or t
aacctaacacaacttttgnagcacatcaagaagtggcccctgaagcttccnctacngcccccctaccctttaaggtatgtctatctggagacaggataacaattgctgtaaagcagagcatactcctcttgagtcattttcagttccccaatacttttataaaaactaaacataggtgttatatattcatcagagataccactatttcgaattctttcttccaataggtcagaatgcccagacggaagtttcttattgaaaatctcagctgaacgaaggaacatagcttcaaccgcagaccctttcagcaaagcaatctggtcttcatggtccaaagtctgaaatcctggtagcttttttgtgaattctacaagaacctgtacatgattggttgccatttccgtcaaaatgagaaaattttcttctgcactgaattcttcttttaaaattttatttgttatttcctgaggcatcctctgtttgttatatgaatccataataaaatgtagaagagtctgttgatctggggtgagttcagttttctccctgcatgactttgttgtcgaggtcacttgtcgcaagtcacgaccttcactgtcttcattcacggtctgatctgcatgctgcttcacattttttctcagtcgcttagatttacactgaatttcagttaacaagccggtatacatacattcagccaacattcccagctctttgcatttccttagtcgacactcttgacactttcttcgcatgtacatatccatcacacagttgcccccgtttttacacttggacacagcgttttt

SEQ ID NO: 256264 - DNA, 690 bp, Homo Sapiens
ggtgttcggaccttcatctctgaactccctacgccagtctcccatgcagaccatccaagagaacaagccagctaccttctcttccatgtcacactatggtaaccagacactccaggacctgctcacttcggactcacttagccacagcgatgtcatgatgacacagtcggaccccttgatgtctcaagccagcaccgctgtgtctgcccagaattcccgccggaacgtgatgcttcgcaatgatccgatgatgtcctttgctgcccagcctaaccagggaagtttggtcaatcagaacttgctccaccaccagcaccaaacccagggcgctcttggtggcagccgtgccttgtcgaattctgtcagcaacatgggcttgagtgagtccagcagccttgggtcagccaaacaccagcagcagtctcctgtcagccagtctatgcaaaccctctcggactctctctcaagctcctccttgtactcaactagtgcaaacctgcccgtcatgggccatgagaaggtccccaacgacttggacctggacatgttcaatgggagcttggaatgtgacatggagttccattatccggagtgaactcatggatgccgatgggttggatattaactttgaatccctcatctccacacagaatggttgttgttttgaacgtgggggacctcactggtgcc

SEQ ID NO: 256265 - DNA, 526 bp, Homo Sapiens
  misc_feature (77)..(77): n is a, c, g, or t
ccttcatgcccaaatgatcccctctatacagaaatttgcccagaccaactcagctgcaacaaaaccctagtttggtnccttatttttagtgagtcttttgcacatattccttcaaataaagtaaaatgtgaaactcaaccccacatcaccaccctggaatcagggattgctcactcccaggttactgcaaccctaactcactctagtgggaccttgactggagaaactccacgatcttcctgaagaagagaaatggatgtttccaaattccacaataagcaatatgtggtgataatgaaaagaatgattcagtcttgacggtgaatggaagacacttacctaacaagtactgctcatttacactcaaattaatcttgaagtagtcttaaaatgtgtaagaagttaaaacttgagaagcaaaaaaatgcctgcaaaaagaagatcattttgtatacagagaaccggatgaatataagcaatgaagatgaacatttattgatcttctacatacaagacttcaccataa

SEQ ID NO: 256266 - DNA, 740 bp, Homo Sapiens
  misc_feature (458)..(498): n is a, c, g, or t
atgagccactgcacctggcctgtatagtatactttaatacaacttgtttttaatcctataggcttaaaaccttgctttaagtctttaaaatgaagcatatgctcaagaggaactcacataactcatgaagaagaactataaagaataaccactggaggtttattcagtagagagagacacagagatcaaagttcggggaagaaccagggtgtctctgtgccttggtttcctcaaatgaaacagggattgataagtatcttagaggtcatagttaaaagtaattaagacaacctagctcacaataagcatccaataaggccattccctctcctcgccccatccccatgctttctttctcatttgtctagaacaacactccccaagggaacctcccaagctgaagttctccatctgcaatgtccaagctgcagccactaattctgtttaattttaaacannnnnnnnnnnnnnnnnnnnnnnnnnnnnnnnnnnnnnnnntgtggagaaactaaagggctttgggcaattactgcctgatcccaattctgctacaagccttgaccaactggccaataatccccatggtgcctaccttccagaatttaagttccatgaagggctttgagccttttcatttactattgtttacaatatcgcaatgcttacaacaatgttagtgcatggtaagtactcaaaaaatatttgtttgaatgaataaaatagtgattttttccatagag

SEQ ID NO: 256267 - DNA, 613 bp, Homo Sapiens
  misc_feature (130)..(130): n is a, c, g, or t
  misc_feature (155)..(155): n is a, c, g, or t
aagggctggaaatagagatgctttaatccatctcagtggtctcaaagagcagttcctggcatcacttgaaagcttgtaaaaatgcaaatccttgggctccactccagacctactgatttggaacttcagngggtggtttctggcaatctgtgttntcacaagccttcagggggattctgaaaccatcactctaatgcttacaacaattctgcaaggtctacattattaccaaggtcacacagccaacaaagggtaaggacagaaatcaaattcaactccggttctggttaaaaagctaatgccttttatagttagcttcaaagaaacttaataaatatctactttaccttaccttatcttacctaaacacatacacacacacagtcttgaaagacatgaggtgctctcttcaaaaaacatactagatgctacacgctagactagaagtttgggtattacaaacacaacttaactgggggaaaccttatgaaaggaagctgggaaaaacaaaaaagggaaactttctgcaactctacaccatgtggtggaggtttctgttgtctggcacctacgccccattctgggggtaatctcgtgccgaattcggcacgag

SEQ ID NO: 256268 - DNA, 633 bp, Homo Sapiens
  misc_feature (226)..(509): n is a, c, g, or t
  misc_feature (576)..(576): n is a, c, g, or t
caaatatttaaccactcctttacattcccttttcattcataatactttgaaaataaatattgggccttttcaaggagagatacaacgtgtaatcctatatctgttttcttcttttctgtctcctcccctttaagataaaaaaaagacactacttttctccaccctcccaatggaacaaactttgagggagtggtaaaaggagctgtttaaaggggaaacaggtcannnnnnnnnnnnnnnnnnnnnnnnnnnnnnnnnnnnnnnnnnnnnnnnnnnnnnnnnnnnnnnnnnnnnnnnnnnnnnnnnnnnnnnnnnnnnnnnnnnnnnnnnnnnnnnnnnnnnnnnnnnnnnnnnnnnnnnnnnnnnnnnnnnnnnnnnnnnnnnnnnnnnnnnnnnnnnnnnnnnnnnnnnnnnnnnnnnnnnnnnnnnnnnnnnnnnnnnnnnnnnnnnnnnnnnnnnnnnnnnnnnnnnnnnnnnnnnnnnnnnnnnnnnnnnnnnnnnnnnnnnnntaattatttaaaaaaagaggaaacaatgggggaaactctctgacctcagtttattccatcatctggntcttcatttgtccctgcggaggaacttccccacacccacacttcttacttttattat

SEQ ID NO: 256269 - DNA, 496 bp, Homo Sapiens
  misc_feature (57)..(92): n is a, c, g, or t
cttaatagagacgggatgcagtcttaataagttgcccaggctggacttgaactcttnnnnnnnnnnnnnnnnnnnnnnnnnnnnnnnnnnnnagagccgcccccgattaaagtagcctgctcatacaccttacttagtatgtttttgactagcattgcttttatctgatgttatttcctgtgcctttaggatatcatctcctggtcaattaatcacaagggttttttgttgttgctgtttttaactgcaatactatacatacttacctgaaactgttcaggaatgacagttacccttaatcaaaactgggaggcaaccacttttcccaatgcacttcaggtctgtaatacagacttcacgtctacattatatggtctatagtttataggaaactctccaaggacagagacctgccaatactttgtggtaaactataactacataacgtgaatttttaaaagcaatagaagaaacggccgggcgtggtggcgcgcac

SEQ ID NO: 256270 - DNA, 1092 bp, Homo Sapiens
  misc_feature (999)..(999): n is a, c, g, or t
  misc_feature (1007)..(1007): n is a, c, g, or t
  misc_feature (1032)..(1032): n is a, c, g, or t
  misc_feature (1035)..(1035): n is a, c, g, or t
  misc_feature (1042)..(1042): n is a, c, g, or t
  misc_feature (1044)..(1044): n is a, c, g, or t
  misc_feature (1046)..(1046): n is a, c, g, or t
  misc_feature (1074)..(1074): n is a, c, g, or t
cctggccgcgctctccccgcttcttcgcagtcttcggccctctcctgtcgccgccatgagcactggcaccttcgtcgtgtcgcagccgctcaattaccgcggcggggcccgcgtggagccggcggacgcctccggtaccgagaaagctttcgagccagcaaccggccgagtgatagctactttcacatgttcaggagaaaaggaagtaaatttggctgttcaaaatgcaaaggctgcttttaaaatatggagtcaaaaatctggcatggagcgttgccgaatccttttggaggctgccaggataataagggaacgggaggatgaaattgctactatggagtgcatcaacaatggcaagtccatctttgaggcccgcttggacatcgacatttcctggcagtgcctggagtattatgcgggcttggctgcatccatggctggtgaacacatccagctcccaggtggatcgtttggttataccagaagagaaccacttggggtatgtgtgggaataggagcatggaactacccctttcagattgcctcttggaagtcggctccagcattagcctgtggtaatgccatggtctttaaaccttctccctttacacctgtttctgcattgctactggctgaaatctacagtgaggctggtgtacctcctgggctcttcaatgtggtgcagggaggggctgccacaggccagtttctgtgtcagcatcccgatgtggccaaagtctccttcactggaagtgtgcccactggcatgaagatcatggagatgtcagctaaaggaatcaaacctgttaccttggaacttggaggcaaatctccactcatcatcttctcagactgtgaatatgaacaatgcctgtaaagggggcgctgatgagacaacttcctcacacaagggccaggtttgctgtaatggcacaagaggtatttgtgcagaaagaaattcttgataaatttacagaggagtggtgaacagaccccaangattaagnttggagatcccttctggagatacanggngggtcantntnaacgacacactggagcgatcttgggttntaagtggcaaggacaggt

SEQ ID NO: 256271 - DNA, 645 bp, Homo Sapiens
  misc_feature (401)..(401): n is a, c, g, or t
  misc_feature (463)..(463): n is a, c, g, or t
  misc_feature (501)..(501): n is a, c, g, or t
  misc_feature (532)..(532): n is a, c, g, or t
acgagtcacaaacaaaaccaaagtttacttacctgataacattttatatacgttatttgtaaaaggtttaatttttttaatgttttacttttaacttcagaaattaattttattaggtgaattatctaagcagagaaaagagtggcaccttattcattacctttaaatcctgctgatcagggaaatgctataatgagaggacaccatttcccctgctaaatgtgaaagggaagataatcttagttgcttagtgtccgtctgtttcgtgggatatagatttatttacttttaaaaagttcattcatttaattatttataaggtcttctgtcccctcattcttttctttgaactccccaaagacagatctgccttaccaaaagcattcataagccctgcatantttatggaagatttcccaggggaagtatggcagctggttatattacacagaatgtaacattntgtacccacttttctatctgctactatgtctgatattnggctcctcaaatcattatgaatctaccacanggatgataggatgggctgggagtatagcatgagtatatagactatggggatatgctataagagcagagactatttcctggagatcatgaggtgatactgaggctacaacgatg

SEQ ID NO: 256272 - DNA, 369 bp, Homo Sapiens
gcagaaaaaaatgaaggtgtatgtgggaattcatgaacgggtgctttctgcaagacagaaagcagatgaaacagagaaaagaaagccactgcccgttatatgctaacagagaagtagtacagtagagcttggagccagctgtgcattagaagtccagagttgcaggtatgaatgaggataaaaatgagaaacgggatggaaaacagggaaaataactgaagatttctgaaacaattgtaccaatgatcggggagagctgaggatcctgatgcagggagaagtaaaggggagcacaggagagcagagggggatggggcaaaaggaggaagagggagaagaaggaaagggaatacattctcttgatgtttc

SEQ ID NO: 256273 - DNA, 435 bp, Homo Sapiens
gagcatgtgggtctgcagtaccctgtggcgggtgcgaacccccgcccggcagtggcgggggctgctcccagcttctggctgtcacggacctgccgcctcctcctactccgcatccgccgagcctgcccgggtccgggcgcttgtctatgggcaccacggggatccagccaaggtcgtcgaactcaagaacctggagctagctgctgtgagaggatcagatgtccgtgtgaagatgctggcggcccctatcaatccatctgacataaatatgatccaaggaaactacggactccttcctgaactgcctgctgttggagggaacgaaggtgttgcacaggtggtagcggtgggcagcaatgtgaccgggctgaagccaggagactgggtgattccagcaaatgctggtttaggaacctggcggaccgaggctgtgtt

SEQ ID NO: 256274 - DNA, 778 bp, Homo Sapiens
  misc_feature (637)..(652): n is a, c, g, or t
  misc_feature (699)..(699): n is a, c, g, or t
agacagctgaagaggaaagtagaataagcagttctcccacacttctggagaacagcctggaacaaactgtggagccaagtgaagaccacagcgaggaggagagtgaagagggcagcggagaccttggtgagcctctttatgaagagccatgcaacgagataagcaaggagcaggccaaagccacccttctggaggaccagcaagacccttcgccctcgtcctaacaccctggcttcagtgcaactcttttccttcagctgcatgtgattttgtgataaagttcaggtaacaggatgggcagtgatggagaatcactgttgattgagattttggtttccatgtgatttgttttcttcaatagtcttattttcagtctctcaaatacagccaacttaaagttttagtttggtgtttattgaaaattaaccaaacttaatactaggagaagactgaatcattaatgatgtctcacaaattactgtgtacctaagtggtgtgatgtaaatactggaaacaaaaacagcagttgcattgattttgaaaacaaacccccttgttatctgaacatgttttcttcaggaacaaccagaggtatcacaaacactgttactcatctactggctcagactgtactacnnnnnnnnnnnnnnnncctgaaaaagaaaccagaaaaaaatgtactcttactgagataccctntcaccccaaatgtgtaatgggaaaattttaattaagaaaaacttcagttttgccaagtgcaatgggtgtgcctctttaa

SEQ ID NO: 256275 - DNA, 704 bp, Homo Sapiens
  misc_feature (328)..(328): n is a, c, g, or t
  misc_feature (441)..(441): n is a, c, g, or t
  misc_feature (471)..(471): n is a, c, g, or t
  misc_feature (503)..(504): n is a, c, g, or t
  misc_feature (510)..(510): n is a, c, g, or t
  misc_feature (515)..(515): n is a, c, g, or t
  misc_feature (517)..(517): n is a, c, g, or t
  misc_feature (521)..(522): n is a, c, g, or t
  misc_feature (529)..(529): n is a, c, g, or t
  misc_feature (532)..(533): n is a, c, g, or t
  misc_feature (538)..(538): n is a, c, g, or t
  misc_feature (543)..(543): n is a, c, g, or t
  misc_feature (545)..(545): n is a, c, g, or t
  misc_feature (550)..(550): n is a, c, g, or t
  misc_feature (554)..(554): n is a, c, g, or t
  misc_feature (582)..(583): n is a, c, g, or t
  misc_feature (613)..(614): n is a, c, g, or t
  misc_feature (622)..(622): n is a, c, g, or t
  misc_feature (643)..(643): n is a, c, g, or t
  misc_feature (663)..(663): n is a, c, g, or t
cacgagatcacttaatcattcctgaagtagattaggctagacttaaaagaattcattagttctttttctttagttttcattgactttggtagccgggtgtgcctcgtgtaggtgatagttttaatgaatgaaaataactttccattgatactacctgccatgccaaaaaagaggagtctcctgtgagcttctgtgaattgagagcagattctcttagggtggtagaagttgggtgtgaccttgcagaattatgtcaaatagcaactgagtctccatggaaagtcaaaaatactggatgtcttttatcttttcactatctccgtctttntttgtcacttttatattcattaaacttcttagtcattacttcttactgtatatatataagaatatatatgtgaacacatatgtgtatatatattcttagtgaattagtcacanaaccattggtcattacataaagcaagtcanaattccagagggtggtcttggataagggctannaggctnatttngngccnntataggntanngaaangtcangnatttnctgngtgttgcactggtttgaaactactactnntatggcttctttgagtaagggctgtaaccnntctgtgtngacagtagtgaagactgatangtgcatgaagctgatttgangctgatcgaatgcaattttgattaagatgcactgattggac

SEQ ID NO: 256276 - DNA, 379 bp, Homo Sapiens
atctccttagtgttagcctgcctctgtggaatgctgatgccctctcccagcatcctgtcagccagccctcttgaattttttaaaactcagatttaatttacataagatttcactgcatagaaattttattaccagtcaagcattaaaatcaaggccatctgaaaacaggtaatgcagtgacctatcttaaccatcctgaagtcccaaagactctaggccttctcagtttctaaaatttattgttagtgtcccctagctaacctctcttatctccgggagaaatggaaagcaccggagagcatggcctctccctaatctagcatgccctgctgtttgttcctcaccagtggccctgcactccaatgagtagttgtgcgct

SEQ ID NO: 256277 - DNA, 649 bp, Homo Sapiens
  misc_feature (580)..(580): n is a, c, g, or t
  misc_feature (602)..(602): n is a, c, g, or t
  misc_feature (627)..(627): n is a, c, g, or t
tacagtggctgactgaaaggttaactgagaggggagtgaagttcttccagcggaaagtggagtcttttgaggaggtggcaagagaaggcgcagacgtgattgtcaactgcactggggtatgggctggggcgctacaacgagaccccctgctgcagccaggccgggggcagatcatgaaggtggacgccccttggatgaagcacttcattctcacccatgacccagagagaggcatctacaattccccgtacatcatcccagggacccagacagttactcttggaggcatcttccagttgggaaactggagtgaactaaacaatatccaggaccacaacaccatttgggaaggctgctgcagactggagcccacactgaagaatgcaagaattattggtgaacgaactggcttccggccagtacgcccccagattcggctagaaagagaacagcttcgcactggaccttcaaacacagaggtcatccacaactatggccatggaggctacgggctcaccatccactggggatgtgccctggaggcagccaagctctttgggagaatcctggaagtgccttnccccacaagaaactcctttctncctcagccaatgaatcaatgtgctncttcataagccattgcttctcc

SEQ ID NO: 256278 - DNA, 1812 bp, Homo Sapiens
ctggagacggagaaggcggacgtacagctcttcatggacgacgactcctacagccaccacagcggcctcgagtacgccgaccccgagaagttcgcggactcggaccaggaccgggatccccaccggctcaactcgcatctcaagctgggcttcgaggatgtgatcgcagagccggtgactacgcactcctttgacaaagtgtggatctgcagccatgccctctttgaaatcagcaaatacgtaatgtacaagttcctgacggtgttcctggccattcccctggccttcattgcgggaattctctttgccaccctcagctgtctgcacatctggattttaatgccttttgtaaagacctgcctaatggttctgccttcagtgcagacaatatggaagagtgtgacagatgttatcattgctccattgtgtacgagcgtaggacgatgcttctcttctgtcagcctgcaactgagccaggattgaatacttggaccccaggtctggagattgggatactgtaatacttctttgttattataacataaaagcaccactgttctgttcatttcctagctgttctaattaagaaaactattaagatgagcaaccacatttagaaatgtttattgacaggtcttttcaaataatgcttttctaattaatagccaaagatttcatatctaactttgtaaccagaattatacagtaagttgacaccacttagatttaaaggcagacagttttgctttagtacaatagtatacattttataatgatgaacttataatgattaagggacatttctataaaaatactacaatagttttatgcacaacttcccattaaaaatgagatttcttatttgtttgtctgtttttactctgggagtaatactttttaaattacctttacatatatagtcactggcatactgagaatatacaatgatcctggaaattgcagtaacaaaagcacacaacgattatagtaactataagatacaataaaacaaataaatgtgaaagtagattcatgaaaatgtattcctttaaaatattgttttcctacaggcctatttaacaagatgtttcattttactgtatattttgtagttaatataaatgttgctctaatcagattgcttaaaagcatttttattatatttatgttgttgaactaatatatgaaataagtaaatgtagctcccacaaggtaaacttcattggtaagattgcactgttctgattatgtaagcatttgtacatcttctttggaaataaaagataaaagagcgatacacaaagctttcttttctaacttttccaagcaaaatctaaaatgttttatgacatttttctggctgtgatcttaaaataattcatatctaaatagtatttgtctaggagatgctttctctctagtagttagaaattaaatctgtgtcagcattcctattaatgtctcactttactttcaagtaatattggtgctatttaacattttaccaggtaaaatgttacttctgatactttaagtaccaattccactacagcgatccatgtcacgaggacccgggcgtgcgcaccttgggctactggaaacaaattcctaataaaaacaacaggctacaacatcagatttctctcatatgggtgtcaccccaggaacggtcctggctaaggacgggacccatagggaggacccggggtcgaaacacatattggcgggaggaaccgcacacacgtgagagggaaagagacaacacgcggaacgcacaaaaggggggccaccgagaaaggacccaaaatataa

SEQ ID NO: 256279 - DNA, 2553 bp, Homo Sapiens
  misc_feature (280)..(280): n is a, c, g, or t
  misc_feature (431)..(431): n is a, c, g, or t
  misc_feature (439)..(439): n is a, c, g, or t
  misc_feature (442)..(442): n is a, c, g, or t
  misc_feature (487)..(487): n is a, c, g, or t
  misc_feature (711)..(712): n is a, c, g, or t
  misc_feature (1163)..(1163): n is a, c, g, or t
cgggatgggagcggcggctgcagaagcagcagcagcagaaacagcggcgggtactctgtgccccgcgtcccggaggcagccgactgcgccaccccaccctcgcacggccgggcgggacccgcgccaccagcccggacctccgtcgtcccgcggcgaccaaaacccccgctggccccaccgctgtgactactctggactcgcccgcagagtttgcccgccggggagggtggccgattggcggacgcactcctgctgttttccccaccatctcgtggatgtngtccctcgggtggtgaaagaactttgcagtgggctggagcgccctttgcggagaagcacacgaaggtgaaggaaggaaagaaagaagaccgaggaagaaggagctcggaagaagggtccggagcggccggtccggccgtgcagggcgagtncgcccgangcnggcgccctgatgctccccgggctcgaggagcattgggcacttgcnggactgctctcggtggagtagccccgtcgggcccggaggtttgttcaaccgcggagaacaccgagtgctggtcgcacggggcgtgccgagccgcctcccggcgcgccctccgcactttccccgcctcgtcatccgtcgctccccggccaggagcctccgctgcgtcttcaacctcgctcccctttgcgtcccgggagcctgcgagcacccggccgaaggcagcnnattcttgcgggagtcgccccgaaagcgtcgggtttgtgtggggttagcgggggccgccgcgccacctgcacctcgcccgccgccgcctcggggaaagcccgaagaggaggcggaccaggagaagagcaaagaaaagcagtccgtctggatttgtttgcccaggactggcgccgcgcacgcggatcgccgaggggagtgcggtcggagtcaccgcgcccccgcctccccgcccgggcagctgaggccgggggttggagcgctgcccccgcgcacagtccccgagcgcccgacgtctccgcgcaggttcttgaagcagctgggcctggggcgcccactaatgtggccctgagggccggagcccgcaccgacgggagcgggagccggagcagctgcgggcgccgagtggccggtgcgcccggcggagcgcgcgtgcgtggccagcgcgcctccnccgcttctgcttggctttccggcttaattttcctcggcgggattaaagttggaaattgaccggagaattgagttgccggggaacagagccccggccgccgccagagcgatgttcccgcagagccggcacccgacgccgcaccaggctgcaggccagcccttcaagttcactatcccggagtccctggaccggattaaagaggaattccagttcctgcaggcgcagtatcacagccttaaattggaatgggagaaactggcaagtgaaaagacagaaatgcagaggcactatgtgatgtattatgaaatgtcatatggattaaacattgaaatgcacaaacagactgaaatcgccaagagattgaatacgatttgtgcacaagtcatcccatttctgtctcaggaacatcaacaacaggtggcccaggctgttgaacgtgccaaacaggtgaccatggcagagttgaatgccatcatcgggcagcagcagttgcaagctcagcatctttctcatggccacggacccccagttccccttacgcctcacccttcgggacttcagcctcctggaatcccgcccctcgggggcagtgccggccttcttgcgctgtctagtgctctgagtgggcagtctcacttggcaataaaagatgacaagaagcaccacgatgcagagcaccacagaggtgagaggccgggcaagccagattaggactttacacacagactcttacagtgctgcaaagttgtgtgcatcgctaaagagagccccaacctatacagagaggcaaacaatgagataagaggaactgtcgcaaagctttccactgaaacacaggtcaccctggaagtttgcagggtttgctgtgggcatctgtagatttctcgatctcgttagattgcaggcatcttgacatcttggcaactgcctagttaatgccagtggcctgtaccatattatggaaaactgttaactgcttaattgggtaattttcaaagaaagtaatgttgttaaatggggcgaaataagaagttaaatttgaaagtgaatgtgttcaaatgaaaggtttgataattgcgtctgttactacttagtttcataggctttaattctagtatgcattaaatattgggcaaaattgcacttgactaattttttgaagaaaagtaatttattctgtcaagaaataaaaaaataggctttgtgtatggttaaactgtaaatcttatgtttacaaaatactgtaattttcaggaaatcactgtattaggaatgtgcaatgacttatataaataaaagccatttttaaaactgtttggggcttgtgttctaattattccccccttttttttatttctgttcttgcctctgtgtctgaacgggcatgtct

SEQ ID NO: 256280 - DNA, 939 bp, Homo Sapiens
cgggtggcgaattcagcacgaagcttaattttcctcggcgggattaaagttggaaattgaccggagaattgagttgccggggaacagagccccggccgccgccagagcgatgttcccgcagagccggcacccgacgccgcaccaggctgcaggccagcccttcaagttcactatcccggagtccctggaccggattaaagaggaattccagttcctgcaggcgcagtatcacagccttaaattggaatgtgagaaactggcaagtgaaaagacagaaatgcagaggcactatgtgatgtattatgaaatgtcatatggattaaacattgaaatgcacaaacagactgaaatcgccaagagattgaatacgatttgtgcacaagtcatcccatttctgtctcaggaacatcaacaacaggtggcccaggctgttgaacgtgccaaacaggtgaccatggcagagttgaatgccatcatcgggcagcagttgcaagctcagcatctttctcatggccacggacccccagttccccttacgcctcacccttcgggacttcagcctcctggaatcccgcccctcgggggcagtgccggccttcttgcgctgtctagtgctctgagtgggcagtctcacttggcaataaaagatgacaagaagcaccacgatgcagagcaccacagagacagagagccgggcacaagtaattccctcctggtcccagacagtctaagaggcacagataaacgcagaaatggacctgaattttccaatgacatcaagaaaaggaaaggtggatgataaggactccagccactatgacagtgatggtgacaaaagcgatgacaacttagttggggatggggctaatggaggacccttcttttccggaagaaagccttgcccacttgccccggggaaatgggattcgaacaaatcgc

SEQ ID NO: 256281 - DNA, 1124 bp, Homo Sapiens
  misc_feature (1085)..(1085): n is a, c, g, or t
  misc_feature (1093)..(1093): n is a, c, g, or t
cctgtgatccaagcggcagtgatttgcctcaagatacctggcactccatggtctatgtgccacagatgcagcagcagcttcatgtagagaattatccagtctatactgagccacctctggtagatcaaaccgttcctcaatgctacagtgaggtgaggagagaagatggcatacaggcggaagcatcagcaaatgatacttttccgaatgctgattcttcatctgtccctcatggagcagtctattatccagtaatgtcagatccctatgggcagccacctttgccaggttttgactcctgccttccggttgtgccagattattcctgtgttcccccctggcatccagttggtacagcatatggtggttcttctcaaattcatggtgctataaatcctggggccaattggctggtatttgctccatcttcccccagcttctcattatgtacctcagggtatgttaagatccagcagtatggaagtattcttggcacttgccattttcttgctgtttttgtttttaaaaagtattttatgttagtgggttaaatgattaaggggaataggtgtttaccattgtatttgtctttaaaattatttttatcttttgatttaaaatagtactttaaaattaaggggtattattttgggctgtgactaaggaaattgagatggatgtacaactagccccatattgagcatacttcattgtattcagctgtttctcctgtcagccatttgtcagctttatattagctgatggtaccaattgataaaatgaatataaagtatttcattggttcaaaaatcacacatcatattaaaccatgcagaattggagtaacttccacttttttctagaaagtaaaaccaagagcctttgcttctggataactcacttaatattaaattaaagagctcttcacgtttcttgagaattatctgaagccagttgcattctgtgatatcgagttttgaaggcacatggttctctgctttagatttatcccatatgctattgtttaatactggatgtatgtaagtgttttactgcactgtattgaattggtgtcttttgcacangttagcangtaaataaaaattagcatttaaaattgccaa

SEQ ID NO: 256282 - DNA, 364 bp, Homo Sapiens
tgtgtttgcagatggttatataaaaatatccgggtcaacttggggagaaatgacattatctctcttttctctcctgattgctgctgcagtgtatatcatggacactgtgggtaacatttgggtgtgctatgcatcctatgttgtcttcagaatcatctacatgttactcatcacgatagcaacgtatgtattttggctcatagaagccttaggaaaaattgtaacaggataaattttttggtttctttacaaaccatgtgcattatcagtttttctcctgaggaagcatttaggcaagttttggttattcccatgtttgtatgttcctactggtttcagatgtttgcatgagatttatatcatt

SEQ ID NO: 256283 - DNA, 389 bp, Homo Sapiens
tgcccatcccatataggggtcccaaagtcaatcctctggctgtgcaggaaggttggataggcatttgtgcaaagaactatgaactctgcctactacattatagtgctcaggctggagttgtgaatctcaactggcccaattgtctttcactgccatcatgggattttctttctacaagcacacacaatacttcccatgttttaagctattaacagcttttcaacaagagaagccaagatggtgaagaagctgtgtgccaaaatctcacatttatcccatgttgaactggtgaatgtcgataaaattttccacacatgatggcaggcacataggagtctcataaatacagaagaagccttttatcatctgctccaagtttttcacttctc

SEQ ID NO: 256284 - DNA, 628 bp, Homo Sapiens
gagaagtgaaaaacttggagcagatgataaaaggcttcttctgtatttatgagactcctatgtgcctgccatcatgtgtggaaaattttatcgacattcaccagttcaacatgggataaatgtgagattttggcacacagcttcttcaccatcttggcttctcttgttgaaaagctgttaatagcttaaaacatgggaagtattgtgtgtgcttgtagaaagaaaatcccatgatggcagtgaaagacaattgggccagttgagattcacaactccagcctgaaaattttctttacgtcagacaacatagatgccaagtcagagtggctgttcagcagcactataatgtagtaggcagagttcatagttctttgcacaaatgcctatccaaccttcctgcacagccagaggattgactttgggacccctatatgggatgggcaatgctccaaatgtttgtgagagctgagtcaaatctaaaacaggcagcactcacggattaagtagtcttgacagggaactacaaataataatatctaagaaaatatactctaggaagaccgaaactgtaggcatacgtctacaagaaacagcagcaagccaataaccatgactacccctgacagag

SEQ ID NO: 256285 - DNA, 243 bp, Homo Sapiens
taggtcatatcatactcatagtacacttagtcactttcaggctaaatgcagagatttgcatctgtgagaaactgtaaggatgttatatcatccacaatctctgagtcaaaaaaactatagaaaagagctcattggataaatgaatatggtgacttgaacattgaaatagtcaagaggacatggtgcagagcacctctctgaaagggaacactatcaggtccacaaacactgcatgagaaagtt

SEQ ID NO: 256286 - DNA, 416 bp, Homo Sapiens
atttctctcgtaattcaggctcactgcccaaaggcaagagaacttcaatataactgtccttcattctcctaggaggcagtccatcctgtgatttagccaagaaactatgaagtaatttcctttcttccattgccttcacatggtctctccagtttgtggatgctcctactatctcccgcaacttatctcgaacttcatgaatgtggaagattccctgtttcttggggttctggggtccttgagtcagtcctcttccaggagtaagctgccctttgcccaaggcacaaagccgcagtgctgcccgcctcattgcgctaggctgccgtgcgcgcgatggagaaccgggccccgcgcgctagtcggcggagggaaactgaggcgataaaagacgcacgagtaccagaccgcgcccttgc

SEQ ID NO: 256287 - DNA, 550 bp, Homo Sapiens
agctggtgaaggtccattactgacgctctgaggcttggttgaatggaacaggaagacctgaagtgaaagaggagctttgacaagctcctggacgctgatcagagcaaagggagcagacatgtggcgctcagcacacggaagagtgtgtagagcagagtaagagcgcctggaaccctgaagcttcctctaggccctcccactgcagggcgctgtatcagaggctggagagcctagtgtcaagcatatttcagtctttgtggaacttggcatcctgtaggctatattttgcccctgggcatgtttgatttagcttatataaaatatttttttaaatattggagccagtgtttgtaagttaggttatttcacattaaaaaaatatcttgaaaacatagaaggtcaggaagcgcacagacggcatctacctacagcaacagtgtgggctggtcctttggctctctggcccgggctgtgcgtgccagtttcacactttccagccgtggcccctgcactcatctttgctacctgcctccataaatatctgagttat

SEQ ID NO: 256288 - DNA, 618 bp, Homo Sapiens
  misc_feature (545)..(545): n is a, c, g, or t
gctgtttctgcccctgggttaacattcaagatggtacatgctgaagccttttctcgtcctttgagtcggaatgaagttgttggtttaattttccgtttgacaatatttggtgcagtgacatactttactatcaaatggatggtagatgcaattgatccaaccagaaagcaaaaagtagaagctcagaaacaggcagaaaaactaatgaagcaaattggagtgaaaaatgtgaagctctcagaatatgaaatgagtattgctgctcatcttgtagaccctcttaatatgcatgttacttggagtgatatagcaggtttagatgatgtcattacggatctgaaagacacagtcatcttacctatcaaaaagaaacatttgtttgagaattccaggcttctgcagcctccaaaaggtgttcttctctatgggcctccaggctgtggtcttcagccttcgacactgaccgataagtggtatggagaatctcagaaattggctgctgctgtcttctcccttgccataaagctacaaccatccatcatctntatagatgaaatagactcctttctacgaaaccgttcaagttctgaccatgaagctacagccatgatgaaagct

SEQ ID NO: 256289 - DNA, 2141 bp, Homo Sapiens
  misc_feature (751)..(751): n is a, c, g, or t
  misc_feature (1474)..(1475): n is a, c, g, or t
  misc_feature (1477)..(1488): n is a, c, g, or t
  misc_feature (1490)..(1490): n is a, c, g, or t
  misc_feature (1492)..(1492): n is a, c, g, or t
  misc_feature (1494)..(1494): n is a, c, g, or t
  misc_feature (1496)..(1571): n is a, c, g, or t
  misc_feature (1595)..(1596): n is a, c, g, or t
  misc_feature (1608)..(1609): n is a, c, g, or t
  misc_feature (1611)..(1613): n is a, c, g, or t
  misc_feature (1615)..(1621): n is a, c, g, or t
  misc_feature (1633)..(1647): n is a, c, g, or t
  misc_feature (1697)..(1738): n is a, c, g, or t
  misc_feature (1779)..(1840): n is a, c, g, or t
  misc_feature (1948)..(1957): n is a, c, g, or t
tgtaggaatacggcacgagagagcatgttgagtttcaaacctatttggcttctgtgttgtgagacctttgaactatatgtatgtgtataagggtatacacatacatatatggcatataacaagtgtacacatatacacataacaagtgtagaagtatatattacatacatacacttactttggctggtataggctaattttgaagaacttccataaggttctggtggttcttccatatactggtgtcaccaccatcagaattcataatcaaacctaacctttttggttggggcaccaaatctgaagacaaaattaatttgcaccagtaaacatcaagctgcgttctttcttgaaaactaaacggttaacgtataatgtctgtttggatactgttccaaattgttgattgcatgtggttaatgttgcattagagcactttgcaattgcataattcattaatgttttgtgagcttgcatttgtgagttattggatgatcagactgaattttgtcaagtatcacattgtacatcttgcctagatgtcgatgactgcaagtaataatacagtttataatgaaactatctacaattcttgttttagcacatctgttatccgtaaaacacctgtaactagcttttttaatttattatttgaattttaggatagcgaatcactaatttttagttgctgaggttggcattttagtgattattaagcacttctgtcagtctttgaaaaaaagaacgtatntttttgtgctttgaagatctcttgaagaatttcttttataatagaatgggcatgtattggtaacagttttatgtcaaatgatctgtgctgtagaaaaacattaacccttgttcaaaaaagaaatggataaacttggcctttctaagtggtaagaatgacctgtcactataatatactgtatgtttacattttatttaaatttaatctcttatgtatagggtgataaccttccccagaaacaacagtgattgcgattgttttctagaaacttctttaaagtgccacatttggcagtacaaatgagtctgagtgtaatagcccagagatttatatatagttgaatgtctaaaatggtaaaatgtgccactgtgtcaagttacagtggcttatgtttttcatagtaattcaaatgaacttcctatttttgatagtaaatggccatttaatagtatacttgccatttgagcctcactgcaaaattagtgcagaggagaaaacaatttttaatgtaatcttgattttacctcatatactgtacattccaaaaactctaaactttttaaagattatagatacactaccaaacatatcaccttaaaattgtataaggctgaatgaacttcatacaaatgaaaaaaatctcataaaaatacataaactatgtagcaaaagtatctgtaaaatccatggaaaataaaagttgtatcattctttttgaaaaannannnnnnnnnnnnancncnannnnnnnnnnnnnnnnnnnnnnnnnnnnnnnnnnnnnnnnnnnnnnnnnnnnnnnnnnnnnnnnnnnnnnnnnnnnaaaacccaaaacaccatccccaannccaaacccccanncnnncnnnnnnnttggtttggcgnnnnnnnnnnnnnnnaaaaaaattttttatacaacctttttgtggggggcgcgccccccacaggnnnnnnnnnnnnnnnnnnnnnnnnnnnnnnnnnnnnnnnnnncccccccgaaacaaaacaaggggcgggggacccctcccccnnnnnnnnnnnnnnnnnnnnnnnnnnnnnnnnnnnnnnnnnnnnnnnnnnnnnnnnnnnnnnggagctcttcgggggcttttatttggggtgtttatatccaagaggggggccccccggggtgtctcctcctttaatttaatttatgtggcgccccgcccgctggggtannnnnnnnnngagaagaggggtggggtggtatatttcaataaaaaaacttccccccgccccgcgggagagaccctccccctaaaacaacgggtgttttgaaaccccccctttataccccgcgcgcgggggaattaaacacccccttgggggccccctctggggaaaataaaatatttctcccccccgcgcggag

SEQ ID NO: 256290 - DNA, 227 bp, Homo Sapiens
cttttttcctccataaagtgcaaaacacttattattgttagatttataaacaacaattagaagctcaatccaataattttatgtctacatcatctcttccagtcacctttgtatagatacttgtgttgagaatatgtccacttacatactatatcaaataagtattggaacacagatgtgaaaaaagaaggctgccaatatttcttttaaaatatgacacttctttt

SEQ ID NO: 256291 - DNA, 435 bp, Homo Sapiens
ggcacgaggtgtatgtaaggggaagtgctgggtgcagcctctggggtggggttattcctatcctcctctttcctgcctggaccatgcagatgagggccatcccctagagataatgaagcaataagatgggagatacctggcagtccttgacaccatggacccgccatactagtctttggctgcaaactctcacgctgtcatggaagataaataaacctcaatactgcttaagccattgaaactttaggtctctgttgcacacagatgaacccatagtccaacaaatgtatcttcttgactaaatcttaccttcttactctgatgatttatattcagagaataaatttaactttgtctatatctggggtaaaaaagaacagctcttcaataaatctgcttctctccaaaaatattccagaaaattcatgtgattgg

SEQ ID NO: 256292 - DNA, 591 bp, Homo Sapiens
agcaagactccatctctattaaaatatatatatatttttttaattgttgaaagtatagtatgaatgaaaaatacagcgatttaacagttgtgacatttgcagtgtttgttttttctacttcttttttcccattgatccataataaagtcaattgtaaacatggcaatttattttcaatatcacagcatattcctcaaagttggtacaataccattgtagcatctaagaaaataaacagtaattttcagacattatcatatattattcatatccagatttctctcatttgtccccttaatgtcttttatagctttccttaaaacactagggtccaaagttcacacacagcattttattgtattctgtctttagtatcttcaagtttaaaagaatctccttattcttttccttcttttctctttctcctgcattcttcctaacatagtatcagtttatatagtaatttatgaagtgtcaatttggattttatgggctattttcaagtctgtggatgagcttgaaagcaaggatgtcagtgaactgacatccttaagagttgatgtactattttgtgttcctgtggatatatgt

SEQ ID NO: 256293 - DNA, 635 bp, Homo Sapiens
  misc_feature (480)..(480): n is a, c, g, or t
  misc_feature (483)..(483): n is a, c, g, or t
  misc_feature (586)..(586): n is a, c, g, or t
ggacatcattatgaaatacgaaaagggacaccgagctgggctgccagaggacaaggggcctaagccttttcgaagctacaacaacaacgtcgatcatttggggattgtacatgagacggagctgcctcctctgactgcgcgggaggcgaagcaaattcggcgggagatcagccgaaagagcaagtgggtggatatgctgggagactgggagaaatacaaaagcagcagaaagctcatagatcgagcgtacaagggaatgcccatgaacatccggggcccgatgtggtcagtcctcctgaacactgaggaaatgaagttgaacatccagcgcatcgaccgggacgtaagcgggacattaaggaagcatatattcttcagggatcgatacggaaccaagcagcgggaactactccacatcctcctggcatatgaggagtataacccggaggtgggctactgcagggacctgagccacatcgncgncttggtcctcctctatcttcctgaggaggatgcattctgggcactggtgcagctgctggccagtgagaggcactccctgcagggatttcacagcccaaatggncggaccgtccaggggcttcaagaccaacaggagcatgtggtagccacgt

SEQ ID NO: 256294 - DNA, 542 bp, Homo Sapiens
catcattatgaaatacgaaaagggacaccgagctgggctgccagaggacaaggggcctaagccttttcgaagctacaacaacaacgtcgatcatttggggattgtacatgagacggagctgcctcctctgactgcgcgggaggcgaagcaaattcggcgggagatcagccgaaagagcaagtgggtggatatgctgggagactgggagaaaaacaaaagcagcagaaagctcatagatcgagcgtacaagggaatgcccatgaacatccggggcccgatgtggtcagtcctcctgaacactgaggaaatgaagttgaaaaaccccggaagataccagatcatgaaggagaagggcaagaggtcatctgagcacatccagcgcatcgaccgggacgtaagcgggacattaaggaagcatatattcttcagggatcgatacagaaccaagcagcgggaactactccacatcctcctcgcatatgaggagtataacccggaggtgggctactgcagggacctgagccacatcgccgccttgttcc

SEQ ID NO: 256295 - DNA, 1110 bp, Homo Sapiens
  misc_feature (655)..(695): n is a, c, g, or t
gagaattgtggatccggaaattgccctgccagtccatggtgctgggcctggctcaggatccaatgtgtcaatgaaccagcagaatcctcaggcccctcaggcccgtgcgatggaagctcgtgcaatggaggcccgagcgatggaggcccgtgcaatggaagtccgagggatggaggccagaggcatggataccagaggcccagtgcctggccccagaggacctatacctagtggaatgcacggtcccagtccaattaacatgggggcggttgtcccccagggatccagacaggtcccagtcatgcacggaacaggaatgcaaggagcaagtatacagggtggaagccagcctagcagctttagtcccgggcagaaccaagtcactccacaggatcaggagaaggcagctttgatcatgcacgttctacaactgactgcagaccagattgccatgctgccccctgagcaaaggcagagtatcctgattttaaaggaacaaatacagaaatccactggagcgtcttgaaaggttttagaaaatatttggctgtagtctcaaattttattctgtagcatggagaatgggtgcaaaaagctgacttctgtatccccacacttggattagggtttccctcctcctagaacctaatcttannnnnnnnnnnnnnnnnnnnnnnnnnnnnnnnnnnnnnnnnaattgagggtggggggaggagggagtgcgtctgttcactttaagttactttaaaataactctgaacatgattatattatgccaaataagattacaaagaataagcagcaatattgaagcatctacagtatgttaactacattttttaaatgtcgagtaaaacttcgtgaaaactgctcataaagactaaaagttgacctgttaaaacgttaatgtactaagatagttttaagatttttggtgtgtataacaaaataaaagtttacccaaaagtatacacacccaacaaacaggggggcgttctaaaggtttcctcggggggcgcaagcttaagcgtacccagttttttgtccaaggggccctaagggaggcgataaaaacaaggacggcgcgttaaaaacgtcgggtgggaaagg

SEQ ID NO: 256296 - DNA, 772 bp, Homo Sapiens
gctacctctatgctctcacacaagctgatttttaaatcccatattttgataatgttcttaaaatatgacactttcccagatgcaaaaccatattcccgatctgaataccacagagtacagtagaaatatttactcccctgattcagatgccacatgctgtcagtgtgcccaatctgtgtgacaattttagatcacttgtcacccaggtcttgggtggggagtatatggttaaaataatttttattatgaggctgtcagacaatctcacatcattacaatgcaggcaatacagccaggccttagggaaacggggcaatggccaggcagctaccctccatccttctcagtcgtaggaactgcatagttccctgtctgtctcttagtttctgctctgtcgttacttcaagttgcccatgggtttccatgatactctctgactccttgcatttgggtacccgacagctacctgaggggcattcagtgtcacgtaattcaaattcccaggagggaggcagggccccactggcccagcatagtccagttactcccccttcctaatcagctgtggccagcaaaatgatgatccggcaacagacacagctgccaggcaggtctcctcataccaccaggacaggccatgaaaagagggggcgcattttccctaaaggatgtgtggatgggaggtaaagattggtttttttaaaaccccttccagccgggcacagtggctcatgcctgtaatcccagcacttttggaggtcgagagcaagac

SEQ ID NO: 256297 - DNA, 555 bp, Homo Sapiens
  misc_feature (111)..(247): n is a, c, g, or t
  misc_feature (408)..(453): n is a, c, g, or t
ccgccctttgaagatgagtcacggttccctaatagtggactcgtgtttccatctgagccacattccaccctatatcgggccaatcccgtgattgagaacgttttttgacannnnnnnnnnnnnnnnnnnnnnnnnnnnnnnnnnnnnnnnnnnnnnnnnnnnnnnnnnnnnnnnnnnnnnnnnnnnnnnnnnnnnnnnnnnnnnnnnnnnnnnnnnnnnnnnnnnnnnnnnnnnnnnnnnnnnnnnngaaaggtattacggcagctggggaaatgagcatgtgaagcaaagcgatttagctgggtaacccctggggtttcccagtcagtcaggtgtaaaacgacggccagtaagattgtaatgggactcgctatagggctaattgggttctcgggctcccccttaagnnnnnnnnnnnnnnnnnnnnnnnnnnnnnnnnnnnnnnnnnnnnnngaattgtattttttattgaaaagaattcaggctgaggtgggaggattacttgagctcaggagtgtgagatcagtctgggcaacaaagagagaccattgtctc

SEQ ID NO: 256298 - DNA, 1004 bp, Homo Sapiens
  misc_feature (321)..(332): n is a, c, g, or t
ttgaccattctcttttagtctatgggaattacagggttgccgctaaaatattcacttgttcatatcgtgtcagagatttcctcttctctggagcttaggtggctcttcacaatccataggcttgaatctgcaacctagtgtaaactgccttgctttccccggttctttcccctgctagcacctgctttctcatccctatctccagtcaaagatgggattgcttaatccaactctggagagggaccaagtcttttctgcccacatctcacacaattgaggtgtctgaacaagcttggggagggtctataaggggtaggctcnnnnnnnnnnnncccatttgcagaggcagttttgccaacacaagggctctttcaagccgactttcacaaagagagccggacttgttagttggcttctgtctctttagagccaagaaaatagtaattaagtggcctagatataggaagggcagaataagcacttactccccctgccttccaagatgaagaggagaagcaggccaaccctcaataattgcaagcctgaagagaagtgatcttagagaaagcagagaacagaatggactggatagacatcttgactctattcagcccgtagtctgtgatctggagagtccagttaaggtaacccagatttttgacaaccgccttcctgctgagccaaagttttctcattacccctccactggggaagcagctgaggcccagggccttgctccctgggaaattctcttctctccatctttcggtgcattggccatgttactgtgccaaagtgtcttaattcttgtcccatctattctcagctggccttggaacccacataggagttggtgggggagggatggaatgggtattattcattgtagttgatcctggtgtgtgtattatataaagagacccctccccttattttgtgttttccatccctctcccttaacaggattgaaataaaacatgcttctgtttttgtaaaaatatttt

SEQ ID NO: 256299 - DNA, 635 bp, Homo Sapiens
  misc_feature (43)..(43): n is a, c, g, or t
  misc_feature (121)..(121): n is a, c, g, or t
  misc_feature (128)..(128): n is a, c, g, or t
aatgaaaggaccccattgtgacagacccctgaatctgctcatnttctgtgctcctgaatgtgtagctacagactctaatttcgaaacaaacctgataagtgggacgagcccaggccctagnaagctgnagccctctctaatgctctggagcctgcccacctcctgagatctggaccagtctctgcctcttctggggcctcagtttcccaattgtaatgtaatgagaaattaaatgtaaaactgcataaacatatgctctgtgagaatttggtgtcagagttctcaatactggatgataatttggagtggggtgggtttgggacccatgggttctcaggcctcctttcacacccagtgcagtaggtgtagagctctggacagccaggtgttctttcctgagccagctgattacaacacaatggaccaagggctctgatcttaaatatggggggagcagatgacaaaccccattatagtgaagaagagcaagaaactagacttgtgggcctggggaaaagaaaaaaacacttctatttctcccaaactgtagaatctcttgtcaaatatttaattttgattatatctgagcttgataatacattcatgtgttaacagctgcttaaatttgttttttc

SEQ ID NO: 256300 - DNA, 639 bp, Homo Sapiens
caagaatacattttctaaagtcagagcctctctcccctaaaataattgagatgttattttatgataaatgttgcttacctgacaatctaaatagtacactttcgatcagcattcttaattttgtgtttttaaacccctagagcagagcctctcaaacagtgtcctctaaggataggttatgggtgtgccaatgtattgcttcctcttagtttcttgggtgatagagtgcagcatggggaagttctgaggaaatgggcagggattctggctgtaaactttgttcatttagtatagcattcaaatgttaccattttctgtggggaaaatgacccttgaacagcgttgctcttaatttgaggtcctcacaccctcaagaaacctgaagatagaataggggtagggtagtcggtgaacttggattggaaaaaattatgtctttattttcactaacttccaactggcatttctttcaatcatgaatatgtctacaaaccacagtagaatcataagtatctgcagctttgtcattcatagaaatcacaaatatttctaaattattaatatattacagatgtactgatatcctcccaaatttttatactaatttcttcttcaaaattcctggctggccacaatggc

SEQ ID NO: 256301 - DNA, 653 bp, Homo Sapiens
  misc_feature (52)..(52): n is a, c, g, or t
  misc_feature (78)..(78): n is a, c, g, or t
  misc_feature (97)..(97): n is a, c, g, or t
  misc_feature (119)..(119): n is a, c, g, or t
  misc_feature (147)..(147): n is a, c, g, or t
tccctctccattctgggaaaattgaagggtggggctgaaaccctctaatccntgcctgggccctgtgactagccctanccctgaagtttcgtagggnctgcccaatcactggagccagnaaatggaaggcaggccagatatgtattntgccaatccacaactatagacttctaacttcctgaaaatgttcatggactgaatcaactctcctgtccacttcatgctgtacaccagcaagtgagccctgggcctcaagggtgtgggagaatgtctgccttctaaacagaatcattttcaattgctgtgcctgtgaaaatctgcctgccttttatgctttccctgtctcttctcttgtcatttaggcttctcctgttatcagggcctgtaagaagcaccacccttcccagtctgttggctgacaaccggctgcaagcccttgttaccactgtgtgagaaccaggaaaccaggattagtcaaggactttatggcttatcagccagcctcactgtctccccatccctgtaggtggctgagtgacaggaccctgggggaggacctgagagcctcctgggaacaaagagcatccaggacatgtctgtcaagtcgctaacaaggtcatctgacccacctgagaatgtgaaactacctatct

SEQ ID NO: 256302 - DNA, 613 bp, Homo Sapiens
  misc_feature (163)..(164): n is a, c, g, or t
  misc_feature (204)..(204): n is a, c, g, or t
gctatttcttaccttctgctccttggtccttactatttaggaaatagttaccaaatgtactgtaaagctaaccacaccacaggtaataacccagaaggccaaacatgtctcaaaacagcctctggtgttgaaatgcaccctacatcctttatgtcaagaaagnnaggactttcttagggaatatgccttataggctcatgtganaatgtcctaggactctttggtatagcaaagtttgcatttaacctgcaaccacggtcattcacctggggtagcaatgggagtggaatgaatccaaaagtagcgtagtgcttttatattttcctggaaaaataatttcgcttttttgagggggcacagtgagtgacatgttcatttaggacttctggatttcccacacattttctttggtctttggagtctattccagctgcatccagggactggaatactcaattcttgacatccagagtttttttacttgaacatttactgaagtttggggttttggggtgtccagatgtcacaactccttgccttttacaggaaagcttccagtgatgagaggacttgaatgttttatggccagaaacagactaatttccattttacc

SEQ ID NO: 256303 - DNA, 1041 bp, Homo Sapiens
  misc_feature (66)..(117): n is a, c, g, or t
  misc_feature (276)..(286): n is a, c, g, or t
  misc_feature (1015)..(1015): n is a, c, g, or t
tcctggccaagaactcagtcatttttctgtgtaccaggttgcctaaatcatgtgcagatggttctnnnnnnnnnnnnnnnnnnnnnnnnnnnnnnnnnnnnnnnnnnnnnnnnnnnncgtgtgcattttgtataatggccagaactttgtcgtgtgacagtattagcactgcctcagttaaaggtttaatttttgtttaaacctagacgtgcaacaaaagttttaccacagtctgcacttgcagaagaaagaaaaaaattcaaaccacatgtttannnnnnnnnnngcctacctcattgttcttaatgcattgagaggtgatttagtttatatgtttttggaagaaaccattaatgtttaatttaatcttaataccaaaacgaccagattgaagtttgacttttattgtcacaaatcagcaggcacaagaactgtccatgaagatgggaaatagccttaaggctgatgcagtttacttacaagtttagaaaccagaatgctttgtttttaccagattcaccattagaggttgatggggcaactgcagcccatgacacaagatctcattgttctcgatgtagaggggttggtagcagacaggtggttacattagaatagtcacacaaactgttcagtgttgcaggaaccttttcttgggggtgggggagtttcccttttctaaaaatgcaatgcactaaaactattttaagaatgtagttaattctgcttattcataaagtgggcatcttctgtgttttaggtgtaatatcgaagtcctggcttttctcgttttctcacttgctctcttgttctctgtttttttaaaccaattttactttatgaatatattcatgacatttgtaaataaatgtcttgagaaagaatttgtttcatggcttcatggtcatcactcaagctcccgtaaggatattaccgtctcaggaaaggatcaggactccatgtcacagtcctgccatcttactttcctcttgtcggagttctggagtgggaaatnaactggcattatgggccgctttaacc

SEQ ID NO: 256304 - DNA, 662 bp, Homo Sapiens
  misc_feature (19)..(19): n is a, c, g, or t
  misc_feature (21)..(21): n is a, c, g, or t
  misc_feature (62)..(62): n is a, c, g, or t
  misc_feature (167)..(167): n is a, c, g, or t
  misc_feature (184)..(237): n is a, c, g, or t
cgttctctccttaatagtntnttcagattagtactcatgctgagccagttcatagctctacncaactgaactcctcatacactcacaagagtcattgtgtctgtgacacctgacatatccacgaagcgtagtacatagtgtcatttgtgtgatagctgtggttgacnaatgataatgcatgtgnnnnnnnnnnnnnnnnnnnnnnnnnnnnnnnnnnnnnnnnnnnnnnnnnnnnnntgaagataggtatgactattaatacagatgggctgaattgaatagatattaaatttaaatgataaagatgtcttctggctttgattccttgtggttgataaatggctcaaagtgcaatggaaaatgaggtaaaaaagggagtaaaaaaagaatgagatccagtcatttgcaacatgaatggaactgaagattattatgttaagtgaaataagcctgtcacagaatggcaaacatcacatattcttccacttatttgtgggatctaaaaatcgaaacagtagaactcatggacatagatagtagaaggatggttaccagaggctgttaagtgtcatggggggctgtgagggagaggtgaggatggttaatggttacaaaaatagacagaatgaataagatccactctcgtgccgaattcctgcagc

SEQ ID NO: 256305 - DNA, 693 bp, Homo Sapiens
  misc_feature (17)..(17): n is a, c, g, or t
  misc_feature (435)..(435): n is a, c, g, or t
  misc_feature (508)..(508): n is a, c, g, or t
  misc_feature (517)..(517): n is a, c, g, or t
  misc_feature (532)..(532): n is a, c, g, or t
  misc_feature (536)..(536): n is a, c, g, or t
  misc_feature (542)..(542): n is a, c, g, or t
  misc_feature (558)..(558): n is a, c, g, or t
  misc_feature (561)..(562): n is a, c, g, or t
  misc_feature (661)..(661): n is a, c, g, or t
  misc_feature (664)..(664): n is a, c, g, or t
  misc_feature (669)..(669): n is a, c, g, or t
gcacgagaaaatgctgngattacaggcgtgagccacggcacgcagccagcaagttgtttttaaatgttaatatagaaaacagtgaaggattagctgaaaatatatgagcaggtgacattgaggtttactgaaatagccaatttgactggtgcttagactattgtgcagtaaacctaaaaggtagtggagaattgcttcctgctagcaggaagccttcatcttcttgagtacccaaaccaggcttcaggtgtcctttgaggatagccaggtttgaaattcttagtttctcaggaagagctcttctatgtggcaggggctgatagggcaaaataaaatgacaatttctttattgctacagagtatcctctataagttattaaacgagtgtaatgggataatgcccttccatcacacaacaggacaccaccccagttntgttttctggggtttcttccccctttgtaggaatcagataccttttgtagaaaaaaatggctatgccacgtanaggtgaatntttagaaaccacttnctangcgttntgggaacctactgaantcnntccttgtacagatggcgagaagtacaagctgtaatggactgtgctcttttgctgtctgcttctcttctgctgatagcaggaaagattatggtatataancanatatnatgctatcaggtgatgtactgatc

SEQ ID NO: 256306 - DNA, 320 bp, Homo Sapiens
tttctgagtccagctgcatctctcttaattaagctcattctgctttattcctgttattatacaaacacaacattaatgtttgttaaaaaattgtttccctgagaggaaatgtgaacatctaaggtcttcccaagtatttcatttttaaccaataaggtgattggataaaccatttttgatagttcggtcacctttgaatattcctgcccttttatgtggtatataattcttagagaatagagattatatattgggtatggaggtcggggaagacataaccactaaatagagaggtggtgccctaatatgaatcctcagac

SEQ ID NO: 256307 - DNA, 1969 bp, Homo Sapiens
ggggaactgtaagtgccagggtctcagggtcaggtcgcggctggtcactgtgcaggcgcttgggtgacgcgacgatctcagcggatctggtcaccttcgtctccccgccatggagacctcagcactcaagcagcaggagcagcccgcggcgaccaagatcaggaacctgccctgggttgaaaaataccggccacagaccctgaatgatctcatttctcatcaggacattctgagtaccattcagaagtttatcaatgaagaccgactgccacacttgcttctctacggtcccccagggacaggcaagacatctaccatcctagcctgtgcgaaacagctatataaagacaaagaatttggctccatggtcttggagctgaatgcttcagatgaccgaggaatagacatcattcgaggaccgatcctgagctttgctagcacaaggacaatatttaagaaaggctttaagctagtgatcttggatgaagcagacgccatgactcaggacgcccagaatgccttgagaagagtaattgagaaattcacagaaaataccagattctgcctcatctgtaactatctgtcaaagatcatccctgccttgcagtcccgctgcacgaggtttcggttcggtcccctgactcctgaactcatggttccccgcctggaacatgtcgtggaagaagagaaagttgatataagtgaagatggaatgaaagcactagtcactctttccagtggagacatgcgtagggctctgaacattttgcagagcaccaatatggcctttgggaaggtgacagaggagactgtctacacctgcaccgggcacccgctcaagtcagacattgccaacatcctggactggatgttgaatcaagatttcaccacagcctacagaaatattacagagttgaaaactctgaaggggttggcactgcatgatatcctgacagagatacacttgtttgtgcatagagttgactttccatcttcagttcgaatacatttattgaccaaaatggcagacattgagtacaggctttctgttggcaccaacgagaagatccagctgagctccctcattgctgcatttcaagtcaccagagacctgattgttgcagaggcctagatgctctgagggccattcacaattctcagggctcagcagtgatgggagaacagaggacagttccaggataaactgctgcctggggctgtgggatgaatcagtcaccccgaatcttggaaaaacccccttccaggagaggatgggcaggcatttaaaaagtaccatttttgtggttgtttggagcagggatgtacaaaataattttaatgtattaactcatactgcctgtcttttataggggaaaaaaataaccttttttattttaaagttataaggtttttaccttttagttgcttggatgacagggaattagcctaccccattttggtctggaacagaagactttcaaatttaatatggtccaagtgtcttcctactcaaggtaaacattatctccaaaattacatttatgattctaatatttgggcattgtggtctgtatcctaatttaaacagatgttaatggacgtctggccgaaactattatacttttataagatgagctgaatcctcttactttaaaaactggtctttttatttaccctctgtggtagaagagtcaccagcaggttccaaattgatgtgtatgataggaaaaaaaccttaattttaaatataatatagagccttaaactatgccactgggtggcagaggctgtataaaacgcacttgttttcatgcaggagcggggcaagtaaggttgagcctgactgtaaacctagaactgcggaaggactgggacttttgtacaaatttcacatttattttacagcaatcatgctgcatttgtgttagtgttctttataataaaaaacaaagcagcctcctggctggct

SEQ ID NO: 256308 - DNA, 389 bp, Homo Sapiens
ggaagagctggacatgtttcctcatgccactttatcttttggcaggtaacctgtctggtcagagtgcagcttcagtcttgcacccccagcagaccctccaccctcctggcaacatcccagagtccgggcagaatcagctgttacagccccttaagccatctccctccagtgacaacctctattcagccttcaccagtgatggtgccatttcagtaccaagcctttctgctccaggtcaaggtaataaagcaaccatcatcgtccaaaaacaataaaatggagatgttgccataactgggacaaaagcctgttaaggcgggttgggagactagctgaccagaacacagcctgtgtgttgtacactgaagaatctgggtggaaattacttt

SEQ ID NO: 256309 - DNA, 374 bp, Homo Sapiens
taactcccaatcaccttgactgaccttgatgtcctcaaaatttcctcaggtatattctgattataaaataacacactttcaaagatggctgaataggaacagctacagtctacagctcccagcgtgagcaatgcagaagatgggtgatttctgcatttccaactgaggttcatctcactgggacttgttggacagtgggtgcagcccatgcgagcatgagctgaagcagggcagggtatcgcctcactcaggaagcacaaggggtcggggaactccctgtcctagccaagggaagccgtgacacatggtacctggaaaatcgggacactcccaccctaatactgcacttttccaacagtcttagcaaacggcac

SEQ ID NO: 256310 - DNA, 428 bp, Homo Sapiens
  misc_feature (386)..(386): n is a, c, g, or t
  misc_feature (402)..(402): n is a, c, g, or t
  misc_feature (407)..(407): n is a, c, g, or t
gccgaaagaagtgccttcgccatgtctttctcttcgagcatctcctcctgttcagcaagctcaagggccctgaaggggggtcagagatgtttgtttacaagcaggcctttaagactgctgatatggggctgacagcacgagaggcatacactctgcaggcaacctcaccagagatcaaactcaagtggacaagttctattgcccagctgctgtggagacaggcagcccacaacaaggagctccgagtgcagcagatggtgtccatgggcattgggaataaacccttcctgggacatcaaagcccttggggagcggacgctgaagttgccctgcttcactgggaagagccgcccgcacccgggcttccgtggccgtgtcatcctttngagcatgcccggcccnttccntttacccgggccttttcgccg

SEQ ID NO: 256311 - DNA, 418 bp, Homo Sapiens
gcggcgccagttggccgggcacggggctgctgtaaggccgaggttgcggcggaagcggagaccatgttccgagcggcggctccggggcagctccggcgggcggcctcattgctacgatttcagagtaccctggtaatagctgagcatgcaaatgattccctagcacccattactttaaataccattactgcagccacacgccttggaggtgaagtgtcctgcttagtagctggaaccaaatgtgacaaggtggcacaagatctctgtaaagtagcaggcatagcgacaccattgattttggcaactcagaagcagttcaattacacacacatctgtgctggagcatctgccttcggaaagaaccttttgcccagagtagcagccaaacttgaggttgccccgatttctgacatcattg

SEQ ID NO: 256312 - DNA, 414 bp, Homo Sapiens
acaaagctgtggaaaagctttattatagattttagtacagaattaaaaaagttcaaacaataattgtttggaaccacaaataattaaaaggaaacacagcaatcccataaacaagcattctggcatctgttagaaattttccctcaaattatgaaatgtagctctccatgctttccaatgattgttataatacccacaaatatctgtgatttcagtggaatactttaacaaaagttttctttttaaggcatgatcctgattcattttttcttcaatatctcagtcatttcaggaactaccttaaataaatctgcaactattccataatctgccacttggaaaattggagcttctgggtctttattaattgccacaattgtctgtgaaataaaaacaaagagtttgacttttacc

SEQ ID NO: 256313 - DNA, 1379 bp, Homo Sapiens
gagatctcgttcgcgcgtctcgcgagcattaggtgactggctgaggcggcgccagttggccgggcacggggctgctgtaaggccgaggttgcggcggaagcggagaccatgttccgagcggcggctccggggcagctccggcgggcggcctcattgctacgatttcagagtaccctggtaatagctgagcatgcaaatgattccctagcacccattactttaaataccattactgcagccacacgccttggaggtgaagtgtcctgcttagtagctggaaccaaatgtgacaaggtggcacaagatctctgtaaagtagcaggcatagcaaaagttctggtggctcagcatgatgtgtacaaaggcctacttccagaggaactgacaccattgattttggcaactcagaagcagttcaattacacacacatctgtgctggagcatctgccttcggaaagaaccttttgcccagagtagcagccaaacttgaggttgccccgatttctgacatcattgcaatcaagtcacctgacacatttgtgagaactatttatgcaggaaatgctctatgtacagtgaagtgtgatgagaaagtgaaagtgttttctgtccgtggaacatcctttgatgctgcagcaacaagtggcggtagtgccagttcagaaaaggcatcaagtacttcaccagtggaaatatcagagtggcttgaccagaaattaacaaaaagtgatcgaccagagctaacaggtgccaaagtggtggtatctggtggtcgaggcttgaagagtggagagaactttaagttgttatatgacttggcagatcaactacatgctgcagttggtgcttcccgtgctgctgttgatgctggctttgttcccaatgacatgcaagttggacagacgggaaaaatagtagcaccagaactttatattgctgttggaatatctggagccatccaacatttagctgggatgaaagacagcaagacaattgtggcaattaataaagacccagaagctccaattttccaagtggcagattatggaatagttgcagatttatttaaggtagttcctgaaatgactgagatattgaagaaaaaatgaatcaggatcatgccttaaaaagaaaacttttgttaaagtattccactgaaatcacagatatttgtgggtattataacaatcattggaaagcatggagagctacatttcataatttgagggaaaatttctaacagatgccagaatgcttgtttatgggattgctgtgtttccttttaattatttgtggttccaaacaattattgtttgaacttttttaattctgtactaaaatctataataaagcttttccacagctttaaaactaaaaa

SEQ ID NO: 256314 - DNA, 447 bp, Homo Sapiens
catctttttaaatgaggtcgaggcttgaagagtggagagaactttaagttgttatatgacttggcagatcaactacatgctgcagttggtgcttcccgtgctgctgttgatgctggctttgttcccaatgacatgcaagttggacagacgggaaaaatagtagcaccagtaagtattgcaataaaatatgctgtgtaaaatgttatggggataagtactgtatgtatttgttgaacagtgatctcagtgatttaccttactcagtgttcctgagcagttagccagtaccatggtgaatatgtcattttcacaaggtctgtgtagttcttgatcctagtaaaatgcccagcagttcttaaatccagcttattattcaagtattttaaagcagtggaacattttatcaaattaagtcatattacatcaaataaaacattgataaaagca

SEQ ID NO: 256315 - DNA, 1273 bp, Homo Sapiens
  misc_feature (1192)..(1192): n is a, c, g, or t
ggtgagtcggctgttgatttcatcaggacacttttagttaagaaacctgaagatcgagccactgctgaagaatgtctaaagcacccctggttgacacagagcagtattcaagagccttctttcaggatggagaaggcactagaagaagcaaatgccctccaagaaggtcattctgtgcctgaaattaattcggataccgacaaatcagaaaccgaggaatccattgtaaccgaagagttaattgtagttacttcatatactctaggacaatgcagacagtctgaaaaagagaaaatggagcaaaaggccatttccaaacgatttaaatttgaggaacctttgctacaagaaattccaggagaatttatctactgagcaatatttccctttagaacttcaagatttctacactgaaaatgttaatattatttatggacctctggccaaatggtacatgtactggaagtggataaccagtatcacttacacaaacaaaaataactttgtcaaatttgtggagttaggtggaagccagattttaaaagctgccaaccaggagatttaacaggtacagttacccgtttcaatgttatttttaagaagggagatgttggcacctttgaattctacatcctgtttctccagaatgagaatttgtgtacaaagatatttgtattcactttctttaaaaaaatccaagtaaaagtgccaaaactacacttctgtaaatctcttgcattattcatatgtgtatctatatctgcataatgtttgttaatgtctactaaaattgctactttttcactttggatttgtttttggcaaaattttagtctaaacagacatctaaattttcgagacttagaataacattcactaaagtttgataatgtcttttttaaatattttcttactgctttatagtgacttgatttggtttctgttgtgtttttgcctaaatactagtaacatatcagtgaaaaaccctaattttttttcacttcaatgtcactagtaagagaggtggtaatttttcacctctgaaattattctgggtttaggtgtcagcttttgagctgcttccctcatcacaccacactcacatgcatctgttctctctcacactctatacccctgccaccttcctgggcacctccccccaaggcttgtcattgtaattttgggccacttngtaaggtatcaagtgtgatcttgatcaacactcctggttaccttgggtcagtgaaaagatgctactatattgcttttggcc

SEQ ID NO: 256316 - DNA, 374 bp, Homo Sapiens
tgtgattctgcattggtgaatattcctatatttaagtcatctgtttgaccactgatttcatcagaatcatgtcttgaatttgaaatgttagatgcattatattccatttgtattgtatcaacaccaagatttttaatcagtctagaagtgtcatgtcccttttgcgccaattctcggattctttgttcttgttttagtctctgtgccagttcctgtgctcgctgcattgtctggaatagctcatttgtcttgagagtcatgatttcttccttttgtttttgcttaagtatgtcttcttcatactgtttctgcatctcttcacgttcctgtgctaagcgaagctcctcttcttgttctggcttttttctttctcc

SEQ ID NO: 256317 - DNA, 521 bp, Homo Sapiens
tggagccaggaataagctccttggggcatgggagtcattagatgaaatattcctctttctcgctgcccttggccaagtcactctccatctggacgatggcactgggctcaccttctgtaggttcataggtgacgtagctgcctttgttcttgtacaggtaaaagaagatcaagatcacgaccgagagcagggtgaggaagacaacggtgataacaactgcaatgagtgctgtgctggctccatcttctggggacagggcctcagtgggctgtaaaattggggtggtcatcagttcttctcttggagaaggagtagtcaggaggctggtcattgtcactagtggttgagtttcttggagaagaggcagatcagcaccccgcggagcgcgctgcgctgggggcggccggtgcgtcggggagcggcgttcccagccgccgcgaccctctgccccagcggagcgctgagcttcggccgctccgggtttcggttcctgccacggccgaggtggctgcggcgaatgt

SEQ ID NO: 256318 - DNA, 377 bp, Homo Sapiens
  misc_feature (213)..(214): n is a, c, g, or t
aatataactttacaagcccagagtgagcccattaatggatttggtcaggcttccctctggagagagatgcccttgatccagaaggtcccttggagttggctcagagtctattacctgcaatgagtgctgtgctggctccatcttctggggacagggcctcagtgggctgtaaaattggggtggtcatcagttcttctggaaaatgtagaaaanngtggaaaaggaaatggagtgaattcttttgtttgaaagcacatgtttggccttcaaatttcaccaccccaccttcttccctattcaaaagtttatcatttaactcctagagtatatccaaatagaaaatcctagagaataaagaagaaaataaaccaccaccc

SEQ ID NO: 256319 - DNA, 657 bp, Homo Sapiens
taagccgccgtgcccagcctggaaggttcttcttctatatatggaatgtgataatatctttggaaaggagactacagtaggttgtagacatactataaactctaagacaactactaaaataataaaaagttatggcagataagcaaacaaggagataaaactgaactgtggaaaaatagtcaatccaaaagaaggcagaaaagaaagacaaagaacagatggaaggaacagaaaacaagtagcaagatggtagcttttcacctggccacatcactaattacattaaatgtaatagtctaaacacccccaataaaaagatgtggattgtcagactagaataaaaagcaagatcactctataagctgcccagagaatctcactgtaagtaaaagacacacattagttattgaaagtaaaggaagaggaaaaaacacaccgtgctaacacagaaagaaagatcaagtggcaatattaatacaaaggtagactttagagcaaggaactggcaataaagaagatcctttcataatgataaaatcatgaccttggattaggcaaagatttcttagacacaacactaaaagcatgatgtataaagtaaaaattaatacattgggctttgccaaaattaagaacttcggccagtctaggtggcgc

SEQ ID NO: 256320 - DNA, 1972 bp, Homo Sapiens
  misc_feature (468)..(476): n is a, c, g, or t
  misc_feature (563)..(633): n is a, c, g, or t
  misc_feature (652)..(652): n is a, c, g, or t
  misc_feature (717)..(735): n is a, c, g, or t
  misc_feature (753)..(802): n is a, c, g, or t
gatgaggtgggcgcgacaaatataggcgcggctttattatttgcggcgctgagggtgtgtttatcacgcgtagggagaggtcgttaatgtgttattgcagcaggggggcgccacaaagtatggtgtttgtataacaccgcgcgggcaagagttaacacaaatgtctgacacacagcaggtgtgtggtgaagggagaagttcgcgcatagtggtgagataaagagagggggtgttgagatagaggttgcggcgacaactaccatgcctttcatgtgggagggccaccacagacgcggcgggggggataatatatgaaataatggtgaggcgactgcgggtgcaaaccgcgggcggtggggggagggaccgcccatagaggggagctatgaggaaaacctctcatttggtggatgttgttttgtaaacggggattgcggagtgcgacgcgggggcggatttttttgtttnnnnnnnnnaagaaaaacaaggcggggtgttgggtgagcacgagttttgtgttttggtaaaacaaatattttggggaagggtgggcggtggcctcnnnnnnnnnnnnnnnnnnnnnnnnnnnnnnnnnnnnnnnnnnnnnnnnnnnnnnnnnnnnnnnnnnnnnnnccggcaaaaaaaagggtgnctggttagagttggggttatgcggcgagagtggttggtggtttttgggtgtttagtagtgggggnnnnnnnnnnnnnnnnnnngtggggtgtgttgagtgnnnnnnnnnnnnnnnnnnnnnnnnnnnnnnnnnnnnnnnnnnnnnnnnnnggttgtctcaatagataactttatttgaaatgaaatgcattttgaaaatatgaaaaataaatcacatctccccaaaatcatctaagagacatatttacacaagttctgaccatgctaaaaaattcatgaatgtgatggtgtataaagcatttggtacatgatgatacttgctttccagaagctggcatttgcatattataaaacgttaagaagaaggctgacctcggaatgtaacagacaatagttttatgtttcttctcaatatacagtgacctggaaggactccctgttgttaaaacctgcttccccactgctcagcctgccatcagccatccagctgcagagcagtggagagtaggtctcaccagtttttgtgcagatgcttctaacccagagtccttctgcttacttcattggacaatattgccctttctaagaaaacccttttagatcctgtactccacttagcaaatgccctgccagcaaagtcacagatgacttttttacccaatcttaggtaaatctggattatctgcccaaccgtgcaagtcaataagccacccttgaaaactgtgtcaagatttgaggaaacaggtcttaagaacctatccaacacatgattccataaccaatacatcttaggttgttttaggcaaataggtgtatctcttgaatcactgatggattcaatatcaagatctataattttcacgtttaaaatttactctgccgaggacattttattggtaaagcaaaaaccagttagtttgacacacacgaaaaagaaaacaaatgttcacagtcctatcttcgtaggattctgtgctataaaattgctccaggttcaagtcttagaccactcttctaaggctgctactgaatataatattaacactggagccaagctaaaactacatgacttttcccctagggacagaaaacaagggatgtgtttgaactcatacacttgcagcaaactttactgtcagatataaaattagggctttctcttaaagggcttctttaagagaaatacagagtgtttggtatatgagagaaaaaaagttaaaacaggactttcaacttaatccagacttcctaacagtgtttacatgtgagggaaactcctttaagtaatgcgtagtttttatttttaccatcattggagac

SEQ ID NO: 256321 - DNA, 883 bp, Homo Sapiens
acaccttgcgatccaaaatacggagctggcatatacttcaccaagaacctcaaaaacctggcagagaaggccaagaaaatctctgctgcagataagctgatctatgtgtttgaggctgaagtactcacaggcttcttctgccagggacatccgttaaatattgttcccccaccactgagtcctggagctatagatggtcatgacagtgtggttgacaatgtctccagccctgaaacctttgttatttttagtggcatgcaggctatacctcagtatttgtggacatgcacccaggaatatgtacagtcacaagattactcatcaggaccaatgagaccctttgcacagcatccttggaggggattcgcaagtggcagccctgttgattaatctctacatcattttaacagctggtatggccttaccttgggtgaactaaccaaataatgaccatcgatggctcaaagagtggcttgaatatatcccatgggttatctgtatggactgactgggttattgaaaggactagccacatactagcatcttagtgcctttatctgtctttatgtcttggggttggggtaggtagataccaaatgaaacactttcaggaccttccttcctcttgcagttgttctttaatctcctttactagaggagataaatattttgcatataatgaagaaatttttctagtatataacgcaggccttttattttctaaaatgatgatagtataaaaatgttaggataacagaatgattttagattttccagagaatattataaagtgctttaggtatgaaaataaatcatctttgtctgattaactggctctgaaaaattatgtgtcaaatgaaacaatttgaagtggaaggacatc

SEQ ID NO: 256322 - DNA, 330 bp, Homo Sapiens
tgaccatcaatggctcaaagagtggcttgaatatatcccatgggttatctgtatgcactgactgggttattgaaagcaatagccacatactagcatcttagcgccttaatcggtctttatgtcttggggttggggtaggtagataccaaatgaaacactttcaggaccttgcatataatcaagaaattgttctctagtatataacgcaggccttttattttctaaaatgatgatagtataaaaatgttaggataacagatatgattttagatttcacagagaatattataaagtgctttaggtatgaaaataaatcatctgtgtctgatt

SEQ ID NO: 256323 - DNA, 814 bp, Homo Sapiens
  misc_feature (498)..(498): n is a, c, g, or t
  misc_feature (500)..(500): n is a, c, g, or t
  misc_feature (510)..(510): n is a, c, g, or t
  misc_feature (526)..(526): n is a, c, g, or t
  misc_feature (539)..(539): n is a, c, g, or t
  misc_feature (553)..(553): n is a, c, g, or t
  misc_feature (564)..(564): n is a, c, g, or t
  misc_feature (572)..(572): n is a, c, g, or t
  misc_feature (576)..(576): n is a, c, g, or t
  misc_feature (610)..(610): n is a, c, g, or t
  misc_feature (614)..(614): n is a, c, g, or t
  misc_feature (616)..(616): n is a, c, g, or t
  misc_feature (620)..(620): n is a, c, g, or t
  misc_feature (629)..(629): n is a, c, g, or t
  misc_feature (651)..(651): n is a, c, g, or t
  misc_feature (661)..(661): n is a, c, g, or t
  misc_feature (668)..(668): n is a, c, g, or t
  misc_feature (672)..(672): n is a, c, g, or t
  misc_feature (681)..(681): n is a, c, g, or t
  misc_feature (697)..(697): n is a, c, g, or t
  misc_feature (699)..(699): n is a, c, g, or t
  misc_feature (719)..(719): n is a, c, g, or t
  misc_feature (743)..(743): n is a, c, g, or t
  misc_feature (749)..(749): n is a, c, g, or t
  misc_feature (763)..(763): n is a, c, g, or t
  misc_feature (782)..(782): n is a, c, g, or t
  misc_feature (791)..(791): n is a, c, g, or t
  misc_feature (795)..(795): n is a, c, g, or t
cttgcgcgcgcagtggggatggaacgttgctaggcttagcgggtctggctgctgggggcccgagcagcacgctcggagccgccgcgcgccaaagcgggaatctgggaggcgagcagctctgcagtaaatgcacgtattttaaactcccgggcctgcggacgctatgcacaggaagcacctccaggagattccagacctgagtagcaacgttgccaccagcttcacgtggggatgggattccagcaagacttctgaactgctgtcaggcatgggggtctccgccctggagaaagaggagcccgacagtgagaacatcccccaggaactgctctcaaacctgggccacccggagagccccccacggaaacggctgaagagcaaagggagtgacaaagactttgtgattgtccgcagcctaagctaaatcgagagaactttccaggtgtttcatgggactcccttccggatgagctgctcttgggaatcttttcctgtctntncctccctganctgctaaaggtctctngtgtttgtaagangtggtatcgcccancgtctgatgantctctatngcanaacttagacctcacaggtaaaaatctgcaccccngatntnactngtcggtttnctgtctcaaaggggtgattgcnttccgctgcncacgatnattnatggaccancattggctgaacattnancccttttcgtgtacagacanggactatcgactcagtatagagtntcaccnccacggcatatgtntagtgttcaagtgcagatntagctggangctncggtttcggatccatgtca

SEQ ID NO: 256324 - DNA, 129 bp, Homo Sapiens
gatctgaaaaggcgtcttcactgctttatctcatgatgcttgcttgtaaaacttgattttagttttccatttctcaaataggaatactacctttgaattcaataaaattcactgcaggatagaccagtt

SEQ ID NO: 256325 - DNA, 955 bp, Homo Sapiens
gtagcgaggcctgggtggcgcccgggcgcccgcgggccccacgctttgaccgggtcgtggcagccggagtcgtcttcgggacgcgcctgctcttcgcctttcgctgcagtccgtcgatttctttctccaggaagaaaaatggcatccgttgcagttgatccacaaccgagtgtggtgactcgggtggtcaacctgcccttggtgagctccacgtatgacctcatgtcctcagcctatctcagtacaaaggaccagtatccctacctgaagtctgtgtgtgagatggcagagaacggtgtgaagaccatcacctccgtggccatgaccagtgctctgcccatcatccagaagctagagccgcaaattgcagttgccaatacctatgcctgtaaggggctagacaggattgaggagagactgcctattctgaatcagccatcaactcagattgttgccaatgccaaaggcgctgtgactggggcaaaagatgctgtgacgactactgtgactggggccaaggattctgtggccagcacgatcacagggggtgatggacaagaccaaaggggcagtgactggcagtgtggagaagaccaagtctgtggtcagtggcagcattaacacagtcttggggagtcggatgatgcagctcgtgagcagtggcgtaaaaaatgcactcaccaaatcagagctgttggtagaacagtacctccctctcactgaggaagaactagaaaaagaagcaaaaaaagttgaaggatttgatctgggtccaaaacccaagttattatggtaaaactgggaatccctggctaccaagcttcacctcccgtggcctaccaacaaggctcccaggcaggggttaaagaaaccttaaccaaaaaagcccaacagacccattttctcagcctccaattcttacttgtttccccctggaattgaaattttgcccagg

SEQ ID NO: 256326 - DNA, 1918 bp, Homo Sapiens
  misc_feature (16)..(16): n is a, c, g, or t
tccttcccctttcacncccctaacacccttttcccctttctacccgtgcgaggtctgggtggcgaattcggcacgagggtcgtggcagccggagtcgtcttcgggacgcgcctgctcttcgcctttcgctgcagtccgtcgatttctttctccaggaagaaaaatggcatccgttgcagttgatccacaaccgagtgtggtgactcgggtggtcaacctgcccttggtgagctccacgtatgacctcatgtcctcagcctatctcagtacaaaggaccagtatccctacctgaagtctgtgtgtgagatggcagagaacggtgtgaagaccatcacctccgtggccatgaccagtgctctgcccatcatccagaagctagagccgcaaattgcagttgccaatacctatgcctgtaaggggctagacaggattgaggagagactgcctattctgaatcagccatcaactcagattgttgccaatgccaaaggcgctgtgactggggcaaaagatgctgtgacgactactgtgactggggccaaggattctgtggccagcacgatcacaggggtgatggacaagaccaaaggggcagtgactggcagtgtggagaagaccaagtctgtggtcagtggcagcattaacacagtcttggggagtcggatgatgcagctcgtgagcagtggcgtagaaaatgcactcaccaaatcagagctgttggtagaacagtacctccctctcactgaggaagaactagaaaaagaagcaaaaaaagttgaaggatttgatctggttcagaagccaagttattatgttagactgggatccctgtctaccaagcttcactcccgtgcctaccagcaggctctcagcagggttaaagaagctaagcaaaaaagccaacagaccatttctcagctccattctactgttcacctgattgaatttgccaggaagaatgtgtatagtgccaatcagaaaattcaggatgctcaggataagctctacctctcatgggtagagtggaaaaggagcattggatatgatgatactgatgagtcccactgtgctgagcacattgagtcacgtactcttgcaattgcccgcaacctgactcagcagctccagaccacgtgccacaccctcctgtccaacatccaaggtgtaccacagaacatccaagatcaagccaagcacatgggggtgatggcaggcgacatctactcagtgttccgcaatgctgcctcctttaaagaagtgtctgacagcctcctcacttctagcaaggggcagctgcagaaaatgaaggaatctttagatgacgtgatggattatcttgttaacaacacgcccctcaactggctggtaggtcccttttatcctcagctgactgagtctcagaatgctcaggaccaaggtgcagagatggacaagagcagccaggagacccagcgatctgagcataaaactcattaaacctgcccctatcactagtgcatgctgtggccagacagatgacaccttttgttatgttgaaattaacttgctaggcaaccctaaattgggaagcaagtagctagtataaaggccctcaattgtagttgtttccagctgaattaagagctttaaagtttctggcattagcagatgatttctgttcacctggtaagaaaagaatgataggcttgtcagagcctatagccagaactcagaaaaaattcaaatgcacttatgttctcattctatggccattgtgttgcctctgttactgtttgtattgaataaaaacatcttcatgtgggctggggtagaaactggtgtctgctctggtgtgatctgaaaaggcgtcttcactgctttatctcatgatgcttgcttgtaaaacttgattttagtttttcatttcccaaaaagaaa

SEQ ID NO: 256327 - DNA, 1012 bp, Homo Sapiens
tctccccctcttcccctacacaaaccctgcaaaacctccccgcacccagcctgggtggcgaattcggcacgaggcctacctgaagtctgtgtgtgagatggcagagaacggtgtgaagaccatcacctccgtggccatgaccagtgctctgcccatcatccagaagctagagccgcaaattgcagttgccaatacctatgcctgtaaggggctagacaggattgaggagagactgcctattctgaatcagccatcaactcagattgttgccaatgccaaaggcgctgtgactggggcaaaagatgctgtgacgactactgtgactggggccaaggattctgtggccagcacgatcacaggggtgatggacaagaccaaaggggcagtgactggcagtgtggagaagaccaagtctgtggtcagtggcagcattaacacagtcttggggagtcggatgatgcagctcgtgagcagtggcgtagaaaatgcactcaccaaatcagagctgttggtagaacagtacctccctctcactgaggaagaactagaaaaagaagcaaaaaaagttgaaggatttgatctggttcagaagccaagttattatgttagactgggatccctgtctaccaagcttcactcccgtgcctaccagcaggctctcagcagggttaaagaagctaagcaaaaaagccaacagaccatttctcagctccattctactgttcacctgattgaatttgccaggaagaatgtgtatagtgccaatcagaaaattcaggatgctcaggataagctctacctctcatgggtagagtggaaaaggagcattggatatgatgatactgatgagtcccactgtgctgagcacattgagtcacgtactcttgcaattgccccgcaacctgactcagcagctccagaccacgtgccacaccctccctgtccaacatccaaggtgtaccacagaaacatccaagatcaagcccaagcacatggggggtggatggcaaga

SEQ ID NO: 256328 - DNA, 384 bp, Homo Sapiens
tcgttcttgagcttgggcatggagctccctactgaccacatctgacattggagagcccaaatgtcttctgacatagtcatccactcgtttcttcagttcaactctcttacggcacttcgctaggaatttaagcgctgctctttgaagtgtgacagctgctttatactctatgagagactgcctctgttggtgaaaatttttcctttccctgtaccctctccaatgtttctggataatcagtgctgatttctcttccatttcccgatagtgtttctccacctgacctggatgaactatttcgagcatactcagctgcaattctcgggaaagtctcatggctctctgtctttgaagttgcaattgtaatttgaggtcctcttcttc

SEQ ID NO: 256329 - DNA, 1123 bp, Homo Sapiens
  misc_feature (973)..(973): n is a, c, g, or t
  misc_feature (1018)..(1018): n is a, c, g, or t
  misc_feature (1064)..(1064): n is a, c, g, or t
  misc_feature (1104)..(1104): n is a, c, g, or t
gtatacagtatgtgatgtggctctctgtgttataaatagtaaaagtgctttgtgcaatgcagattcaccaaaggacccagtcctcccaatgaaattttttacacaacctgaaaaggacttctgtaacgataagagttatatttcagaagagacaagagtacttctgttaacaggaaagccaaagcctgctggagtactaggtgcagtaaataagcctttatcagcaacgggaaggaaaccctatgttagaagcactggcactgagactggaagcaatattaatgaataattcagagctgaacccttcaaccggaaatcgatcaagggaacagagttcagaggcagcagaaactggagttagtgaaaatgaagagaaccctgtgaggattatttcagtcacacctgtaaagaatattgacccagtaaagaataaggaaatcaattctgatcaggctacccagggcaacatcagcagtgaccgaggaaagaaaagaacagtaacagcagctggtgcagagaatatccaacaaaaaacagatgagaaagtagatgaatcgggacctcccgccccttccaaacccaggagaggacgtcgacccaagtctgaatctcagggcaatgctaccaaaaatgatgatctaaataaacctattaacaagggaaggaagagagctgcagtgggtcaggagagccctgggggtttggaagcaggtaatgccaaagcacccaaactgcaagatttagccaaaaaggcagcaccagcagaaagacaaatttgacttacaaaggtaaaaatgcatttgcaaagggagaaaatgaaggccaaacagaagcaggctccagcttctgcaaaaacttggattcacaaatgtccctgaacagaaaatgaagctcacttcagaacacacactctctgccttgaaaactaaagacgactattacttccttttcacatgaccacaagtcctctgantggaaatgtacagcagaaactcttgacgagagaggctaaaaagcnactctcgttctccccctttccccttaggactttttctttacgaaanagtcaataatttaagcaaatttgctttaagcactttgggnttcccaggttccttggcct

SEQ ID NO: 256330 - DNA, 375 bp, Homo Sapiens
ctctgcctgaaaagatcatttgtgagaactgaatctctggcattaatccaatagaaaggtgagaaattaaaggcatgttcttctaatcaaccctcctatgctttaggcagacccacttgtattatcgacctgaatactggcctcaggtatgtttctgatttaacggaggtgaccacttgcagagctctgtcgaaaaatattcctaggacaggtctgaagtcagcacaaataaagtgacataagtcattaactgcggcattaattgtgtgacaaggaggagcggaatgatcactgaattattttgaggaacagtgatatcatgtgcaaatttcttaagaaagttgaaaaatgtctaagaaaaagtgtgtgtgtgtg

SEQ ID NO: 256331 - DNA, 670 bp, Homo Sapiens
gaagccaaaagagagttataaacatcaatcgttttcagatacgctttaaaaatatttctttaagtttgttcaaaagtaacatcattattttaagttatagcacaatcattaaaggaaaaaagaacccaagaacaaatgaaattcattattattttagtcacttttagtggaaaaaataaaacaagatttggattttcatccagcataaagtaaaaagactcttgtcagatgtcaattttctcattaatgaactacttgagactgtactcctgggtcaacttatttctgcttctcctgtctctagacctgtcttaattatatttgtgtctcaggatccatgacatagatttaaacagacccatgggcaaatctaaacagtgaccacacagtgtccagtctattcgtttctctacaaagtgacagaaattcaacctgtaatcagtagaagttgattctacctaaattcctaatataactaataaaatgtagtcaccttcaataaaataaatgcccagatactattttaaaggatacagcaaatccaagtcatacctctaccaaggctaactatgctgtaccttaatttgtttgttctcagagctaaaatcagtgcttcacttagattctcctttcctaaagagtccgtcaactcagaagaaatgcctagttc

SEQ ID NO: 256332 - DNA, 1484 bp, Homo Sapiens
  misc_feature (501)..(539): n is a, c, g, or t
  misc_feature (649)..(649): n is a, c, g, or t
  misc_feature (652)..(652): n is a, c, g, or t
  misc_feature (835)..(835): n is a, c, g, or t
  misc_feature (857)..(857): n is a, c, g, or t
gcgaagggtgggcgccgccgaggcctcctgccgctggcgggtttccgcggagtgccgcccggctccgctctgccgccggcgcggctcatgggcagagtcggccgggcgggccggcattaaactgaagaaaagatgtccctgtacgatgacctaggagtggagaccagtgactcaaaaacagaaggctggtccaaaaacttcaaacttctgcagtctcagcttcaggtgaagaaggcagctctcactcaggcaaagagccaaaggacgaaacaaagtacagtcctcgccccagtcattgacctgaagcgaggtggctcctcagatgaccggcaaattgtggacactccaccgcatgtagcagctgggctgaaggatcctgttcccagtgggttttctgcaggggaagttctgattcccttagctgacgaatatgaccctatgtttcctaatgattatgagaaagtagtgaagcgccaaagagaggaacgacagagacagcgnnnnnnnnnnnnnnnnnnnnnnnnnnnnnnnnnnnnnnnaaggcgtaaagacagacatgaagcaagtgggtttgcaaggagaccagatccagattctgatgaagatgaagattatgagcgagagaggaggaaaagaagtatgggcggantgnccattgccccacccacttctctggtagagaaagacaaagagttaccccgagattttccttatgaagaggactcaagacctcgatcacagtcttccaaagcagccattcctcccccagtgtacgaggaacaaagacagaccgagatctccaaccggacctagcaactccttcctcgctaacatnggggggcacggtggcgcacaanatcatgcagaagtacggcttccgggagggccagggtctggggaagcatgagcagggcctgagcactgccttgtcagtggagaagaccagcaagcgtggcggcaagatcatcgtgggcgacgccacagagaaagatgcatccaagaagtcagattcaaatccgctgactgaaatacttaagtgtcctactaaagtggtcttactaaggaacatggttggtgcgggagaggtggatgaagacttggaagttgaaaccaaggaagaatgtgaaaaatatggcaaagttggaaaatgtgtgatatttgaaattcctggtgcccctgatgatgaagcagtacggatatttttagaatttgagagagttgaatcagcaattaaagcggttgttgacttgaatgggaggtattttggtggacgggtggtaaaagcatgtttctacaatttggacaaattcagggtcttggatttggcagaacaagtttgattttaagaactagagcacgagtcatctccggtgatccttaaatgaactgcaggctgagaaaagaaggaaaaaggtcacagcctccatggctgttgcataccaagactcttggaaggacttctaagatatatgttgattgatccc

SEQ ID NO: 256333 - DNA, 704 bp, Homo Sapiens
  misc_feature (50)..(50): n is a, c, g, or t
  misc_feature (55)..(55): n is a, c, g, or t
  misc_feature (61)..(61): n is a, c, g, or t
  misc_feature (66)..(66): n is a, c, g, or t
tccccaatgtgtagatccccgggacataaaggtgggggaaccgccaatgnaaatnaaaatnaaatnattgtaaagtaggacctcagttcctgtaaaccacatcctaatgatatgcctgcctcagttcctgtaacacatcctaatggtatgttttgatacagatgccatcccaagaagtcagattcaaatccgcctgactgaaatacttaagtgtcctactaaagtggtcttactaaggaacatggttggtgcgggagaggtggatgaagacttggaagttgaaaccaaggaagaatgtgaaaaatatggcaaagttggaaaatgtgtgatatttgaaattcctggtgcccctgatgatgaagcagtacggatatttttagaatttgagagagttgaatcagcaattaaaggttagtggtacagctaaatattaaagaataaaaaagttgaatttacagccttaatctttacaagtaaagttactgtttaattaaagttaaacctttatcttataggatacctgtattaactgtcttttgtttgcctttcagcggttgttgacttgaatgggaggtattttggtggacgggtggtaaaagcatgtttctacaatttggacaaattcagggtcttggatttggcagaacaagtttgattttaagaactagagcacgagtcatctccggtgatccttaaatgaactg

SEQ ID NO: 256334 - DNA, 977 bp, Homo Sapiens
  misc_feature (294)..(332): n is a, c, g, or t
aaggtagcgaggcctgggtggcgaattcggcacgaggctcaggcaaagagccaaaggacgaaacaaagtacagtcctcgccccagtcattgacctgaagcgaggtggctcctcagatgaccggcaaattgtggacactccaccgcatgtagcagctgggctgaaggatcctgttcccagtgggttttctgcaggggaagttctgattcccttagctgacgaatatgaccctatgtttcctaatgattatgagaaagtagtgaagcgccaaagagaggaacgacagagacagcgnnnnnnnnnnnnnnnnnnnnnnnnnnnnnnnnnnnnnnnaaggcgtaaagacagacatgaagcaagtgggtttgcaaggagaccagatccagattctgatgaagatgaagattatgagcgagagaggaggaaaagaagtatgggcggagctgccattgccccacccacttctctggtagagaaagacaaagagttaccccgagattttccttatgaagaggactcaagacctcgatcacagtcttccaaagcagccattcctcccccagtgtacgaggaacaagacagaccgagatctccaaccggacctagcaactccttcctcgctaacatgggggggcacggtggcgcacaagatcatgcagaagtacggctttccgggagggccaggggtctggggaagcatgagcagggcctgagcactgccttgtccagtggagaagaccagcaagcgtggcgggcagaatcatcgtgggcgacgccacagagaaagatgcatccaagaaatcagattcaaatccgctgactgaaatactttaagtgccctactaaagtggtcttactaagggaacttggcttggtgccggaaaaaggtgggatgaaaaacttggaaggttgaaacccagggaagaattgtgaaaaatatgggaaaagtttggaaaaaggtgtggaaattttgaaaac

SEQ ID NO: 256335 - DNA, 499 bp, Homo Sapiens
  misc_feature (340)..(340): n is a, c, g, or t
agctagacagagctagtcaaaatgagacctgatgtgaaaggccactagggcaccagcctttttaatctgaaagctctgcttcctctgtttctttatcctgttgctgtttgttgaccacataattatttgtttacgtcatcagctggcacagggcctttatgaggtcagagactgcctagccctgtgttcctggcacctaacaatgcctgtcataaaaacaggcattcagtacgtttttgatgatgaacaaattatacttatttccttggtatttgacaactacttgactgtatatgatggataattagaatatccactctgagaaatcatttaaaagagnaaactcattcaatgcaatctcaaatgcctttactcatcacgctctcattttcttccagattcctggtgcccctgatgatgaagcagtacggatatttttagaatttgagagagttgaatcagcaattaaaggttagtggtacagctaaatattaaagaa

SEQ ID NO: 256336 - DNA, 920 bp, Homo Sapiens
  misc_feature (843)..(843): n is a, c, g, or t
ggaatagttaaataaatagcaaatcactgaattcagaatctcacttaaggcagaaattaaaatcataatataaacgcttggttttacatgaacaaaaaatggtgtgctcgaaaaagacattactgatgccttttttttatagagtggattgaaatgccagtcatgcctgatatttcagcccattgacttgctggatgaaggactagaatacagcagctgttataacacgaccagtcaatgtggaacaaactgtttctgtgcaacccctttgttttaccagacaaaatttgaatactttttttcctgaattgtatatgaccttggtgctgcatgcatgctgttgacttttaggactttgatcttttaaggttttttttccccagcattaatattgatttataaagatttgaaaatctttaatgaactggagaacactaagatttaaactcgaaaattcgttgttcaagtaaagaaagccatgatgctctgtatgttatctgtgtgtgtgcatgcactcaggtgccctttgtttcatgaacaaatacatttcattgtacatgttttctgtttaaatcattgtataaagtaattgcaggtcagaattataccacagaactgtttatgagaggcttgtgtctgttgcacatttcttgaagcatttttaaaataacatgtaacctgtaaccttgttgtttaagttttcttttctattaatactctgtcctgtggtcccgtgcatgctccttttcccagaactcctctctgctgcacccacagcatctgttcccgaggagttatgactcttgacttcctgcagggctgggggctcttaggcaccagctngctgttccagcactttcaggcggcaagatctccctggattttggccacgtggggaattgtaacttgtattatggatt

SEQ ID NO: 256337 - DNA, 529 bp, Homo Sapiens
ccaccatgcctggccaattttcaactgctttgtagagagaaggtctcactatgttacccaggctggacaagggtactattaaaaagaaatatttgaagaataaaaagagctctttcaaattaaaagcaaaacagcagaagtgaaaaattcaacagaagggttaaatgattaagttaaagaaatctcccagaagaagatatgaaaaataggagagaaaagtaataaaccaggtaagtctaggagatccatcatccaaaaagcaaagttgtataatgagaaaacagaaaaaatagaaggcaggaaattatcaacaaaataagttttccaggacatttgctgatagattaaagtgactaaagtacccagtataatgaatgaaatatatatgtatagaaaggtacatcactgcaaaatttagaacccaggaacaaagagaagatactacaagttttaagaaagaaaaataaaattttaggattcagaacaatttcggacttttcaatagcaacagaggaagcaagatgaggat

SEQ ID NO: 256338 - DNA, 2246 bp, Homo Sapiens
  misc_feature (1079)..(1079): n is a, c, g, or t
  misc_feature (1274)..(1274): n is a, c, g, or t
  misc_feature (1635)..(1755): n is a, c, g, or t
  misc_feature (1772)..(1832): n is a, c, g, or t
  misc_feature (1837)..(1988): n is a, c, g, or t
  misc_feature (2000)..(2011): n is a, c, g, or t
  misc_feature (2028)..(2152): n is a, c, g, or t
gggggcggggacgcagcggctccctcccggaaagcgagcgtatctcccgagccgttgccactgacagccgcgggcgctcccatctgagtaagagccagcccgtccgcggcctctccagccccgggttcgcgctctcgactctcctgcctgcccagctgcgcggcggagcggagcgaggcgcggcctgcgagtccccggcagcccccgacccctccctcggcgctgcgtgtaggccgcgccctcaggcccagtccgcggtgccccggcgggtgatgccaaatacagccatgaagaaaaaggtgctgctgatggggaagagcgggtcggggaagaccagcatgaggtcgataatcttcgccaattacattgctcgcgacacccggcgcctgggggccaccattgacgtggaacactcccacgtccgattcctagggaacctggtgctgaacctgtgggactgtggcggtcaggacaccttcatggaaaattacttcaccagccagcgagacaatatcttccgtaacgtggaagttttgatttacgtgtttgacgtggagagccgcgaactggaaaaggacatgcattattaccagtcgtgtctggaggccatcctccagaactctcctgacgccaaaatcttctgcctggtgcacaaaatggatctggttcaggaggatcagcgtgacctgatttttaaagagcgagaggaagacctgaggcgtctgtctcgcccgctggagtgtgcttgttttcgaacgtccatctgggatgagacgctctacaaagcctggtccagcatcgtctaccagctgattcccaacgttcagcagctggagatgaacctcaggaattttgcccaaatcattgaggccgatgaagttctgctgttcgaaagagctacattcttggttatttcccactaccagtgcaaagagcagcgcgacgtccaccggtttgagaagatcagcaacatcatcaaacagttcaagctgagctgcagtaaattggccgcttccttccagagcatggaagttaggaattccaacttcgctgctttcatcgacatcttcacctcaaanacgtacgtgatggtggtcatgtcagatccgtcgatcccttctgcggccactctgatcaacattcgcaatgcccggaaacactttgagaagctggagagagtggatggccccaagcacagtctccttatgcgttgaatattgccaaatgctctttctgaaaatgctgaattgccttttttgtttgcatcctttatntttaatattcataatgtcatgtgcttaaaagtgggctttgaagtgtgtgctgcttactcctttcatctttctccccgcttccccagtctttaaacattggacgctatttactcagctacccagtagagcttgaagctgacctttctgagaagttggtatggtgtaacactaaagtaggtggttcgtgtgtgttctcattacctggttatgatagatatgcacatcaaagcctttaccagtatcttcctgtattccgtatcagattgcaaagacggaatgttactattttatcagcaaggtattaaaatgcatttataaattcttcttggcttcattcatgaataaacgtgttagcaatttnnnnnnnnnnnnnnnnnnnnnnnnnnnnnnnnnnnnnnnnnnnnnnnnnnnnnnnnnnnnnnnnnnnnnnnnnnnnnnnnnnnnnnnnnnnnnnnnnnnnnnnnnnnnnnnnnnnnnnnnnccttttggggccccccnnnnnnnnnnnnnnnnnnnnnnnnnnnnnnnnnnnnnnnnnnnnnnnnnnnnnnnnnnnnntgggnnnnnnnnnnnnnnnnnnnnnnnnnnnnnnnnnnnnnnnnnnnnnnnnnnnnnnnnnnnnnnnnnnnnnnnnnnnnnnnnnnnnnnnnnnnnnnnnnnnnnnnnnnnnnnnnnnnnnnnnnnnnnnnnnnnnnnnnnnnnnnnnnnnnnnnnaaatttaatttnnnnnnnnnnnngggcactttttgggaannnnnnnnnnnnnnnnnnnnnnnnnnnnnnnnnnnnnnnnnnnnnnnnnnnnnnnnnnnnnnnnnnnnnnnnnnnnnnnnnnnnnnnnnnnnnnnnnnnnnnnnnnnnnnnnnnnnnnnnnnnnngggggaaaacacggggggacaaaaaaagtttccctatttggcccccgttttaaaaacaacagggggggaacaccctcccccggggttgtggggg

SEQ ID NO: 256339 - DNA, 670 bp, Homo Sapiens
  misc_feature (276)..(296): n is a, c, g, or t
gggaaaaccacttgagtcttgtggtgtgtggtgggcagacaccacagggtggcatcacctggtggcatttccagaacctcagccccgattccagcacccaccaccgcctgaccctgtgtaacctgctgtcccgggtcccagagtgcactctgccccgctgctctgctgcctgtcctgggaaagtagctttgccccactaggaaatgtaaacaggagggcttggggagcgtgggcacctttctcatgagcagctactgcggcgtttggcaggactcnnnnnnnnnnnnnnnnnnnnntgtgtaggtcggggagccggagatccccaggacgcgcgccggacagtcggcactgaccggcccacctggtagcagaggacacccccagccccccaagcattgaagacatagtgtatttcctcgtatcctttctcccttgggtgtagttggggtggggaagcagggaaggctggtgcgatctccattccttgggctccgcgtccgagttcatggtgcgccgctgtgctgggagctgcagtgggaatgtgtgggacaccttgaccaaaggggagctttgtctcgtgtgttttgaaaaaggctttaatgaagagaatgttgttcattcttagtagtatagtttgcaattcttaatggcaaataataagtttcagtag

SEQ ID NO: 256340 - DNA, 989 bp, Homo Sapiens
  misc_feature (644)..(655): n is a, c, g, or t
ttcatgggtcccataaaaaacaatgtgaaggaaggttctaagagtgaccaaatataccagtgaacatactatctttctgaaaaagaaagaattaagtgaccaactaagagatccacttttgcaccaatgaaacacatggaggtgaaacctcagaacaagcggagcttaagctcaatgacagtatgttttatatgacaggccagctgagaatgtatctgtcaatcctgactaagcccaatacatgggtggtgaccctgaggtagcccagatgatatgctctgaattttagataggtctaaatcacaatggtacagtctgatgtgaaactttagtctacctaccataaactcgttttctgaatcagtccttattcataattagacccaaaacccagctatttctcctctcttagatgacatgcccaataaaaacagcatccatgattggtttcattatctcccaattaagtagtggtgacaccaccactaacactagtatccaaactctgatacaaatcctaaaggtattgagtcagtaagacagagcagaagctatgtcgggccatactgaccaatttctgagaaccacattagccacattcatgcaattaaaacccatctaagacacacaaatggcagatgagnnnnnnnnnnnnggatgaggtcattaaactttatcactggaaacatgattccactgtttcaaataggaaacctaccctgggagacttccaccaaagtgcagaaggacctgatgcacgggctcatcatcttaacactagagtcccaagtcaaaactctaggaggaggataagaaaggtctagtctgtgaatcacctggacagaaaggtcatatcccaagtgccctgcctatctgtgacagctgctagccaacagacaattctggttatgaagttatctcttgagaatggcttgattctcttatgccaccaacagtattagtctgggcagggttccctggatatttac

SEQ ID NO: 256341 - DNA, 470 bp, Homo Sapiens
gatctctatccagttggacacttaattgctttcttcattcagaaagatagtcatgttcactggtatatttggtcactcttagaacctgtccttcacattgttttttatgggacccatgaatggttagcctttcttttctattgtagaaggaaataaataggagtaaaaagaccattgtagtaaataagttcaaggggaacttgggaccagaaaccactgttatgtacaaaaaaatggcaaattcaataaactcaaatttaaaataatttttaaattaacagttatgataaattttatattttatacaaatagattgcttagaatggttctcaagaattataagagaaatgaactcgacgagtacgaaaaattttataattactatacttgtgttttgtttgggggctgggaaatgtatttttacattgtagccaatcattttatatttgtcaatttaaatcttatgggtc

SEQ ID NO: 256342 - DNA, 1434 bp, Homo Sapiens
agttgacgctctgggccgccacctccgcggaccctgagcgcaagagccaagccgccagcgctgctatgtgggccacgctgccgctgctctgcgccggggcctggctcctgggagtccccgtctgcggtgccgccgaactgtccgtgaactccttagagaagtttcacttcaagtcatggatgtctaagcaccgtaagacctacagtacggaggagtaccaccacaggctgcagacgtttgccagcaactggaggaagataaacgcccacaacaatgggaaccacacatttaaaatggcactgaaccaattttcagacatgagctttgctgaaataaaacacaagtatctctggtcagagcctcagaattgctcagccaccaaaagtaactaccttcgaggtactggtccctacccaccttccgtggactggcggaaaaaaggaaattttgtctcacctgtgaaaaatcagggtgcctgcggcagttgctggactttctccaccactggggccctggagtctgcgatcgccatcgcaaccggaaagatgctgtccttggcggaacagcagctggtggactgcgcccaggacttcaataatcacggctgccaagggggtctccccagccaggctttcgagtatatcctgtacaacaaggggatcatgggtgaagacacctacccctaccagggcaaggatggttattgcaagttccaacctggaaaggccatcggctttgtcaaggatgtagccaacatcacaatctatgacgaggaagcgatggtggaggctgtggccctctacaaccctgtgagctttgcctcttgaggggactcaggacttcatgatgtatagaacgggcatctactccagtacttcctgccataaaactccagataaagtaaaccatgcagtactggctgttgggtatggagaaaaaaatgggatcccttactggatcgtgaaaaactcttggggtccccagtggggaatgaacgggtacttcctcatcgagcgcggaaagaacatgtgtggcctggctgcctgcgcctcctaccccatccctctggtgtgagccgtggcagccgcagcgcagactggcggagaaggagaggaacgggcagcctgggcctgggtggaaatcctgccctggaggaagttgtggggagatccactgggacccccaacattctgccctcacctctgtgcccagcctggaaacctacagacaaggaggagttccaccatgagctcacccgtgtctatgacgcaaagatcaccagccatgtgccttagtgtccttcttaacagactcaaaccacatggaccacgaatattctttctgtccagaaggactactttccacatatagagctccagggactgtcttttctgtattcgctgttcaataaacattgagtgagcacctccccaa

SEQ ID NO: 256343 - DNA, 528 bp, Homo Sapiens
accagaccctaagctccttgaggacaaggatgctttaattctctctgaaattatcccatcccccaggccctggcacatcttgttttgtttagtaaatgttattgaactgcgtggggaggctgagacttcgggtccataacctgtatttcatgccctttgcatcctcaacaggatggttattgcaagttccaacctggaaaggccatcggctttgtcaaggatgtagccaacatcacaatcgtgagtgccgatccccctctgggatggggaatgtgtcctgatgaggaggcctctctcatgctgtcggatagccagtgggcccagcaaggcagcccttctggcagcacatccctttgacgagttcatattatccctgggtctcagtcgctgtgatggtggcgaggcaggagatgggagggagagcgcaaactggcaggcaggccctctggttctgaactccagatccacacatgccttcattcttttggttctgttttcttgcttgtaaaatgcaagcaattgtccgca

SEQ ID NO: 256344 - DNA, 1405 bp, Homo Sapiens
  misc_feature (77)..(77): n is a, c, g, or t
  misc_feature (168)..(168): n is a, c, g, or t
  misc_feature (1002)..(1015): n is a, c, g, or t
aatataagggaaatttaaaccagaaaaatgacacaataactttaaagaggagctgaaactttgtcaaaaaaagaaanaactattagcctgttttcaaagaaaaacattctaaaagtgtgcatttcagaacatagaattcttctaagtttaccatcttcaaaaatcttntaaattgtatgacacttttacattagcacaacaaacagctttttctaagtctagccaagttcccatggaaggcaaacgaccctaagtagttcatattttacagcccttgaacttataaagcttttctcattaagagtcagttttacccttctgtaaataaggatggtgatactgttatccaggcctaaaaagcaggaagtgcaacaaacccttagggtttcatgatacagtgaatcttcccctccccaacgtttggaaaaaattgggacacttgctagttcttccctgtgggaagaatctttctaatattacccaaatattgaaaacaaaatctaccttctttaacccttgtattagtaattctacctccttggcttatggggggaaaagtcctagttttaaattgctggcattttacaagctcaacaagataaaaaattgaacactggttttcatactctaattttatgtaaaacaaagatgcttaaatgtgcgaatagtaaagcattcactgatatttgatgtatctgaataggactaacaggctaattgtaggtgctttcatatgaaaataattgggagaaaagaagaaccagctcctttgatttcagtactgccaaaacaagtaagcccccagagttaattacaaaaatgtagaggaaaataggcccggaagactttgcaatttaaagtactgcctataataccccagattaaaaaggaccgaagattgcacatcaagtctaatatttggctgtacttgcattgccctgctcggcatttttaaaaaatggctctttccttaaatttcacacgtcagaacaaccacaattnnnnnnnnnnnnnncaatgcagataacaccaaacattggacaatattaagaaaactacttactaagcttaggtaatagaggcaagggttaagggcagaagtgatggaagtgtttctttgtattacaaaccctcaccctaaacctggggtttgggctctaaaaaagtaatttagggaagcagatcaagagcctgattatcagttctcacatggaaatctcaacagatttcaaaagcaactcaccacaagtgtcagacacaaaagaatcttaataatcatctagcaaactacactaagaactcaatgaccaaaaataatcaatcaaacttcaagacacaccaaagcaacagtaaaagagaaataactacacaagctaagctctgtagagaaatcaactaaaaatta

SEQ ID NO: 256345 - DNA, 647 bp, Homo Sapiens
gggtggcccacctctgcaggcccagagggtttagagaattaggagttccaagattgaggaaaggaaggctctggaatcaacctggatgtccccatcctagtatcagagtactgttctttcacaccagggtcctgaccttgccagagcagatctatcttggctgggagtttagctttccttggagccctgctgttctgacaattaggtcctaagactggtggtcagctttctctgccttcacctaggagaggagagcctctttctatgctgcaagaaggcccactggcttctccacatttgatttcccatggcctgtaaattgctgtcaggttttcattttattttctaaagtgtcagactacgttaaggcagtagaattggattccattgtcattataggcactgattcttccaatgttttcaaatatctaatactttataccagccactgcatttccttctgctactataccatctccatttgccactggtgacagttttaagaactaggctgtgtattaatttccttgcacagtctgttcataagaaattaccacaaacttaagtggattaatattggcagggccatggtccctttaaacatgaagggggagaaatctttctttacccttcttgactgggggggg

SEQ ID NO: 256346 - DNA, 623 bp, Homo Sapiens
cggcactgcttcagcattcagcacactctcgcctgtgatgggccagatcccaccgttggcaggggtggctgccatgacactgcctgattcacaagtgacctccacagaacacagctggaccttgagataatagccgatggcataattccgatcccctgtttccttctctgactggaatgtggcattgctgaaacccatgtattcattcccagccattttgttgagatactgcaacacaaaatcaaacttctctgctttgtcacagtccatcttgatcagggagctgacaacaatggcaccagcattgaccatggggttatgggggattccttcctcattgagggagagcttgttgtagcgcaggccacttggctctttgcccacaaacttgtgcacgtagtcagtgcctagggtgcttatggagatggcataggtgaggggcttcacacaggactgcaggcagaaggggatctttgtgtggcccacagagtgccgttgaccatccacagtgcacagggagacaccccacaggtctgggtttgacttggccagctgagggatgtaggctgccactttgcctccagtgagctctttgacatcctcaaagatgcgatccacatggc

SEQ ID NO: 256347 - DNA, 777 bp, Homo Sapiens
ttaataggccggtcttgaacacttggtttcaagagatcctccatttcaggcttccttatgatactgaagatctaggcttcatttggaatttcctcaccttcctgtggacaaaattcctcctttgattgtgtcccagccacatctagttgcttcggtaggtaatcttaatgtgcagttctacttgtcctttatgctatattgcaaactccaaagatataatcacactagtatttatgtgtttaagtgtgtgtatgttaaacatgtaaaggggtaatgtatctatacagatatatgtatacttcccatttaagcaaaagttaatttggttttacagatacagataccaggttctggcagcttggagaataagtgtaacaatttggtaaaacttgtataattctgacctataatattacagagtgaatttcaagttattgctttttgattacagaataaaaaattcattctcttgcaaaacttttatacagaatgagtaaccatttcctattcaagtaacagcaatcagaatcagaagttccttacacaacagtagatgcttgagacattttttgaatggagatgtgatttcattctgttcaagaacttatgcaggaaactgggagtgacttaatttttcaaaagtacaagaaaatcagcaccccaactgcttagtgctcaggagggtttctcaagggctctataaagctcagcttgtgggtgaggttcacacccacctttaggaagggattcccattctacttatggcagccttgtttc

SEQ ID NO: 256348 - DNA, 1007 bp, Homo Sapiens
ctgaggccaccccggcggcggctggagagcgaggaggagcgggtggccccgcgctgcgcccgccctcgcctcacctggcgcaggtaggtgtggccgcgtcccctacccggccgggactttctggtaaggagaggaggttacggggaacgacgcgctgctttcatgccctttcttgttctaccttcatcggccgaggtaaaagtgctgaaaccatgtgaataaaatacaggtgggttccgccagcttcgctcctgaacctacccgcgctcgggatccagaagctgcgccgggagagaggggctcaggcctgggcggaggggacggaggtcagaccgtgcggaaagtgacccgggcaccccagggcgcccaggcccccagggagcgcggaaagtgcggtcgcggcccggccctcgggagacgcgggattgggatcaggcacagcgcgaggaagtcgatcttggagctagaacattttcctttggccatttacacgaatccactggaaaatgccgcagtgtttatcaaagttactcaaagtagaaatgtccagacgtcttatgagcttagacaaatcttttactacaaaaagaaacagcagttgcattcaaacaacaacccttctgaaccactactaaaatttagcataattactcttgtggatacattttcattgtcaagtaatttacttagccaatgaacttggagagcaagaaagttttatgtagtaaaatgtaaatttgagttaagagttaagggtgtttctttttgtctgtttgtctgtttttggcaatgtggctccaaaaccttaagcccacctaaaaactatataaatgcaatccattcttttgttggaatgttcaaggactagaaagacaattggagaagtgagagtttgaatctttttttacgttggaaacagtgttgcaaaatattttttgagttttgcctgacttagcaaagattcagtcgaactcaagtagagttcaaagcattgcagcgtgtagtaa

SEQ ID NO: 256349 - DNA, 569 bp, Homo Sapiens
ttacagatactgttattacaatcttgtttcagttttaggtgggatatatttaaccatgctttggtatgacattagcagtttcatttctcatttttctcctcctcacatcctaatatttactcattttactatttttacattgtccatgtttgtaacattcatacttagtttttcaaccacttttttataacttattattgttctatattctctagtaaccttttagaatgtcctccttgattctggagtttttgatacaattggcataatttcagtcttatagcactgagtaatgtttcagtagagaagtctcatgcaagccagccagattcttttccatttcccctagtagatgatttgctttttatgcatgaattgttgaataattttttaagctcccaagcataataatttaactaagagtagaaatgggaatagcctgactcatgtgcccacatgtgtctatgtggaataatcttttaagaattaccacctttcttctggaatacatgttgatggagcacccactatgtggaagatctctggttttgagatagtatatggttcat

SEQ ID NO: 256350 - DNA, 1462 bp, Homo Sapiens
  misc_feature (912)..(912): n is a, c, g, or t
  misc_feature (1306)..(1366): n is a, c, g, or t
cagtgttgagaggaaaggggaggtcctgctgattcctcagaatggcttctggaccttggagatgcataaagggcaataccgggccgtgtcctcccctgataggattctccctttgaaggagtccctttgccgggtgggcgtcttcctggactatgaagctggagatgtctccttctacaacatgagggacagatcgcacatctacacatgtccccgttcagccttttccgtgcctgtgaggcccttcttcaggttggggtgtgaggacagccccatcttcatctgccctgcactcacaggagccaatggggtcacggtgcctgaagagggcctgacacttcacagagtggggacccaccagagcctatagaatcaattccttggtctcacagccatgtagacaagccctggtcatctcagcagccaccgcacaacacccctggtggaagacacgccctcctcccctctggtcacacaagagaacatcttccagctgcctctttcacacccactacagacctcagccccagttttctcctcctcactaggctgtgtttttagtagttcctttgcttgtaactatgggatgggatccaggcatagggaactagtttgtacacagcttccagccaagaagaaagtgtgagaagttgatgggcagcaaacctgctgtttaacatcagggtgaccacattaagcccagtattccagttggcaccagaagatatggacttggaatgaggcctacagggttcaccaggatgtaagaggagagaggaatccacaggaccaccagagaggagagggaaccagatatgcagatcagagatagaggaagtggaaccagagagctgggagggaccaaggttgtaagggtggctaagtcccaccataacagctaaggggacctgngagatgatggctcatttccacccagccccaggatttccagagcgcacatccacaggcctggacctgggatgaagatgaatgaagaacatggatgcacggtggatgtagttttggctccaggtgtccctgccagtgggcaaggagtcagtactcagtccctgagtgtggctgaaatttgaggtcctggctgagccaaggagtaatggaccagatctacctcagtattcaagttcagtggggacaccagtggcttcaaacttcctggtttcatgatatcttgagacgccttacaaatgatggaggattccaaagagtttttgtttatttgggttaatatttgttggtatttatggcatttgagattgaaactaagaaatgttttaatttattaccnnnnnnnnnnnnnnnnnnnnnnnnnnnnnnnnnnnnnnnnnnnnnnnnnnnnnnnnnnnnntagcatgaataagccaattataggttaatataagtagaatgtttgtgaaaaataagtatggtatccaaagcaaaataaattttattgtgaagtgtg

SEQ ID NO: 256351 - DNA, 1849 bp, Homo Sapiens
  misc_feature (42)..(42): n is a, c, g, or t
  misc_feature (149)..(149): n is a, c, g, or t
  misc_feature (303)..(303): n is a, c, g, or t
  misc_feature (601)..(618): n is a, c, g, or t
gaaaaaatacttccgaaaccaggaattcaatgtatgtttgtnttatactgtttgataagaaaagtaggtccagccttaagcagcacagatgcgctggtagatgcatagtcaggaactttttttatttcttttaggtctagggacaggantgaatagaaagggaggagagctctattatgttctatacacagattaggagatgaccttactgggtacacccctctaaccagtgcttacaggttaatgcatgttaatgaatatttttgcagttgtaaacgcataacaattacaactacacagtcntatttctaaagaataaaacaggaccatatttatttacttctgtcaactatagaaagaaagaccttcagctgtatttccacagatttctcccaaggaaaaggctaatattagtcactactgttatcacatccctttgtataagttttaaaaagagatggagggagatcttcatttctttgaggagatcagtattgtaacgtatgtgaatagatgataacaattaatattactaaaagtcccacatgagagtcctgacgccctctccatgccccacagtaatgtggcttctttcatgggnnnnnnnnnnnnnnnnnnagctgatctcatcctaagcatgctttatttttccttgaaagctaggtatttatcaactgcagatgttattgaaagaaaataaaattcagtctcaagagtaaaccctgtgtcttgtgtctgtagttcaaaagtcagaaatgattctaatttaaacaaaaagatactaaatatacagaagttaaattcgaactagccacagaatcatttgtttttatgtcagaatttgcaaagagtggagtggacaaagctctgtatggaagactgaacaactgtaaatagatgatatccaaacttaatttggctaggacttcaattttaccccgtttaacccactgtgctatagttgcgggtggaacagtcaaactttctagtagattatgatattgccctctttgtattcccattttctacagttttttccgcagacttctttctgcaaattattcagcctccaaatgcaaatgaatgatataaaaataagtagggaacatggcagagagtggtgcttcccagcctcacaatgtgggaatttgacataggatgagagtcagagtataggtttaaaagataaaatctttagttaataattttgtatttatttattctagatgtatgtatctgaggaaagaaatctggtatttttgctttccaataaaggggtatcaaagtaatggtttttctctcagttctctaagctggtctatgttatagctctagcagtatggaaatgtgctttaaaatatgcttaccttttgaatgatcatggctatatgttgttgagatatttgaaacttaccttgttttcacttgtgcactgtgaatgaactttgtattatttttttaaaaccttcacattacgtgtagatattattgcaacttatattttgcctgagcttgatcaaaggtcatttgtgtagatgagtaattaaaaaatatttaaatcacattataattctattattggagagcatcttttaaatttttttctgttttaacgagggaaagagaaacctgtatacctagggtcattatttgaccccatagtataaccagattcatggtctaacaagctctcagtgtggcttttctctgaatgcttgaatttcacatgccttgcatttcacagttgtactccatggtcaaccggtgctttttttcacatcgtggtacttgtcaaaacattttgttattttccttggtaaaatatataaaaaaggttttcttaattttc

SEQ ID NO: 256352 - DNA, 788 bp, Homo Sapiens
  misc_feature (288)..(301): n is a, c, g, or t
tgcagccttgcggaactctcccgtcaacaccaagaatcaagctgtgaaggagcgagcccagggcgtggtgctgaaagtgctcacaaacttcaagagcagtgagattgagcaggctgtgcagtcactggacagaaacggcgttgacttgttaatgaagtacatttataaaggctttgagaagcccacagaaaatagcagcgcagtgttactccagtggcacgaaaaggccttagcagtaggaggactaggctccattataagagttcttacagcaagaaagactgtttnnnnnnnnnnnnnngactcatgttaccttgagaagaattctggatgcccaggctggtgaagaagggattgacaatggaccatcttcctaggaactcccaagtaaactatttcaggacatgtatctgctgaaatgtattttattttcaaggtggaggggaaaatcgtctgtttcctaaatcctgtttaggatctgatagtctatgcctttgtctccgagtactgcagaactgacattttgacggtctaccagcgtggcggctggtgttggtcagatgcacctgtgtgcactgggggagggatggtttgggcaggtgcagatccaagggctgtggtaaacgggagagcttgtgtttttgaagtggaaaaaaacccaagagtttgtacagacatcctgtcttcccagagaaggtggacactcttgggctcattgtaaagtgcctgctgcatcaataaagctcttggcttattagtctatacattgcggtgtgtttcgtgtatgt

SEQ ID NO: 256353 - DNA, 652 bp, Homo Sapiens
caggtctccctacattgtcctggctaactattcataagcactaatagtgtaccacagtgtagaattcctgagctctagtgatccatccgcccaagtaggtgggaatacaggtgtgtgccactgtgctcagcttataataaattagtttctaaaagcaagtaacaaaatattgaaatcaagattggtgtaattatgaattacccgtttggtatccaataaagacacctggagcagatactgcatttgaccaccctcaacaccactcaaatccctgttagtcagccacatgaggggtaacacatgtgaaaggatggctacaaagtgaggaaggctgggattcaattccacttctgcaacttccttattatgtgataaatgagtgaaatgagtaaaatatctttagaattaaatgagataatgcctggcacctaatggttatttaataaataatataacaataagtctcagttcacaattcaggacagtaatagaagtgatatgacaatgctgcacacaattaaatgacagaaaattcctatcttagaatttaaaataaagttaatattaaagcaggtaaaaatagtaaagaaaagctgacaacagaggtcatttaaaaataatctaaaattttcaggctaggcacggtggctca

SEQ ID NO: 256354 - DNA, 678 bp, Homo Sapiens
tcgatctaaaaaaaaggtacattcacttaatagcctatataacaatatttctctataggcaaacaaggatacagtgttcttttagtgtgcctgagaatatgggaacatattttgttttctaggttggaaaataatttattttctatttatatagaatatagtaataatatattactgctatttattactactatttattactatttctatttgtatagaaatagtaattattactatttctagtaataatagtagtaataatttatttctagtaataatttattactgtttctaagtaataaaaatatctcagatttagttgatacctcaactaaacttgtattgatacaaggtcaaaatagaaaaccagttgctaaagtagtaaggtcaattattttgacaaaaatttagaactgttttctaaggaagctgttttttccacgattatttctgatgagatgatcaagtggggttgaagtacacaagttattatttctggtctcttttaggcataccaacacacatagaaagacatgctggacagtttgatcattcaggtagaccaaatctacatgcattaaacagtggaattggtatataatctgccactttctgtgttctgacttcaacattagccggttttaaaatcctttagaaggaatggttacaaatgtcccc

SEQ ID NO: 256355 - DNA, 910 bp, Homo Sapiens
cagaaccgctgtcttgtccctggctactattctacccatctacaacgctggctgacttactacccctctggacagttgctgattgtggatgggcaagagctgcgtaccaacccagcagcctcaatggagagcatccagaagttcctgggtttgatgatgataagggattttggtgccagggacttgaaggtggtaagactcgctgtctaggccggagcaaaggccggaggtatccagatatggacactgagtcccgtcttttccttacggattttttccggaaccataatttggagttgtcgaagctgctgagccggcttggacagccagtgccctcgtggcttcgggaagaactgcagcattccagtctgggctgatgtcccagcctcccataccagcaaaatgccccctgcttccctaaggggcaggtccagagcagggcccacaagggggattagagtggcctggcccctccccctctacctcagtagcccccaggcctgagatggctgagaagggaagggtatccttttcccacagttctgggacaaataaaggggcttcctttggtaccccacataatagtgctaggtacctttgacccatcatcttgggaggtggggaggaatgagagggtccaggcagggtgtaggggaatgtattagtccaatgagatttccctcttcatccgcagcagtgtatctattctatacctggctatgggagagaccccttgcatgggagggaccccttgctatggcccctttagccaggcagtgggatctacctgtgcccggcctccctaatgtcattcacattgaatggggatgaggtcggacagctgctcatagagccgagtatgagccctagctgtgggctagaaatgtccttaataaacatccttattttt

SEQ ID NO: 256356 - DNA, 1137 bp, Homo Sapiens
gtgggccctgctctggacctgccccttagggaagcagggggcattttgctggtatgggaggctgggacatcagcccagactggaatgctgcagttcttcccgaagccacgagggcactggctgtccaagccggctcagcagcttcgacaactccaaattatggttccggaaaaaatccgtaaggaaaagacgggactcagtgtccatatctggatacctccggcctttgctccggcctagacagcgagtcttaccaccttcaagtccctggcaccaaaatcccttattcatcatcaaacctgagggtccggtgtgtagttcagaaaggggtgtgatacccaggaactttctggatgctctccattgaggctgctgggttggtacgcagctcttgcccatccacaatcagcaactgtccagaggggtagtaagtcagccagcgttgtagatgggtagaatagtagccagggacaagacagcggttctgcagggagcgtagtgccagaggggtctgggaggaggctgaaatcacctgatagaaggtatagttcagagcaactgggtctccatgggctcgctgatgctggtaccaggagtaggccctgtcagcagggttggtgagcactgtgatgatcttggctcgtggcaggagggcagccccccgccgtggtacaacttcagagtcaaagtaggtggcacttttttcaaataggaaatcagtgctggcattggaaggaacagggaagaaatccatgtaccagtcaatacccttgtggtaattagggctgttgaagaactgaatctcctcaaatgtgctggggctagggaagctgctagttacagctgggtgcaggctcaggaagaagtgaatagctgtagtccctgttttctggggtcccacaatgaggaacttcgggagacgatcacaggttttctccttggaccagatatctttgtgcctcttgtcatcacagggattctgccaaagggggcttcgctcctgagggaaaagttcaaagtacttctgtgcaagtgggacaggaggaagggtctgtaggcgcagccgtgtccaacactggaggaagcgcaccaagctctcaaaggtgtataggcccagccggtcatttccataatgga

SEQ ID NO: 256357 - DNA, 713 bp, Homo Sapiens
attcttctgagtattctacctggtgtctcttaaattatgaagttttccagtctggccgatgagagcatgaactattcccaacccttagaaatctttggtaattgttctctctcttcctttctggtgactctgctctaggccttgtgtgtttcctcacaaggatatggggattggtattgagctgaaattttgagatgaagatgggacacccccctccccttcctgtctgtatagttgtctctgttttggtactctgtcctacgaattctagctttcttcattttcctgtattcttagcttcatcatctcaacttagggtgaccatcaggctccatctgggttcccttgccctgcactgaggcctggaaactgtctctagaatataagccgggacaattgtaaaactctgtaggattttattcgtcttttttaaggaatcactgtagcacactacagtgattcttggatttatttgttttttctgagacagggtcacactcctgtctcagaactaaccgatatttcatgtctaaagactaaagtgttatatgttttgttcatttttaaagcttttcttttaagtgaaagggtatacctgctttctgctactggattttggccagatacctttcttttggaagctgaaaatactggattactcattagttaaagaggaaattacagtgaaaaatatacaatatctaatttgatga

SEQ ID NO: 256358 - DNA, 669 bp, Homo Sapiens
  misc_feature (146)..(162): n is a, c, g, or t
caaaggagcaaagaatgcagggagggcggtccaggcccctgggaaggggagctcggcaccctccaggtccgtgtgggaccccagccgctgttggctgggaatcgaagttagaggtgacttccaaaggccccccgagccggcagtgnnnnnnnnnnnnnnnnnagcgactctgcggtgccagtgccttgttggcttttccggctacgcaccctgcagtcactgagctctcggtctgacgtctgatgtttgtggtttgtttataacacggggccttacctggggaattcagctggtttgaatatttgtagcccgctcccagaatgtcttattttgtaatgactgaactacatttagtaatagttacacatgtatatggttaatacatatggaaattcaatatattttgtagttaacgtattctgaagtaacggatgtttctcgccaatcgtagtgacttcagctaacgaaatgttcttttgtagtaccatggtcctcggcctaacgaaggacgtgaaccttgtaagaggagagctctgaaacgtggtcacctttgtttagtggaagggaaagtgtgttcctggcatgaggtgcctcggaattagtaaagaattgtgggcaatggattaaccactgtatctaagaatccaccaattaaagcatttgcacaga

SEQ ID NO: 256359 - DNA, 666 bp, Homo Sapiens
gccgtgacaaggtgccaagtcacccaggtctcagggctggggtggggtctccccacagacagcctggctcagacacactttcaactgccgcagcgcgaggacccttgtcatcatcccacagagtctgcctggtcattgcttttaaagtgcttagagactgtcaatgaaggagcaatctcaataaactttgtggttttgtcatcctcagaaatgaccaatcttcatgaaggtggtgttgtgcaagcctgggcttctattaaaataaaaaagtgtgctttgcacctaaggcaatggtgggattaaagcaagtagcaaattgatgttctcatttaaaagtcttgcctggtctgtgagtgccctgggcctgcaaaggtaaaagaagcctgaccacaaagcaactgggcattctggaggttactgggcagacctgagactccagagaaagtaggaagagaaggcagattgtcagttaatgatggcggtgttcgtttctgtttgtatacttttaacagtctaaaaatggggcttcggacacaatacctttcctaaatgaaaccagtgcctgcttcgttacaggcacaaggtatgtactgtgggtgacatccagcccccttcagttttccagagtctttcctggggtcttgcttggctcagggccactggaac

SEQ ID NO: 256360 - DNA, 614 bp, Homo Sapiens
cctcagaaatgcccattcttcataaaggtggtgttgtgcaaagcctgggcttctattaaaataaaaaagtgtgctatgcacctaaggcaatggtgggattaaagcaagtagcaaattgatgttctcatttaaaagtcttgcctggtctgtgagtgccctgggcctgcaaaggtaaaagaagcctgcccacaaagcaactgggcattctggaggttactgggcagacttgagactccagagaaagtaggaagaaacagtctaaaaatggggcttcggacacaatacctttcctaaatgaaaccagtgcctgcttcgttacaggcacaaggtatgtactgtgggtgacatccagcccccttcagttttccagagtctttcctggggtcttgcttggctcagggccactggaacacaacccacccgatgacaccagggtgtgtcgagcctgtggtcaaggttcacacgtctgtgtgtgccacaaccactgcagaggggaaagacatcatccacacaacatcccaccctcagcagggacttggaaaatcaggaacccgatagtccatagttggggagactgaaaggttccccaaacaagcaaggctgctccattttac

SEQ ID NO: 256361 - DNA, 622 bp, Homo Sapiens
  misc_feature (494)..(494): n is a, c, g, or t
  misc_feature (577)..(577): n is a, c, g, or t
ggagagagaaggttgattgtttaatccctcacctcaactccaagaaggcgggaaagaatgctgcagaaacagctaacccattaggagttgacttcattttcaaagcagcaacctaatgtaacttcctttggatagcatttaagtttgtcatttcagggatttgtgtgtgcttcgatttcaatatgtatatgagttcgaatgacaaaaacgggaaaaggccagagtataacgagatgtagaacaatggggctgtctctgggaacactaaacatttgataggggagccgttgtcgttgtatttatgatatcaacttaccggtttttaattactctctcatcgttcaacattcaataaatatttatagagcgtctactatgtgctaaaccgtggaagcttggattgcatcagtgcacgaaacagagataactgccttactgccttcattaacctttacagaagggtctgggggatgcctcgtggattaacaactggngattgatgccttttctctggctcttcagtcttttcctaacctctatcctaaaacagttaatttctctgtcaatccactcttcnccttttctcctttaaaagcccatgcatggttggtttatagagaaa

SEQ ID NO: 256362 - DNA, 1080 bp, Homo Sapiens
  misc_feature (998)..(998): n is a, c, g, or t
  misc_feature (1031)..(1031): n is a, c, g, or t
  misc_feature (1048)..(1048): n is a, c, g, or t
  misc_feature (1052)..(1052): n is a, c, g, or t
gggaggacagactgaagaaacatccaaggtggtcttgaaggacactgggatcctgtaacacagccccggatatctgtgttaccagccttgtctcggccacctcaaggataatcactaaattctgccgaaaggactgaggaacggtgcctggaaaagggcaagaatatcacggcatgggcatgagtagcttgaaactgctgaagtatgtcctgtttttcttcaacttgctcttttggatctgtggctgctgcattttgggctttgggatctacctgctgatccacaacaacttcggagtgctcttccataacctcccctccctcacgctgggcaatgtgtttgtcatcgtgggctctattatcatggtagttgccttcctgggctgcatgggctctatcaaggaaaacaagtgtctgcttatgtcgttcttcatcctgctgctgattatcctccttgctgaggtgaccttggccatcctgctctttgtatatgaacagaagctgaatgagtatgtggctaagggtctgaccgacagcatccaccgttaccactcagacaatagcaccaaggcagcgtgggactccatccagtcatttctgcagtgttgtggtataaatggcacgagtgattggaccagtggcccaccagcatcttgcccctcagatcgaaaagtggagggttgctatgcgaaagcaagactgtggtttcattccaatttcctgtatatcggaatcatcaccatctgtgtatgtgtgattgaggtgttggggatgtcctttgcactgaccctgaactgccagattgacaaaaccagccagaccatagggctatgatctgcagtagtcctgtggtgaagagacttgtttcatctccggaaatgcaaaaccatttatagcatgaagccctacatgatcactgcaggatgatcctcctcccatcctttccccttttaaggtccctgtcttatacaaccaagagaaagtgggtgttggccaggnacatcccatctcaaggcagcaagacaatctttnactcacttgaccggcancaancattgtctctcaaaagtggtgaaactaa

SEQ ID NO: 256363 - DNA, 734 bp, Homo Sapiens
  misc_feature (26)..(26): n is a, c, g, or t
cagccttgtctcggccacctcaaggnataatcactaaattctgccgaaaggactgaggaacggtgcctggaaaagggcaagaatatcacggcatgggcatgagtagcttgaaactgctgaagtatgtcctgtttttcttcaacttgctcttttgggtaagtgtatctcttctgagcacggtttagctcacctttacccagctaagctctcctcattcctctactgaagaggctggtgtggggtaaaatgcatgcgtgttttgggtcatgtccagcacaaccatcctagaaacaaaagagtaataatttttcccctcttcctgccacagaataaacctgcaaaattgaaaggtaccagtgcagttattaatggaggtgctgtttctctctgagggctttagtttactactactcgtagctaacatatataggtgagaaacctgagactgtgctctggatattgagtgcctctgtttttcttgtctttttttctagattccttgaaacaataagtgattgaaaggaaagtcaccctttccagggaggtttcactgtataaaattcagcaattgaatttcagatataggatgggttggtacttgtgtatatgagaagattattataagtttggcttctctagttttctgcctagcaagatgagcttcctcaagcagggcatcttctctacatggtcatggtttctacagagaaagccatgtgtgagcgactgaaaag

SEQ ID NO: 256364 - DNA, 1639 bp, Homo Sapiens
gggggagtcgagccgagctgatttgatcgaggagcgcggttaccggacgggctgggtctatggtcgctccgcgggccgctccgccggctggtgcttttttatcagggcaagctgtgttccatggcagggaacttttggcagagctcccactatttgcaatggattttggataaacaagatctgttgaaggagcgccaaaaggatttaaagtttctctcagaggaagaatattggaagttacaaatattttttacaaatgttatccaagcattaggtgaacatcttaaattaagacaacaagttattgccactgctacggtatatttcaagagattctatgccaggtattctctgaaaagtatagatcctgtattaatggctcctacatgtgtgtttttggcatccaaagtagaggaatttgggagtagtttcaaatacaagattgattgctgctgctacttctgtattaaaaactagattttcatatgcctttccaaaaggaatttccttataggatgaatcatatattagaatgtgaattctatctgttagaactaatggattgtttgcttgatagtgtatcatccttaatagaccttggctccagtatgtgcaggacatgggccaagaagacatgttgcttccccttgcatggaggatagtgaatgatacctacagaacggacctttgcctactgtatcctcctttcatgatagctttagcttgcctacatgtagcctgtgttgtacagcagaaagatgccaggcaatggtttgctgagctttctgtggatatgggaaaagattttggaaataatcagggttattttaaaactatatgagcagtggaagaatttcgatgagagaaaagagatggcaaccattcttagtaagatgccaaaaccaaaaccacctccaaacagtgaaggagagcagggtccaaatggaagtcagaactctagctacagccaatcttaaaacattccgaagaattccatagtggaccacttggaaataaaccattggacagatttcagtaatgtcttcagtggaacacaaatgaaaatgaatagcttgtttctgtcaagcatattggaaagtgattttatttttgcaaaataagtttttctttaatatgattctagtacataattgattaaaatctcttgattataaatgtttggaaaggttctaaggggacctacagacagacatacatagacatttcaaaattaatagcttttgattagtataatatttcttaatttggataataaaaattgtagctttttattaagccaggaaacatgaagcataatttgtttaaaattctctttggtcattgagggaccaaaaaaggacgtaaaatttacagtcaatctatgagggtttttttccctccataagtttaactttaaaactgtatttaaggaatcaaatcttacaaaatcctggaagattttggtaatgatgttgataatttcagggaaattaatcaagtacctatattgatttaaaagtgtattttattcagtagtttgaggatcttgccatggaagatactagcccagccttaccagcattttgaaatgcttggcaaacttcttgagggtatttataataaattcacagctaataga

SEQ ID NO: 256365 - DNA, 930 bp, Homo Sapiens
gattgtgttcctggttcagaatacctgtagtaaatctgtaaatccacaccaagacacaacattaaactagggtgtgtatatcttataaaaaccttttcacagtaaaaatcaacattaaaattttaccaaattccaacattatggtttttgaatccaattaagctttcaaaatgcctgattagctgtgaattaattataaataacttcatgtagtttgcccagcatttcaaaatggttatggactatcatgtttaaaatgtcaaagtatgctataaatattgcacttttcggctaggctgggcaagtatcttccatggcaagatcctcaaaataatgaataaaatacactttttaaatcaaaataggtactttgattaatttccctgaaattatcaacatcattaccaaaatcttccaggattttgtaagatttgattccttaaatacagttttaaagttaaacttatggagggaaaaaaaccctcatagattgactgtaaattttacgtccttttttggtccctcaatgaccaaagagaattttaaacaaattatgcttcatgtttcctggcttaataaaaagctacaatttttattatccaaattaagaaatattatactaatcaaaagctattaattttgaaatgtctatgtatgtctgtctgtaggtccccttagaacctttccaaacatttataatcaagagattttaatcaattatgtactagaatcatattaaagaaaaacttattttgcaaaaataaaatcactttccaatatgcttgacagaaacaagctattcattttcatttgtgttccactgaagacattactgaaatctgtccaatggtttatttccaagtggtccactatggaattcttcggaatgttttaagattggcctcgtgccgaattcctgcagcccggagg

SEQ ID NO: 256366 - DNA, 673 bp, Homo Sapiens
  misc_feature (20)..(20): n is a, c, g, or t
  misc_feature (88)..(88): n is a, c, g, or t
  misc_feature (95)..(95): n is a, c, g, or t
atgtaggcaagctaagctantcatgaaaggaggatacagtaggcaaagatccgttctgtaggtatcattcactatcctccatgcaagnggaagcnaacatgtcttcttggcccatgtcctgcacatactggagcaaaggtctataaggatgatacactatcaagcaacaatccattagttctaacagatagaattcacattctaatattaatacagaagtagcagcagcaatcaatcttgtatttgaaactactccaaattcctctactttggatgccaaaaacacacatgtaggagccattaatacaggatctatacttttcagagaatacctggcatagaatctcttgaaatataccgtagcagtggcaataacttgttgtcttaatttaagatgttcacctaatgcttggataacatttgtaaaaaatatttgtaacttccaatattcttcctctgagagaaactttaaatccttttggcgctccttcaacagatcttgtttatccaaaatccattgcaaatagtgggagctctgccaaaagttccctgccatggaacacagcttgccctgataaaaaagcaccagccggcggagcggcccgcggagcgaccatagacccagcccgtccggtaaccgcgctcctcgatcaaatcagctcggctcgactcc

SEQ ID NO: 256367 - DNA, 1757 bp, Homo Sapiens
gaccgctgagtggttgttagccaagatggcggtagcgatcgctgcagcgagggtctggcggctaaaccgtggtttgagccaggctgccctcctgctgctgcggcagcctggggctcggggactggctagatctcacccccccaggcagcagcagcagttttcatctctggatgacaagccccagttcccaggggcctcggcggagtttatagataagttggaattcatccagcccaacgtcatctctggaatccccatctaccgcgtcatggaccggcaaggccagatcatcaaccccagcgaggacccccacctgccgaaggagaaggtgctgaagctctacaagagcatgacactgcttaacaccatggaccgcatcctctatgagtctcagcggcagggccggatctccttctacatgaccaactatggtgaggagggcacgcacgtggggagtgccgccgccctggacaacacggacctggtgtttggccagtaccgggaggcaggtgtgctgatgtatcgggactaccccctggaactattcatggcccagtgctatggcaacatcagtgacttgggcaaggggcgccagatgcctgtccactacggctgcaaggaacgccacttcgtcactatctcctctccactggccacgcagatccctcaggcggtgggggcggcgtacgcagccaagcgggccaatgccaacagggtcgtcatctgttacttcggcgagggggcagccagtgagggggacgcccatgccggcttcaacttcgctgccacacttgagtgccccatcatcttcttctgccggaacaatggctacgccatctccacgcccacctctgagcagtatcgcggcgatggcattgcagcacgaggccccgggtatggcatcatgtcaatccgcgtggatggtaatgatgtgtttgccgtatacaacgccacaaaggaggcccgacggcgggctgtggcagagaaccagaccttcctcatcgaggccatgacctacaggatcgggcaccacagcaccagtgacgacagttcaggtaccgctcggtggatgaggtcaattactgggataaacaggaccaccccatctcccggctgcggcactatctgctgagccaaggctggtgggatgaggagcaggagaaggcctggaggaagcagtcccgcaggaaggtgatggaggcctttgagcaggccgagcggaagcccaaacccaaccccaacctgctcttctcagacgtgtatcaggagatgcccgcccagctccgcaagcagcaggagtctctggcccgccacctgcagacctacggggagcactacccactggatcacttcgataagtgagacctgctcagcccacccccacccatcctcagctaccccgagaggtagccccactctaaggggagcagggggacctgacagcacaccactgtcttccccagtcagctccctctaaaatactcagcggccagggcggctgccactcttcacccctgctcctcccggctgttacattgtcaggggacagcatctgcagcagttgctgaggctccgtcagccccctcttcacctgttgttacagtgccttctcccaggggctgggtgagggcacattcaggactagaagccctctgggcatggggtggacatggcaggtcagcctgtggaacttgcgcaggtgcgagtggccagcagaggtcacgaataaactgcatctctgcgcctggctctctacc

SEQ ID NO: 256368 - DNA, 432 bp, Homo Sapiens
ccccttgcctgtctcctctctggtccccaactgcccccacgtctatctgtgcctccacccgcagctgccgaaaggagaaggtgctgaagctctacaagagcatgacactgcttaacacccatggaccgcatcctctatgagtctccagcggcagggccggatctccttctacatgaccaactatggtgaggagggcacgcacgtggggagtgccgccgccctggacaacacggaccctggtgtttggccagtaccgggaggcaggtgtgctgatgtatcgggactaccccctggaactattcatggcccagtgctatggcaacatcagtgacttgggcaaggggcgccagatgcctgtccactacggctgcaaggaacgccacttcgtcactatctcctctccactggccacgccgagccctatgcagtctc

SEQ ID NO: 256369 - DNA, 932 bp, Homo Sapiens
  misc_feature (41)..(41): n is a, c, g, or t
  misc_feature (62)..(63): n is a, c, g, or t
  misc_feature (84)..(84): n is a, c, g, or t
  misc_feature (173)..(173): n is a, c, g, or t
agaggagttttcaccggtatgtgataaaacaaatagaatanaagttccattactacgaaaannatatatataggatggttgganacgtgaagagagaaggacacttcaggtggcgtggtcagggagggcttctttgaggaggtgacatataagcaaagatcagaatgaccaanagagtattccaggaaaaggaagtatatagggtaaatcctataatacaagagcaaattcaacaagtttgagaaagagaaataaggctggtgtcactgcagttggtgaagagtggtgggaaataaggttaaagaggtggtcgggaatcccgtacagggctccacgggccctgcatgaagaagaagtctggactttatcacaggtgccatcagcagacatggagggattctaagatgagaaatcacatgatctgatttatgtcttaagacttatgatttatgaaactctagctgtgctgtggtgaatgaggacaagagcagaagcaggaaaaccatttagaaagctattacaagagcacagaagggaaatgttttggaggtaaagttgacctgaattctgaggattgtgaaaacggaggaaaagagaagaatcaagaatatctacatgctttttgtgttgagcaattggtgggtggtaatgccatttaatttgaagcctgagagaatgaagaattctattagtgtagtatttccttctttccttgtgcagccttaagcttgcagaccatggattacaccactctcttttattttccttccctacttgccctttagtccttcttatataaaagaacttcatctatctgcatcctctactcttatcctgtcttgaactcactgcagtttggctactatccccattttactaataaactccttcttgccgaacacaacaatgacctccttactacctccaaaaac

SEQ ID NO: 256370 - DNA, 1175 bp, Homo Sapiens
  misc_feature (72)..(72): n is a, c, g, or t
  misc_feature (85)..(85): n is a, c, g, or t
  misc_feature (126)..(126): n is a, c, g, or t
  misc_feature (560)..(569): n is a, c, g, or t
  misc_feature (696)..(696): n is a, c, g, or t
  misc_feature (722)..(722): n is a, c, g, or t
  misc_feature (758)..(758): n is a, c, g, or t
  misc_feature (933)..(933): n is a, c, g, or t
tggccattagcaacaatgcagtctcatgcagcagcacattaaaatcaacggggtgcaaatcgttcaccaccntcagagtgttggnagactttcacatttcatcatccttataatccacaaccaganacatgaagggatgcaagtgagttcagcattcactcgtttggtgcactcaagtgctgagagaatgcagaatttacagtgtcacagaggaaaaaagccatctgaaataattgtaaaaatggttaagtgtggtatttaaatgttggttccctcctcttcatacaagtggaagaaaagaaggggctagggtacccactgggccatgaggttaaccccttagcacaggcaatgaagaacatccaatgccacagattctgtctgaatcagtcttaatctgattttgttttggctacacagttatgctgttatacctttgacatacataaaaatggtcattttatttcaatccagacagctcagcattgtacaaatgatggcagaaagatccatttgttcagactcagcttgctttgtttttaatactggggaataaaccnnnnnnnnnngtgtaatttttatcatttgtatccttcattctactttactggagtggaatccccagggccttcagataatctgggaagacctgactattcctgtgaggcaagcacagccctgctgaactttactcangaataatgcatgaatagactcaacgntaattcccaggaaaaaaacccaagtcactccaattncataaactcccctcaataccaaccatcgtcattccttcttgaatgaccataaataatggctccttcctgaaaaggacagctcatcttccttgtcttttgtatagtcataaattgccacaaccttttccaagtaagaacgtggagcccacggtgggtcctcttcagcataaggatnactatactcaaccacagcagcttcctcctcttcgtaatcttctggaggaggaggaggtgggggagactcatcaaagactggttcttccacaggtggcggtggaggtggtgtatctgaaatattttcttggactctggccacaaatcccattaaaggtaactgaggagttacctgtaggatggagggaggaggaggagcaagagatactggattctggctataaaaaggtcctccattcatct

SEQ ID NO: 256371 - DNA, 282 bp, Homo Sapiens
  misc_feature (75)..(88): n is a, c, g, or t
tttaaatttgaaataataataggtactggatttatgcaaatgtcttttctgcgtcttttgagatgagtatcaggnnnnnnnnnnnnnnccttttatcatctgatgatgaacttaaggtttccatttgtattaatggaatactaagtccctctgtgatttctgaaccaagctattcctaggcctgagttttattttgttgacacagaaataaattagaaggccaagcgtggtggcatgtgcctgtagtcctagttgctgaggtaagaggattgcttgagccca

SEQ ID NO: 256372 - DNA, 607 bp, Homo Sapiens
gaaagaaaaggccgcaggcttttgcttttttacctgctaattagattgctaaatccagaaaaataatgggcatgcagttatattgaatttccagcaaaaggcggcacaggtgaaatcgggctgcgtgatgacgcatcatgctgcattcatcacatttctatactaattgtgtgctggcctgtggatgggttcagagggatttcctggaagtcagggtcaaatgccatttgttccagcactttcagggcctggcatgtaagtgttcagtggatgattcttgaatgaatcgttgactgtccttgtagatgagagagaaaaatagggactaaatagtgctgcagttacacgatggatgatagctgaacaaccacacaccaaagctgctgagcaatggattgtgtcaagggttggggggtaccggattaaacccaaaagaaaatttcttgggaattttcccaagactgggttcaaagcatactctttccaacattgaaagaaaatacctgggatcccaccctgaaaaaccgcttatgaaatttgcatacacccccaagtgggttccaaaaattcctcccattattagaaaaaccctaaaatccttttatct

SEQ ID NO: 256373 - DNA, 916 bp, Homo Sapiens
  misc_feature (878)..(878): n is a, c, g, or t
ggtccggaattccctgggattgtataaacagcagtggtttgctatgctgcgggcagaacaggacagtgaggtggggcctcaagaaatcaataaagaagaactagagggaaacagcatgaggtgtggtagaaagcttgccaaagatggtgaatactgctggcgttggacaggttttaacttcggcttcgacctacttgtaacttacaccaatcgatacatcattttcaaacgcaatacactgaatcagccatgtagcggatctgtcagtttacagcctcgaaggagcatagcatttagattacgtttggcttcttttgatagtagtggaaaactaatatgtagtagaacaactggctatcaaatacttacacttgaaaaggatcaggaacaagtggtgatgaacttggacagcaggcttctgatcttccctttatatatctgctgtaacttcttgtatatatcaccagaaaaaaagaattgaaaataatcgtcacccagaaaatccagaaaactgaagatttcatcagttggaaacagtagcactttgaaaactttttaggccagctttaatttaatggccctactgatattcacatcgaaggtgactaacaatgacaaaggccttatgaactgtacagacaatacagaagattattcttatcctcattgcatttctatgcatatgcgtaagaacattttaaagccaagaaaatatctgtcaaaccatttctgttagaacgatgtcaattcatgcttttaatttagcatcaatagaaaattgctgtaggtaaatctcacatttatctgcaacaaaatatagattttattttttagcttaaaactttggttcctaccctaatggttagtgggacctcagnttaatccatctggaaaaatttccttttttattttggcc

SEQ ID NO: 256374 - DNA, 1245 bp, Homo Sapiens
  misc_feature (451)..(451): n is a, c, g, or t
  misc_feature (1095)..(1095): n is a, c, g, or t
ctggattatcaagagtttgtagttgacattgaatccaggctgaggatggaaggtgtggaacttaaagaagaatggcaagatgaagattttccgatacctttaccagaagatgatagtattgaagcagatatactagctataactggaccagaggaccagcctggctcactagaagttaatggaaataaagtgagaaagaaactaatggctccagacattagcctgacactggatcctagtgatggctctgtattgtcagatgatttggatgaaagtggggagattgacttagatggcttagacacaccgtcagagaatagtaatgagtttgagtgggaagtcatttcctggaaggatattttccgttaacagctttgtcttggaaacaactaacatgcagtaggtttccccctccccccatcttttggtaaggactataatactgaaattntgaaaattattactacattgaaaatcagctaaactgcaatctcaaaacataaattacacttaatcattggtgcttatgctttggctaatgctaatttaaatagacttctgcatgtatacttcaaagtattataaatacatttctgctttataaactgatcaaatgagaagtgatcattgagtagttaaccacttcctatctggtattacagttaatttatgtgctcaacaacaacaaaattggctcccagatagctacttgaagtaacctatagtcataactgccagggagaatattgtcacaagttgaatctggaaaggcattgtaaggccagtgtactaagattttgatgactctacaaattatattttctgaacttgtggatacacgtttcactatgattaggtggtttttgctaaattgggcaataaaagttaaagaaccatgatttccaaagacataaaacagcctcatgttaagaataagccttttcctcctttacggaagagagatttaaaattgtgcagatggtataatgaaaattctctgtaaaatctaggtagtaaagtggttaacgtataatttgatttttgttgtgtaacaatttgtgattcaaaaactttttattttgacagatgatcttncaaaacccaagactactgaaagtattaggaaaggctcaaatactgaatacacagcagcagaggaaaaagaagatggacgacgctggcgtatgttcaggattggagaacaggaccacaagggtgatattgaaggcaattgaaccctataaa

SEQ ID NO: 256375 - DNA, 1020 bp, Homo Sapiens
  misc_feature (856)..(856): n is a, c, g, or t
  misc_feature (906)..(906): n is a, c, g, or t
  misc_feature (966)..(966): n is a, c, g, or t
  misc_feature (987)..(987): n is a, c, g, or t
  misc_feature (992)..(992): n is a, c, g, or t
ggggtgtccgggtcagctgctgccgccgacgccgtaccgctgcggccgggggattgggccggggtctccaccgccgaccgaggggagcgggctccgctcggccctgctttttgcgacctggccgtcagccccacgtcgccggcctggaggggcgaataggacgagggggccgaggcttcctccggggacattggctccctggattatcaagagtttgtagttgacattgaatccaggctgaggatggaaggtgtggaacttaaagaagaatggcaagatgaagattttccgatacctttaccagaagatgatagtattgaagcagatatactagctataactggaccagaggaccagcctggctcactagaagttaatggaaataaagtgagaaagaaactaatggctccagacattagcctgacactggatcctagtgatggctctgtattgtcagatgatttggatgaaagtggggagattgacttagatggcttagacacaccgtcagagaatagtaatgagtttgagtgggaagatgatcttccaaaacccaagactactgaagtaattaggaaaggctcaattactgaatacacagcagcagaggaaaaagaagatggacgacgctggcgtatgttcaggattggagaacaggaccacagggttgatatgaaggcaattgaaccctataaaaaaggtatcagccatgggggatattatggggatggattaaatgccattgttgtgtttgctgtctgtttcatgcctgaaagtagtcagcctaactatagatacctgatgggacaatctttttaaatatgttattggcactttgggagctatttagtagccngaaaactacatggattagtttatttttaaatgggtgccaaccaacttcgnagggaaaaatgccccgttctggggatgggctccagggaattgtttatccaggccaatttngattaggaaggtttacggggnaaaantcttaaattcccctaattcctttgtacc

SEQ ID NO: 256376 - DNA, 567 bp, Homo Sapiens
  misc_feature (340)..(357): n is a, c, g, or t
tagttgcataccttatttcgttacatcatatatttgtaatgtgtaatatgaaatcttttgctttaatgtctttttttaaaatgtagaatgttctaaacttgaaaggcaattgaatgtagtatgatgaaaatgtgaatgttttgctgctttcatgaccaaagatacagggctagtggacatttagaataataattaaagctagagtcttgtatgtcttttctttgaaggagttctaaccttgtaaattgagaatgacttcagagaattttgattaagaaaacattaaaatcttaaccggcacaaacactccaatttttttcactgtgaagccgcaagcaannnnnnnnnnnnnnnnnncaaaagcctgccttctgaatttatttcttgtttactcatttcagagagggtagtaaagaagatctatttctggtagtcatatcgcttgaaaggtattggtaaatgtgttttcagtcgtgaccatgtggaaagtgaacagtgttggcaaacattaccgagaaaatcatgcttttcaagatgcccttgctttgggatatccttcctagggag

SEQ ID NO: 256377 - DNA, 611 bp, Homo Sapiens
ccgggctgcaggaattcggcacgaggttcttccaaaagcttctctttgatagaattttgaggccatgccacctcccttccagtccacatggaattccagaatcagtcacagcctctgattttttccaagaagagattgccttcaccattgttaaatgtcagcctgtacggcagagacatggtggtctgcacaagcctggacaagttcttccatattgatggtggagcaacccctgtaatctactccttggaaggattttttgctttgcttatgaaaagctgtgcttgagacttaggtacttttctcacgtggacacactgatcccatcccatattgcatctttgaagagatggatatcaagtacactttggtagctgaaataatcatatctttctgatgtctattgtatctcctttgaggaaaagaacacacatttttaatggagattggctgctttcaggttgtggatcacatcattgcctaattttattaaagacggagtgaagaaattatttgattccactttagagactcttccaatggaggtatttgggaaacctgtcattgtgcagtagcaaatatttgtattaaaaagaggcggttttccccca

SEQ ID NO: 256378 - DNA, 596 bp, Homo Sapiens
  misc_feature (551)..(551): n is a, c, g, or t
  misc_feature (561)..(561): n is a, c, g, or t
gttaaatgtaggagagtcccaaaatttattctcaatgccatttaagaggagaaaagcatcactaaccctcctaggtacatagcagggacactgtaactacagcctgcatgaatgaataaatattgagtgttgagtggtgagtggttcttacctatgctgcaggcacagccctgtgctgcagtccacacaagtcctgtggaatcatctggatgcaagtgcttggaaagggccaggggaaggctattgtctgctcgcacaagttacttgttattgggcagtttgtaacccatactgctataagcattactgcaaaatcccataacaaattttacgatgaaaatctcatgaacttgactgtttctgcaattttgagccagtgatccactcattccaaacaacattgacttcccaaacaacaaaatctgggtagtccctgggagtttgctctaatgaagcttgaactgtgtcgcaaactcttattttgccttttaaaagaaaagaagccagttggattcatttggtagtagatataggaaatctgttaatagttnttcatgtctntattgaatgatcataattttgcattcatcacaagt

SEQ ID NO: 256379 - DNA, 475 bp, Homo Sapiens
  misc_feature (372)..(372): n is a, c, g, or t
atgagccaccgtgcctagcctctcttttcttacacagacttcctgctcaaatgtgtgagccttgtgcctaggtaggaaatataatcagtgtatagagtgtgtagagagaagatatattcatcaatggtagaaaattgtaaaatgcaggagcacgaagcttctttttcttctactcactaacccaatactgctctgtgctcactcttttggaaagcactggattggcacacaggtaaaccttacctaaggtccaatcaggtgtttcgaaggatttgaaggatgttgttgacacaggataacacttgttgtgggtagtgatttgaactcagagagcccaacagacctgctgtggataggatggctctactcttntgtaacgttgaacttttggaatacacatacagacttgcatttatcagtacctcataaagtatttattacagaaggactttctaaatatctcttgaatgaataa

SEQ ID NO: 256380 - DNA, 564 bp, Homo Sapiens
  misc_feature (467)..(494): n is a, c, g, or t
gaattaaaagagctcaagggagtctattctagactctttagaatgtgtttgtggcctgtccagaattttcactggaccaaacaaaaatagaacttgctaattccccagacatctttcttgtcaggttacacagttcaaaaggtgctgagggcttcctaaacttagagatgagagaagaggcactgcaccatggatctaacttttgtgaattctaatcagcaattcacaaaagtgagatcttacaattataaaacccggtctccaaattctaccttgctttccgatctttctgccaaggtctgagtcttagaaatattagcaaattcctgttcatggactgtcaatctgaaaagactgtcaactagtcagtttcatggaatgcataagaaattgcaaactggtagcaggcagcaacgtttgttttggtctgtagttttgttttgcttttcactggttgtccaacattnnnnnnnnnnnnnnnnnnnnnnnnnnnnctttggaggagcttacacaaaaatctgggtatctccctttgcttgaaaaatcaagtctgactgattcaca

SEQ ID NO: 256381 - DNA, 661 bp, Homo Sapiens
catcctcccaacagggttctaataggaaagaatacaacttccagggcatttgaaatcaaagatttggctcataaaagaactttgcaaaattattagtaagcccatgattacctaccaagatttaaaattaatactagtccttctttttcatgtactgatccattttagtcaaaaatcttgattgtggagatattagaacacactatctctgaacagctggaacaaagaaaataaaacttaagatatgagagaccaaatgttgaaatacttagtttttgaatttaaaatgacataagaacttcttagaaatcaaaattgtagccagatggctattatatctcatttcagtagaacacatacagcaggaaggtaggaacactacccacattatcacatttgccaactaaatagaagatgattttgagaaactgcctttcctagtcattagaagagacagaaatacagagtaagtagtagagggaagagtctgaaaaataaaatgaacattgttactgataaaatgtgtctttttaaattattaaacttaactacccacagtaaaagacgtgaatacttaaataacacaaataagtatcttttactagttccaaaaatgtagatttttttaaaatgtggtctagctgcaaaaattatacagccg

SEQ ID NO: 256382 - DNA, 431 bp, Homo Sapiens
tcctgagctcaggcaatcggccaccttggcctctgaaagtgctagaattacgggcatgagccaccgcatccagccagaaagatacatatctaattctagaaatagcatgcagtatcagtcatagtaacagccatgtgctgacctaaataaaatttcttgatattgtgtatttaacctgaagtattgagctagttatattgttttgatttttggtgctgaacattttggtctaattctttggcttcttagaacattttaaaaaatctatgttttgctatcagccaaagtaaatgtgttcacactaacatataagttactaaccttcattatacagcaaagctaaaaagtggtgggatatttggggtcttaatgaaaattgtatcatttaattccataaatattaagttctatattcattcagtttaatctca

SEQ ID NO: 256383 - DNA, 698 bp, Homo Sapiens
ttgcaccagcttgtagaaatcattaacagacccaacacaccaaagacgttgttagagaatacagcaataacaattggtcgtcttggttacgtttgtcctcaagaggtggcccccatgctacagcagtttataagaccctggtgcacctctctgagaaacataagagacaatgaggaaaaggattcagcattccgtggaatttgtaccatgatcagtgtgaatcccagtggcgtaatccaagattttatatttttttgtgatgccgttgcatcatggattaacccaaaagatgatctcagagacatgttctgtaagatccttcatggatttaaaaatcaagttggcgatgaaaattggaggcgtttctctgaccagtttcctcttcccttaaaagagcgtcttgcagctttttatggtgtttaatctaatacacttaagctgcagtcccaaaattaggggtccttcagtcttggagactataagggagcctctgcacccagggaaaatgttaccctttacaggggggaagggtaaaccagtagggaatacagtacaatcccaaccctactgggaggggcgggagggaggtgttgccgtcactgtattaagtcgatgttgggaaacgttttaacatctggagcctttgtgggtggaaatatgtctccagttacaactccgcagtggatgtgaagaagcaa

SEQ ID NO: 256384 - DNA, 573 bp, Homo Sapiens
ttcccgtggaggtaatttgtccaggtcatgtacaactcgctgggggattttaagtacagtgcgtactgctggaatccggagacaggatacttggaccagggaaaacaaattggaggagagccagtacataaacactgccgtggggaaatgcatggttatgggcaaggttatcaggggcatcattctgatgacatttctcatccactgaaggtcagaactttgcacacctgtctcagcacctagctcaagaacagcccacattgtagcagtgactgccagtggtaatatgtagatgggatcggataccgtgagatcctggaaccaccagaggccacctgtctgcaggctgggcacaggaaggttggccatctctctcaaagcaatgaagaaggagatgaagattggggcctattacacaagataaacagtgtcagcatgctttaccagagagaacattttcatcaccccactactgaaagccatgtataatccaccaccacctgttttttgggggacctgggacacatgaaacacagagaggaaatttcatgggtactggatgaaataaggaag

SEQ ID NO: 256385 - DNA, 1573 bp, Homo Sapiens
gcaaaagcaagtcctcttccgggcaaaatggcgatgggactaatgtgcggacgccgggagcttctgcgcttgctacagtccgggcgtcgggtccacagcgtcgcagggccctcgcaatggcttgggaaaccgctgaccacacggctcctattcccagtagccccgtgctgctgtcgcccacactacctcttccttgcggcttccggcccccgcagcctcagtacctctgctatctcttttgcagaagtccaggttcaggcccctcctgttgttgctgcaactccctcacccacagcagtacctgaggtggcttctggagagactgcagatgtagtccaaactgctgcagagcagagcttcgctgaactggggctggggtcatacaccccagtgggactgatccagaatttactggaatttatgcatgttgatctgggcctaccttggtggggggccattgctgcatgtacagtctttgcccgctgcctgatttttcctctcatcgtgacgggccagcgagaggcagccaggatccacaatcacttgccagagatccagaagttttccagtcgaatcagagaggccaagttagcaggagaccatattgagtattacaaggcttcctcggagatggcactttaccagaaaaaacatggtattaaactctataaacctctcattctccctgtgactcaggccccaatcttcatctccttcttcattgctttgagagagatggccaaccttcctgtgcccagcctgcagacaggtggcctctggtggttccaggatctcacggtatccgatcccatctacatattaccactggcagtcactgctacaatgtgggctgttcttgagctaggtgctgagacaggtgtgcaaagttctgaccttcagtggatgagaaatgtcatcagaatgatgcccctgataaccttgcccataaccatgcatttccccacggcagtgtttatgtactggctctcctccaatttgttttccctggtccaagtatcctgtctccggattccagcagtacgcactgtacttaaaatcccccagcgtgttgtacatgacctggacaaattacctccacgggaaggcttcctagagagcttcaaaaaaggctggaaaaatgctgaaatgacgcgtcagctgcgagagcgtgaacaacgcatgcggaatcagttggagctagcagccaggggtcctttacgacagacctttacccacaaccctctcctacaacctggaaaggataaccctcccaatatccctagcagcagcagcagcaaaccaaagtcaaagtatccctggcacgacacacttggctgacttatgttctgtgcgcattctggcaggaattctgtctcttcagagactcatcctcaaaacaagacttgacactgtgtccttgccccagtcctaggaactgtggcacacagagatgttcattttaaaaacggatttcatgaaacactcttgtacttatgtttataagagagcactgggtagccaagtgatcttcccattcacagagttagtaaacctctgtactacaaaaagaaaa

SEQ ID NO: 256386 - DNA, 1000 bp, Homo Sapiens
  misc_feature (726)..(726): n is a, c, g, or t
gctgggtggcgtgggactaatgtgcggacgccgggagcttctgcgcttgctacagtccgggcgtcgggtccacagcgtcgcagggccctcccaatggcttgggaaaccgctgaccacacggctcctattcccagcagccccgtgctgctgtcgcccacactacctcttccttgcggcttccggcccccgcagcctcagtacctctgctatctcttttgcagaagtccaggttcaggcccctcctgttgttgctgcaactccctcacccacagcagtacctgaggtggcttctggagagactgcagatgtagtccaaactgctgcagagcagagcttcgctgaactggggctggggtcatacaccccagtgggactgatccagaatttactggaatttatgcatgttgatctgggcctaccttggtggggggccattgctgcatgtacagtctttgcccgctgcctgatttttcctctcatcgtgacgggccagcgagaggcagccaggatccacaatcacttgccagagatccagaagttttccagtcgaatcagagaggccaagttagcaggagaccatattgagtattacaaggcttcctcggagatggcactttaccagaaaaaacatggtattaaactctataaacctctcattctccctgtgactcaggccccaatcttcatctccttcttcattgctttgagagaggatggccaaccttncctggtgcccagccctgcagacagggtggccctctgggtggttccaaggatctcaccgggatcccgatccccatcctacataattaccaccgggcaggtcactggctacaaatgggggggctgggtccttgaagctaagggggctgaagacagggggtggcaaaagttccttgacccttccaggggggaaggaaaaaaatgggcctcccgaaaatggagggccccctgaataaacccttgggcccataaaacactggcagtttcccccccacgg

SEQ ID NO: 256387 - DNA, 791 bp, Homo Sapiens
  misc_feature (727)..(727): n is a, c, g, or t
  misc_feature (747)..(747): n is a, c, g, or t
  misc_feature (762)..(762): n is a, c, g, or t
  misc_feature (770)..(770): n is a, c, g, or t
gggttgctgcaactccctcacccacagcagtacctgaggtggcttctggagagactgcagatgtagtccaaactgctgcagagcagagcttcgctgaactggggctggggtcatacaccccagtgggactgatccagaatttactggaatttatgcatgttgatctgggcctaccttggtggggggccattgctgcatgtacagtctttgcccgctgcctgatttttcctctcatcgtgacgggccagcgagaggcagccaggatccacaatcacttgccagagatccagaagttttccagtcgaatcagagaggccaagttagcaggagaccatattgagtattacaaggcttcctcggagatggcactttaccagaaaaaacatggtattaaactctataaacctctcattctccctgtgactcaggccccaatcttcatctccttcttcattgctttgagagagatggccaaccttcctgtgcccagcctgcagacaggtggcctctggtggttccaggatctcacggtatccgatcccatctacatattaccactgggcagtcactgcttacaatgtgggctgttcttgagctaggtgctgagacaggtgtgcaaagttctgaccttcagtggatgaggaaatgttcatcaggaatgatgcccctggataaaccttgccccataaaccatggcattttcccccacggcagtgtttttatggtnactgggctcttccttccaanttttgtttttttccncgggggtnccaagttattcctgtttttcc

SEQ ID NO: 256388 - DNA, 399 bp, Homo Sapiens
  misc_feature (13)..(13): n is a, c, g, or t
  misc_feature (28)..(28): n is a, c, g, or t
  misc_feature (104)..(104): n is a, c, g, or t
tggccttaaatanaattgaaccccctgnaacttggaacctgaaacagttctggattccaagtcccccagagacttcctttttcttccagttggatgaatttggnaaagtcatctcctcagagtcagcttccctcatcccataaaatggagataacaatccctcacagagttgctgtgaggtttaaatgagataatatgtgtgactgtggtaaaagtcatcagtaaaggttttgcaaatgaataagacaagaaagaaaacagcagccccatcagcatcagcagtggccttgctgtgagtgccaagccaggacactgctgatgctgatggggaaatgcatggttatgggcaaggttatcaggggcatcattctgatgacatttctcatccactgaaggtca

SEQ ID NO: 256389 - DNA, 522 bp, Homo Sapiens
  misc_feature (418)..(418): n is a, c, g, or t
  misc_feature (456)..(456): n is a, c, g, or t
  misc_feature (487)..(487): n is a, c, g, or t
  misc_feature (492)..(492): n is a, c, g, or t
gtctctacaaaggatgggatgtgaagcaatcctcaagagaaagttttctaaaccaatccgtcgcctctccacaaaatctggatccatgttgtcagcagagagtttatgccaaacaaattctgcccgtttttctggcagaggtggcacaacaatatgtggatagtaaactaaaaggtagcatctcaacaactcaaattcactatatcgccgccatagtgagtctgttaggacactctgaccatcggtatgttcaactgaccttgtttcaatgaggtaagcagtatatgtttcttgcatgttcatggcatttcttccagttcgtttttctgcttctgaaacactgatttctatcttcttcaaccaaaaattattgtgtgtcatcgtgtcgaccccagagctctcttctccggccccctcngcttccttgccgaccgcagcccccagcccagcgtctgnggagcccaggctccaagggcgccggcatgantgccngctcggggtccggaggtgcctgctccagtg

SEQ ID NO: 256390 - DNA, 519 bp, Homo Sapiens
  misc_feature (349)..(382): n is a, c, g, or t
atttatgtgaaaacagtcttgaggcagggacatggagaactatgcaagggtgatttctttgactgaatatatacaaggctttacttctgtcccctaattcttccattgaatgtgtacctctaccttgtcatgtcatggaagatacaacattcggaagatctgacaatcggaatgactttggaataataaaattgactaattggaaattttgcatattctgaaaatctaatctcatagttctaatttgtacctatggcaaataagggcttctggacatcatgtttaaaatgttaagcataagaaataaactgacatttgtaataggtgactttctgatggaaagcaagcnnnnnnnnnnnnnnnnnnnnnnnnnnnnnnnnnnctttttgtgaaatgtctatatactttttaaggtaattaatgaagatttcagttattgcttttaagcataaagttgtatttagcttctgctgaaaaattgtatcatataataattttgcttcattgaaaagggatgtt

SEQ ID NO: 256391 - DNA, 501 bp, Homo Sapiens
  misc_feature (421)..(421): n is a, c, g, or t
  misc_feature (460)..(460): n is a, c, g, or t
gacttgtttaaaatcgagaatgtcatgattgatgaaaagaactggttatcaatatttttaaaaattatttaagtaatatcttaggaacatcatttatatttaaaaatcagtctgggtataattgagacacagctttttaaacataacatgcatttatctaggggcctttgtcagaaatcagagcttttattatgttggtctaaagttagtacatttctggtaatggaaaaaagtgaaccaggttaattcccaatacctagacaggtggaagcaaagctctgccagatccctgaaagagagaagcaaagatatactctgaatgtatttccatctattctattttgatagaaaaatggtttactataacaatggaatattgggagaagagggtttaagctcgggaaggtgatgggatttcggnggaaagataaaaagcactcaggaacctgcctaagaatanaaagactccctgggggtggaggtagagggggtggggttggg

SEQ ID NO: 256392 - DNA, 1064 bp, Homo Sapiens
caactctaatgggacgaatggagaggcacccaaatgccccaatagcagtgcggagtcttcatgcacaaacaaaagtgcttcaagcttcaaaaattcctcccagggctgcaaattaacaaacttgcaggcggctgcagctcagtgccatgccaattctttacctttgaactccacccctcagcttgataatagtctgacagaacattcaatggacaatgatattaaaatgcacgtggcgcctttagaagttcagtttcgaacaaatgtgcactcaagccgccaccataaaaacagaagtaaaggacaccgggcaagccgactcacagtcctgagagaatatgcctacgatgtcccaacgagcgtggaaggaagcgtgcagaacggcttacctaaaagccggctgggcaataacgaaggacactcgaggagccgaagagcttatttagcctacagagagagacagtacaacccaccccagcaagacagcagcgatgcttgtagcacacttcccaaaagtagcagaaattttgaaaagccagtttcaaccactagtaaaaaagatgcgttaaggaagccagctgtggttgaacttgaaaatcagcaaaaatcttatggcctcaacttggccattcagaatggaccaattaaaagcaatgggcaggagggacccttgctcggtaccgatagcactggcaatgttaggactggattatggaaacacgaaactactgtgtaacattgctgggcttcctaggcagaaattcatataaactgtgatactcacattccttgaagctatgagcatttaaaaactgtttacagccaccatagggattcaaaagaatttggaataaactttgaagttttggattttacttatttttatccccaaattgttgctattttttaggatctgaaacaaaatctttctaaaacattgttttagttgtcaaagcaccaacaggacattttgggatgtgaaatgtaatttcttggaatctgtaatttgtacttaatatttcaggcttgtatttaatataataaataggtgtttgttaaaaaaa

SEQ ID NO: 256393 - DNA, 725 bp, Homo Sapiens
ctggggtgggttgtactgtctctctctgtaggcaggtaagccgttctgcacgcttccttccacgctcgttgggacatcgtaggcatattctctcaggactgtgagtcggcttgcccggtgtcctttacttctgtttttatggtggcggcttgagtgcacatttgttcgaaactgaacttctaaaggcgccacgtgcattttaatatcattgtccattgaatgttctgtcagactattatcaagctgaggggtggagttcaaaggtaaagaattggcatggcactgagctgcagccgcctgcaagtttgttaatttgcagccctgggaggaatttttgaagcttgaagcacttttgtttgtgcatgaagactccgcactgctattggggcatttgggtgcctctccattcgtcccattagagttggggggctggacgttgacttgcactgaatacgagctccgtcctgggcagcaagtcatgatccacgcaagtctaacatcctccctattaacacaatggtggaccatgaagaacgcactgaagcttaaacttgtggctccaaaaacgaagctaaaaaccaagtccaaagggtaatacaaagaaacagccaaagccccaaacatccacagtgcaacatataagagcaaagtaaggctggcccccaagacctgagaatgaaaagtgtgctcattttccagggttgatgtaaaaacaaaatcctcgg

SEQ ID NO: 256394 - DNA, 679 bp, Homo Sapiens
  misc_feature (130)..(148): n is a, c, g, or t
ataaatatagatgaaaaagctataccctttcggggtttttggtgaaccaagagaggaataaataattgcccatttgtaattaagaaatccaaattttttcttttgtaataaaagtccatcacatgaggcnnnnnnnnnnnnnnnnnnngcttaaaaaataattaacacacacatcaggttcagaatcagacccaccaagtggtacagcacagtaaaaacccatggaagcttgggtctgtgacctggaaaattctactatgggtccaacacagcctctgaccactgagagtaggagagatacttgttaagcagcactccagctgacccccccggcagtcataaaattaagtgcataacacaaaaagaacaggggaaaatagagaaaatattttatgtcactaatctataggccagatccaaagccaattccactgtgaaactcaattcttgcccccactactttcagtatcactggaacaaacacatcgtcaatttctaacaatcgtttctcaaaaaggtaagctgagtaaataagttgtataaaacaccaccaatctagctttacaaagattgtgtttgacgggttaaatgagagcagagaaaaaccagaaacttgacgagcactgctcttaccaggaattaaatgtaggcgttggaaaatgaatgcaaaatatatcca

SEQ ID NO: 256395 - DNA, 544 bp, Homo Sapiens
  misc_feature (269)..(286): n is a, c, g, or t
ttttttttgtgcgcaggcagcttaagttcataggaagaaataaggttctgatatgtttagagtgcacattttaaaacaacaaaataaaaatttcaagcatgtgataaaaatattgatttttataatacagtattgctttataaatatagatggaaaagctataaactttactggtctttggtgcatccagagagggataaataatttgccatttgtaaattagaaatccaaattttttcttttgttataaaagtccattacatgaggcnnnnnnnnnnnnnnnnnntgcttaaaatataattaacacacacatcaggttcagaatcagacccaccaagtggtacagcacagtaacaacccatggaagcttgggtctgtgacctggaaaattctactatgggtccaacacagcctctgaccactgagagtaggagagatacttgttaagcagcactccagctgacccccccggcagtcataaaattaagtgcataacacaaaaagaacaggggaaaatagagaaaatattttatgtcactaatct

SEQ ID NO: 256396 - DNA, 613 bp, Homo Sapiens
ttagtctccaatcccatctaggttgctgcaaatgccattatttcattcttctttatggctgagtagttttccactgtgtatgtataccacagtttatcttcttgttgattgatgggcgtttgggctggttccacattgttgcagttgcaaattgtgctgctgtaatcgtgtgtacaagtatctttttcatgtaatgacttttttgctctgggcagatactcagtagtgggattcctgggatcaagtggtagttctacttttagttcctttaaggaatttccacgctgttttccatagagttctttttttggtatatgccttttattttttaaggaaataaaatttacagttagagttgaagtgtcattcctttcctatcccgttttctttctttttcaccaaaagtaaacactggattgaatttggtggtaataacatatatatttgattttggaagccttttgttgattgggcttgctagatagttattaattttaaaaactgactttctgtttaattaataccatactgcttacgttcaaaaaaacaattgaaaaatttttcattttgattattcaatttcttacaggatatttggtttttgctgtcaaaa

SEQ ID NO: 256397 - DNA, 635 bp, Homo Sapiens
ccatttggaacaagtaaataatcctgcatgtgttaaatgtaagcttactttaattactaaatattcagacatttggttcatcaggctcaatctttagaagtacacttttagtaatggttaaaaattcactgttaactttatgctaccaaactaaagaccaaatcattcatttttatatagcactgtcacagaatagagcaatgagaagcacagctcctgtcctgggaacccacggtgtaaaggacaagtaaagactggattaaaattaaatctacaaaatactgtgacagaggtatggcccagtgcaccatggaaacaaggaagaaatggggagggcagaggtttcaaggggaaatgcttgcgttgtattttgaaagaccaacagaaatccatatagaaggcaagtgtgggaagacacatggatgaggaaaaattaatgcaggaaaacctgccaagtagataggtaccactatagcagattatgcacataggagaaaaggcctgaaatgaagatggaatgggcaaaagtcaaatcatgatgtgccatttatgctatactcagaaattaaaatcaatcctgaagaaaatggggcacaattaatagagcacctcacctgtaagatcagttttgtgtc

SEQ ID NO: 256398 - DNA, 623 bp, Homo Sapiens
  misc_feature (34)..(34): n is a, c, g, or t
  misc_feature (105)..(105): n is a, c, g, or t
agtattcctagaccttgtactaatctcattgtcntatgctcaggcaaacgtttgcaacagccagggaaaacaactgcagattgagacttgagcgagaagggtggnagatggtccttagcagatcctggggcctggggatcacctgctccctgggatcaacagaaccagctgtggagaatctgctcgacagtggccttggaacagctgcggctgctgcaccaagaagggagggcaggagggcggagcggtactggtggaagggtgagctaggaggaaaggctgcaaggaccctgccacgccacctcccggcaaaccaggaagtatttttgcagtaagtgcattggactgagccaccttttgaacctacccgaagtgttaacagcgcacagcaggccttagatgggtgcaataactgcaaactctcaacgggctggtgcctaagaggctacgggctggcagctaaatagagcccggcgcagtgagtcgcgttgtccgaaagtacacagagtggagccagccgactgtgctgtctttgcaaaccgtgaccgagcaaagtccgcggtaaacaagcctcgcagcagctgcctccggatgagcgccccctgctcattcctccacccagc

SEQ ID NO: 256399 - DNA, 277 bp, Homo Sapiens
  misc_feature (175)..(192): n is a, c, g, or t
ttacagataaagaattcgctttattgtataaatgacaatttcaacaagggtacaaattagatataattatataaactgaatatttacatccaatttacatccatcattctattaatgagcattttaaatatataatacaattcagaatgataaagatatctacattaaggcatcnnnnnnnnnnnnnnnnnngaaagcaaagacaggaagtctacttgcccactcagtaattaacaaagatttatgtaaaattcccacaaattgatctcagaatcag

SEQ ID NO: 256400 - DNA, 639 bp, Homo Sapiens
  misc_feature (216)..(216): n is a, c, g, or t
cactccattcataaatcggttaatcaaaatgtataagttctaataacctagaggaagatatattaatgtctacagttgtaaataccaggatggtgaaggatttaaggctaaaatttaaggataatatacactttggctctactaaaaccaagaaaaaatagcttggcaatggtggtgcacacgtgtggtcacagctacttggagggttgacgtggnaggatcacttgagcttgggaagttgaggttgcagtgagcaaagatagcacccttgtactctaccttgggcaacgggagtgagagcgtgtgtcgaaaaccaaataaaaataaaaataattgaatattttagaatgacttgagacacatttaatatgttaagtaaaaacaacaggatgcaagtatctcatatttttaaaaaaggcaattgcaacttttacatgcaaatctcacacacacaaaccccccaaaacaattactaaactatgattcaccaaaatactaacagtggttatctctaattagtcaaataatttaatattcttgatatttttcaaattataatatgcaagaatataatttaatattgacatttttcaaattataatatgcacatactacctatataatcagaagatttaaaaa

SEQ ID NO: 256401 - DNA, 791 bp, Homo Sapiens
ggtagtgaagttgtgcaacggccagggttgtgctttctagcaaatatgctgttatgtccagaaattgtgtgtgcaagaaaactaggcaatgtactcttccgatgtttgtgtcacacaacactgatgtgacttttatatgctttttctcagatctggtttctaagagttttggggggcggggctgtcaccacgtgcagtatctcaagatattcaggtggccagaagagcttgtcagcaagaggaggacagaattctcccagcgttaacacaaaatccatgggcagcatgatggcaggtcctctgttgcaaactcagttccaaagtcacaggaagaaagcagaaagttcaacttccaaagggttaggactctccactcaatgtcttaggtcaggagttgtgtctaggctggaagagccaaagaatattccattttcctttccttgtggttgaaaaccacagtcagtggagagatgtttggaaaccacagtcagtggagcctgggtggtacccaggctttagcattattggatgtcaatagcattgtttttgtcatgtagctgttttaagaaatctggcccagggtgtttgcagctgtgagaagtcactcacactggccacaaggacgctggctactgtctattaaaattctgatgtttctgtgaaattctcagagtgtttaattgtactcaatggtatcattacaattttctgtaagagaaaatattacttatttatcctagtattcctaacctgtcagaataataaatattggaaccaagacatggtaaaaa

SEQ ID NO: 256402 - DNA, 1674 bp, Homo Sapiens
  misc_feature (734)..(743): n is a, c, g, or t
  misc_feature (819)..(900): n is a, c, g, or t
  misc_feature (964)..(988): n is a, c, g, or t
  misc_feature (999)..(1015): n is a, c, g, or t
  misc_feature (1102)..(1110): n is a, c, g, or t
  misc_feature (1144)..(1154): n is a, c, g, or t
  misc_feature (1284)..(1333): n is a, c, g, or t
  misc_feature (1481)..(1502): n is a, c, g, or t
  misc_feature (1551)..(1551): n is a, c, g, or t
ctttctttcccgagcttggaacttcgttatccgcgatgcgtttcctggcagctacattcctgctcctggcgctcagcaccgctgcccaggccgaaccggtgcagttcaaggactgcggttctgtggatggagttataaaggaagtgaatgtgagcccatgccccacccaaccctgccagctgagcaaaggacagtcttacagcgtcaatgtcaccttcaccagcaatattcagtctaaaagcagcaaggccgtggtgcatggcatcctgatgggcgtcccagttccctttcccattcctgagcctgatggttgtaagagtggaattaactgccctatccaaaaagacaagacctatagctacctgaataaactaccagtgaaaagcgaatatccctctataaaactggtggtggagtggcaacttcaggatgacaaaaaccaaagtctcttctgctgggaaatcccagtacagatcgtttctcatctctaagtgcctcattgagttcggtgcatctggccaatgagtctgctgagactcttgacagcacctccagctctgctgcttcaacaacagtgacttgctctccaatggtatccagtgattcgttgaagaggaggtgctctgtagcagaaactgagctccgggtggctggttctcagtggttgtctcatgtctctttttctgtcttaggtggtttcattaaatgcagcacttggttagcagatgtttaannnnnnnnnnaacaacattaacttgtggcctctttctacacctggaaatttactcttgaataaataaaaactcgtttgtcttgtcnnnnnnnnnnnnnnnnnnnnnnnnnnnnnnnnnnnnnnnnnnnnnnnnnnnnnnnnnnnnnnnnnnnnnnnnnnnnnnnnnncctaaccaaaaacaccgcaagagcacataccaaaacgaaatcctcaatcattacccgggggacnnnnnnnnnnnnnnnnnnnnnnnnntttttgggcgnnnnnnnnnnnnnnnnnaaaaaatctttttaaaaaactctttttcttggccggccgccccccccaggggaaaagaaagacacggggaaacgactcttttccccnnnnnnnnnccccggggagaaaagaaccggaggggtttgttannnnnnnnnnnaaataaataaaacacgcccggggggggaaacaccgcaggctcctttaaaaaaaatccaccaaaagggcccctttccgcggcggcccccacccgcgtgggccccttctcgcgagcaaagggattcctacannnnnnnnnnnnnnnnnnnnnnnnnnnnnnnnnnnnnnnnnnnnnnnnnnggctccgttgtacggaagagagaggggcgggagaacttctctacaaaaaaattcttgtccccgccgctatgtggaacacccactccccacaacacctagtgtactgctcaacaaacacttgattttcgcccatgcgggcaactcttannnnnnnnnnnnnnnnnnnnnnggcgagataaatatactttcccgccgcgggaggaaaaacacgcgccggngaaaaaaattaatttctttaattattcgccaccccatttataacacacaagagcgggggggaccacacccccccgccgggtgttgtgggcgcacacaaaagaatatattttgtttttaataag

SEQ ID NO: 256403 - DNA, 443 bp, Homo Sapiens
atcacatgttagcaatggaaacaatagataaagccaaggaagtgggagccacgattgaatcatatatttcctactgtggtgggcttccagcccctgaacattcaaacaatccattgagatataaatttagctggagtccagtgggagttttgatgaatgtaatgcagtctgccacctatctgctcgatggaaaggttgtgaatgttgcaggaggcatctcctttcttgatgccgttacgtccatggatttttttccaggattaaatttggaaggctatcctaacagagacagtacgaaatatgctgagatttatggcattacttctgctcacactctgatgcgggggacactgagatataagggattggaatgctgaataatggattggaatgttgaataatgttgaataccttcctatggtatcctccctaactccttcccc

SEQ ID NO: 256404 - DNA, 958 bp, Homo Sapiens
cgccctcctcgtccgcccaacctgcggcctgtggaggcgtgaggcgacgacaggcgagcgcctcgagcagcgttagccgctgcggccgccggtcctccctccacctgctcctcggccccccctcgcttacctcctcccacttcccgagctccggcgtgtaccggccacgctcgacgctgctgcaggaacaaaggaagaccccgcggcggcggcggcgccacctccgcctgctgctccgacccgctcccggcccgcggcggcggcaccagggcgcccggctcatccttcccggaggcctcggcccggcctcatcgtgccggcttcggcgcgaacccggctttcgcatttgggaccctgcagggccctgaaaaggagcctttaaaagtcaattctactccatttggcaaagagggaactgaaatctggaaagtaaggacttgcccaaggtcactgacttagtggcagactagagacttgaactcaggtctccattcccagcagaaaaatatggctcaggagactaaccagaccccggggcccatgctgtgtagcacaggatgtggcttttatggaaatcctaggacaaatggaatgtgttcagtttgctacaaagaacatcttcagaggcagcaaaatagtggcagaatgagcccaatggggacagctagtggttccaacagtcctacctcagattctgcatctgtacagagagcagacactagcttaaacaactgtgaaggtgctgctggcagcacatctgaaaaatcaagaaatgtgcctgtggctgccttgcctgtaactcagcaaatgacagaaatgagcatttcaagagaggacaaaataactaccccgaaaacagaggtgtcagagccagttgtcactcagcccagtccatcagtttctcagcccagtacttctcagagtgaagaaaaagctcctgaattgcccaaaccaaaga

SEQ ID NO: 256405 - DNA, 378 bp, Homo Sapiens
gcaggattcggcacgaggccatgtggagactctgaggaggcagatttagcttcagccttgtacttgggagtacagagtcagagtttggaggtgcagctgagtctgaaggacactgccggtctccatccttggggcgcacagggttctgtcatgaggataataggtagagatggtctccatccttggggcgcacagggttctgtcatgaggataataggtagagatgagtgtgcccatagtcctgtgtggacttaggagttactagtgacagcagcaggtgaaattaagacccttggttgttgcagggagggtcccagggaaatggggaggggtgaagacccaaggaggttgaagggaaggtggtgcagcagtgtgaga

SEQ ID NO: 256406 - DNA, 933 bp, Homo Sapiens
  misc_feature (840)..(840): n is a, c, g, or t
gagccgtttggaggggccgtttctggtagttgtggcttttatgctttcaaagaatttcttcagtccagagaattcctcctggcagccctgtgtgtgtcacccattggtgacctgcggcagtatgtacttcagtgcacctactgcttactgttgctttagtcactaattgctttctggtttgaaagatgcagtggttcctccctctcctgaatccttttctacatgatgccctgctgaccatgcagccgcaccagagagagattcttccccaattggctctagtcactggcatctcactttatgatagggaaggctactacctagggcactttaagtcagtgacagccccttatttgcacttcaccttttgaccataactgtttccccagagcaggagcttgtggaaataccttggctgatgttgcagcctgcagcaagtgcttccgtctccggaatccttggggagcacttgtccacgtcttttctcatatcatggtagtcactaacatatataaggtatgtgctattggcccagcttttagaaaatgcagtcatttttctaaataaaaaggaagtactgcacccagcagtgtcactctgtagttactgtggtcacttgtaccatatagaggtgtaacacttgtcaagaagcgttatgtgcagtacttaatgtttgtaagacttacaaatgcagtgctgagctgtgggcggtttctggggatgtcccagggtggaactccacatgctggtgcatatacgcccttgagctacttcaaatgtgggtgtttcagtaaccacgttccatgcctgaggatttagcagagaggaacactgcgtctntaaatgagaaagtatacaattctttttccttctacagcatgtcagcatctcaagttcatttttcaacctacagtataacaatttgaaataagg

SEQ ID NO: 256407 - DNA, 514 bp, Homo Sapiens
  misc_feature (117)..(156): n is a, c, g, or t
gtgtgagccaccacaccaagccggttgggtgtacttttcaggtgttctcagagcagcctaagctttccctaagcgtcacctcactatacacttggccgcaacctcccaatccacttnnnnnnnnnnnnnnnnnnnnnnnnnnnnnnnnnnnnnnnntgcaggaaggagccctgggagctggaggaaaccagaaatggccctgccttgaaggagatccctgaaggcaaggaagccaagagagagattaaatgaagccaagaaagaagctgggggtgcaggtccagatacaattaactacatacaagttcccagggtacacaagaggatgtacatggaagggcggggagtgaggtcagcagtcaaggagtagtgcaaagatcagactgaagtcaggcattgagacaagagagctccatttctaactcaccatcactgttacacagagatactcttttaggcaggttcacacaggtgggacaatatctccataccttgtaaaaatgcaccaatttcc

SEQ ID NO: 256408 - DNA, 287 bp, Homo Sapiens
ttaagcccctttctttaaggctcaagggcatattttcacactgcagtgcatcacaaccgttttcattcttccagtgttcctttcttctggtctccagccacctgaagtcttccctcatcaatgccctccatgatcagcctttgactctggaatcccttaatatattcctcagatcattagaggttttctgagtcatcatctgagatttttcattaaattgtggagtttgagcagccagtcctgagctgtcggactcagttccaaatagaagtcctagttaaagacac

SEQ ID NO: 256409 - DNA, 536 bp, Homo Sapiens
  misc_feature (13)..(13): n is a, c, g, or t
  misc_feature (25)..(25): n is a, c, g, or t
  misc_feature (36)..(36): n is a, c, g, or t
  misc_feature (62)..(62): n is a, c, g, or t
  misc_feature (80)..(80): n is a, c, g, or t
  misc_feature (125)..(125): n is a, c, g, or t
ccaaggaaccccnaaaaacccggcncggggtgaaancctgacccgcaaaaaaaccccgaaanccaagaccaggccttgantgtgtgaaaaagaagtgtgccaacaagccttaaaggaaccgtgcnaaatgtgcaacacgtttgtggaaaaggagggtgttcctggccctgaagaagcctaaagaagaggcatgtcccagtaatgctttgcagggtgtgtttgcctcttttcccatgccccatgcaacccagattggggtggagcaggaaggagctcttttctgttcccaagcctcagaactcttgagctgtggcttacttgctgtcttcacccaggttcaagctccgtgggccacactgctgctgtgccaagaaggtgtacagcctccccaggatggggcctcatacaacccttcatctgcactcaacatttaatcgtgtccttgctgtctttttattttcctttttgttagcaaaaacctctatttagatttcaataatcagagaagtgtaaaataaaacagattatattgtaag

SEQ ID NO: 256410 - DNA, 908 bp, Homo Sapiens
  misc_feature (328)..(328): n is a, c, g, or t
  misc_feature (384)..(384): n is a, c, g, or t
  misc_feature (389)..(389): n is a, c, g, or t
ggtcagtcagtcataaacagccagacctttgtggtgctctacctgctggcagcctgatccaggtgacaatcctgctgtacctggcagaagtgatggttcggctgacttggcaccaggccctggatcctgacaaccactgcatcccctaccttacagggctgggggacctgctcggtactggcctcctggcactctgctttttcactgactggctactgaagagcaaggcagagctgggtggcatctcagaactggcatctggacctccctaactgggccccgctggtcccatttgctcattagaatttcctctcacatcagtgggatnacagaattcagtttctcccttgccaggtccttgggatggttgacccctgcctctgncagtnagccttttgtgagtctgctaaggtagctctcacacacctcggctctggggttgatacctgagcctgcaatagagccctgaaatcaagagcatagcttgagtgtgtgaatatgatgtgtgcacatgcttaatgagcgtgcaagtgtgcacacgtttgtggagaggagggtgttctggcctgagaaggtaaagaagaggcatgtccagtatgctttgcagggtgtgtttgctcttttccatgcccatgcaacccagattggggtggagcaggaaggagctcttttctgttcccaagcctcagaactcttgagctgtggcttacttgctgtcttcaccaggttcaagctccgtgggccacactgctgctgtgccaagaaggtgtacagcctccccaggatggggcctcatacaacccttcatctgcactcaacatttaatcgtgtccttgctgtctttttattttcctttttgtttgttagcaaaaacctctatttagatttcaataatcagagaagtgtaa

SEQ ID NO: 256411 - DNA, 250 bp, Homo Sapiens
gccccagggcagttaaaatggacagaaatgaaaggatcgcattacaggtttcataaaaactggttattccaggcatatgttaatgaaattcacgcattttgtgtttattggaataccgaatggtcatattcaccagcattgaattaatgtgttaaagtgaggttttgatgacattagttgcacatgacctttagttgaaaatttttttcaagaagtaaaattaaagcaatgggtaaaataaaaaataaaa

SEQ ID NO: 256412 - DNA, 1595 bp, Homo Sapiens
  misc_feature (14)..(14): n is a, c, g, or t
  misc_feature (31)..(31): n is a, c, g, or t
  misc_feature (37)..(37): n is a, c, g, or t
  misc_feature (50)..(50): n is a, c, g, or t
  misc_feature (56)..(56): n is a, c, g, or t
  misc_feature (68)..(68): n is a, c, g, or t
  misc_feature (98)..(98): n is a, c, g, or t
  misc_feature (130)..(130): n is a, c, g, or t
  misc_feature (249)..(328): n is a, c, g, or t
  misc_feature (331)..(344): n is a, c, g, or t
  misc_feature (584)..(616): n is a, c, g, or t
cacctaagagttcnagaaatttaaagcctcnactttnaagaaaaacggancgggcnaaaagatgtcanacctgtaatccccagtactttgggaaggcnaaggcgggtggatcacgacgtcagggagtccnaagaaccagcttgacatggtgaaaccctgcctctactaaaaatacaaaaattagccgaagcgtggtgacacacgcctgtaatcccagctactcaggaggcaaggcaggagaattgcttnnnnnnnnnnnnnnnnnnnnnnnnnnnnnnnnnnnnnnnnnnnnnnnnnnnnnnnnnnnnnnnnnnnnnnnnnnnnnnnnccnnnnnnnnnnnnnngaaagaaaactcattctatttttctctttggagcagaggttgcaaaactgtgatgcctaacaaaaacgttgtgtataaaagctccaaaaccaagcattagcctaaattggctataactgcaacttaaatcaaaaactatatccaactagatcttcgttgtggctatgcaactttttgctttgtggcctgaaggtttttactgaggtaacaacctcttatctcttgtccttccctcaaccnnnnnnnnnnnnnnnnnnnnnnnnnnnnnnnnnctctacagcttccttcttcatggctgtctttggcaatgcttccaaatcttgaaagcaaaagaacctgctgaagtatatgaggaggatgaaaacactaaacatgacatatgaaaaccaatctaagcgtatgaattgagaaagaaaatactagaaggaaggcagagcagcagtcggccctcaacagaaaacaaaaaagaaggagggctgtaactgctctggcccttcttccatattatctcccaattagaagagcgtggaaccgaaaacttaaactctgaaaaggtaataactttcaaggaggagctacggaagtgaataaatgataaagaagaacagcagtagctttagctgtcaatgagtttctttgctctggcattggcaatatcaatacgatctctgttggtgtcagccttgtctgtgattcgttttatttgtggattttgagcatcaatctcattgcctatgttcagggccatgtcttttagatttcccaggatactgcccacttgagtcaggttctcttccatttcatcttctctggcatcattagttatgcgtttaatgtatccaccactggctgctcccgttgttggttgctgaagctgaccatttgtcaccgggcctggctgtttagatactacattgcaaggtgagttttctccaccatctccccatgttgtcttataagccttgccagactcaaagttctttgttctattacatgggcagacacaaaggccacagcatttgttgagttctgttaaagtcttctctgtctctctcatgtccttatttatttggtccaagccttcttctatgcggtttagttgttccttttgttcatccagcatagtgatggtcttgattcctgcatcctgagactcaatggctaaacccaggattctcctcgtactttccagagactcatcagtaatctggtgagctctctgttgaatttcttctgatgacagattatccc

SEQ ID NO: 256413 - DNA, 732 bp, Homo Sapiens
  misc_feature (438)..(438): n is a, c, g, or t
  misc_feature (441)..(441): n is a, c, g, or t
  misc_feature (443)..(443): n is a, c, g, or t
  misc_feature (446)..(447): n is a, c, g, or t
  misc_feature (451)..(451): n is a, c, g, or t
  misc_feature (462)..(462): n is a, c, g, or t
  misc_feature (464)..(465): n is a, c, g, or t
  misc_feature (473)..(474): n is a, c, g, or t
  misc_feature (478)..(479): n is a, c, g, or t
  misc_feature (486)..(486): n is a, c, g, or t
  misc_feature (504)..(504): n is a, c, g, or t
  misc_feature (570)..(570): n is a, c, g, or t
  misc_feature (664)..(664): n is a, c, g, or t
  misc_feature (699)..(699): n is a, c, g, or t
  misc_feature (710)..(710): n is a, c, g, or t
cccccaagtgaggacctaactccaaataatacaatagaatatgcaaattatcttcacatcaagagtaccccaagaaaaacgaaatccatggcacagacactgtacaagggtgcagggcagggctctgaggggcccaaaccccattttgccaactcgattttctagcattgaagggagcaaggggtcaggcatatgatggagatgatactgaaatgatttatccaaaatccatgcaaatcaagttctttggatagaggtgaagaacttggacatggctgtttcaggcagctgaagtcaaagggaatagtaattggggaaggggaagtgggcagaaaggattgttggccaatagaccttccactccagtagagagggaggacttggctctgagaacctccatctgacctaagaggaaccctcctctcctatggccatctnctncnccnntccntttaagtctcntnngtttcctnnttcnnccctttnccctttctttcccccttnccctttaggcaaaatttcaattgtcctgggggagaaaaggttgctgtcatgtccgaaagccctgtnggaggccgcttgaaggagttgggtgacagctgagggaaggggaagcttgctgacctggggccggggaaagcaggggggaacagaggagtacgtnggttggccacccacggggaggggaagccacttttncacaggggatnggtaggtccaggaacccggaga

SEQ ID NO: 256414 - DNA, 1613 bp, Homo Sapiens
ggggcgcaggcgcaacgcgactcccgaggcgcgggccgcccccttggctggtttggatccgggtcagtcgggtgccgagatttgggagagacgctctgaactgactgccccgcatcaccggagcgtcccagctgcgaggagtgtaaacaggaacatcgataagtagtgtaaaaacttgcacaatgaaatccgaagccaaggatggagaggaggagagtctacagactgctttcaaaaaattaagagtggatgcatcagggtctgtagcatctctgtctgttggagaaggcacaggtgtcagagcaccagtcagaacagcaacagatgataccaaacctaaaaccacatgtgcatctaaagacagttggcacgggtctacaaggaagtcttcacgaggagcagtgagaactcagcgtcgtcgacgttctaagtctcctgtccttcatcctccaaagtttatacattgcagtacaatagcgtcttcttccagcagtcaactcaagcacaaaagccagactgactcacctgatggcagcagtgggctgggaatttcatcccctaaagagttcagtgcaggagaaagctctacttctctcgatgctaatcacacaggggcagtcgttgagcctttgagaacttctgttccaaggctcccatcagagagtaagaaggaagactcctctgacgctacccaagtccccccaagcaagtctcaaagccagtgatctctctgactttcaatcagtttccaagctaaaccagggcaagccatgcacatgcataggcaaggaatgccagtgtaagagatggcatgatatggaagtgtattccttttcaggcctgcagagtgtccctcccttggctccagaacgaagatccacacttgaggactactctcagtcgctgcacgccagaactctgtctggctctccccgatcctgttctgagcaagctcgagtcttcgtggatgatgtgaccattgaggacctgtcaggctacatggagtattacttgtatattcccaagaaaatgtcccacatggcagaaatgatgtacacctgatagcaagaagctaattcatatgctttaaaccaatgaaggcttgtcaaagagatttagttaatggcagaccttgtggccactttgtgtgagaagacatctctttctgctcactgtgcttgcaataaaaacttttcttggcatctcagttaatcttcattctttcaacttactctcttgagttcttacatacacttcaaggcgagcggatcaaagaaaaatcccccttatttagaaatgttcctgggggatgaagaaaccataattacttgagactggcagcagtgggtatatggtaaaagcctttgtaaaacagtgcatttttcagatttgtttaaggtttgctagccaaggaaagtaaaatgtgattttgtaactgcactaaacatttgtcatgctgtagttgccagcccagaatattagaagttacaagactgatttaaaccgtctctgatttaatgcaagatatattgtgtctataaaggtttctcttgttattgttaagccagagatctaaggtttagattcaatttgaataaactagctggcctgca

SEQ ID NO: 256415 - DNA, 780 bp, Homo Sapiens
ggggggcgccgagatttgggagagacgctctgaactgactgccccgcatcaccggagcgtcccagctgcgaggagtgtaaacaggaacatcgataagtagtgtaaaaacttgcacaatgaaatccgaagccaaggatggagaggaggagagtctacagactgctttcaaaaaattaagagtggatgcatcagggtctgtagcatctctgtctgttggagaaggcacaggtgtcagagcaccagtcagaacagcaacagatgataccaaacctaaaaccacatgtgcatctaaagacagttggcacggatctacaaggaagtcttcacgaggagcagggagaactcagcgtcgtcgacgttctaagtctcctgtccttcatcctccaaagtttatacattgcagtacaatagcgtcttcttccagcagtcaactcaagcacaaaagccagactgactcacctgatggcagcagtgggctgggaatttcatcccctaaagagttcagtgcaggagaaagctctacttctctcgatgctaatcacacaggggcagtcgttgagcctttgagaacttctgttccaaggctcccatcagagagtaagaaggaagactcctctgacgctacccaagtcccccaaggcaagtcttcaaagccagtgatctcttctggacttttcaatcagttttccaaggctaaaccagggggcaagcccatggcacatggcataggccaagggaaatgcccagtggttaggaagatgggccatgaataatgggaag

SEQ ID NO: 256416 - DNA, 416 bp, Homo Sapiens
  misc_feature (43)..(43): n is a, c, g, or t
  misc_feature (73)..(73): n is a, c, g, or t
  misc_feature (102)..(102): n is a, c, g, or t
caaaggtaataaaactttgggaaggaatgaaaggaacaggaanacttaagaaagtccgaacgaacgcctgaanttcctccccctgcctccctccgtgaaaanacttcccttgtaagaacccgtgcccaactgtcctttaaaatgcaacatgtggttttaaggtttggtatcatctgttgctgttctgactggtgctctgacacctgtgccttctccaacagacagagatgcctacagaccctgatgcatccactcttaattttttgaaagcagtctgtagactctcctcctctccatccttggcttcggatttcattgtgcaagtttttacactacttatcgatgttcctgtttacactcctcgcagctgggacgctccggtgatgcggggcagtcagttcagagcgtctctccca

SEQ ID NO: 256417 - DNA, 457 bp, Homo Sapiens
gaaggtagattcgatgtgaaggatgaatctggcttgaccttctgggtggctgatgggccatttactgagatggggcagcctggaagaggaacagaagcagggtcggggtggagggagaatactaaacttagcttgagacattttgcaataaggaagctatatctagagtgcttatgtgactcacctaaggccactcaacaagtttgtggcagaactggattagaactgcacagaaaacagccaagctgggatttgaacccatgtagtccaactccaaggcctctgcccctaaccactgtgccataccacctcccaataatcaacagcaaaattataggtctaacaatgttttataggacacccctccatttatgtgatggggtttggcatcctgattaaacccatcataagttggaaaatatgatcataagttgaaaatatgatcataagtcactta

SEQ ID NO: 256418 - DNA, 339 bp, Homo Sapiens
tatcatacttgaaagataagcacatagttattgctgaatataatgtgacactatggtcgaatactacctacgaattataacattagaagcctattgcatgtgttttaaaagtcatatagaaatattaaataagacggacagaggagaatttgcactggaagacaattgccacttgtatttgtaaaggatgaaaaataggatcactcttattgtacgctttattataagtttagaaggcagtttattctaaataatttttctctaggaaggcgtagaattttaaagaactggtaataggaaagcatgtactattttcttaaagcaataaactcttgaatg

SEQ ID NO: 256419 - DNA, 1908 bp, Homo Sapiens
  misc_feature (77)..(77): n is a, c, g, or t
ctgggggtggtgtggtggtcggagcgagggggtgcacaaaaatactatcaactaaaaagggaatccaaatgtctatnaaaaataagcatttgattgtaattccagcattcagccacacgatgtcacaattggattttgattttcactgtgtgtttgtctcaatagatgaaggcattttcaaagctggagcagagaggtctgaaacacgggggacagcagaagtccaagaagatgaagatactcaggttgaggtcccagttgatcagaggccagcagaaatagtagacgaggaagaagatggagagaaggcaaacaaggatgcagaacagaaagaagacttttcaggaatgaatggtgaccttgaagaggaaggaggtagggaggctacagatgcccctgagcaagtcgaggagattctggatcacagtgagcagcaggcacgccctgctcgtgtaaatggaggcaccgatgaggagaatggtgaggagctgcagcaggttaataatgagcttcaactggtcctagacaaggaaagaaagtctcaaggagctggcagtggacaagatgaggctgatgtagaccctcaaagaccaccaaggccagaagtaaaaattaccagtccagaagaaaatgaaaacaaccaacaaaacaaggactatgctgccgtggcttagaagatttttaaaaagagagtatatggatcgcaagaaaaatgaagggttatcatacttgaaagataagcacatagttattgctgaatataatgtgacactatggtcgaatactacctacgaattataacattagaagcctagtggaaagaccagataactttaaatggctactaaaggataattacttacttttattgcatgtgttttaaaagtcatatagaaatattaaataagacggacagaggagaatttgcactggaagacaattgccacttgtatttgtaaaggatgaaaaataggatcactcttattgtacgctttattataagtttagaaggcagtttattctaaataatttttctctaggaaggcgtagaattttaaagaactggtaataggaaagcatgtactattttcttaaagcaataaactcttgaatgaacagattgcgatttactttcagacataatttggagatggcagtagatcaaaatgtgtccatgacttgttaacatgcctttctttcttcctccttagccaaaatccacctttgaactacaaagacagagcaaggcgttcattttggtgggaggaagcattggttcagagtgttagtgactagtatcgccacgccctcacttaaatgctttcaggcttgcatgcttgtggctccaatggcgcacactcaggaaggaattgtaaaggagcacccagttatattataaagcctggatgtatggtttgcagataatggaaatcctgtggattttcactgatccagtctatctttaccaatagtatctctctcttctcccttatgttattagagaacctgatattggctattccaaagattaaattattttcaaatagttttcaacaaaaataaaagtgtattaggaagaaaaaagtagactatatgaagagtttgtgactgctcaatttaacttgttttttgccttatttctattaagactgttttactatgtttttgccctagggatatcagcaaatatttatttttcctagcatgatatagttagaatttcaagcagatttctttgtaattagaaggcatctgatagaaattgtaaaactttagaagttattataatgaaaccaattcctgaatcacaacttcatggactgactaaattgatttatagttgccttgtgaggtatgtatggggaaaacataaaaacataattaaaacataatttcgtccttttaaaa

SEQ ID NO: 256420 - DNA, 819 bp, Homo Sapiens
  misc_feature (54)..(125): n is a, c, g, or t
agctttgcgatcttggatgagttttttaatcctcttggtatcttaatttctccnnnnnnnnnnnnnnnnnnnnnnnnnnnnnnnnnnnnnnnnnnnnnnnnnnnnnnnnnnnnnnnnnnnnnnnnacttaggatgtgtcaaataaattggtggttctcaaactttagcagggataaatctcctggagaacttgtttaaatgcaatttgcaggacttggttccctggatgcttacagtgagggcccagagttgtgtgacgctggcacaggtagtcagtaccacctggtcactgttgcacctggatacctgccaccctctgggagcagcaggatcctgtgtccctcaggattggccctagttgcccggtgggttgctagaatccttgcagattgtggtcttgtgtgttgtggctcatcagcctggaaagttcttctgcatcttgtccagttgatctttcaagtttcagcttgagcaacgtctcctctatgaacccttctttacctggacctgaacctctgggaagggacacaagcccttgtctgctgttccaagactcattttttgtaaatgtgaagcaacctgacttgtggcaagaaccatatgtgatggcaaaaacctgacctgaactgacatgcagctattgatagtctttatttactccacttagtgtgactcttcatatgtttgctgtagaaatattaatgggtttgctgacaaggtgctgccccagactctgctgaggatcttacataatggatggcatataaaaggtatcactttcctaaagtaaaaataaacaaacctgcattacataataaa

SEQ ID NO: 256421 - DNA, 643 bp, Homo Sapiens
ctggcctgccccaaaacccactaacaattttagcaaaacagtccaggccaaagaggaagcatttcatgttcaataagaaacccagccattccgcatggctggttcctgagtggctctggtgatactctccagccacctgctgacattcagaatctcagacctcgggactgctgttgcggtaccgtgtgtctgacacctgccagcagccctttgctatctgcgcgcaggatgggggtgactgcccagacattcccgctagataggctctgatttccggggcagcctttcagatgcggcagacatacaacacctgtactttagagttttaagggaaaaaaaatcagaagtgctggttagatagtaaaaacttaggataacttagaaaggctagttttagcttcctttgtggctccctggtgcaaaacaattagcagttatgcaatggacctgattctagtttattctaattaagaagtgaggccgagtttgacttcgttcctgaatacaatcttgagtaactgggaaagtctgagtgaaaggatggcctcattctctttctaatcttgctggtttcaagattagaaaatggcattatttgatctgaaatgtttgagaagacacgaataaagttacttgggcagac

SEQ ID NO: 256422 - DNA, 637 bp, Homo Sapiens
  misc_feature (128)..(128): n is a, c, g, or t
tctgggcattcctttggtacatgtccagcatctccacatataaaacatttgaggtctctcggttctctaaagtctcgagtatcgtgaaggtctcgggggtcaagaacatctcgggaatctttctttcntcatccccttcctctcttcttcactgtctttcttcttaagtctaacaagtaaactgctgataccaataatgtggggctagggacttgtaaattaagtgagtcacagaacaaactatgctgaaggcaagggaacaaacatttatggcacacctgctcatttggcaggaactcggttttccagtagttttgtaaaacaatattatattaaattttttaaaataccaaatcttaaacctttaacaatccttagaggttgatatttattatctccagttttaaaaagaaattgaggcttagagaagataagtgtcttgactaaatttaatagtaaatagcagtgatggaaactggaagttcgttctgtctcaaaagttccaagtttttattttaggccagacttgatgacaaaagaaagagatcttcctgacctactacagtatacagaacctgggagactataattcgtagatatattttgagggagtatagaagatgtacattccctcgtg

SEQ ID NO: 256423 - DNA, 818 bp, Homo Sapiens
ccttcaagatcccactaaagtgtcaaggtgtggaagggaccaagcgaccaaggatgggccatctggggtctatgcccacatacccacgtttgttcgcttcctgagtcttttcattgctacctctaatagtcctgtctcccacttcccactcgttcccctcctcttccgagctgctttgtgggctccaggcctgtactcatcggcaggcgcatgagtatctgtgggagtcctctagagagatgagaatccaggaggcctgcaccaaatgtcagaagcttggcatgacctcattccggccacatcattctgtgtctctgcatccatttgaacacattattaagcaccgataataggtagcctgctgtggggtatacagcattgactcagatatagatcctgagctcacagagtttatagttaaaaaaacaaacagaaacacaaacaatttggatcaaaaggagaaatgataagtgacaaaagcagcacaaggaatttccctgtgtggatgctgagctgtgatggcgggcactgggtacccaagtgaaggttcccgaggacatgagtctgtaggagcaagggcacaaactgcagctgtgagtgcgtgtgtgtgatttggtgtaggtaggtctgtttgccacttgatggggcctgggtttgttcctggggctggaatgctgggtatgctctgtgacaagggtacgcttacaatcagttaaacacaccggagaagaaccatttacatgcaccttatatttctgtgtacacatctattctcaaagctaaagggtatgaaagtgcctgccttgtttatagccaaa

SEQ ID NO: 256424 - DNA, 1067 bp, Homo Sapiens
tgatgaaaggatattttaatctagcgtaaaatgtttctttgtcgtaacagcagaatttcttgacattttacaacttaatgaaacaaaagaacaatcatctttaaagtcaaacatctatcaaattataaaccaaacacatagcaccgatatcaacctcataaaacgtgcgggcccgcagggtagaaaagaactgtctggggcactggcagcaacgtgccattccaggaactcagaatttcgaagtgaacatttttgtggcagatgcttttcctaaaaaacactgtatcatccaataaatatttgactaaaatccattttgtgcttttgggtgacgttaactgacttctttctgaggcctaataagaaacaagaaagctccttgtgtattttagagcaggattcgtcatcacaagcctcgatactgtcataaaattttaatttaaagcagaaaacatgctgatgtgtcagtgatagggcttaaaatattaaagacttcaaaaacccccaagcacttcttctctgtacaacattggtgaatatatatctttgctatataattttaaaacatggaatagttttcctctcctcttttctatatataatatatgtcttccaaaatacattgtcagtatttatatctgaaaaatactgtacaaaaaagaacttcctataattactctgtataaacattaaacgatttaataatctctccttttggtctatagtaaacatttaaattgattggattaaccacagtttgtgacaacaccatccccttctgagatacaccagtgtcttttacattcatttttcagaagtccactttataagagcacatacgttcaaaagcaaacagagaataagaaacataagcttcagaatcattaatttatgaggcattcaaaaatgagaccactaggaaaaagggccttagaaaacatcaacttattaacttaatcaactgattttctttttaaaaacaacaaagtataattcacaaaaatatatatattaccaaaaagtgggaaaactgaatcttaagtaactgttttgaatgtcaagaggga

SEQ ID NO: 256425 - DNA, 657 bp, Homo Sapiens
  misc_feature (31)..(31): n is a, c, g, or t
  misc_feature (206)..(206): n is a, c, g, or t
  misc_feature (485)..(485): n is a, c, g, or t
  misc_feature (488)..(489): n is a, c, g, or t
  misc_feature (496)..(496): n is a, c, g, or t
  misc_feature (518)..(518): n is a, c, g, or t
tgtaaaaaggcatcttgctgtgttgcccagnctggtctttaaaaccctggcccccaaacaaaaccctgactttatggcacttgctcagccctggtgtgacagtgtctgtctccctggagggccaggagccccctgcatgcagccagcatgccccatttataatcgtagcccagcacatggaagggacccaagagaatgacagcaancgttggctttgccatttcaaccctgaacctcattttactgttctattcatattatctgggggacaaaattttcccacattcctttctgttggtgccaccatctctgtgcctccgtgtgctgctgacctgccaagcccatggccagctcagcactcggattttatttggtctctcggtatgggttcctttatcagcatttcaaaaagcttttgtgttttatccataattgattaaagtttgtagctgtgaataaaagattgattaaaagcaacaacagcnaannatatagnggggggcggggacaaattttgncctaaattgggtttctttaggggggccccgcgccccaattcccccctaaggggggggaataaaaaatccagggcccggttttaccaccggcgggaactgggaaaacctggggggttgcccacttaaaataggttgggag

SEQ ID NO: 256426 - DNA, 652 bp, Homo Sapiens
tattgtccccagattgtatggaaatgcctagtggcattaaggatgcagtaggatgtccacttttagtagcaaccgatgttaattcactactccatgttaggtgctttacttggattatctcacttaaaaaccacaacattttatctctgttttacaaaggaagaaactagaggcttaaaagatttcagttatttgacaaagatcacaagctagtgagtgtgacatggggagctgtgacagttctggaacatagagtcttaggcccaggaaataacagtaaatgttattattaagggaggggtggtggagcaagtagatcagtcctttactgattcattgcttatctaagctacaaaagtacattctcctttgtttcttagctcttggaggggggaggtgtgagctactaaaggggtggcatccctaggaagtttgagttttggggattcttattcagcttccagtgcaagcctgtgggcaaggaatgaaggcggaaggagcggtgtggagggaggcggtccgtggcgcctcctgctttgttaatgtgcttcatttcactcttttgattgaatgattgccggaaagtgcaaggcattaagaattaaactaatgagaaccgaggcaggcggactgactcagattttaattttga

SEQ ID NO: 256427 - DNA, 890 bp, Homo Sapiens
  misc_feature (289)..(289): n is a, c, g, or t
  misc_feature (721)..(721): n is a, c, g, or t
aaggaagagctcacctcccatcagtctcagctaaccgcctttttcctggaggccctggacttccgagcccagcactctgagaacgatctggaggaagttggaaaaacggaaaattgtatcattgactgtctagtagccatggttgtcaaactttccgaggtcacattcaggcccctgttcttcaagctgtttgattgggctaaaacagaagatgccccaaaggacaggttgttgacattttacaacttgggcagattgcattgctggaaaagcttgaaagggctttttnactctgtttgccggccacttagtgaagccttttgctgacaccttggaccaggtgaacatctccaaaacagatgaagcattttttgactctgaaaatgaccctgaaaagtgctgcttgctgttgcagtttattttgaactgtttatacaaaatcttcctttttgatacccagcattttataagtaaagagagagcaggagccttgatgatgcctctggtggatcagctggaaaacaggcttgggggagaagagaaattccaggaacgggtgacaaagcacctgataccatgcatcgcacagttttcagtggccatggcggatgactctctttggaaacactgaactaccagattctgctaaagacgagagactcctcgcctaaggttcgatttgctgctttgattactgtggtagcactggctcgaaaactanaggagaattatattgtcttgctaccagaatccattccctttcttagcagagttgatggaagatgaatgtgaagaagtaaaacctcagtgcccaaagactattcaccaactggaaactgtcctgggagaagcccctcccagagctatttccaaaacctttctgtgggggc

SEQ ID NO: 256428 - DNA, 1015 bp, Homo Sapiens
  misc_feature (751)..(751): n is a, c, g, or t
gtaatctgcttgtatgatcacaaaccaccacaaaagaaaagatcgtgaagattacactgtaaacggactctcaaatgatcaggaggtggtcacttcgcaacttgctccctccacccaactcaaaacaggagctcgagcctgcctgtatttgagactggagctgcctgtatgaggactggatcaactgctagtcacgttatatccaaatctgcattatcattgggcacattttcacagaattttactgaattattccttaattgtttaatggttgggaatagtttgggaattaccttccatcaactctgctaagaaaggaatggattctggtagcaagacaatataattctcctttagtttttcagccagtgctaacacagtaatcaaagcagcaaatcgaacctgaaagggataaaagagcaaagaaataaaaagtagtgttactgtatttattatcttaagagctgtactgacttgagacaagctctaactttttaaacattagttcacatgcgtttattcacttcattatgttcattaagctttcatcttagaataccagtttcaccatttgggagctgtttgtaatatgtgcaaccttataaatagtgttttccaaactgtgtcccaggactgcaaatctttaatgtgaaatgtctttttataatctcttcctttaaaaaaaacccaataaaataaaatgccgcatgcaaactcaagtgtgtcacccagattttacttccattggcgncttccgagcccgccaggctggcaataaagtgcctccagccacctctggcaggtctcctcacccacagcccctgactggtcaccactataattgtatgaggggcccaggacagtcgcttgggataaactcccatctcagcactgaataaaaaacattctgtgtcacaatatcctagttttggggctttaaaaacgtctaggtgttcctcacatgccttgtctataataaggaaagcaagcagtagttgggtattgttagcttttg

SEQ ID NO: 256429 - DNA, 450 bp, Homo Sapiens
  misc_feature (424)..(424): n is a, c, g, or t
tcacaaaccaccacaaaagaaaagatcgtgaagattacactgtaaacggactctcaaatgatcaggaggtggtcacttcgcaacttgctccctccacccaactcaaaacaggagctcgagcctgcctgtatttgagactggagctgcctgtatgaggactggatcaactgctagtcacgttatatccaaatctgcattatcattgggcacattttcacagaattttactgaattattccttaattgtttaatggttgggaatagtttggggaattaccttccatcaactctgctaaggaaagggaatgggattctgggtaggcaaggacaatataatttctcctttaggtttttcagccagtgctaacacaggtaattcaaaggcagcaaatcggacctgaaaggggttaaaagggccaagggnttaaaagtagtgttaccgtattatta

SEQ ID NO: 256430 - DNA, 488 bp, Homo Sapiens
cagattccaggcccactccaaactgggtaatcggaagctgctgtggcatggcaccaacatggccgtggtggccgccatcctcactagtgggctccgcatcatgccacattctggtgggcgtgttggcaagggcatctactttgcctcagagaacagcaagtcagctggatatgttattggcatgaagtgtggggcccaccatgtcggctacatgttcctgggtgaggtggccctgggcagagagcaccatatcaacacggacaaccccagcttgaagagcccacctcctggcttcgacagtgtcattgcccgaggccacaccgagcctgatccgacccaggacactgagttggagctggatggccagcaagtggtggtgccccagggccagcctgtgccctgcccagagttcagcagctccacattctcccagagcgagtacctcatctaccaggagagccagtgtcgcctgcgctacctgctggagg

SEQ ID NO: 256431 - DNA, 592 bp, Homo Sapiens
gttgtcaatggctacaacacctcccccagatgcactgtcttcatcaccatcaacaggaatagctatgctgaatacagaggtggccagactgttcataggtgttaactcagcaatgagagaaagtggtggttgaggtaggggttctgattttcttctagtatcgtcgacttgcccgactaaaggctgggtctgagtttgaaactggcttaggtcagactgtggtagacttgttggtgcgctgtgtgtgcctggcgctaagggcagcccaacatgctggattatgctgctgctcctgctgactggcgttatgcctgctcagctgttgcggactgggccagaggccgcgggtacatttggcatagtaacagaagtggtagacacactaggcacgcttggagcgggcacggctgcaggcacgttgggaactccgggcaccacggcgtgagggccaccaggtacggctgacagcggaccactgccacccatctgcggcggaggcacggactggggctgcccagccccggcaggaccgaggcacggctgcaccacgcctcccacagtagccgggggcactccagtcggctgacaaggc

SEQ ID NO: 256432 - DNA, 1796 bp, Homo Sapiens
  misc_feature (8)..(8): n is a, c, g, or t
  misc_feature (32)..(32): n is a, c, g, or t
  misc_feature (69)..(69): n is a, c, g, or t
  misc_feature (1324)..(1324): n is a, c, g, or t
  misc_feature (1335)..(1335): n is a, c, g, or t
tgcttgtntcaccaggggactaaacacaaaancaccagcaccatgagggcgctctcgaaccaaaaaagncctggtccccgtcagttaatgtgactgagtccgccattgaggccagtatggctggacccaaatgaaccctctgaatccccaactccctggccagcaaggagtgaagctccatgccccttggtccacgcctctagagtctgagcatatcctgcagcctcgatctcaggaggcaacgcatgcagcccccctgcactcagaaagggggcttctccagtcgtggtcttcttctctgtccacaagtttccagatggcccctccttggagcccctgcccaggcagggaacggccacatcctcgggcagagccaagagtcaccgtctttcgtgggcctgggaccaggcccagccaggacgctaggaggctgcctctgctgccatgggctggatcaacatggtggtggcctgcagcgggtagtagcggccccgccaggtcttccagaagattcccttcttaagcttctgccgctgctgtgggatggagcggaagtactggccgttgaggttggaatggctgcaggtgccaaaccaccagcctccagagaggctcttggcgcagttcttgtccctgcggaggtcgtgatcctggtcccaagtggagaagggtacggagaggccgctgggtgggacggtggtggcgcccagctggccggccacgggtgcagtgagctgcaggctataggccgtgtcctcgccacccaggtgcacggagaactgcagcaactcggcgttgccatcccagtcccgcagctgcacggccaggcggctgttgcggtcccccgtgatgctatgcaccttctccagacccagccagaactcgccgtggggatccccaaaccccgccttgtaggcttcccagggccggttgaagtccactgagccatcgtggcgcctctgaattactgtccagcctccatctgaggtcatcttgcagttcaccaaaaatggcggagacccctgaggctggatttcaaatagtccactctgcctctccccaacctggaacagctcctggcaatccctgggcagccggtgcaggcggctgacattgtgagccgggtcaactggctgggccatctcgggcagcctctttcttcgggcaggcttggccacctcatggtctaggtgcttgtggtccaggaggccaaactggctttgcagatgctgaattcgcaggtgctgcttctccaggtgccgctgctgctgggccaccttgtggaagagttgctggatcctgctgttctgagccttgagttgtntctgcaggctntgaaggacctcagggtccacccggctctcaggggctaacgggaggtcggtggacccctcggttccctgacaggcggacccgcacgcgctcaggcgccgctccagcgcgctcagctgactgcgggtgctccgcgtgttcgcgcagcccctggccgagctgcaggagtccgtgcgccaggacattcatctcgtcccaggacgcaaagcgcggcgacttggactgcacgggtccgccctgagcgctcagtagcacggcggtggcggcgcagagcatcagggctgccccggccgtcggagcaccgctcatcctcttaggtagcctgggagcggggattcggggactctcggggacgttggggttccaggtgcgaggactggagacgcggaggaccgggggtaagacccgcttggttgcagaagccgctggaaagaatcggatcacagtcgtgtgaggatccgatc

SEQ ID NO: 256433 - DNA, 910 bp, Homo Sapiens
cctttaagggcttcccaggggccggttgaagttccactgaagccatgggggcgccctttgaattacctgtccagcctcccatctgaggtcatcttgcagttcaccaaaaattggcggagacccctgaggctggatttcaaatagtccactctgcctctccccaacctggaacagctcctggcaatccctgggcagccggtgcaggcggctgacattgtgagccgggtcaactggctgggccatctcgggcagcctctttcttcgggcaggcttggccacctcatggtctaggtgcttgtggtccaggaggccaaactggctttgcagatgctgaattcgcaggtgctgcttctccaggtgccgctgctgctgggccaccttgtggaagagttgctggatcctgctgttctgagccttgagttgtgtctgcaggctgtgaaggacctcagggtccacccggctctcaggggctaacgggaggtcggtggacccctcggttccctgacaggcggacccgcacgcgctcaggcgccgctccagcgcgctcagctgactgcgggtgcgctccgcgtgttcgcgcagcccctggccgagctgcaggagtccgtgcgccaggacattcatctcgtcccaggacgcaaagcgcggcgacttggactgcacgggtccgccctgagcgctcagtagcacggcggtggcggcgcagagcatcagggctgccccggccgtcggagcaccgctcatcctcttaggtagcctgggagcggggattcggggactctcggggacgttggggttccaggtgcgaggactggagacgcggaggaccgggggtaagacccgcttggttgcagaagccgctggaaagaatcggatcacagtcgtgtgaggatccgctcagctcggctta

SEQ ID NO: 256434 - DNA, 605 bp, Homo Sapiens
  misc_feature (276)..(286): n is a, c, g, or t
  misc_feature (393)..(479): n is a, c, g, or t
cacttactgtatgccaaagcttatgccgagagctggctgccagcagctcctcctgcctcgaggcctttgtccatgtcatcatttcccctttggctgtaacagctgcagttctctcataattttaggtttcatcttaaatgtcacttcttcagaggcttcttgacagcacaagtcagggcccttgttagtttcatcacatccattacctttccttgatcacttgtaccatcatctgtaatttatttttatgtttaatacgggtgtgggatttctgannnnnnnnnnngctagactggaagctctcagagggcaggaaccatttgtttccctgccacagagatgttcaataaatattgtcaattgaatgtgcaaataatctcacttaaccacagnnnnnnnnnnnnnnnnnnnnnnnnnnnnnnnnnnnnnnnnnnnnnnnnnnnnnnnnnnnnnnnnnnnnnnnnnnnnnnnnnnnnnnnatccatgtgtctgcctccacacagcctgtgtgttcttaattattgatcactaagcaacagctgcctctcacaaactggcaggaaacttcaacttttcccttttatcaatatattgtgaacgccttt

SEQ ID NO: 256435 - DNA, 711 bp, Homo Sapiens
atccagagggttggtcagatccatgtccagtttctttcacaagaatacttaaatgatatagcggccttcctgttacatcgttttaggaggtatagaatgtctttctggcgatgctcacattgtcctttcatttaatggttctaacagccattgtcatatgattattgcctaggtctattattttgaggttttttttatgtattgaatttatgatcagttacagtcatcattcttttttgatgttcacattgtgccatctgtagccattaggaattactaagttggttcctgtattttttaattccttcccccatttatctttgatagtttcttgttttctggaatagtaagacgtcccaggctcatgtatacttcctgcgtcatgcctggaatcagccatgtttctaaggaaccgtgatccttttaatagataatactatttggaagcaacaatttggatgctgacatgttcattcctactggttgtcattgtttctgggtcttttcagtaggtagtgctaggtaaatcatgaattaatggtgatatttcaaatttataaatacaggctaattttgggttatgttatacttgtatcatttttatcttatgctgaatatcttggttcttcaaatgatgttgttacttatgtaagtatcacaacatatatgtgtttctaaataatacagtattactactaacaataagactgt

SEQ ID NO: 256436 - DNA, 1046 bp, Homo Sapiens
  misc_feature (350)..(371): n is a, c, g, or t
  misc_feature (577)..(629): n is a, c, g, or t
ctaaaagtttgtatgtcagttagctaaaacttcagaatacatttctccctataaagagttataaatgatggtttagttctcaggcagctacaaatgcctatttattccctaatgtacctgaacactagtaccatagaactgaaccaccatctgtatcagcgcttggggagtgtgcattctgaggtctaacccggggtgccaggaacacacacatcctccatcccagcatagagaatggggactccctgagtaatgggagttctttcatggcctctgcttggggtgggggagtcagcagcacccatttgtacatataggtcattcatacatcacattttaaattggggacnnnnnnnnnnnnnnnnnnnnnnagttctacgtttctaccatatgtgatcagtttaatagtaactttatttatttaaaaaaaagaaacacaattagttactgttaaactgataaagggtgtttatttttacttttagaattggtcctatgaagaagtagaaagtgagtcatgcactagacagtgggcctagctcatcagtggctaaagttgaaaaggggttggtttccnnnnnnnnnnnnnnnnnnnnnnnnnnnnnnnnnnnnnnnnnnnnnnnnnnnnnatacataatgtgcttaaccactgccctttaaaactttaaattaaataaaaacattggggttgattcaatttggcccatctgtgtgtgtttctttatagatacatgggctaaacaatacctatttcacagtttatgcctttttaaagtgcttttacatccatggtcccacttctaatagcctttttaaggacaggtagagtacatggagggttagtgaaaaggtcatttatccagaagttacctctctggcaaagcaaaaaaatcaggaattacgtcttaaaggcctttcagctgccagaggagatgtcacaaagtttcttgcaacttacttatgggagagatcttcaagaatatcactcttagactctgaactgaaatttgatacgcttccaacatgttttattagctggctttgaa

SEQ ID NO: 256437 - DNA, 1196 bp, Homo Sapiens
  misc_feature (140)..(140): n is a, c, g, or t
caaataagtaaacagccagatgaagatacacacagggtgaggtctggacgggtcctgggcaaatgctggagcttctgtccccaatggagtgggggtgcgccaccctcttggcacatggacaagttctagttcccctcccntccacatgttcaagctcttcagaagctcccgtgttccatgggccttttatggagacgtcaattggataggcaatggctgaagcatggcagctgtgttgagatgaaactggacaaaaagcataaggtctaaacccagcaaggcctgtctgtccagatgcttcttggcctctctgtgcagcgttcctccttccgggtatggggcagcaccctctctggaatgagggtcttatgagctacagtcagattaaagtctggtgttgagcaagtgaaatggggcaggagaaggtcacagacagagattccgttttctgaggcctgcagtgtcccaacattataacaaagggttatgggagtgatgaaccaggaactgtggacaaaaacatctacacacgtataaaatatcacagtgccctgggctgcagctggagtgtgtgggtcataattcttgcagatgaaacagaaacagcaagactgtaggtactgcccaaggtctcctagccagtcaaggctgaccaggagtccacagaccatggcacagttctgggcctgacatggaaggtgggagcatccagatcagagaccattcccactgagcggtggccaaggacggaatgacagaagaggtgattagtaaccacatatggctgtttatttgacacagggctctgtacaaaatatttacacatattctttacagaataagtaaaccacctgaaggtaattagataatgctttcttctcaatgacagggagaatcctggtgtcagcaaagttagaaaacagataaacattctccttccgaggccacaactcaagcaaatgccacttgcttcctaggatctgaaaagctgtggccttgggaccctggtcacatgcacctcctttcctcaaccccatcaattccttcagtatttacaaacaggcttgagtacttgtggaaggaggggcagctggtgccgcccactgagaggatgacaagagggccagcttgctttgggagagcactgggaatatctgccgcatcatcacctctggaagaatttcctttgccctgat

SEQ ID NO: 256438 - DNA, 384 bp, Homo Sapiens
cacgagattagcagacactgcttaaaggagaccatttgtagcagttggcttaacctcaacttctaaaactacattgaaaatgtaaatacatagcttagttttttgtaatatatggtgacttcagatttttttgtacagtattttgaatgtgagatgattgtcaggactaactgtctttttaacaaaacattttcagtattttaaataaaattttgtaaagtaatgtgaattaaaaattttggaacaattagaattcattcactattgtatagaagatgctgttaaaacataggaagggtatttttcttgatccaaagtttgtgaatttggctttgctacctcaattgcaggtgtttgtttgcctttataaactgttgcaaatag

SEQ ID NO: 256439 - DNA, 368 bp, Homo Sapiens
  misc_feature (196)..(304): n is a, c, g, or t
gcctcccaaagtgctgggattacaagaatgagacactgggcctggtctaatgttactttaaagggtcattactttatctctaaataaagaatcaaggtacttttattacttcatgtttccaacttagaatgaagcaatgaagtataaatatatgctttcatattgctgctcatgtgttttgtcatgcttctctctnnnnnnnnnnnnnnnnnnnnnnnnnnnnnnnnnnnnnnnnnnnnnnnnnnnnnnnnnnnnnnnnnnnnnnnnnnnnnnnnnnnnnnnnnnnnnnnnnnnnnnnnnnnnnacaggtgcctaccaccacaccaggctaattttttgatttttagtagagacagggtttcactatg

SEQ ID NO: 256440 - DNA, 119 bp, Homo Sapiens
tctgcagatatggaacctgtggatatggagggctgactgtataaagtatcctcaaataagattaacagctgtttttcatcagaaaccatggaggctaggaggcagtgggatgacacagc

SEQ ID NO: 256441 - DNA, 700 bp, Homo Sapiens
ttatgccagaaaatggagattgaaaatgtcaaattgtcggcaaataaatgcaacagaatgtggaagtcagaaaaatattataaatgatctgtaacagtgtgttgttttaatcctccaaggacctttttcactatcaatatacccttatttatgcttagttagaatctcaacctgccttctggttgtaacgaaaactattcaattaaaacattgaatttgtccaaaaatcagaacgtatgtcaagtggaaatttaaatcacaataacatctgctattttccaccccaggtcttttccactgctgtgactggcatactataagtttctagcacccccatgtggcttaattggagtggtttcataggcatttgaaatcagttgcctgaaactgagaacagtagaacagactataattttacacagaagttctgctggcatcataaaccaagaaagggaaacttaagtcagcaaaattataagataaatgtataggttcaattcctaaattatttgctgtctactgttcattttatgtgatcactagaaaggatgatttacaagcaactatagctggtttcatctttgtcagatagaattcctcagttttcaaaaccaagcatttgacatgggcaataattaaatagatgaaaaggaacctaatttttctcaaaaagaaaagcaagtgttttattgtggaattc

SEQ ID NO: 256442 - DNA, 1062 bp, Homo Sapiens
  misc_feature (4)..(4): n is a, c, g, or t
  misc_feature (11)..(11): n is a, c, g, or t
  misc_feature (39)..(39): n is a, c, g, or t
  misc_feature (50)..(50): n is a, c, g, or t
  misc_feature (54)..(54): n is a, c, g, or t
  misc_feature (57)..(58): n is a, c, g, or t
  misc_feature (63)..(63): n is a, c, g, or t
  misc_feature (68)..(68): n is a, c, g, or t
  misc_feature (74)..(74): n is a, c, g, or t
  misc_feature (86)..(87): n is a, c, g, or t
  misc_feature (94)..(94): n is a, c, g, or t
  misc_feature (96)..(96): n is a, c, g, or t
  misc_feature (98)..(98): n is a, c, g, or t
  misc_feature (125)..(125): n is a, c, g, or t
  misc_feature (129)..(129): n is a, c, g, or t
  misc_feature (131)..(131): n is a, c, g, or t
  misc_feature (137)..(137): n is a, c, g, or t
  misc_feature (150)..(150): n is a, c, g, or t
  misc_feature (167)..(167): n is a, c, g, or t
  misc_feature (181)..(181): n is a, c, g, or t
  misc_feature (186)..(186): n is a, c, g, or t
  misc_feature (275)..(275): n is a, c, g, or t
  misc_feature (292)..(292): n is a, c, g, or t
  misc_feature (299)..(299): n is a, c, g, or t
  misc_feature (314)..(314): n is a, c, g, or t
  misc_feature (318)..(318): n is a, c, g, or t
  misc_feature (322)..(322): n is a, c, g, or t
  misc_feature (328)..(328): n is a, c, g, or t
  misc_feature (1040)..(1041): n is a, c, g, or t
gttnataaaanatttagatgtattaaattaatatttttnattaagtatanattnaanncctanccccnaatatnattagaatattnncttgtantntnatagatgatctgtttaggataaagatnactncnccccanaatagtgaatcantttaaacaaaaacatancgtaaaagtgggcncaganccagagaggtagcaaaaatcacaggggtggttccatgaatggctgacacttaggaaactctgaattaggccatcctcgagactagcccnccattctcttttgttcntcccccntgggctcattatcgnaaanattncacctntgatttggaaggaagaagtttcttgcccaaatgcctggatgtgtctgcttgactttcagaacttctcacctcagccctaaagagggagcctgtgggttctaagatgagatatcacaatttgagtcccaaagaagaggccagatacccaccaaccttcccccaaatcttaagcacctgcgccagtacagtcaagaagaggaaagtgtgtgaagacccaggtctggctctgccacttgcctggccatgtcaccttgaagctgtgacctgactccctatattgtttcctcagttgtagaccaaaggcaatggtgtctgccctcctaccttagaagacaaatgcaagggcatttcaccacagagaggacctttgtgctcactttggcccaggaggcagtgatgctcatggttgcatgactttatgagtcgctgggccagggtgaggacctgggcctcctgactcctggcccagagttcttgtccatcagttcatactgcaattttatgtgaaagcattatgactgtcctacccatgggagagtaaatgtagattgaatgctaggagtcttaaagctggagagtatagattttgaggtccccatttgggaaacatgtgccagaaatgtctaggtgtttaataaaacagatattggattatctcatcactcttgcccttgagtattatgggaagagccagggagacgggcaggggganntgaaaagctgaggctccgtcc

SEQ ID NO: 256443 - DNA, 931 bp, Homo Sapiens
  misc_feature (753)..(783): n is a, c, g, or t
  misc_feature (843)..(843): n is a, c, g, or t
  misc_feature (894)..(894): n is a, c, g, or t
tctccttctcgccgcgcgcgaattcggcacgagggccttttcttacttccagaaagctgcagcccgcggctacagcaaagcgcagtacaatgcgggcttgtgtcatgagcatggcagaggcacccccagggacattagcaaggcggtcctttattatcagttggctgccagccagggccacagcctggctcagtaccgctatgccaggtgcctactacgagacccagcctcttcgtggaaccctgagcggcagagggcagtgtccttgctgaagcaggctgcagactcaggcttgagagaggcccaagctttcctcggggtgcttttcaccaaggagccctacctggatgagcagagagctgtgaaatatctttggcttgcagccaacaatggggtatgcgatctcagtggacaagcatgttggggatgaagcctgataagagaagggattttggaactggtactgagttcttctgtgcttacgagattgttggataggagccttggcctggcttcaagccttagcgctcactgacttactgtgtgaccgttgggcagttgcagtagtacgccagagctggcttgcaccaggctgtgagagctgttggcagcttaaaatctgctatggtgggaatatttgcaccacagaaattgctaaatgccataaaacagggctttttccctcctcgagagccagttgttcaacatttaccagcacactactgggcctggtcacttcttgattcaaacctnnnnnnnnnnnnnnnnnnnnnnnnnnnnnnngcttgccttacctgtccagtactttcacagggtgggttgtgaggatcaaaatctaactgnggataacttaacagggtgtggacagtgctgtggaaacgtgttacacatggnaaaaacacatcctttaccagttgatgggttaacccgg

SEQ ID NO: 256444 - DNA, 773 bp, Homo Sapiens
  misc_feature (573)..(573): n is a, c, g, or t
  misc_feature (738)..(738): n is a, c, g, or t
  misc_feature (744)..(744): n is a, c, g, or t
gggagcggcagagggcagtgtccttgctgaagcaggctgcaaactcaggcttgagagaggcccaagctttcctcggggtgcttttcaccaaggagccctacctggatgagcagagagctgtgaaatatctttggcttgcagccaacaatggggactcacagagcaggtaccaccttggaatttgctatgagaaaggccttggtgtgcagaggaatctgggagaggccttgagatgttaccagcagtcagccgctctgggaaatgaggccgcccaggagaggctgcgagccctcttttccatgggggctgcagccccggggcccagcgacctgacagttacaggactgaagtctttctccaacccctccctctgcagcttgaacaccctgctagcaggaacctcacgcctaccacatgcctcgagcacaagcaaccttggcctcctctgcagaagtgggcatctcggagccagcctggaagcctccagcagggctattcccccacacccctacccactggaaaggagtgttgtaagactaggttttggctaagaacttctcacctcagccctanagagggagcctgtgggttctcagagagatatcacaatttgagtcccaaagaagaggccagatacccacccaccttcccccaaatcttaagcacctgcgccagtacagtcaagaagagggaagtgttgtgaagaacccaggtctgggctctgcccacttgcctggnccatgntcacccttggaagctggtgacctggactc

SEQ ID NO: 256445 - DNA, 777 bp, Homo Sapiens; identical to SEQ ID NO: 3593
  misc_feature (405)..(415): n is a, c, g, or t
  misc_feature (465)..(465): n is a, c, g, or t
  misc_feature (469)..(505): n is a, c, g, or t
  misc_feature (535)..(535): n is a, c, g, or t
  misc_feature (619)..(632): n is a, c, g, or t

SEQ ID NO: 256446 - DNA, 666 bp, Homo Sapiens
  misc_feature (363)..(363): n is a, c, g, or t
  misc_feature (545)..(545): n is a, c, g, or t
  misc_feature (630)..(630): n is a, c, g, or t
atagatgccatgttagaaagaataaagcatgaaaaaactgtagatatttatggccatgtaactttaatgagagcccagaggaactatatggttcaaacagaagaccaatacatctttatccatgatgcactgttagaagcagtgacttgtggaaataccgaagtgccagctagaaacttgtatgcctacattcaaaagctgacacaaatagaaacgggagagaatgtcacaggaatggagctcgaatttaagcgtctagccagctcaaaagctcacacctcaaaggttatcagtgccaatcttccatgtaataaaatcactatccgtggaatagaaagatctgattacatcaattgcaagttntattgatggatacagacaacagaaagcctacatcgctacccaggggcccttggcagagaccactgaagacttctggcggatgctctgggaacacaattccaccatagatgtgatgctcaccaagctgcgtgaaatgggcacagagaaatgtcaccaatactggccagcagaacggtctgcangataccagtactttgttgtagatcccatggctgagtacaacatgccacagtatatcctaaagggaattcaagtcacagatgccanggacgggcagtcccgaacagtaaggcagtttcagtt

SEQ ID NO: 256447 - DNA, 405 bp, Homo Sapiens
ctgctttgcacatgtagaggtacccgtcaggttggtctcaagcacagcgtgccatcccttagaactgatgtgttcagcaggggaaagaaactggcctcctccattgttcaccaagaaattgatcttaccaaaagtatctaaggtagatttgaccaaattattcacctcctcctcattccggatgttgcattgtatgggaatgactcgtgcctgctttgtggaaggtaggttggcctgcagttcatctgccgcagacttcaatctctccaacttacggccgatgcccgtggccccgccggtgacgatggccacttggccatgcagcaaaccaggcgccaggtagctcctgcccttagcccaggaggccatcctgcagcgtgggctcgtgccgaattcctgcagccg

SEQ ID NO: 256448 - DNA, 1095 bp, Homo Sapiens
tgggtggcgaattcggcacgagggctgcagggatggcctcctgggctaagggcaggagctacctggcgcctggtttgctgcagggccaagtggccatcgtcaccggcggggccacgggcatcggaaaagccatcgtgaaggagctcctggagctggggagtaatgtggtcattgcatcccgtaagttggagagattgaagtctgcggcagatgaactgcaggccaacctacctcccacaaagcaggcacgagtcattcccatacaatgcaacatccggaatgaggaggaggtgaataatttggtcaaatctaccttagatacttttggtaagatcaatttcttggtgaacaatggaggaggccagtttctttcccctgctgaacacatcagttctaagggatggcacgctgtgcttgagaccaacctgacgggtaccttctacatgtgcaaagcagtttacagctcctggatgaaagagcatggaggatctatcgtcaatatcattgtccctactaaagctggatttccattagctgtgcattctggagctgcaagagcaggtgtttacaacctcaccaaatctttagctttggaatgggcctgcagtggaatacggatcaattgtgttgcccctggagttatttattcccagactgctgtggagaactatgggtcctggggacaaagcttctttgaagggtctttttagaaaatccccgctaaacgaattggtggtcctgaggagggcccctctgtgggctgcttcctactggctcctgcaacttccttcatcactgggacagtcggtggatgtggatgggggcccgagtctctatactcactcggatgagggaccagatcatggacaacgggcccaagggaagcaggggacctttctggtgtcaaaaagatgaaggagacctttaaggagaaagctaagctctgagctgaggaaacaaggtgtcctccatcccccagtgccttcacatcttgaggatatgcttctgtactttttaaaagcttatagttggtatggaaaacatttttcttatttttaagtgttattaattatatctatggaaaaactattcctg

SEQ ID NO: 256449 - DNA, 1015 bp, Homo Sapiens
tgggtggcgaattcggcacgagggctgcagggatggcctcctgggctaagggcaggagctacctggcgcctggtttgctgcagggccaagtggccatcgtcaccggcggggccacgggcatcggaaaagccatcgtgaaggagctcctggagctggggagtaatgtggtcattgcatcccgtaagttggagagattgaagtctgcggcagatgaactgcaggccaacctacctcccacaaagcaggcacgagtcattcccatacaatgcaacatccggaatgaggaggaggtgaataatttggtcaaatctaccttagatacttttggtaagatcaatttcttggtgaacaatggaggaggccagtttctttcccctgctgaacacatcagttctaagggatggcacgctgtgcttgagaccaacctgacgggtaccttctacatgtgcaaagcagtttacagctcctggatgaaagagcatggaggatctatcgtcaatatcattgtccctactaaagctggatttccattagctgtgcattctggagctgcaagagcaggtgtttacaacctcaccaaatctttagctttggaatgggcctgcagtggaatacggatcaattgtgttgcccctggagttatttattcccagactgctgtggagaactatggttcctggggacaaagcttctttgaagggtcttttcagaaaatcccccgctaacgaattggtgttcctgaggaagtctcctctgtgggctgcttcctactggctcctgcagcttccttcatcactggaaaatcggggggatgggggatgggggcccggaactctcctatactcactcgaatgagggacccagatcatgacaactggccccaagggaacaaggggaacctttctggtggtcaaaaaagatggagggcgaccctttaagggggaacactaaacctcttaagtctgaggaaaccagggggtcctccctccccccagtggcctttaaaatattgggg

SEQ ID NO: 256450 - DNA, 384 bp, Homo Sapiens
  misc_feature (329)..(329): n is a, c, g, or t
aaatagtttactgtgtaagaaggagcataagctttaaagttagttcagatcccacaactataaaatattcatggccttcggaacatgattacccaaaaggctagagaaattattggacaagagaagaacatcacttgcatttttcatcttaaggggaatcaactctattgtcttagctatgaagacactgcattgttaaagtagaaggtcatatttctgtgttccagttctttactgtgtcagcaaatgaaatttaacaaggggagaatattagaaataactgggtgcttggtgtattttacaaaggtttgttgacattattgacattntgttccgttttaattaactcattatagaagaagaaacagtttttgtccattggaa

SEQ ID NO: 256451 - DNA, 672 bp, Homo Sapiens
agaaggagccatggggctccctggaatgagaggccccccaggaccagggtgcaaaggagagcctgggctggatggcaggaggggtgtggatggcgtccctgggtctcctgggcctcccggacgtaaaggtgacacaggagaagacggctaccctggatacctcggtggcttcctcctggttctccacagtcagacggaccaggagcccacctgccccctgggcatgcccaggctctggactgggtatagtctgttatacctggaagggcaagagaaagctcacaatcaagaccttggtatggatacaggatcgcccatctccattgcctgaagagtaaaatttggggttaattttactgattcatcaacaccttaaatgatcactaaccttatatgggattattcttacttttaaaacaaaaacactagcatggtcattctcagctaatcctttaaacttatgatcctatgaagtgtcaaagaagctcattctggctataattattatctggctataataagtatattattattatctggctaataataagtatattattagttttataaaaatgattctttctcagtaagttaaatgtaactctggtatgaaaggtctttttgcttccaaatggtaataaccagaatgtggtcagttcttgacttacatgt

SEQ ID NO: 256452 - DNA, 391 bp, Homo Sapiens
cacgagtgactccaaaagaaggagctcgacaggggtaatgtaaacagagatgctaactaagtcagaaaactctcctggtgaccaaaagagaaccactattgggggtaatggctagatttggtctcctttaacttaaggaggggagatttgagaatgacagacagttgaacttcctggcagcagcaagcaagcacaggagaaggtggcccctgtgagatactggtgggctatataggcgttttctgaggggctttgggaggcatgaacaaaggtggaaacattgctgttggcttcggcagtatctgaatttactgtgagatggagggtttaaatctaaccccatggaatgcaggagtccatgaattatctaaatcgatcattttgatctttt

SEQ ID NO: 256453 - DNA, 510 bp, Homo Sapiens
atgctgacatcttcttcaacatagtatctataaaatggctcttcaggttcatcttctaattcatcattgtcagtggattcattacagtctttatcagtaactttaataatgttaaagtctttcagttcatctgtaggaatatcttctggctccatcttaataataatccttttcctctcagcagctctgcttttctcttcgcttgctatttcagactccactgtgctactttttctgcttccagtggttgaagctgaatcatcagcagcctggcttgtgtctcctctgtatttgtccgtctgtgcagaaaatgttttggaagaatctttttcaccaaattcagctttgatgttactgtcttttccatctctaatatctactattctatggtaagatcttgtgttttggtataaatgtctgttagtacaggttagcacatgctcatctaataatttttcacagctaaagccaaatccacagctatcacaggtaaaactccgcccaaagcgt

SEQ ID NO: 256454 - DNA, 486 bp, Homo Sapiens
ataagccaccgcgcctggctgtgacattcacattctaaacaaagccagctgagggtgtatggaatcaactagtgtgcccctcactgggtaggccccaaactgggagcatgaagaggtgacatgccatctgtagtttcacagttgagggctggtgacaagggaagaagaggggagggctctggtcatgtccagaatggctggcctggctggtgagggtcacagaccagtcatccatggaggtttgcccatggactacacgcaaagatcctaacaaagaggaatcactgttggcaaggccccactgtgtccccagcaatatggaaggaagtgtgggtccatgaagacagtgcctggcagtgtgcagcaggagagccttgggtagggcaggggtttgcacctcatctttcagagctgaggggacagatggcagtttggactctgggctgctcagaggctgccttgtggattttttagttttgacaaaat

SEQ ID NO: 256455 - DNA, 912 bp, Homo Sapiens
ctggattgacagtatcctggccttctcaaggtccctgcacagcttgcttgtcgatgtccctgccttcgcctgcctctctgcccttgtcctcatcaccgaccggcatgggctgcaggagccgcggcgggtggaggagctgcagaaccgcatcgccagctgcctgaaggagcacgtggcagctgtggcgggcgagccccagccagccagctgcctgtcacgtctgttgggcaaactgcccgagctgcggaccctgtgcacccagggcctgcagcgcatcttctacctcaagctggaggacttggtgccccctccacccatcattgacaagatcttcatggacacgctgcccttctgacccctgcctgggaacacgtgtgcacatgcgcactctcatatgccaccccatgtgcctttagtccacggacccccagagcacccccaagcctgggcttgagctgcagaatgactccaccttctcacctgctccaggaggtttgcagggagctcaagcccttggggagggggatgccttcatgggggtgaccccacgatttgtcttatcccccccagcctggccccggcctttatgttttttgtaagataaaccgtttttaacacatagcgccgtgctgtaaataagcccagtgctgctgtaaatacaggaagaaagagcttgaggtgggagcggggctgggaggaagggatgggccccgccttcctgggcagcctttacagcctcctgctggctctctcttcctaccctccttccacatgtacataaactgtcactctaggaagaagacaaatgacagattctgacatttatatttgtgtattttcctggatttatagtatgtgacttttctgattaatatatttaatatattgaataaaaaatagacatgtagctgg

SEQ ID NO: 256456 - DNA, 488 bp, Homo Sapiens
  misc_feature (447)..(447): n is a, c, g, or t
agatacaatggtgcagtggaactgttgggtcaaatgttagctttacttttgatttttttgaggaacctccaaactgttctccatagcagttttactaaaggccccatacaattccaaaatccagcagggaagtccaatcttaaagctccaaagttatctcctttgactgcatgtctcacatttgggtcacaatgatgcacagcctccctcctggctgcttttgtgacctggcattgagtgtctgcagcttttccaggtgtgcagtgcaagctgtcaatgcctttacaattctggggtctggaggtcgaagaccctcttctcacagctccactaagcagtctccgatggagactctgtgtatggacttcaaccccacatcttcctttcacaccgcccaagcagaggttctccatgaggaccccacccctgcagcaaacttctacctgngcatccaggcatttccatacatcctctgaaatctaggtgga

SEQ ID NO: 256457 - DNA, 436 bp, Homo Sapiens
gaatattccacctgccttgacatgtgtgccatcactccaaaatccaaccagcttcaacttttctagccctttcaagcgttaagcatccttcctaaccctacactctgaggtaagcatgtcctctcatgctcaaggaactgtgtaaaatggaatacgttataattactgtgtttataccatatagatctactaaacagaaagttgatagaagttttcccaaaattaacaacagtcctaaaagtttaccgaccttacgaacaatgagaagtgaagcagagaaaaaaattctaaactattagacatacccccaaaccaatgttcatcgtcatgctagaggaaaagctaaattatctctacattctcgttacagaaaatgttactgtagaattgtcataagaagacttaattgaagattatacagccaaattatagaaat

SEQ ID NO: 256458 - DNA, 497 bp, Homo Sapiens
gctggcatattacttggtaggaaaatagcaagttttaatacaagatgtgtgatatgagcccaatattgtaaataaacatttaaccctatatgtatgtgtgcataagttatacatatatatataatgtgtgaatgcacataatgtacacacacatgcatagatgtacatgtacatctgtacccatatattatctttaaatgtattccaaattgtaagtagcttgttctaggagatgagctgtgaaaagcataatcaattatgttacttcttatttcttacatttcaagtagaagacaggaagagtggtgaacataatttaacataagatacttagttgtctatgctttggagatgacatgaggctaattatattaggacaatagcataaaattatcatcccactaatgttaaaactaaaacaatataggagaagctgaaaaagattaaaccctggtaattcttcttagaaattttgttcagccaggtgcagtggctca

SEQ ID NO: 256459 - DNA, 373 bp, Homo Sapiens
catgggctatgtgtgtgatgcaaaagtgtgtgagtctaaatgttcacctctgatctcattcaacactgaagattaaaagagatttgaggtttttctgtgtctctaatactcttaaatagacctggttccaaaagtctttatcaatttgttttcacagaaaatttcaaaaatcaaattagcaccataatcttatgtgtaattaatagttgtattggcatacaacccttgaaatgaagcaatgtccaacaagtaaaatttcccatcatttttctatgatgcaaaatattacttcgagtcaaacagtattctcttgtttgcttcatgtttggaagaacctgtgtcttccaaacatgcttccttggcacatgagtgc

SEQ ID NO: 256460 - DNA, 408 bp, Homo Sapiens
actttagtcaatcgatattttttcagttaattaatttaaaaaattaatatgtattattatcctagcacagtacctgacacacaataggtacttaaagatgaactgaatagatgctttaataggttaaaaccttattacatcaaccctagatgaccaattaaatattcttttgtgctatcattttgacatgacatatatttcccgaggcttaccatgatatgtatttgttctaacaagaataaacttacattaagtttctatttaacgcattgatgcataaatagatgaagctggccaactaggatgagagtaggggaaggaaggaacatactgatttaactctcaaaggctttctggataacccaagctaactcattaaatggaagctgaaaaactacataagccact

SEQ ID NO: 256461 - DNA, 1922 bp, Homo Sapiens
  misc_feature (411)..(411): n is a, c, g, or t
ccttcctcgcgcgctgtgtgtgcacgctgcaaagaccagcaagctctctggaccttggagcaggcctgccgccttcatgtccactctcctcatcaatcagccccagtatgcgtggctgaaagagctggggctccgcgaggaaaacgagggcgtgtataatggaagctggggaggccggggagaggttattacgacctattgccctgctaacaacgagccaatagcaagagtccgacaggccagtgtggcagactatgaagaaactgtaaagaaagcaagagaagcatggaaaatctgggcagatattcctgctccaaaacgaggagaaatagtaagacagattggcgatgccttgcgggagaagatccaagtactaggaagcttggtgtctttggagatggggtatgctgntggtttatcaaggatgattggaggacctatcttgccttctgaaagatctggccatgcactgattgagcagtggaatcccgtaggcctggttggaatcatcacggcattcaatttccctgtggcagtgtatggttggaacaacgccatcgccatgatctgtggaaatgtctgcctctggaaaggagctccaaccacttccctcattagtgtggctgtcacaaagataatagccaaggttctggaggacaacaagctgcctggtgcaatttgttccttgacttgtggtggagcagatattggcacagcaatggccaaagatgaacgagtgaacctgctgtccttcactgggagcactcaggtgggaaaacaggtgggcctgatggtgcaggagaggtttgggagaagtctgttggaacttggaggaaacaatgccattattgcctttgaagatgcagacctcagcttagttgttccatcagctctcttcgctgctgtgggaacagctggccagaggtgtaccactgcgaggcgactgtttatacatgaaagcatccatgatgaggttgtaaacagacttaaaaaggcctatgcacagatccgagttgggaacccatgggaccctaatgttctctatgggccactccacaccaagcaggcagtgagcatgtttcttggagcagtggaagaagcaaagaaagaaggtggcacagtggtctatgggggcaaggttatggatcgccctggaaattatgtagaaccgacaattgtgacaggtcttggccacgatgcgtccattgcacacacagagacttttgctccgattctctatgtctttaaattcaagaatgaagaagaggtctttgcatggaataatgaagtaaaacagggactttcaagtagcatctttaccaaagatctgggcagaatctttcgctggcttggacctaaaggatcagactgtggcattgtaaatgtcaacattccaacaagtggggctgagattggaggtgcctttggaggagaaaagcacactggtggtggcagggagtctggcagtgatgcctggaaacagtacatgagaaggtctacttgtactatcaactacagtaaagaccttcctctggcccaaggaatcaagtttcagtaaaggtgttttagatgaacatcccttaatttgaggtgttccagcagctgtttttggagaagacaaagaaaattaaagttttccctgaataaatgcattattatgactgtgacagtgactaatccccctatgaccccaaagccctgattaaatcaagagattccttttttaaaaatcaaaataaaattgttacaacatagccatagttactaaaagatgagttaggtggatttttattatgtcaactagttgtacatggctttttaaaagttaatgattattttgtaattagaaaaaaatagtacgtaccagggtaggaatttgggaaaatacagaaccgaggagaaaacagaagtctttgcagtag

SEQ ID NO: 256462 - DNA, 1043 bp, Homo Sapiens
  misc_feature (985)..(985): n is a, c, g, or t
  misc_feature (1002)..(1003): n is a, c, g, or t
  misc_feature (1008)..(1008): n is a, c, g, or t
  misc_feature (1010)..(1010): n is a, c, g, or t
  misc_feature (1017)..(1017): n is a, c, g, or t
  misc_feature (1019)..(1019): n is a, c, g, or t
  misc_feature (1035)..(1036): n is a, c, g, or t
atttcagcagctctcagggccttgggctcatcccgagtcccgggctcagtatgtggcgccttcctcgcgcgctgtgtgtgcacgctgcaaagaccagcaagctctctggaccttggagcaggcctgccgccttcatgtccactctcctcatcaatcagccccagtatgcgtggctgaaagagctggggctccgcgaggaaaacgagggcgtgtataatggaagctggggaggccggggagaggttattacgacctattgccctgctaacaacgagccaatagcaagagtccgacaggccagtgtggcagactatgaagaaactgtaaagaaagcaagagaagcatggaaaatctgggcagatattcctgctccaaaacgaggagaaatagtaagacagattggcgatgccttgcgggagaagatccaagtactaggaagcttggtgtctttggagatggggaaaatcttagtggaaggtgtgggtgaagttcaggagtatgtggatatctgtgactatgctgttggtttatcaaggatgattggaggacctatcttgccttctgaaagatctggccatgcactgattgagcagtggaatcccgtaggcctggttggaatcatcacggcattcaatttccctgtggcagtgtatggttggaacaacgccatcgccatgatctgtggaaatgtctgcctctggaaaggagctccaaccacttccctcattagtgtggctgtcacaaagataatagccaaggttctggaggacaacaagctgcctggtgcaatttgttccttgacttgtggtggagcagatattggcacagcaatggccaaagatgaacgagtgaacctgctgtccttcactgggagcactcaggtggggaaaacaggtgggcctgatggtgcaggagaggtttgggagaagtctgttggaacttggaggaacaatgccattattgcctttaagatgcagacctcacntagttgtccatcacccnntcgcncngtggganantggcaaaagtgtccanncaggcga

SEQ ID NO: 256463 - DNA, 894 bp, Homo Sapiens; identical to SEQ ID NO: 15040

SEQ ID NO: 256464 - DNA, 261 bp, Homo Sapiens
ggtctttgagaagatatgctgggggctgggaattgagtacaccttcccccctctgtattaccgaagagcccaccgccgattcgtgaccaagaaggctctgtgcattcgggttttccaggagactcaaaagctgaagaagcgaagaagagccttaaaggctgcagcagcagcccaaaaacaagcaaagcggaggaacccagacagccctgccaaagccataccaaagacactcaaagacagccaataaattctgttcaacca

SEQ ID NO: 256465 - DNA, 659 bp, Homo Sapiens
caggcctggatggattgtgcaaaatggtactatgccttggagcaagaggttagttcacaacctagttattaattactcacttgctttttatcttgagcattgcatcacgaccgtgagaatggctttatagccacttgcagtaggcagtgtcagcttcttgctcctctctcaatcccaaagatccagatacagtagtaaatcctgccaaaagttactggaattccagacatctctcacaactcctagcacattcaggacatcccttccagaatgggcatatgccatctcacccatctatcatcttcaggctgaattgcactggactcagttgtggggacatttacggaggagaaagcagagagtttacaccttacctcagatgccctgtgaagtccctcctctagtgtgattcccatctgtcttgctgcacttctatgatatttcctcttgtttggccctccttgtcactggttgagtgaatactgtgagcgcacttaatggtgggtgtatcagacttctgctgctcttattcctatctcgaagtcatagaatcagccctacacgggagaatgggaatgagacctttttggctttcccctttgcgtacatctggcccttgtttgacccttttattttccccactttgaagactgtggagt

SEQ ID NO: 256466 - DNA, 718 bp, Homo Sapiens
  misc_feature (460)..(460): n is a, c, g, or t
  misc_feature (462)..(462): n is a, c, g, or t
  misc_feature (465)..(465): n is a, c, g, or t
  misc_feature (481)..(481): n is a, c, g, or t
  misc_feature (484)..(484): n is a, c, g, or t
  misc_feature (546)..(546): n is a, c, g, or t
  misc_feature (562)..(562): n is a, c, g, or t
  misc_feature (571)..(571): n is a, c, g, or t
acgagcagacccggaaccctggacaaacccggcaagcagtccaaactgcaggatccccgccaatatcgtcaggctaatggaagtgctaaaaaatctggtggggactttaagcctacttccccctccttacctgcttctaagattccagccctttctcccagctctgggaaaagcagttctctgccctcttctagtggtgacagctctaacctccctaatccacctgctactaaaccatcgattgcttctaaccctctcagcccccaaacaagaccacctgctcactctgcctccctcataccttctgtctctaatggctctttgaagtttcagagcctcactcatacaggtaaaggtcaccatctttcattctcaccgcagagtcaaaatggccgagcaccccctcctttgtcattttcctcctcccctccttctcctgcctcctccgtctcactgaatncnatngccaagggccccgggnccntccatactcccagcctcaccagctacaaggcacagaatggaagttcaagcaaagccaccccntccacagcaaaagaancctcttaanggtcaaatcctattaggcacaagtcggagttacatttaaaaaaaattaacagtctacaacaactgttttcacaagagaatgtaacatattgctgtatcgtttgaggcttaatgctaaatatgtgctaaatactggattaatagattt

SEQ ID NO: 256467 - DNA, 420 bp, Homo Sapiens
atcagcagcttctcgataagatctcaaaagttgggtaaatgggctcaagcttatgccccaaaaggcaaaatggcggagtttaatggtacatgcccttcccccaggaatgctagatctgtaagggaaaaacgtcttaagtgagcatgtgcccttcagtatactgaaccccctgtgcttgtggcccccccaagtgctggcaggcccccgtgcatgtggacagcccatgccaaggtaggaatcaggggaaaaaagatgcaaaccgtaaatccctggaagcatgccagcatatgaaaccccaatcaaaggtcaaaccagggacttgaatttgtcaagtcattcacgcctggccctcttccaaggggactttacttcctttcattccggctctaaaactttttaataaacgttcacccctgccct

SEQ ID NO: 256468 - DNA, 382 bp, Homo Sapiens
aagtgcacacaagaacagagaaaccaaacatattgagaactatgagaaaatgtcgtcatcttacagtattaagaactttatcactttattattcagagatgttgatatctgaatagagaacaccaagaagagtatcaagctgcccacagatgtctcaaaatattttttaaagtaactatggaaatggagaaataaagatgaatggaaacttggccagaagagttagcaaaggtagcaagagaactggcattcggtagacaaaagtaatgcaagtcatcccacttttacataaggtggtcatatactttatccaaagaataagactgtaacaaggtattttcacttctcttaaatgactgtgttaagtagtctctcccttttc

SEQ ID NO: 256469 - DNA, 197 bp, Homo Sapiens
ataagtaagtaaattgcaagctgcttttagaaataaatgtgtaggaatgactgtgtttggaggctccttaacttaaggctctcaaagatgcctgggttgggggagcttcagaggtttgcaccacgcagtgggtaccatggggctctgagggtcctgacaataatcctgaccccgattccaacaccagccagtgcctg

SEQ ID NO: 256470 - DNA, 771 bp, Homo Sapiens
  misc_feature (114)..(114): n is a, c, g, or t
ttaggtcccaaaaaacaagtccaaaacacatccttaatttcccaaaaagtttgactggaggaaccaaaagggtctggataagccagtctggaaaaatggcgcggcggccatgtnctcaaataagaggaacaggtgagatatcggaggcttagtgtttctcctctgttagctggaactcccttcaaagagagtgttcagctgatcgtctaaactttctgcataacaaagtaattcaaaaagctgcttgtttgaacgtggcaactgattacttgaccgtacgcgtgaccgttcagaagtctggtttttcaacttcagattgaagaaacgtgatctgaatggaattgcagtctccatggccgtgcttggagtatgagtccccattctgcagtgaacctatgctttccttttggcaaaattctacgaccagcatagagaccaaagctttcatagaagaaatgattattaataggtccaaattgggataaatatttaagaaacttgttttcactgattttctctgggcaatgtattaaaacagtccgctgtgcctgttctcgtctttcattttgcatctcagagaatctccttttgggaatcttgtcttcaaagcctgtctccacgctccctgaaggctgctcgtctctcctaaggtctttggccacagttcctgggcaactcaaaagcctgacgataggccgctggactcgagttcttctccgggcacacaggttcaaacgggtcaagagccccacgccgggaaccgccattgct

SEQ ID NO: 256471 - DNA, 714 bp, Homo Sapiens
  misc_feature (673)..(673): n is a, c, g, or t
ttctactgtgggatcctgccctccctgtggcttctcctgcttggggggcctgcctgcctgaagacccaggaacaccccagctgcccaggacccagggaactggaagccagcaaagttgtcctcctgcccagttgtcccggagctccaggaagtcctggggagaagggagccccaggtcctcaagggccacctggaccaccaggcaagatgggccccaagggtgagccaggagatccagtgaacctgctccggtgccaggaaggccccagaaactgccgggagctgttgagccagggcgccaccttgagcggctggtaccatctgtgcctacctgagggcagggccctcccagtcttttgtgacatggacaccgaggggggcggctggctggtgtttcagaggcgccaggatggttctgtggatttcttccgctcttggtcctcctacagagcaggttttgggaaccaagagtctgaattctggctgggaaatgagaatttgcaccagcttactctccagggtaactgggagctgcgggtagacgctggaagactttaatggtaatcgtactttcgcccactatgcgaccttccgcctcctcggtgaggtagaccactaccagctggcactgggcaagttctcagagggcactgcaggggattccctgagcctncacagtgggaggccctttaccacctatgacgctgaccacga

SEQ ID NO: 256472 - DNA, 509 bp, Homo Sapiens
  misc_feature (75)..(75): n is a, c, g, or t
  misc_feature (155)..(155): n is a, c, g, or t
  misc_feature (295)..(295): n is a, c, g, or t
  misc_feature (308)..(308): n is a, c, g, or t
  misc_feature (324)..(324): n is a, c, g, or t
tggaaaaaactttaaaatggtaaccgtactttcgccccaaactaatgcgaacccttccgccctcctcggtaaagntaaaaccaactaccagctggcaactgggcaaagttcctcaaaagggcaactgcaaggggaattcccctgaaccctccaanaagtgggaggccctttacccaccctatgacgctgacccacgattcaaagcaacagcaactgtgcaagtgattgtcccacggtgccctggtggtatgcatcctgttaccgatcaaatctcaatggtcgctatgcagtgtcntgaggccgcccanaaatatggcattgacntggcctcaggccgtggtgtgggccacccctaccgcagggttcggatgatgcttcgatagggcactctggcagccagtgcccttatctctcctgtacagcttccggatcgtcagccaccttgcctttgccaaccacctctgcttgcctgtccacatttaaaaataaaatcattttagccctttcaa

SEQ ID NO: 256473 - DNA, 424 bp, Homo Sapiens
  misc_feature (22)..(22): n is a, c, g, or t
  misc_feature (47)..(47): n is a, c, g, or t
tcggtgaggtagaccactaccnagctggcactgggcaagttctcaanagggcactgcaggggaatccctgagcctccacagtgggaggccctttaccacctatgacgctgaccacgattcaagcaacagcaactgtgcagtgattgtccacggtgcctggtggtatgcatcctgttaccgatcaaatctcaatggtcgctatgcagtgtcctgagtgccgcccacaaatatggcattgaactggcctcaggccgtggtgtgggccacccctaccgcagggttcggatgatgcttcgatagggcactctggcagccagtgcccttatctctcctgtacagcttccggatcgtcagccaccttgcctttgccaaccacctctgcttgcctgtccacatttaaaaataaaatcattttagccctttc

SEQ ID NO: 256474 - DNA, 896 bp, Homo Sapiens
ttgcattaccaaagaagaggaaggacaaaaggcaagcgaaagatctgtaaaggcttccactttttgtgaggtactcctgcagttcaaacaacgtatgtgagttcgtagttttcctccaaacattttttctattaaagtcttctcaccgtcacttgtacgaggggtctctgttagtactgctgctttactagctacttcctgtaaagaagtttcactgcattccagaatttcagaaggcttgtgtgaggcctgaactttcaagatcttttcttcttcatggagcctgtcaaggagaaatctgaggtattcagaacagtcttgctgtgatctgggagtaaaccatggaggtctggaagcctcaaagaatatccgaggtgcgtatgcttccctctgtgtatgggccagaaaggcaaaaagatgctgtaattttttcattaatgaattgcacccatttagatttaaagataatacttgtctcctgaaatctgtggccataaacaaggcttgtataacactgttcatataacatgtatttcctaggttaataagaccagttttcccagtttcagattttccagaaagtctagacaagcaagacgccaaagaattggattgagaagtccaggcactttgattgagaattaacttaatcttctcttcactgggcttaggaaaatcctttattgcctccagaataggttcatagagatctggaaatccagaataatgatacatcatacagtgtatcaattctgttaattgtactaagaaggctgtacttgaaggcagaccatcatttgaaagaatgaaccaaattaaccacatgaggaacaatcaaatggaacgcctctggagaatgctgaaagctaagcagcatgtgagaaagaactgcaaga

SEQ ID NO: 256475 - DNA, 253 bp, Homo Sapiens
acaaacaacacgggattcaaactgtgcttttgtgtaactggaaaaagtaaagtttatctgtttcacatgattgaagcccttatggaattttagagaaaacagtggcaaatttacatctcaaagcacagagagtgatggaaagtttaagcttaaagatgattttgtgttagttagaggaagataaagaatgatgctaaggtagcacaggtagcttttaatttgatctctttcccaactggacaactgagctcag

SEQ ID NO: 256476 - DNA, 483 bp, Homo Sapiens
aaaagacacaagatcctgatccatagctgttataaatataggaagcagggggttcagacagatgtaaggaagggattatggaccaggtggaaagtatctttgccttggatttcctcaaatgaatgtatctatagggaaccttgtacttgtactgctgtccagaaacccaacggaatggcaggttgtctcctgttacagacacagggaataatgggttttctcctcttgcagatgtaaggatgacttatcaagaaactttcacacagcacaggtatgcacaacagagttgaagagcttgaaatgcagagagtacatcttggatctgagagtacccttgagctccgtgttcagcaagaaagcagtgagcgccatgggctctgtggtactggcatcaggttactcacctgtcttggagcttatcaacgatctactttacatctcatatttgataccagaaactgctaaaaataaaatcagatcaag

SEQ ID NO: 256477 - DNA, 1751 bp, Homo Sapiens
  misc_feature (1023)..(1023): n is a, c, g, or t
  misc_feature (1102)..(1102): n is a, c, g, or t
  misc_feature (1195)..(1195): n is a, c, g, or t
  misc_feature (1378)..(1378): n is a, c, g, or t
  misc_feature (1395)..(1395): n is a, c, g, or t
  misc_feature (1615)..(1615): n is a, c, g, or t
  misc_feature (1687)..(1688): n is a, c, g, or t
  misc_feature (1727)..(1727): n is a, c, g, or t
ttctagtgtgactacgtgttaaggtcgtgcaattaatacaacgagagtaccatttgtgttgaaaagtaggtggttaggggcttccaaaagcccctggtagctgtgcccacaaaggaaaacgagtgtagacacgaaggggaagaagtctgtgctcaacttgttagaatatagggctgtttctcccgagattgaggtagcactacaacgcagaggaccaggcaggccagagtggccccacctgcccttgccccctctaggctaagtgaaacagctagagagagggcggcaagcgcagggacttgacctccagctctgtctagtcaaaacactttaagatgcgctctccaatcccaataaaatagaccccttgagcaatcccaaagagaggtgctatgaccagtgcccggcagccagcgcctttcatgaaggcagatggtccctcctgaatccagagtttcctggcacagtcggtgatcccactgtacatgtcctcgcccaggcctttcttgagggtttggattcgagttttcagaacatctagaggcgtcactgcgaccgcagctatggaacctgccacacagcctgacacgaaggaatgtgcaaaggacgccttaccggcgagctcgttgaaccccaggttgttaaggttggcaaacagtgggaagtagatgatggagaaaggaatgtctctgaggagagtggcacccaggcccctgtagagcccagccaggccctgagtgcggagcagctcccaggcaatgagggtggcagaggggcgcctgtgggtggaagccgaaccagttgtgtaggacctggaggtggagggtgctgaggccgagccctgatgatggacggccaggcgtccagcatcctgcagctgaatcttgagcatttccatgggacagggtcaccacgacctggcacatcccagccccacacccggcaagcatctccatcttcaggttccgctgcatcccatcttccatgagcagccgccggaaaaagtcgttggccgccagcttnatggccttctctggagtgaccagagtgaggttcactgcagcccctcggtacatgccgaagaagccctccgcccgagccntcttcatcaggcagtcgatcattcctttgtacatggctttcccatgctggttctgcaggcgagtcttggccaagtcgatggggaacacgcagntcacccccacgagccctgctacacctccattgatgagtttggctgtgatgctcagatcctggtgggtcattctgcaggggctggggatcccaggacacaaggctgctggctccttggggtagccgctgttggggctgtctgggggaagaagtggaagcttccttggctctggccccgtagcantttggacagagcacggnttttgagtgcagcctggcccgagccaccttcccggcaagtgacgacctccttgggctgcggcttcctcccctgctttcggtaagaacctctgccttttctggaacccaggatatagttcagatcgctgctgagctgcagggagaggtggctttcagtgtcagccagcttggactggttttcccttctgtggtcagtttccctccctctgcctccccctcntcaccactgcagggttccagactctcaccgcacactgcaccttcaaataggttgggtttgaagcaaaacccnnagaggctactatccagtcaagccacgctgcacctccccnggtggcaagtaggttgctgtttac

SEQ ID NO: 256478 - DNA, 1002 bp, Homo Sapiens
  misc_feature (23)..(23): n is a, c, g, or t
  misc_feature (832)..(832): n is a, c, g, or t
  misc_feature (901)..(901): n is a, c, g, or t
tgcctccctggcctcgcgtgagngctccctcaacccgggagaaacagccctatatctaacaagttgagcacagccttcttccccctcgtgcctacactcgttttcctttgtgggcacagctaccacagggcttttggaagccccctaaccaccctacttttcaacaaaaatggtactttccgttgtattaattgcaggacccttaacagggtagtcacaatagaagggttgtttctgtattttaacatttctatttcacagtcaaactcggcattcttcagtcagcttgaggatttagcattgttaatcttggactccataacttatgagtcctagcactgattttgaggaaaaggaggatcagaagttcaagggaccgtgaaagccctcagagtcagcacctagtttgagaccaagcaccctttcgaatccctggatggctgagggggctgaggccggctctgactgggcagctcagcccctcccccagagcccagggtcttgcacacccctccctgtaaccaaggaacactctgaaataaaggtgaatggctaaaatctcatctgttcatcagtgggtacagcagataggctgcagtgaatgctatcaccatctacttttctacgtccatttcaaaaccaaacattaaaaagggcatagaagcagacccccgtcactcttcaaactgttacttgtgggggtggaggaacacagccatagggaaatatctgcttgttagtgacactgggttttaagccttgattctatcccttcataagtgaatcgtcttgaggagctgagtttgctgtgagagccctcctcacgcacctngattcctcccccaaaggctgctacaggagagataatgtcacagcagcagggccaagtcctaagacctgngctacaaggagaggatggtgctacatggtcagcctggggcctactctctgtatgaaactgatttgatattggccttgaacaacctagttaagtccgctcaa

SEQ ID NO: 256479 - DNA, 642 bp, Homo Sapiens
  misc_feature (29)..(29): n is a, c, g, or t
  misc_feature (84)..(84): n is a, c, g, or t
aatcgtgtccccacaatctacccaccacncatatatttctcagtaccagcaagggcatggctcacagagccactgggagctganagcaatttggcagaatatgtcatatacctttaaatgatatgtgtgagcactgctgggaactcagccttgagaaacatattaaaagctcatgcacagagatatttactgcagtattatttatcagtcttcaatttgaaaatggcctaaatatttaataatagggaagtggttaggtaaattatggcacagacaaaaataggctagtatggagtgatcaaaaatggcgtttatcagagtttatagtacacaaaaagtgtcatgttggggtaaaaaaaataagatgtaaaatgtacatataagatgatctcatgtatgtaaaaccaacaaactgaaaacattctgcattaaagaaaagactagaagaaatatacacttacctattcccttggattctcccctagaggcagcagacgccccttcacatggctgcagagcacgcctggcaggacatagcaaatatgctcctcattgctggggttgacttaaacctgagagataaggtacctctgctaacaacccacctcgcttcaggctttcatggctccccctttgccagag

SEQ ID NO: 256480 - DNA, 1782 bp, Homo Sapiens
gggggccccctcgctggagcaacgcaagcaggaggcgggggagtcggaggaggtggcggcgctggagctcctcccggggaccagcgacccggggagcgagcacgtcgctccgcaccgctcttcctccagccgctgagccgtcccttctcgccatgtcccagagcaggcaccgcgccgaggccccgccgctggagcgcgaggacagtgggaccttcagtttggggaagatgataacagctaagccagggaaaacaccgattcaggtattacacgaatacggcatgaagaccaagaacatcccagtttatgaatgtgaaagatctgatgtgcaaatacacgtgcccactttcaccttcagagtaaccgttggtgacataacctgcacaggtgaaggtacaagtaagaagctggcgaaacatagagctgcagaggctgccataaacattttgaaagccaatgcaagtatttgctttgcagttcctgaccccttaatgcctgacccttccaagcaaccaaagaaccagcttaatcctattggttcattacaggaattggctattcatcatggctggagacttcctgaatataccctttcccaggagggaggacctgctcataagagagaatatactacaatttgcaggctagagtcatttatggaaactggaaagggggcatcaaaaaagcaagccaaaaggaatgctgctgagaaatttcttgccaaatttagtaatatttctccagagaaccacatttctttaacaaatgtagtaggacattctttaggatgtacttggcattccttgaggaattctcctggtgaaaagatcaacttactgaaaagaagcctccttagtattccaaatacagattacatccagctgcttagtgaaattgccaaggaacaaggttttaatataacatatttggatatagatgaactgagcgccaatggacaatatcaatgtcttgctgaactgtccaccagccccatcacagtctgtcatggctccggtatctcctgtggcaatgcacaaagtgatgcagctcacaatgctttgcagtatttaaagataatagcagaaagaaagtaaatctggagcaacttaaaaaatctttcagtagcacataaaaagttcccctctggccccttcccaagtaaaacttttaccgtagtgtttatgtcttgtttctaaatctcttcatagattccatcaacactccagatttaattatctcctcatagttgttattaagctctttttaatggcttcaactttgtatcagtatactgtatttataaactttgtaccacaagagagagtgtagcacccattttacagtgccatgcacatcagagaaagaaactgcatgtttgttgttgatgatgaaataaaaatgctagcgacagtctttcttactggtgcttaagctcttctttgcacaaagctttataaagggaattcaaaggaagccctttagaattagagtcttgagggacagcactaacaggcctttattaagtatgattgattgttaaatttcagggaacatgattggtctgctgtgtatttgaattcatgtaacaaagaactgttacgatgggattctgctcattttattaaaaagctactgacttgactgtcatcctgttcttgttagccattgtgaataagattttaatgttgataattctgttatttacatatctctaatttactttgaaattcaaaggtgaaaataaaaaatgatggcctaagtaaaatttacaaacataaattg

SEQ ID NO: 256481 - DNA, 643 bp, Homo Sapiens
tagaagcaggccatgtgcgtcctttctgcctgcctctgtaggtagattccactccgcctcccctgtgtggattcccacattggagcgcgggctgggtgggtggcaaggagagcagtaggtttgtgtggagcatgggcttggagccagctggactcgcatgtcccctttcccttgttacctttgtcacgttccctcatcactgagccttctgtttcctcacagtaaattagagataataatcatttgggtattttttagcaaattcgtattgtctactgtgtgtaaggtaccgtccaggggctgggtatacggatgtttgggagatagaatgagatcatagtgaatgtttattgcctctaagcctctttataggaatgagcccccactgaagcctcgtgacagtgctataaagcaggacactgttatgaccccattttctagatgaagaaattggaaactcactcaggatcccatagatattacatggtagaggctgtatttgaatccaagcagtctgactccagagttcttcaactgcatgaggagtgcacacacttatggttctttaacggagggacttgtctctcagttagatccccttcactccttgcacctactccacctttgagcatccggggcaact

SEQ ID NO: 256482 - DNA, 647 bp, Homo Sapiens
  misc_feature (601)..(601): n is a, c, g, or t
caagagctcacactgaatcaagttaggtacacttttctagtgtgaaattttctgattccatcagaaacatacatcattgaagagggccttcataatgcaaaaggagtaaacagaagataggtttaaaaaggagaaattcatcatctctacatcaggcattagaactgtaagctgtatagcaaaagcacacaccgaagctccagcctatttctgtatcagtcattgcatgctcatatcagagcatcacaatccagtatgagggggaaaaatctgaaaaataactctaactatcaaagataatcaattaaagacacacaggtggcaatcctcaggagttggatcatccttttttccacagtaacttattctgtttcgattaagtgtcaaatgattagcaacaaaaaataacatatggttttaatttcttctagaaagtttgtcctccctcttttgtaatgcattaaatgcaagctatagtcactgtgtgattgctgtagtgttattaacacacattcacagtttttgaaataatgcataccaaatcagacacatttcatagtacatacatgtagaatgccattttctcatatttaagtgattntttcatgtgtagaagaatatccttaatactaactgtaaattccaca

SEQ ID NO: 256483 - DNA, 648 bp, Homo Sapiens
aactataaaaatgaaagataatattgaatttatctgaaaaaattaatcttgagttttaatgcattttactggataaattatcgcaatgtaaccgagatacagcctgtagagtgccttagttacatagtgcagaggatgtttttacgtttagccataaccagaaactaagtaatcaaatcaacaatggagattatcattcagtaaaagatatcgttaatacaagaaatttgcaattcaaaaccattcatcctgtgatacttagatgtatggcatgtacatgagaaatacgaagcattgcaagtaaatggaaaactcctgacctaacctgcatgcccccagctgaccaaagaactagactgtaccattcctgtggagccactgcatcttaagcatggcctgtgctgtacaaatagttagttatgggaattttcttatctttatgctgagacactgtcttgaccatgttaatctggaaagctcgagactcagactctgtcctcgtgcgacattctgcttaagctcgtgtatcattatgtgctagagagctcttatattcctgactaccgtatttcatgtgaactgtggtatatttttgacggttattttatatacgtttcatattaagtaaatgtgttccttaatctactt

SEQ ID NO: 256484 - DNA, 399 bp, Homo Sapiens
aaactataaaaatgaaagataatattgaatttatctgaaaaaattaatcttgagttttaatgcattttactggtaacttattgcaatgtaaccgaatacagcctgtagagtgccttagttacatagttcacaggatgtttttactttagcgcaaaccagaaactaagtaattaaatcaacaatggagattatcattcgtaaaagatatctttaatccaagaaattttcaattcaaaaccattcatcctgtgatacttagtgtatgtcatgtacatgagaaatacgaagcattgaaggtaaatggcattcctgtggagccactgcatcttaagcatggcctttgctgtacaaatagtctgttatgggaaattactatactttcttttgagacactgactt

SEQ ID NO: 256485 - DNA, 601 bp, Homo Sapiens
gatttatggtttttaacacaggactaaagagctgaaaccaacctagatttgtgtttgtgatataaactttaagtgtcgagggaccatgccagcaactaccaaaaatctcttaaatcttcaggtacagctggcattttggcagatgcatagagacatctgagaccctcagaaaggaaggataatccaagaatataggaaatctgtgttctcttcctttcattttatcccttatatttctaaagactaattataagtaatctgacattttaatgtagctactcttatttattttttctttctgaggtattaaaatatctggactgagttttgccaaatgttaaagggagaagagttactgaagactttgaacacttgctttttgtgattgcttatgtcattagtgcctcatgactgtgtttgatgtcctttattgatacaaagtgagcctgtgccttcattatcttgcccattttaatacaaatggaaacctggtgtttgaaaatctctgaactgtgtgggttttggaggaatatacctgaattttattcaataacagtttctggacaggaagaaaaatacagttacatatttataaaataga

SEQ ID NO: 256486 - DNA, 1433 bp, Homo Sapiens
  misc_feature (710)..(710): n is a, c, g, or t
  misc_feature (727)..(727): n is a, c, g, or t
  misc_feature (797)..(797): n is a, c, g, or t
  misc_feature (818)..(818): n is a, c, g, or t
  misc_feature (821)..(821): n is a, c, g, or t
  misc_feature (833)..(833): n is a, c, g, or t
  misc_feature (844)..(844): n is a, c, g, or t
  misc_feature (846)..(846): n is a, c, g, or t
  misc_feature (899)..(900): n is a, c, g, or t
agcgaggcctgggtggcgaattcggcacgaggtttaaaaacctcctctttttacatcgaaacctctcattcagttggcatgcctttggctgtagcgggagaggtgatgatccagccttatcctgttctctccacagtgctccacggcggctgccagtgagccctgtccctctcctgcagatctgagaagtgctccattgtcacctcaattcttgagcttatctgggtatctccagcgcaccctgtttatgtcttcttctgtgcccggggctactctgaaagttgtcctgcacctgagtgtccggcggccctgcctgagacaccccctccttgtggagcagcttaacaattgcatcagctttctcctgtgctgattcttcatgagaacgttgccaaggcgctgtggagacaccgtttctctagttgtgcagctgcaaggtcacagacagagaaactcaagtcgtaaaacatgtttttccttcaaaaggaagaaatgatgtaaggaatgtctcaattcattgaatcactgtctttgtttctcgcttctgtaacatgcttccccctgcaccgatctccccccaccccgcgaaatgcttaaaaggtaacttaactctttgttcagagctcagtcctttggatgttaacccgactgggctggtgcacctaaataataaatatctccctgaactccatcagtctctctgattcctnaaaaatcccgctacatnttgtgtaatgaactggcaacaagagaaagttggtcgaagaaaggcagaggaactgtgtcttgtaagaatnagaaccgaggggcgccataancancgggcacccgcncaaggtggaancnagggtgagaaagggacaggagaggaacgccaggaatctcacggattctcctgnncaggtcccggtcaactgtggccacaatgtaacacttatgctgagtcactctctgtactaagcagtcatctgcataggttcctttgtgtgtacatggtaatcgttcaaatcttggatccttggcaatccttagagccactcgatacttctgccccaatttctcaatttcagccattacacaatcggttatacatgggatacacttggcatacagacagtccatcattgactgcactaagtccagtttggcttttatggaaaagttgataaagttggtatcaacgaggatgtggtaaggtgggcccagctgtgtattatattggaaaaataagcaggaagggtgttggggaacttctctttcctttaatgcgctgggatccttcttttctttctttttaggttttaatctatccttttctttaagcctctgatctctgagactaagcattcgcttcatggtcgcatacttccttgttttcttttgcttccccatggtcacgccaaactcctggttcttccgtaatcaccaacggc

SEQ ID NO: 256487 - DNA, 766 bp, Homo Sapiens
aaaaagagagacacgagaaagagaaaaaagaagcacttttgtctttgtacagtcagtgggctcccaggaaaatgttccttctctttttgttggcatgggcactgtgggatctggtgcattccggtcgacactctcgtttatttggactgtaagtctgacctctatgaataattacttcagcccctgagtgcttccgggccaagctccttggccaaactttcaccttaacttctgataagtcttgggccaagctaagcagcatctatcaatcatcccttcagctcctgattgatcccgggccaaagctgggccaaagctgagccacacgtttttcaagacagcctgtgaactaggcacatatccttcccttcccagtccataaaaaccctggacccagcctcgtagaggcaccactttcagacacctatctctgctggcaaagagctttcttctcttgcttcttaaactttcactccaacctcacctttgtgttcacgctccttaatctccttagaggtagaacaaagaactctggatgttatctcagactacgagagactgttacatcttgggtgcactgctgagactacgacacttgggtttctttgagtttgactaaatattttacatgagtgtaattatacagctttcctttttgactgtcttattttacttaacagaatgtttttgaaggatttgtccttattgtagtactttttcaagatttccttatttttaagggtggatgctatcccagtggattgta

SEQ ID NO: 256488 - DNA, 1019 bp, Homo Sapiens
aaagagcgaggcctgggtggcgaattcggcacgaggccaagatggttgcccccgcagtgaaggttgcccgaggatggtcgggcctggcgttgggcgtgcggcgggctgtcttgcagcttccagggtgagagggtggcgagcagcggggggggcgctgcgaggaaggaagggggccacaggcaggccgcgtgggcccctagagagagcattgccctgggggccggagtatctggattcaagcttctaagttagctgcgtgaccctgcgccaatccgaaggtttagtgactacctctcgcctaaggagtctggctgatctagggttctaacgcggagctgaaagtgcggttcagctaaagagctcagatctgggatcgcctgtgaattgggatgggtgtgtaggcgccaagcccatccttaccgttagcacttgaccaggaggagactttacccgcctgcttggggaatgtcctcctacttgggacaagggcctgaattgttgtggctcaggtttagctcgcggtctccgcgccgctctccctcgtcggcgcgttggcagtcatgcctattgttaagtcaaacctactcgcttgtggagtcagcttttgcctgcctcctcctttccccccctcccaggctaactcaggtgagatggagccgctatagtcctgaattcaaggatcccttgattgacaaggaatattatcgcaagccagtggaggagctaactgaggaggagaaatatgttcgggagctcaagaagactcagctcatcaaagctgctccagcagggaaaacaagttcctgtgtttgaagacccagtcatcagtaaattcaccaacatgatgatgataggagggaaacaaagtactgggccgatccctccatgattcagactccgggaacctgggcaaaagggaacacactttgaaaaagaccatggcccgcttttggagaggaaacggtcaaccactccaaagggcaaccccttaacccttctttccagtcaggccctggaac

SEQ ID NO: 256489 - DNA, 1716 bp, Homo Sapiens
gggaccgagggccgcgccagactgcgacggatacagggagggcaagggtttccttttggcgcttccctttggaccccggagtgaaaaactctaacgtccagatcagtggagagaaacgcagatttaggaccctgaggagtctttttcacccgtttcccgtcactcgctcaggcgcgccgagggcagtccttgtggggtcctcgtggccagccaagatggttgcccccgcagtgaaggttgcccgaggatggtcgggcctggcgttgggcgtgcggcgggctgtcttgcagcttccagggctaactcaggtgagatggagccgctatagtcctgaattcaaggatcccttgattgacaaggaatattatcgcaagccagtggaggagctaactgaggaggagaaatatgttcgggagctcaagaagactcagctcatcaaagctgctccagcagggaaaacaagttctgtgtttgaagacccagtcatcagtaaattcaccaacatgatgatgataggaggaaacaaagtactggccagatccctcatgattcagactctggaagctgtgaaaaggaagcagtttgagaagtaccatgccgcttctgcagaggaacaggcaaccatcgaacgcaacccctacaccatcttccatcaagcactgaaaaactgtgagcctatgattgggctggtacccatcctcaagggaggccgtttctaccaggtccctgtacccctacccgaccggcgtcgccgctttcctagccatgaagtggatgatcactgagtgccgggataaaaagcaccagcggacactgatgccggagaagctgtcacacaagctgctggaggctttccataaccagggccccgtgatcaagaggaagcatgacttgcacaagatggcagaggccaaccgtgccctggcccactaccgctggtggtagagtctccaggaggagcccagggccctctgccgcaagaaacagtgtgagctactgccacgctgaaaactacctgtgggttaaggatgtagttcctttgtaagggtgggcaggcctcgtaagaaagatgtagcagcatattcactatccgttaatccttctttctttgaggctggaacttgctctctctgcccctatttccttgtaaagagggagcacattgacttgggaatttcctcccaggaaactcagggctgttttctcttcccttaggttggggcggacctttggacatataaaggaagcagttttagtatcagaaaagatttattagaaaattctcacgctgaactggtgtagcatgtggtgcagcattcagtgaaactggctggaggaaataggcttgtttccagagttgtccttatacaaaatgtataaaaagcagtttctggtgtgcaaaacaaaaaagcaacaaaaccaaccaacaacaccttttggggccgacttgggcctcggaaaggtttttggaaccccttcgtttggggcccggggccccagttgggctacggggacacggggccacagagagcggttcccccaggggagaaaccgcgcgccacagacaccaacagggcgcggggaattcccaccccaaataaaaaaaggccgcggggacaccagcaacggctccggacacatcccggaaggggagccgggagaggccaaaaggggggatctccacaggggggctcaaggaaggccgaaacaatgcgg

SEQ ID NO: 256490 - DNA, 414 bp, Homo Sapiens
gtcacacttaaactggagaagttacactgaactataatcacactgaatgttagactttttcatctgccaaaaccaaaaaccattttgatctccctgtggctatcaatataacgcacaatcacaagtgtatgaagacttagaaattaatcctttgtggtaggagatctgctgaatgatggaaatcttattactaccacaagactatttgatctggtaattggagacttccggatttaggagatctccatgtctgtatttactctaccactgctaaagtgagtggtcctgggtagtttacttgcttgcggaaaatgagaattgatggtgtacccaatgccccacctcacagagttactaaaaaatgtctgtaaagcatatttacctcttgggagatatgcactatgtaaataaggt

SEQ ID NO: 256491 - DNA, 561 bp, Homo Sapiens
cttttcgcgtctgcggtgcccggagtgtggtacttctcctagttgcagtcaggcttcatacgctattgtcctgcccgtaagttcccgttttgtgtgtggttagagcagccagcgggtacagaatggatttggaagagggagtcaccactggacctccaaggaagccacgtgcagacatctacaaccttcgatctcctgacgagtttatgttggccaaaaccaggctttgattgaaccaggatgaatgcgggtgttggaagtagaatatatatatacatataaaattggttgggagccacgtgtaccagtgtgtgttgatcttggcttgattcagtctgccttgtaacagaaactggcgatggaatatgagaggagccctctggaaagaaaaggacagaccctgtgctttcatgaaagtgaagatctggctgaaccagttccacaaggttactgtatacatagcctgagtttaaaaggctgtgcccacttcaagaatgtcattgttagactttgaaatttctaactgcctacctgcataaagaaaataaaatcttttaaatc

SEQ ID NO: 256492 - DNA, 821 bp, Homo Sapiens
aaaaaaatctttcgcgtctgcggtgcccggagtgtggtacttctcctagttgcagtcaggcttcatacgctattgtcctgcccgttagagcagccagcgggtacagaatggattttggaagagggagtcaccactggacctccaaggaagccacgtgcagacatctacaaccttcgatctcctgacgagtttattgttggccaaaaccaggctttgattgaaccaggatgaatgcgggtgttggaagtagaatatatatatacatataaaattggttgggagccacgtgtaccagtgtgtgttgatcttggcttgattcagtctgccttgtaacagaaactggcgatggaatatgagaggagccctctggaaagaaaaggacagaccctgtgctttcatgaaagtgaagatctggctgaaccagttccacaaggttactgtatacatagcctgagtttaaaaggctgtgcccacttcaagaatgtcattgttagactttgaaatttctaactgcctacctgcataaagaaaataaaatcttttaaatcctgtgcccacttcaagaatgtgtgtgttgatcttggcttgattcagtctgccttgtaacagaaactggcgatggaatatgagaggagccctctggaaagaaaaggacagaccctgtgctttcatgaaagtgaagatctggctgaaccagttccacaaggttactgtatacatagcctgagtttaaaaggctgtgcccacttcaagaatgtcattgttagactttgaaatttctaactgcctacctgcataaagaaaataaaatcttttaaatc

SEQ ID NO: 256493 - DNA, 415 bp, Homo Sapiens
gggctttcgcgtctgcggtgctcggagtgtggtacttctcctagttgcagtcaggcttcatacgctgttgtcctgcccgttagagcagccagcgggtacagaatggattttggaagagggagtcaccactggacctccaaggaagccacgtgcagacatctacaaccttcgatctcctgacgaaaactggcgatggaatatgagaggagccctctggaaagaaaaggacagaccctgtgctttcatgaaagtgaagatctggctgaaccagttccacaaggttactgtatacatagcctgagtttaaaaggctgtgcccacttcaagaatgtcattgttagactttgaaatttctaactgcctacctgcataaagaaaataaaatcttttaaatcaacaagcggccaccaaaagc

SEQ ID NO: 256494 - DNA, 488 bp, Homo Sapiens
ggcttctttcgcgtctgcggtgctcggagtgtggtacttctcctagttgcagtcaggcttcatacgctattgtcctgcccgttagagcagccagcgggtacagaatggattttggaagagggagtcaccactggacctccaaggaagccacgtgcagacatctacaaccttcgatctcctgacgagtttattgttggccaaaaccaggctttgattgaaccaggatgaatgcgggtgttggaagtagaatatatatatacatataaaattgaaactggcgatggaatatgagaggagccctctggaaagaaaaggacagaccctgtgctttcatgaaagtgaagatctggctgaaccagttccacaaggttactgtatacatagcctgagtttaaaaggctgtgcccacttcaagaatgtcattgttagactttgaaatttctaactgcctacctgcataaagaaaataaaatcttttaaatcaaaaa

SEQ ID NO: 256495 - DNA, 1936 bp, Homo Sapiens
  misc_feature (89)..(89): n is a, c, g, or t
  misc_feature (144)..(144): n is a, c, g, or t
  misc_feature (183)..(183): n is a, c, g, or t
  misc_feature (191)..(191): n is a, c, g, or t
  misc_feature (307)..(307): n is a, c, g, or t
  misc_feature (383)..(383): n is a, c, g, or t
  misc_feature (400)..(400): n is a, c, g, or t
  misc_feature (798)..(798): n is a, c, g, or t
  misc_feature (805)..(805): n is a, c, g, or t
  misc_feature (808)..(882): n is a, c, g, or t
  misc_feature (1569)..(1703): n is a, c, g, or t
  misc_feature (1723)..(1723): n is a, c, g, or t
cgcggtatagatgcccccggtttagatcgcggccggatgtatcgcgggcggggttaccagagccggtattttttcgtcggaaaatcgcngcggcccgggcgggaacacagaagaattggggcgcaataaaggaacaacattatnccgatggggaggaggctgtatggaccccagattatattntttgtttnagggatggggggggccccgggcaaaagagaactgagacaccacttgttgcagggcgacgcggccgggtatatcccaactcttagtgtgggccgcgagagtgttgtctgtctcacanccaaagtacgaccgctaaggggcgttgtttgttgcgtcgcaacgcgcgggggcgaaatattctgggggtgtaattncgcccggcggcggggcngttttatagaggggggtacaataaccacagcaccgcgcgccggaaggagagtgggctatagaacacagaattgcggggcacagcgaaatgactgcggaataggaaattggccccgccgggcgggggggcccactatcgtgggaccatggcaccgcgcgacagagtcgttggtagtgcggaaatataatcccccgggaagtcgcggggcgggaggcaaatccccgggaggggggttgtttggagaactcgcttggtgtgattcgcgcggcagagctgacttggcttagggggtacgcgccaaataactaggtgtaggacacaggcaatgcgcgcggacatcagaccgggagctctttttgaaatcactttatgggcccgggtcccccttcctctttgtnttcttcntcnnnnnnnnnnnnnnnnnnnnnnnnnnnnnnnnnnnnnnnnnnnnnnnnnnnnnnnnnnnnnnnnnnnnnnnnnnngatttaaaagattttattttctttatgcaggtaggcagttagaaatttcaaagtctaacaatgacattcttgaagtgggcacagccttttaaactcaggctatgtatacagtaaccttgtggaactggttcagccagatcttcactttcatgaaagcacagggtctgtccttttctttccagagggctcctctcatattccatcgccagtttctaagaaagaaggtggattacaatcagtgctccattctggtctataccgcttcttgtttagggtatgaaaatacatgtgactaagacctggtcactccaagtccatcccctttatcggtacggccaagtaccgataaacggagctgggaaacttcccaatctctaataagacaactttaattctgtacttttattgaatcccatattgtacctgcgttggcaaaatgtttaaccttcatctaaaaatgacttcatgtcacagtaaacacagaagacaaaaacccagaatgaggacactaccagtaaaaatcttttaaaggatgagaagctgagcagtggggggtatggctgtagttgcagctactgaggatattgagggtgggagtttcccttgaagccatgagtttcaagcaatcatgcctgtgaatagctactacactccagcctgggtcacgtagcaaggctgccaactctnnnnnnnnnnnnnnnnnnnnnnnnnnnnnnnnnnnnnnnnnnnnnnnnnnnnnnnnnnnnnnnnnnnnnnnnnnnnnnnnnnnnnnnnnnnnnnnnnnnnnnnnnnnnnnnnnnnnnnnnnnnnnnnnnnnnnnnagaccccattctcgttaaanacagaaattgggatacctgtatgttcattcaagaaataacccaagtaatgtgtattaaagacattttaggggcaaataaggatacttgaataaagttataccaggcttaggatctatttaacatcttagacgtaagggtcattgttatatgcaagatgtcttattacatgaatgttggactttaagaactatgcacattcacacatccaaaaa

SEQ ID NO: 256496 - DNA, 711 bp, Homo Sapiens
accaactcccccaggatgaagtcgtcttcttcggtgaccacttccgagacccaaccctgcacgcccagctccagtgattactcggacctacagagggtgaaacaggtaacttgggggggaagttggggaccacagcaagagagatctaggtctggcccctgccactggcatgccgtatgatcctagataacatctcagaaacctcaggtttccaatctgacaaatggagaaactggattgggtcaaggatgaccgagactccacacccccttttctggcacctgtgacagacattattaatctatcaccgcgctcattccagatgagtgccttgaattctttccgcacattgacccagctgtccatcaccaattggagttggcacgaggctggaatgcgcttgccaaccttggtactggatgttctccagtacttttccggctccaaggatccagaattctccaatagaatcctacactcactctgcgaccttgacagcgatgtcatggtgtcgatgtaagggtaggtctcaaacctactacccctggctcatccatcaacagtaaagacgggactctggcatgcactgtggctcatgtgtgtgacctcagaacggttggatggctgagtgggatcgagcttgatgccccttatttgagactcgactgggcaacatagggagaccccctttattaagtccatgtacaattt

SEQ ID NO: 256497 - DNA, 1125 bp, Homo Sapiens
  misc_feature (881)..(972): n is a, c, g, or t
  misc_feature (1095)..(1095): n is a, c, g, or t
gcctgggtggcgaattcggcacgaggcaggcctggccgcagctattgctggagccaaactcaggaaagtcagcaagcaggaggaggcctcaggggggcccacagcccccaaagctgagagtggtcgaagcggaggtgggggactcatggaagagatgaacgccatgctggcccggagaaggaaagccacgcaagttggggagaaaacccccaaggatgaatctgccaatgaggagccagaggccagagtcccggcccagagtgaatctgtgcggagaccctgggagaagaacagcacaaccttgccaaggatgaagtcgtcttcttcggtgaccacttccgagacccaaccctgcacgcccagctccagtgattactcggacctacagagggtgaaacaggagcttctggaagaggtgaagaaggaattgcagaaagtgaaagaggaaatcattgaagccttcgtccaggagctgaggaagcggggttctccctgaccacagggacccagaagacccgcttctcctttccgcacacccggcctgtcaccctgctttccctgcctctacttgacttggaattggctgaagactacacaggaatgcatcgttcccactccccatcccacttggaaaaccccaaggggggtgggggctttccctgctcacacccacacttggctgctgattgggctggggaaggccccccgccccttttctcccctttgggcccttccccctctggccatcccccttggggggccgggcccctctgcctgggggatgcaccaaatgaaaccccacaaggaagggggggaaaggaaaggaagggaattttcacattcccccttggtccaaaaatcacctttaccgctttattggnnnnnnnnnnnnnnnnnnnnnnnnnnnnnnnnnnnnnnnnnnnnnnnnnnnnnnnnnnnnnnnnnnnnnnnnnnnnnnnnnnnnnnnnnnnnccctccctggggctttgaatacaaccgggaaggccgggacgtttttttacatgccctaaacccccgcggggctcttctcccctcttggggcacatctctctctcgcggcggagggggcagctnccgcgtccccccgctcgcctctcgcttccc

SEQ ID NO: 256498 - DNA, 670 bp, Homo Sapiens
ggcaattcggacgagggccatcaggaggagccagaggccagagtcccggcccagagtgaatctgtgcggagaccctgggagaagaacagcacaaccttgccaaggatgaagtcgtcttcttcggtgaccacttccgagacccaaccctgcacgcccagctccagtgattactcggacctacagagggtgaaacaggagcttctggaagaggtgaagaaggaattgcagaaagtgaaagaggaaatcattgaagccttcgtccaggagctgaggaagcggggttctccctgaccacagggacccagaagacccgcttctcctttccgcacacccggcctgtcaccctgctttccctgcctctacttgacttggaattggctgaagactacacaggaatgcatcgttcccactccccatcccacttggaaaactccaagggggtgtggcttccctgctcacacccacactggctgctgattggctggggaggcccccgcccttttctccctttggtccttcccctctgccatccccttggggccggtccctctgctggggatgcaccaatgaaccccacagggaagggggaaggaaggagggaatttcagcattcccttgttctagattcacttgaacgcttaatgccctttcaagttttggttttttttag

SEQ ID NO: 256499 - DNA, 847 bp, Homo Sapiens
  misc_feature (31)..(31): n is a, c, g, or t
  misc_feature (45)..(45): n is a, c, g, or t
  misc_feature (53)..(53): n is a, c, g, or t
  misc_feature (58)..(58): n is a, c, g, or t
  misc_feature (77)..(77): n is a, c, g, or t
  misc_feature (82)..(82): n is a, c, g, or t
  misc_feature (105)..(105): n is a, c, g, or t
  misc_feature (150)..(150): n is a, c, g, or t
  misc_feature (362)..(370): n is a, c, g, or t
  misc_feature (383)..(383): n is a, c, g, or t
  misc_feature (391)..(391): n is a, c, g, or t
  misc_feature (408)..(416): n is a, c, g, or t
  misc_feature (622)..(672): n is a, c, g, or t
ggaaaaatgtaaacccgaaccaagaaggtgntcataaactgtgcnatcgtccnggttntcaaagtataacccaggcnacccnccaacttcccatcagtggccgangctcgcccaggtctggggcctcaacttcggcagcaaggaggattnggcccagttttccgccgcatggccagtgccctagaggcgttggaaggaggtgggccccctccacccccagcacttcccacctggtcggtccctctgctggggatgcaccaatgaaccccacaggaagggggaaggaaggagggaatttcacattcccttgttctagattcactttaacgcttaatgccttcaaagttttggtttttttaagnnnnnnnnntatatatatattntgggtttntgggggaaaagggaaannnnnnnnnctctttggttttgataaaatgggatgtgggagtttttaaatgctatagccctgggcttgccccatttggggcagctatttaaggggaggggatgtctcaccgggctgggggtgagatatccccccaccccagggactccccttccctctggctccttccccttttctatgaggaaataagatgctgtaactttttggaacctcagnnnnnnnnnnnnnnnnnnnnnnnnnnnnnnnnnnnnnnnnnnnnnnnnnnnaccccttggaggaaataacatgagggagaaaggaaaaggggaggaaacttctcccctcccaccttcacctttagcttcttgaaaatgggcccctgcagaataaatctgccagtttttataaatgctacaacacaacacctcgacacaattaaaactaccctgtcggcccgtctct

SEQ ID NO: 256500 - DNA, 786 bp, Homo Sapiens
gggtaccggtccggaattaccgggatatcgtcgacccacgcgtccgaccggcaaggggtgcgcgctggggagcggacgctgcatcccctttctgctgcaggaacctctcatcagaccgcctgagggaagcggcgcccggagacccgccccggcccggtccacattctccccaggaagccggactctatggggcgggaccctgggggagcctgagccgagcccggagccagccccgaacccctgaacctccagccaggggcgccccgggagcagccagcccgtgggcgagccgcccgcccgccgagcagccatgagcgagacggtcatctgttccagccgggccactgtgatgctttatgatgatggcaacaagcgatggctccctgctggcacgggtccccaggccttcagccgcgtccagatctaccacaaccccacggccaattcctttcgcgtcgtgggccggaagatgcagcccgaccagcaggtggtcatcaactgtgccatcgtccggggtgtcaagtataaccaggccaaccccaacttccatcagtggcgcgacgctcgccaggtctggggcctcaacttcggcagcaaggaggatgcggcccagtttgccgccggcatggccagtgccctagaggcgttggaaggagggtgggccccctccaaccccagaaattcccaactggtcggtcccgaaaggcctcccggagaggtggagcagcagaaaaagcagcagccggcccgtccgagcaacataaagcgccggtctcaggagaagcc

SEQ ID NO: 256501 - DNA, 644 bp, Homo Sapiens
  misc_feature (536)..(549): n is a, c, g, or t
ttgagatcagggaacatctctgggtctgacagacacatcgcgttcttgaactacagtccgtgccctaaggatgcatgggtatcgacctgaatgctccagagaagctgggactacaggcatgcaccactgcacccagctcccctctttatatgagaacgatagtcattgaattgaagattttaattccctagaactacaagcaaggcacaggataggaagaaacagctgagggaaagactgagttctttacagaggaatcagatggaggagaaacaggaggagaaacacccaggtgagaagagacaccaaacctgttatgagaggagatgagaggaacactgaactgtttattttgtggaagagaagatattgagagatgtgatagcaagtctcaaaaatctgtatcttcattgtctccaccccggtcaagctaccttcatctcttgcctggatgaccacaatgcccacctaactggtttcccacttcactcttgttcccttccaggccacacatcacccagcatgatctgtgatcnnnnnnnnnnnnnntttgagagaggctcaggctgtcacccagctggaatgccagggtgggaccttgcttactgaacccttgccttgcgggttaaaatgatcttctgctt

SEQ ID NO: 256502 - DNA, 680 bp, Homo Sapiens
  misc_feature (594)..(594): n is a, c, g, or t
tatatgccatgtgtcagataaagtctcagccacttgttcatctaatgaaaatgattcatcccaacttatacaggatagacagattgacagatgagggtgcagtacatgttaatggacgggattgtaccacagccacctcttcaaaaattgtctgccagagaagctgacaagagaaggtgctttccttatggactgtggctctgttttttacatttgggttgggaaaggctgtgacaataacttcatagaggatgtgcttggatatactaattttgcatcaataccacagaaaatgacacatcttccagagctagatacactttcatcagaaagagccagatccttcataacttggcttagagacagcagaccattaagtccaatccttcacatagtaaaagatgagagtcctgccaaagcagaattttttcagcatttgattgaagaccggacagaggctgcattttcttactatgaatttttgcttcatgttcagcagcagatttgtaagtgaagtagaataaaattgaataagagaaagatctataacctaggtaaagcataatctgtcagagaagcgcgtgagaaattganatgaaggcatttgtaatacaagatgcaacgcacaggactctgtctgaggctttggtaaaaagtaaaggggaagaaacaagttattt

SEQ ID NO: 256503 - DNA, 804 bp, Homo Sapiens
  misc_feature (80)..(165): n is a, c, g, or t
tcgtgaaagggatagagaccgagaccacgatcgagagcgggaaagagagagggaacgagacagggaaaaagaacgggaannnnnnnnnnnnnnnnnnnnnnnnnnnnnnnnnnnnnnnnnnnnnnnnnnnnnnnnnnnnnnnnnnnnnnnnnnnnnnnnnnnnnnaagggataaagaacgagaacgccaaagggattgggaagacaaagacaaaggacgagatgaccgcagagaaaagcgagaagagatccgagaagataggaatccaagagatggacatgatgaaagaaaatcaaagaagcgctatagaaatgaagggagtcccagccctagacagtccccgaagcgccggcgtgaacattctccggacagtgatgcctacaacagtggagatgataaaaatgaaaaacacagactcttgagccaagttgtacgacctcaagaatctcgttctcttagtccctcgcacctcacagaagacagacagggtagatggaaagaggaggatcgtaaaccagaaaggaaagagagttcaaggcgctacgaagaacaggaactcaaggagaaagtttcttctgtagataaacagagagaacagacagaaatcctggaaagctcaagaatgcgtgcacaggacattataggacaccaccagtctgaagatcgagagacatctgatcgagctcatgatgaaaacaagaagaaagcaaaaattcaaaagagaccaattaagaaaaagaaagaggatgatgttggaatagagaggggtaacatagagacaacatctgaagatggtcaagtatt

SEQ ID NO: 256504 - DNA, 473 bp, Homo Sapiens
tggccctaaagctcactgacatacagttagttattttgtccccagtatgtgtgcattttcagagttgagaatttagaattttagcacccaggggcaatgcgggtggttctgctggcacctcctgagacactggcacttcctcaaggaacattcccagccccagaatcaggggcttctgacagagaagactcatgtgtgcttgttgtttctaatgaactgtagtgagaatcccacatcaaagaatcttcagggagtcaagccttagacatgtgtgctggtgcctgctgcctctggtgtttgactggatgaaaaaattatgtccaaacctggtgttccagcctgttggaaacaacgcatatcaaaatgaggctgaggtccagcatggtgactcacgcgtttggggagactgaggtgggaggatcccttgagcccagaagtttgagagcagcctgggcaacataatgagaccctgt

SEQ ID NO: 256505 - DNA, 1879 bp, Homo Sapiens
  misc_feature (112)..(112): n is a, c, g, or t
  misc_feature (167)..(167): n is a, c, g, or t
  misc_feature (182)..(182): n is a, c, g, or t
  misc_feature (187)..(187): n is a, c, g, or t
  misc_feature (189)..(189): n is a, c, g, or t
  misc_feature (226)..(226): n is a, c, g, or t
  misc_feature (273)..(273): n is a, c, g, or t
  misc_feature (400)..(400): n is a, c, g, or t
  misc_feature (406)..(406): n is a, c, g, or t
  misc_feature (408)..(408): n is a, c, g, or t
  misc_feature (414)..(414): n is a, c, g, or t
  misc_feature (417)..(418): n is a, c, g, or t
  misc_feature (420)..(420): n is a, c, g, or t
  misc_feature (425)..(427): n is a, c, g, or t
  misc_feature (432)..(432): n is a, c, g, or t
  misc_feature (436)..(436): n is a, c, g, or t
  misc_feature (449)..(450): n is a, c, g, or t
  misc_feature (453)..(453): n is a, c, g, or t
  misc_feature (462)..(463): n is a, c, g, or t
  misc_feature (466)..(467): n is a, c, g, or t
  misc_feature (477)..(477): n is a, c, g, or t
  misc_feature (483)..(483): n is a, c, g, or t
  misc_feature (488)..(488): n is a, c, g, or t
  misc_feature (492)..(493): n is a, c, g, or t
  misc_feature (519)..(519): n is a, c, g, or t
  misc_feature (596)..(596): n is a, c, g, or t
  misc_feature (613)..(613): n is a, c, g, or t
  misc_feature (631)..(631): n is a, c, g, or t
  misc_feature (641)..(641): n is a, c, g, or t
  misc_feature (652)..(653): n is a, c, g, or t
  misc_feature (661)..(661): n is a, c, g, or t
  misc_feature (668)..(668): n is a, c, g, or t
  misc_feature (687)..(687): n is a, c, g, or t
  misc_feature (689)..(689): n is a, c, g, or t
  misc_feature (695)..(695): n is a, c, g, or t
  misc_feature (698)..(699): n is a, c, g, or t
  misc_feature (702)..(702): n is a, c, g, or t
  misc_feature (705)..(705): n is a, c, g, or t
  misc_feature (709)..(709): n is a, c, g, or t
  misc_feature (722)..(722): n is a, c, g, or t
  misc_feature (730)..(730): n is a, c, g, or t
cgcgcgacacaacccatggctgcgctgggctgcgcgaggctgaggtgggcgctgcgaggggccggccgtggcctctgcccccacggggccagagccaaggccgcgatccctnccgccctcccctcggacaaggccaccggagctcccggagccgggcctggtttccngcggcggcaacggancttanangatattccacttctatgacatctgctcttcttctttnatctgttcgttcaatgctattcccttcaacttcaccatttacatttnctttacaatgccaattacggtccaatttggatttcctacttagggcctcatatgcacgttaacctggccatttccccgctcttggagcaatttatgcggcaatatggcaattacccattacttaacnacattnanctattnaannancaccnnnaccancacnaccttacctattnnccnttcaccacnnaannacaccacttntaccancttcnccannctcttaaccagcgtgttgcttaatcnagctgaacagctctctatactgattctttcaattagtttatttattactttattactctactggaccagctgcgggnagagagtgcttcggggnacaggtgtcggacatggntcaactcttntactactttgnnttggaagntatttgntacatcctgttcgagaaangnattggntgnntgnagngatncatccccgagganaccgtgancttcgtcagatccatcgggttaatgttccagaactcactctatgccaccttcctccccaagtggactcgccccgtgctgcctttctggaagcgatacctggatggttggaatgccatcttttcctttgggaagaagctgattgatgagaagctcgaagatatggaggcccaactgcaggcagcagggccagatggcatccaggtgtctggctacctgcacttcttactggccagtggacagctcagtcctcgggaggccatgggcagcctgcctgagctgctcatggctggagtggacacgacatccaacacgctgacatgggccctgtaccacctctcaaaggaccctgagatccaggaggccttgcacgaggaagtggtgggtgtggtgccagccgggcaagtgccccagcacaaggactttgcccacatgccgttgctcaaagctgtgcttaaggagactctgcgtctctaccctgtggtccccacaaactcccggatcatagaaaaggaaattgaagttgatggcttcctcttccccaagaacacccagtttgtgttctgccactatgtggtgtcccgggaccccactgccttctctgagcctgaaagcttccagccccaccgctggctgagaaacagccagcctgctacccccaggatccagcacccatttggctctgtgccctttggctatggggtccgggcctgcctgggccgcaggattgcagagctggagatgcagctactcctcgcaaggctgatccagaagtacaaggtggtcctggccccggagacgggggagttgaagagtgtggcccgcattgtcctggttcccaataagaaagtgggccctgcagttcctgcagagacagtgctgagctgagtctccgccttgctggggcttgtcctagaggctccagctctggcacagtggttcctggctgctgccatgtctcagatgaggagggagagaaggaggccgccagactcgagaggtgggaggaactccttgcacacaccctgagcttttgccacttctatcatttttgagcaactccctctcagctaaaaggccacccctttatcgcattgctgtccttgggtagaatataaaataaagggacttttatttcttattgggaaaaa

SEQ ID NO: 256506 - DNA, 1038 bp, Homo Sapiens
  misc_feature (15)..(15): n is a, c, g, or t
  misc_feature (29)..(29): n is a, c, g, or t
  misc_feature (54)..(54): n is a, c, g, or t
ccactccaccaatancagctcagccaggntcccatgcctcccgagactgagctnccactgccagtaagaagtgcagtagccagacacctggatccatctgccccgctgcctgcagtgggcctccatatcttcgagctctcatcaatcagcttcttcccaaaggaaaagatggcattccaaccatccaggtatcgcttccagaaaggcagcacggggcgagtccacttggggaggaaggtggcatagagtgagttctggaacattaacccgatggatctgacgaaggtcacggtgtcctcggggatggatcgctgcaggcagccaatgcgtttctcgaacaggatgtagcaaatagcttccaaggcaaagtagtagaagagttgagccatgtccgacacctggttccccgaagcactctctgcccgcagctggtccagtcgagtcataaagtcatcaatcacctcattgaaagcatccgtatagagcgctgcttccgctggcttcagcaaccgctggttcagagcctggcgcagctggtaccagtggtgtccttccgtggtgaacggcccataggtcaggtcgtgctggtcccggtgctccttccatagctccatgtcgttccgtactgggtacttgccctcttgccgcatcacttgctccaagagcggggcactggccaggttcacgtgcatctgaggccctaagtaggacatccacattggaccgtacttggccttgtaaagcacctgtaactggtgcagttgcagggcatagccttgaacgaacagctgaaagaagaagcgcagctgtcctagacgtggaatctcctctaagctccgttgccgccgccggacaccaggcccggctccgggagctccggtggccttgtccgaggggagggcggcagggatcgcggccttggctctggccccgtgggggcagaggccacggccggcccctcgcagcgcccacctcagcctcgcgcagcccagcgcagccatgggttgtgtcgcgcgcctgcacctttgggtcgagtcc

SEQ ID NO: 256507 - DNA, 1171 bp, Homo Sapiens
tttacttccatcagggaggcctaaggcagggaccatgctgcaggagcagggcctgtaaaccagtcaatggtggtcctttatgcaacacggggacaggtcggggctgagctccacaggcgaggggccaggcaggggtttagggggagggaaaagggacaatgaagtcttgggagtaaagatgggaataaacaggaaaaaggaaccaggaggcaggtgctgggatgcaaagatccaactgcgctgcacaacctgggcagcaggctgagtatgggctcctcactcccacctcctggccttcaaggccctacttgttgccccagacagccatctttgagaacacaggtcttgggaggaagcggctggacttcatgtaggcagagatcttctccaagccctcaaagcgggagatgaagtccttcagatttgggaaggcatccaagcagctgggctcaaatacttggtgttctctcaaggacatcataagcgatgaaatccacaaaggtgatcttgtccccaacaaaccatggccgcttccccagaaactgtgagtagagcttcagcatttcagggagttcctccaagtattctggcttcagtttctcaaaatctgggtcatagcagagtctgcccagctgcatacggctgtccataaactggttctccaaaatgtccacacgaatctgctcctcttctgtctccccacacaggttgtgcttgcgggcaatgtagcgcaggatggcgttgctctgggtgatcttgtgagccccatcaatcaagtagggcagattgggaaagtccaggcccagcttgaatttttcattcagccactggcttctgtcataatcaggagcgtcccccatcgtgtacttcttttcctcgtagcttgagtctgtgtattccaggagcaggcggatggaatgggccagcccgcggatgtcccagtaccccagtgtcatgggcatggtgctggttgctgtggattccgcagacaggcctcagctgggctgaactgcgacctcctctggggttcccggcaaacaggggctggacctagcgccagacccgccccctcggccccgctgcgcccgccgatcttcaaggtcgtcacttccaaccggccgatcttcaaggtcgtcacttccaaccaacaggcgcgggaggcacggagcag

SEQ ID NO: 256508 - DNA, 636 bp, Homo Sapiens
ctttactacagccactcaatataaagccttgttattcaccttttaaaaattcaaacaagatgttaaaatgtaaaagaagagctatcattgctcttcttttataccttctgttgaattttaaaatgtttccttttttaaaggagggagagaaacctctcacatttatctttatttggtttctacaacttagagctaaataatgtcttacttttgcatccagtttcagttaatttcaagaaaatgtgtattcctgatataggaaaatttcaaaaatgaacatgtgtgttttatctatttttaccatttcaaaccatgaaaaactgttgagccaaacctctgtaattctcatacttatgacactgatatgattagtctggattctacttcctacaacttgcttctcaaatttaaaaaagaaagagagaaagagaaagactgcacatttcagttccattaggtctaatttgagcagaggcagcttctacggggctcagcggtttaaagctgtgtgtatgataaattcatactaacacttttttctttctaaactataaagaaacctttgagaaaaatcctaaagatttctttctggagatgaacagtcattgttgcctgaatcgattattatcattgctg

SEQ ID NO: 256509 - DNA, 342 bp, Homo Sapiens
acggccttctagcacttaggcctgcatttattaaataaatgtgttctctaactcaagtgttaagttaaaattatgtaattaaataggacttggcctgcaaggtccaccaaagtaatttattaattgaatagtctgatttaattgtatgttattttcgtttattcagggaagtgcctgcatctcttgcagagataggagcctcttgtatgcctgtcactggaggtacagaggtcctctccaagaaatctttagcacccaattaaatattaaccaagaagaggggacttgttccttctgtccctgaaactctattttcatgcctgagtctggcgattttaaagg

SEQ ID NO: 256510 - DNA, 850 bp, Homo Sapiens
  misc_feature (481)..(481): n is a, c, g, or t
cctcccgccgcgccgcgcacccatggacggcccggccatcatcacccaggtgaccaaccccaaggaggacgagggccggttgccgggcgcgggcgagaaagcctcccagtgcaacgtcagcttaaagaagcagaggagccgcagcatccttagctccttcttctgctgcttccgtgattacaatgtggaggcccctccacccagcagccccagtgtgcttccgccactggtggaggagaatggtgggcttcagaagggtgaccagaggcaggtcattcccataccaagtccaccagctaagtaccttcttccagaggtgacggtgcttgactatggaaagaaatgtgtggtcattgatttagatgaaacattggtgcacagttcgtttaagcctattagtaatgctgattttattgttccggttgaaatcgatggaactatacatcaggtgtatgtgctgaagcggccacatgtggacganggttcctccagaggatggggcagctttttgaatgtgtgctctttactgccagcttggcaagtatgcagaccctgtggctgacctcctagaccgctggggtgtgttccgggcccggctcttcagagaatcatgtgtttttcatcgtgggaactacgtgaaggacctgagtcgccttggggggagctgagcaaagtgatcattgttgacaattcccctgcctcatacatcttccatcctgagaatgcagtgcctgtgcagtcctgggttcgatgacatgacggacacggagctgctggacctcatccccttctttgagggcctgagccggggaggacggacgtgtacagcatgctgcacagactctgcaat

SEQ ID NO: 256511 - DNA, 278 bp, Homo Sapiens
gcaggaaataaaagggatctttctatggagaaacagagagaaaaatgttacaactaggacttgggagaatgaagtcagatgacacatatgtagcaggagaccagtgcctggcccatagttgagtgcccagaaaggtacaagttactactgttattggtagctcctccatgctgaaaatcacttatgttttgaatcgttcactggatatctgtaatatctaccactggagaagttaatagtcacgagaataactcttggccaggagcagtggcttacac

SEQ ID NO: 256512 - DNA, 2243 bp, Homo Sapiens
  misc_feature (841)..(883): n is a, c, g, or t
  misc_feature (1058)..(1058): n is a, c, g, or t
  misc_feature (1075)..(1075): n is a, c, g, or t
  misc_feature (1216)..(1232): n is a, c, g, or t
  misc_feature (1297)..(1435): n is a, c, g, or t
  misc_feature (1451)..(1466): n is a, c, g, or t
  misc_feature (1783)..(1783): n is a, c, g, or t
  misc_feature (1851)..(1851): n is a, c, g, or t
  misc_feature (2011)..(2011): n is a, c, g, or t
  misc_feature (2053)..(2053): n is a, c, g, or t
ggtcggaatttcttttgggtcaatatttttaagtgtgtgaggagatgctcagtagcagcagcctatggcaagagcttataaatgattgatgcaaatttgcactctgctccccctctgtaaggatactgatagcacaacctcttccccccaccccgccccgccttttggtcgtccatccctgtccctttctggccctcttcctgtagcccagtctcaggctttcctcttcctgaagccctacagagttagggaatggagcccaggcaccaggggtctaaagtgtgagccactgagaagagagacgccaactgcacccttgccacttccaaagcaatagaggcagagtggtcccctctttgccacctaggccagttttgaccctggcattaactggccttagaagaaactggatcctggtagggggtggcattttgtttgtttcttccaatctgctgaatcttttgactgcaccttacaaacagcagtctgctcccatgaccctctgcccacttccattggtctccaggccccaataatctggggttgaaactttgaggaaatgccagtgacttattccagagtgcctcagttaggggaacttctctgtaaagaaccctgggtattgagcaaaaaccttattatcgttaatgacctataattggaagcttcctgcctttttctttggttgctcctgtggaaaatactgaaaagattactttgttttattttgttgtctttttataaaaggggaggtggagagaccccttcagagcagggattgtgccgggagagtgcctctgactttgggacatttcatccacagaaatttccaagccaatgnnnnnnnnnnnnnnnnnnnnnnnnnnnnnnnnnnnnnnnnnnnggaaaaacatgcatttttaccgtgcacgtaaattggtcagcagaaaagggagcccagaaaaggcagcagatggaccatgcccttgctgggttttccttttctttgggactgtgaggggaaatggtttttagaggtgagggttggtccatgtggaggaaagaagtgtctctgttgngggacagaggaacctgnggagtccatcgcatgtcctacaatctgctcttagacacggccttgccaggagagcctgccctcagactgcaggaccagaacccctgcctccatctttccaagcaccggggcgaaaaaccacaaaggaaaggaagaaaattnnnnnnnnnnnnnnnnnaaatcacttggtgattaaaaagataactgctccataaataaaactcctaaagtcacttatgtttnnnnnnnnnnnnnnnnnnnnnnnnnnnnnnnnnnnnnnnnnnnnnnnnnnnnnnnnnnnnnnnnnnnnnnnnnnnnnnnnnnnnnnnnnnnnnnnnnnnnnnnnnnnnnnnnnnnnnnnnnnnnnnnnnnnnnnnnnnnggccccgacgaccccnnnnnnnnnnnnnnnncggtttgtgcccgccctcctcccccccacaaaaaagtttttaaaaacctcttgtgtggggcgggcgggccccacaaggaaagagcgacaacggggtaaatctcttgttccccccgagaaaaccccggggcaagcacaaaaggggggctgggaccccccccaacaaaagaaagaaacccccggcgggcgcgaacacccatcggtggctgttgagaacacaaaaccgcagaaggggggccgtcccggggggcggcgcattttggggcggcggtcttcttcaaacgcaggggggggcacccgccgagggcgcgaacgccnttgcaagataagacaaaaagggggcggcgcgcccaccgcccctcgcggtggaacattacccggtgtgngagacggaggggcggcgggcgaacatatactctcaaaccaagaaacgtcttccttgcgtgggcgacgcacgtagcaaggagagaccctcactccggaacagcaacggggcggcgcgtgtggcggagacaacctctcgactgttctctccccagcgccggnggtacctctctacaccctcccgcgccttgtggtccgccctcngcgtgcgggaaaaaacaatagaaaactctgcgccccctcacgcgggcagacacaaacaggccgggtcggcacgacaacacgaggtggggtcgcacaccatactcggggggcccccgcttatgtataataacgcgcaagggagacaggtgcgggcgaggaacacctccctccaccgcgcggaggcggtggg

SEQ ID NO: 256513 - DNA, 846 bp, Homo Sapiens
ggcctgggtggcgaattcggcacgaggggcagcaccagtggtgaggaaagtgacttggagagggaggtaagtgacagcgaggcagggggaggcccccagggggagaggaagaaccgctcttccaagaagagctccaggaaaggcaggacacgaagctcctcttcctcctcagatggaagtccagaggccaaaggagggaaggctggctcaggtcgccgtggagaggaccacccggctgtgatgaggctgaagcgctacattcgggcctgtggtgcccatcgaaactacaagaagctgttgggctcctgttgctcacacaaggagcgcctgagtatcctccgggcagaactggaagcgctaggcatgaagggtaccccttccctagggaagtgtcgggccctgaaggagcagagggaggaggcagctgaggtggcctccttggatgttgcgaacatcatcagtggctcgggccggccacgcagacgtacagcctggaaccctttaggagaagcagcacccccaggggagctgtaccgacggaccctggactcagatgaagagcggccccgtcccgcacccccagactggtcacatatgcgtggcatcatcagcagtgatggcgagagtaactgagctctgccacccccaggagggacccttgatacatgtacaaagcatacatagcaccccttgccctgtgtctgtggaacagaagcagcttccttcagagaagactgcagctcccaaggacacaagctgttgggatgctacttctcagcttcacgctgtccctttaaggtgtttattttttaagactcaataaaggagtggtttttaatcacctca

SEQ ID NO: 256514 - DNA, 469 bp, Homo Sapiens
atctgtttggcctgaccgtctctgcagtggcacgcatagcgagatcacttcctggggttgaggcatgtgaaaattataccttccgatacggccgaaatcctctcatggaacttcctcttgccgttaaccccacaggttgtgcccgttctgaacctaaaatgagtgcccatgtcaagaggcctcacaccttaaacagcaccagcacctcaaagtcatttcagagcacagtcactggagaactgaacgcaccttatagtaaacagtttgttcactccaagtcatcgcagtaccggaagatgaaaacttgaatgggaaatccaatgtgtatctgggcacggtctcggattcaggggctgggcctgtatgctgctcgagacatttgagaaacacaccatggtcatttgagtacatcgggactaatcatttcgaaacgaagttaggccaacagggaaaagagaagctttatgag

SEQ ID NO: 256515 - DNA, 521 bp, Homo Sapiens
atgatgctgaggcctgatgacatttatgcttaggggacaagagtttgaactcaagggactgtgacccctgcacactggagtggctcattgtggcaggtttctgccaatagacagcccctgacagtggcctcaaggagctgcaggtggggggctcagcctgcacccacttggagcccctgcaaggagcgaaccggtcagcaccaagtaacacacacacatatatatacaatagtttgatgtcaataaatacatttctgaatgcttaagtgttgcttcatttacatagaaaaaaacacactttaaaaactgataattggtttattactatatattcatttccttctcacagtactttcccattctcattttagaaataaaatgtgaatgattttttaaggccaaattttattcccatctggcagttgttttgattataagtagtggattgatggaaataatttaattgagcaaatatttagttgagttccttttatgaacaagatactttgttaaagttctgt

SEQ ID NO: 256516 - DNA, 794 bp, Homo Sapiens
aatccagaaatgccttgtaaagctttatgaatttgtccgcacttttccttcaacactgcaaaaatacctggattctcttccatgatgttgagggcctcaattgctgcagcagctaacaggggaggtaacgaagctgaaaagcagtatccctggccggaaagtcgctgatggtcaattacaaaagacctgccacagcagaaacctccaatagaagcaagtgcattctccatgttggcactgataagatcaatatcatcaatattgattccatagtgttcagtgactcctcggccatgctctcctaggactccaaatgaaaggctttcctccaggaagattcttgctttgtatttgtattttaacttaaccaattctggaagaggacaaatagttccagtattcatatacaatccttctactacaatgaaacgccgagttacacgagccttgcgaggattcttttgatcttcgatctcttgttcttttagtagtcgctcgaggtcagccatgtcattatgcttaaataacttaatgtcactacgggatgcctgtaatcctttctgaatagcaaagcaggcagctctatctacaaaaacaatgtcccctcttttagagtaagcaggaatagcactggctatggtggcaaatccatatgagtatataatggcttcttctgtcttcataaattttgccaggcggtcttccaaatccaaatgaacaccaaatgtgccagtccaaatggaggtggggcaggccagtaggggctggggaggccctgcctagtggcagggagt

SEQ ID NO: 256517 - DNA, 986 bp, Homo Sapiens
  misc_feature (642)..(677): n is a, c, g, or t
ctaatgggaccaggtccgaaaatgaaagtctcaatcaagaaagtaaaagagcagttgaagacgccaaaggatcttcttcagacagcactgctggagttaaggagtagctcgaggtgaagctggatgggggatccagtggagcaggagttgacggacagtccgttcacatcgctgtgtttccttgttaacatttttctttctgcagagaggaagatatgtttttgctgctttatataaaaatggtttttttaagttattttaaaaatctagcttccctttttgattaagattgccatcttgcttttaggcagattttgcagacctattgtgggtataggtattttcttcctggggaagaattcagttcccgtctcagctgtacttttgtgggcctgtcatcttgatgaccagaatgaaagcttgctctgcctcctgccagccagaattggtggcgggacttggggatacagcgtgaaggtggggaagttgcacagcagaaaacagaattgaagttgggaaactctagagtctggggcaaaatgtttggttttttctcttaaaaaaaataacaccccattaccaaaagaaaaggtaaggtggcaaccttatttttaatagtttgaaatgatgataatcctaatnnnnnnnnnnnnnnnnnnnnnnnnnnnnnnnnnnnngtgatttctaaagatttgtttacttttgtgttttgttttactgtactaagaacttgtcctttctccttgaatcaaagtaggacatgcatcatcctcctaattttaaatgttggctctgattttaaagtggtgcatttgattccagccttggtaatggagagtttgcaaacacacagcggcccacagcttcacgtggtggtgtgcagtgtgaggcagctccttggctttcctggttttcacaacaagctagagattttcaaagctacacttttgagtaaaaacccttattaaaagaaaaacatgattaat

SEQ ID NO: 256518 - DNA, 489 bp, Homo Sapiens
tctctcggggagtatcaagtagaatttgactccctctttctcccttctcaacatgcccaccatcatcttccccagaagactgctcatatgatgggtcatcttccttcaacagtgcatcaatctcttcctctgtgtaatttacatcaccatcatcttcttctccctctgacagctccagcaaggagtcatccaatccatcctcatccaaggaatcccaagaaaatggggcaccgtctttaggcaagagagaggtaccagaagactgttcagagggcacccgtgagcacatcattttgtgtggagctgctggagcaatctctgcctttgccacgagaccaaatggaaaaaggtttcagttcctgctagctgttcctttcaggagacttgtcaaaatgattgactcccaccttcctccggaagccgggccaaagcctgggcgaacgactgcgcctcactccgccccatgcgccattttatcgccccctcccc

SEQ ID NO: 256519 - DNA, 557 bp, Homo Sapiens
ctcctctgttctctcttcacagatgggtaattgcctctccatatgacaggacacacccctagatgcatcctcaagaactgggaaaagtttgacccccaaactctaaaaaagaaaaggctaacatttttctgtaatatagcctgggttgaatccaagctcagggaccaggaatcttggccagaaaatgagatcataaattttaatatgatctattgactggatttgttttgctggcagcagggaaattgggcaaaaatctcctatgtacaggccttcatagtcctaagaaacaaccctgacctttgtcaggcttgtaaaatggatccagcaatgatagcagccacagtcaggcagccccctctggttggtttgggagaccattattgtgtttatccagggctcaagccccagagaaaccaagggcagagcttagctcaaactccccttctaccctattatatccaagtctcccagccctggctcatttccttccctaaccagggccatcctctggacaccacccccttaagttatgccgcttcaagaggttagcagcc

SEQ ID NO: 256520 - DNA, 908 bp, Homo Sapiens
  misc_feature (18)..(18): n is a, c, g, or t
  misc_feature (22)..(22): n is a, c, g, or t
  misc_feature (29)..(29): n is a, c, g, or t
  misc_feature (31)..(31): n is a, c, g, or t
  misc_feature (660)..(660): n is a, c, g, or t
  misc_feature (694)..(694): n is a, c, g, or t
  misc_feature (762)..(762): n is a, c, g, or t
cataattctcatctcttnctcntcatgtntnttagatccgatccattttcttccccgaacatccaataaattacatcctcttcattcagcaaagcagagcagttgagccttacgttttttcctaattccactgcaacatggttaagctttggtccaagaagaaccggaactatattactgcgatcttccactattgttatattgaaggttttggtgatattaaatagttttccattatgatgaaggaaatgcacgcaggagtaatacccctgatcttcaaactcggcgttcttctttatcgttgggtttttattgttctccagtagtagctttttacagttcttatacaatgatgtgctgttgaccagtgtttgatagtaactgttttcacaggttatctgaaaaaattttttaacttccacaattttactagttacttgtctttcagtgaaacagctgtgtttatttcttctgatgacatttaatttccatttctgagtataatttttcatttggaaaaagtaagatcctgtgtcattcaactcaactggccaaaactccaaaacacaatcatgcaaagcaattctcgaggaactccttgggttcagctccacatgttcctgtgatccactgcttttgtaccagcttttggtggttgtntcaatctcatgtgcaagtgaacacgagcaatgtntcagatagaaaggttccccttcaaccacagtaatgtggggacgtgaagtacaagattctgcagtgctnacagatataagcacccaaagggtcaagggtaattctctacaattcatggtttggattctgcttcaaatggcttctcttcagagaggcgtccccgaggctggggcgggggcggcagctcctccttcacgccaggtcgcgactgcgga

SEQ ID NO: 256521 - DNA, 784 bp, Homo Sapiens
cgaaaaacagacatgggtgacaagatcattcgttatagtgcatatcacaaagtaaaacacacgaagctctctcccattggaaataccacggcactactattgtcacaaagaaaggatgctaaaataagagacgaaaaatgtggatatgtccacatgtgaagagtgaacactacagataagccgcctttcaatatgtaaaaaaacccagcacctaaaaagagataagcatacatgtgctactttgctgctcaattaataatgtaataccacacccaacacactgaacacaacttccatctcccaatccctgctatgtaggcatgtgtagatacctcggatgtctcaccgcatgtgcacctgtgttggactgacaccacctggtgcaagagaccttgcaaagatttaacacagtggtgaatggcataaaggagtatcctcatttagactgagagaccacaagtctgaaaccatagtgttgacaggactctactctctcaaagggctctacaagataatacatgcttcactgtctccagctattggtggctgcctgcaatactagtgtacttagaaagaagatgtcttactctaatctctgcctacatctacatattgcatgttcctctgagtgtctgtgtcatcatcatcatcttctttcttctttcacacagtgagactccatctgagaacaactacaacacccataaataagatataaatactcatgggtgggcccgctacccaatcgcctatagtgagtctgttgcaatcatcgcccgctttt

SEQ ID NO: 256522 - DNA, 466 bp, Homo Sapiens
  misc_feature (164)..(241): n is a, c, g, or t
gatggagtctcactctgtgaaagacgaaagaagatgatgatgatgacacagacactcataggaaaatgcattatggagatgttggcagggattagagcaagacttctacattctattgaaaacaggattgctggcagccaccaagagctgggagaagtgaaaannnnnnnnnnnnnnnnnnnnnnnnnnnnnnnnnnnnnnnnnnnnnnnnnnnnnnnnnnnnnnnnnnnnnnnnnnnnnnaaatgaagatactcctctatgccattcaccactgtgttaaatacttgcaaggaatcttccaacaggtggtgtcagacaaacacaggtgcgcatacactaagacatccaaggtatctacgaatacctacacagcatgtactgtgagatggaaggtgtattaagtgtgttgggtgtggtattactcaagtctcaccactacagagaatcagttctgcagaatttcta

SEQ ID NO: 256523 - DNA, 776 bp, Homo Sapiens
  misc_feature (69)..(69): n is a, c, g, or t
  misc_feature (81)..(81): n is a, c, g, or t
  misc_feature (126)..(126): n is a, c, g, or t
  misc_feature (542)..(580): n is a, c, g, or t
tatacatccatgtttctcctcaactacgaaaatcgtccttaatctgaccttcaaatgtgtagagagctntgcacgtccccnatggcagggaggggctcctcatcatcaaacttgtcgtcaaaatcngtggccagcacctatcatctcactctcctgactctgctcctctgtgtaactgccatctgggctctcacggtcctgggcgcagttgttgactgtgggtgggttctggctgtcgtacagtccgctctgccggcgcgcctgctcgttgcgtgctgggagccggccttcaacctggctgacttctgctaatttgtgatccaaactggctgggtctcccatctgaggattctttaggtagacatctttcatttttgttatggcatctctttgatccatctccttctgaatttctttatttaactcatcgactttctgctgcagctttttccttctttgttcaggtgggaggttgctgaaatcctccggtgttgcacccagcttgagagaaagcttcatgtaaaaattggagaggtatgggnnnnnnnnnnnnnnnnnnnnnnnnnnnnnnnnnnnnnnncaacaacacatcagaagaagaggaacttggtcagttccgccatattaaaataacacacacgtctacccgctgatttataaaaatgacttgtagcagatctgtgcaaaagttcacaagaagggctgctccctaataacatttttcttaggctccacattgccagagccaaagatcagatagaaaagcagggtttctg

SEQ ID NO: 256524 - DNA, 895 bp, Homo Sapiens
ccatgatggtggggacaggccctcagccgaggcccggcaggacgcttacttctgacctctgccctggggctggactgcatggcccccctctttccctcagccaagaacaggcctggcccaaggtgccaccccctagcaccttgtcaggctgtcccttgctggggaaagtggcttggttccccatctcctcgccagctgctgatccctacacgggcaggacagatgggcagctgcaaatgagtctggagcctctcatctcccatgaggctcagctggggtctctgtcgctcctgccccagttccctctgggtcccctcctatgtgctgtcctgaatggcccgttgtcatcccaggggtgactcctggtgatgggagtcagcagtttcagattcttacactccatagctccccttaccatgaggtggagctggcttccttttccctgtcttcagacctccctgtctcccccacttactggccagggctctcattctggacctgtgttgtaattgtgtacagaggatggcgttggcctggggtgggggtgctcgccctgtcttctgtactttggttctccttccataatgctgctgtacccagtttatttaaagggacatgcactggaataggaaatgtcccccatctcccttcctgcaccctgctgggctccctccaaacccaccttgctctgtgttctcaggcccccctgcttttgtctcaccaggacccatacctttaaccttgttcccttccacccctccagttagtccctatctgggtaagggtcttcccttgagctccagggggtggaacccaatgtttacattctcttctgtctctgcccccaccccatgcagcgctttgaggaattggaaaagaacctgctgttgtaccc

SEQ ID NO: 256525 - DNA, 596 bp, Homo Sapiens
tggcccgctgccatgaggcagagaggaacatagctttgcgttcaagtttagagtggaattcgtgtgttgtacagacccttaaggaatatctggagtctttacagtgtttggagtctgataaaagtgactggcgagcaaccaatacagacttactgctggcctatgctaatcttatgcttcttacgctttccactagagatgtgcaggaaagtagagaattactggaaagttttgatagtgctcttcagtctgcaaaatcttctttgggtggaaatgatgaactgtcagctactttcttagaaatgaaaggacatttctacatgcatgctggttctctgctcttgaagatgggtcagcatggtaataatgttcaatggcaagctctttctgagctggctgcattgtgctatgtcatagcatttcaggttccaagaccaaagattaaattaataaaaggtgaagctggacaaaatctgctggaaatgatggcctgtgaccgactgagccaatcagggcatatgttgctaaacttaagtcgtggcaagcaagattttttaaaagaggttgttgaaacttttgccaacaaaagcgggcag

SEQ ID NO: 256526 - DNA, 885 bp, Homo Sapiens
gccacaggtgactgtgctggatgtggaccagctggagctacaggaggatgatgtggttgtcatggcaactgatggactctgggatgtactgtccaacgagcaggtggcatggctggtgcggagcttcctccctgggaaccaagaggacccacacaggttctcaaagctggcccagatgctgatacacagcacacagggaaaggaagacagtctcacagaggaagggcaggtgtcctacgatgacgtctctgtgttcgtgattcccttgcacagtcagggccaagagagcagtgaccactgaggattcagacactgtatcccagaactgctctagtgcccgggtgtggtctgggcatccctccagtgtgaccaagagcaaatcctgcctgccctatccctagccaccgcccagtgctctcactatccacctcaacacacatccatctcaagaggaacatttataccaggcagtcagagctggaagtgtatggagagcccagcccaccaggtcctgccttttgcggtgataaccttctctggcagagtgactttacaacttaactaggaaacccatgtgaggctcctcagacaggatcttgaacagcccaaagtatcattctcagataggggcacccaagctaagggtattagccaaagatgccaggatgggtagctagcccatgtttagatccaggtctccaattcatggttatcagggcatgtgttcaacaacccccaaagtccacggcaggtggctttgtaggaaacctttggggcagccttcatgtcttgttaaaacagccatctttcaaggacagcccctggaaaaggggaccagtttcaggtccttgccctgctgtttcttttgctgggagattgagggtt

SEQ ID NO: 256527 - DNA, 709 bp, Homo Sapiens
  misc_feature (60)..(69): n is a, c, g, or t
  misc_feature (395)..(412): n is a, c, g, or t
  misc_feature (680)..(680): n is a, c, g, or t
ctcgtgccgaatcggcacgaggcattatgtaattgtccttagtctttttgttgttttagnnnnnnnnnncaagatgggctcagatggatgcctacgtaaaaatggttcctagctgtgtactcataacttttctttgaattgagtagtgaaaggaaggaggaggaaaggaaattaaatgtccttctagtattctctggactcaagtctgacatatgagataataacctatattgaaatgccaagaattgtatctgaaacaagagaacagtttgacatttatcatgccttcatattacatattaactgaaaccaattaataaacatatgaaatatccattgcacaaggcaaaggcacctaaaccttttgtttctttttctacatagcagaaattgannnnnnnnnnnnnnnnnnaggggaacctatataattatgacccagtgatgtcttttggtgacttaagcttatgaattcaggttacaattgagttgattctagatggttactaccttgaaaaggatgttggtgccttatgtgacacgagccagagcctgctgggaataaacaaagcagattcatgccaacaccaactcgtagctttagtggcagatggggagtggtcacagactcccaaaatgtgggggctttgggatttccacaccatcccacgtgtgtgttcatncttccgcttttcacactcttggatggata

SEQ ID NO: 256528 - DNA, 473 bp, Homo Sapiens
  misc_feature (11)..(11): n is a, c, g, or t
  misc_feature (29)..(29): n is a, c, g, or t
  misc_feature (43)..(43): n is a, c, g, or t
  misc_feature (50)..(50): n is a, c, g, or t
  misc_feature (62)..(62): n is a, c, g, or t
  misc_feature (68)..(68): n is a, c, g, or t
  misc_feature (275)..(292): n is a, c, g, or t
aagggtgtggnaaaaccccaaagcccccnacatttggggaagnctgtganccaactccccanctgccnactaaagcctacgagttgggtgttgggccaggaaatcctgcctttgtttaattcccccagcaggctctggccccgtgtcacataaggcacccaacatcccttttccaaggtagtaacccatcctagaatcaactcaattgtaacctgaattcataagcttaagtcaccaaaagacatcactgggtcataattatataggttcccctnnnnnnnnnnnnnnnnnntcaatttctgctatgtagaaaaagaaacaaaaggtttaggtgcctttgccttgtgcaatggatatttcatatgtttattaattggtttcagttaatatgtaatatgaaggcatgataaatgtgtcaaactgttctcttgtttcagatacaattcttggcatttcaatataggttattatct

SEQ ID NO: 256529 - DNA, 637 bp, Homo Sapiens
agactcaagatatcaatgaaatatgcatatcttatttggagtgtatgattttatagcctccatcttttagttcagttttaagaaaaacagactaaatgatccctgtaatgtttgaatatgttactagctggagttccagaaaatattctggcatgcctttgaactttgagagctcatttcgtgggtgctctgatttaatgtcaactatgcaaaagccaagtaaatgcaagcactgaatacacaaaggccaaataaatacaagacaggacagaaaataaaatacatgcttaccagtaagaatgataagccttctccaaagaaagggaaaaattccctcatccaagcctcaaggtccaaacctcgcagctgaggtcaacagggggaaaataattctacccaacagatctaccaaacaagagggggaaagacctctccctaatcatatcccaaataaaacagaactcgaaccatatctgagagttctgtccaagagatacttactggagggagaaaggattacctgtgaaagtggtgggggtgtagggggttcaaagggccccaacatgggtacctcatgccataactccaaaggccaatgattctccatgaggtgagtcagctttgtatcccacttctg

SEQ ID NO: 256530 - DNA, 666 bp, Homo Sapiens
ggcatcattaatatgccctcctttcatgtccaggggatcagaggggatgccattttcaattgtgatcatgttttcacacttatcttcagcgtcatccacttcagatggttctttgttctttcttctacgttgccagatccctgataaaatcagtagtgcaattgcaactatgatgatgcaaaatatcacaccaaatataataatccagatgggcacagatgggtccatgggtggtgcaagtgtggaagggatttttaaaaattccagagtttggtcatttagaaagaaggcattgttgatccggttcttgttcattcttatggctgattgcacctcaacagcaggaagggtgtgattttttgaagggtctgtaaccacaaaccagaatgataccctctgggttacattgcaaagtaggacatgggaaatttctgttgcttctctgttgggaacttttctcatggagaaagctaccatcgctttgaagaggtattcttcattggtatcccaggcatatgctttatctcccagagctgttctgatactaagtctcactttaaaagcattttctgcacctggttgacagagttcagcatgaatggcagtcaccagaaaaaagagcagccacaacattctttcagggtggaaaacacaaggcaaagtgag

SEQ ID NO: 256531 - DNA, 1550 bp, Homo Sapiens
  misc_feature (1213)..(1213): n is a, c, g, or t
  misc_feature (1216)..(1216): n is a, c, g, or t
  misc_feature (1221)..(1326): n is a, c, g, or t
  misc_feature (1337)..(1347): n is a, c, g, or t
  misc_feature (1369)..(1369): n is a, c, g, or t
  misc_feature (1378)..(1378): n is a, c, g, or t
gggagtctcatctgcctccactcggcctcagttcctcatcactgttcctgtgctcacagtcatcaattatagaccccacaacatgcgccctgaagacagaatgttccatatcagagctgtgatcttgagagccctctccttggctttcctgctgagtctccgaggagctggggccatcaaggcggaccatgtgtcaacttatgccgcgtttgtacagacgcatagaccaacagggggagtttatgtttgaatttgatgaagatgagatgttctatgtggatctggacaagaaggagaccgtctggcatctggaggagtttggccaagccttttcctttgaggctcagggcgggctggctaacattgctatattgaacaacaacttgaataccttgatccagcgttccaaccacactcaggccaccaacgatccccctgaggtgaccgtgtttcccaaggagcctgtggagctgggccagcccaacaccctcatctgccacattgacaagttcttcccaccagtgctcaacgtcacgtggctgtgcaacggggagctggtcactgagggtgtcgctgagagcctcttcctgcccagaacagattacagcttccacaagttccattacctgacctttgtgccctcagcagaggacttctatgactgcagggtggagcactggggcttggaccagccgctcctcaagcactgggaggcccaagagccaatccagatgcctgagacaacggagactgtgctctgtgccctgggcctggtgctgggcctagtcggcatcatcgtgggcaccgtcctcatcataaagtctctgcgttctggccatgacccccgggcccaggggaccctgtgaaatactgtaaaggtgacaaaatatctgaacagaagaggacttaggagagatctgaactccagctgccctacaaactccatctcagcttttcttctcacttcatgtgaaaactactccagtggctgactgaattgctgacccttcaagctctgtccttatccattacctcaaagcagtcattccttagtaaagtttccaacaaatagaaattaatgacactttggtagcactaatatggagattatcctttcattgagccttttatcctctgttctcctttgaagaacccctcactgtcaccttcccgagaataccctaagaccaataaatacttcagtatttcggantgncaagnnnnnnnnnnnnnnnnnnnnnnnnnnnnnnnnnnnnnnnnnnnnnnnnnnnnnnnnnnnnnnnnnnnnnnnnnnnnnnnnnnnnnnnnnnnnnnnnnnnnnnnnnngcccaccgcannnnnnnnnnntacaaacacaacaaaacgacgncacccccgnggctattggggcggcccccccggcctcccaaaaaaatttttttccacacactttttcgtggggggggcggccgcccccaaaagaagagaaaaacacgggggccacaaacctttttttctcacaagaaaaaatcgcgcgccaacaccaagaggggttggggtttccccccacc

SEQ ID NO: 256532 - DNA, 652 bp, Homo Sapiens
tccagggttaagcttcttctctgccctcagtaatgtggcccttccccttgtctgtatattttggagacatgaagcatgtgggatggcctcacagtcagctggggtttgagggtgaaattcaatgactttcgtgaactccttggctcctatgtgctcttcacctgggaggaccagggcatgtgcagggatgaccaccttctccctgggacctgaacagggcagagaaatgggaagctcgggtgcaaagggagtggggaagatgggtccgggcttacagtactgaacccaggaatgacaataactgtgtgtgttgctgcaggtgacaaaatatctgaacagaagaggacttaggagagatctgaactccagctgccctacaaactccatctcagcttttcttctcacttcatgtgaaaactactccagtggctgactgaattgctgacccttcaagctctgtccttatccattacctcaaagcagtcattccttagtaaagtttccaacaaatagaaattaatgacactttggtagcactaatatggagattatcctttcattgagccttttatcctctgttctcctttgaagaacccctcactgtcaccttcccgagaataccctaagaccaataaatacttcagtatttcag

SEQ ID NO: 256533 - DNA, 847 bp, Homo Sapiens
cgcacaccgagagccacttccggaacaagcgtcgcgtttctgaggagaaactcttggtgagaattcccagagtgataatggctacctacagcctggcgaacgagagactacgcgctctggaagacattgaacgggaaatcggcgccatccttcagaatgcaggtactgtgatcctagaattgtccaaggaaaaaactaacgagcggctcctagaccggcaggcggcggccttcaccgcttcagtgcaacacgtggaggcggagctgtcagctcagatccgctacctcacccaggtggccacagggcagccccatgagggctccagctactcttcgaggaaggactgtcagatggctctgaagcgagtggactatgcccgcctcaagctcagtgatgtggctcgaacctgtgagcagatgctggagaactaggccagggagatggacccagagctgagagggagaccatcacctgtgccatgggacagaacctgggaacatgtagggtggggagtatgagcaccaacataccctgctggtcaaagtaccctaggacaaaggggcaaatggtgggcatggaaaaactgaagcccgagcctgcccacagctatgccttggcctctccagcagggtgctcctgctctgcactccagaaacaccctgacaggctcagagaggagatggaaactgacatacccaacccacttcctcaaacacttcatgctgctgccccagccttcccgcagacttggcctaatgaaaatacatacttcttcattcggagagacaaaacaagaactagagttttaatgataataaaagcaataataataaaagcaataacaata

SEQ ID NO: 256534 - DNA, 559 bp, Homo Sapiens
gccctgaaacgaataaaacaaataggcgtctggtatttgttttgtataacacaatccccataaaatgaagagtaataaaacataattatctgtaaaggcttgttttataagcctgagaatgggcttgtttctaccaggtttttatgttcattcataggagaaagaatctctttgtacattaatatgtaacaacaataagaacaaatgcttcccaattacatgcatgaatcaaacttatcttttattaaaaaattttttttctgttgtagtaaaagtttgtcattaaattctttctgtgtaaacacattagattgaaggaaaatgttttccttcaatattctgttcaactggcataactttatgatttttttctccccagcataattaaagaaacaactttatggttggttattgacttttttaggtcagagagcactctgtggattctaaaaccgccttccagaaaagtacacatcaaacttctacgtacgtttttatagggtttgtagagctctgatccttggttaaagatccctgacaatgtctaatagctgttttg

SEQ ID NO: 256535 - DNA, 353 bp, Homo Sapiens
ggaacataaggaagtggttcttctacttctgttatttctgaaatcagcaccgactgagacagggccttctgtgcaggagtgctaccacagtaatggacagagttatcgaggcacatacttcaccactgtcacaggaagaacctgccaagcttggtcatctatgacgccacaccagcacagtagaaccccagcggcaggcccttggtgttatacgacggatcccaatgtcaggtgggagtactgcaacctgacacggtgctcagacgatgaagggactgtgttcgtgcctctgactgatatcccagttccaagcctagaggattcattcatacaagcaccgacagagccaaggc

SEQ ID NO: 256536 - DNA, 821 bp, Homo Sapiens
  misc_feature (262)..(262): n is a, c, g, or t
  misc_feature (291)..(291): n is a, c, g, or t
cttggtcatctatgacaccacaccagcacagtaggacctcagaaaagtacccaaatgctgacttgatcatgaactactgcaggaatccagatcctgtggaaggcccttggtgttacacgatggatcccaaagtcagatgggagtactgcaacctgacacgatgctcagacacagaagggactgcagtcgtgcctctgactgttatcccggttccaagcctagaggatccttccaaaccagcaccaacagagccaaggccttngggagcagcagtgcttaccacgggtaatnggacagagttatcgagggcacatactttcaccactgtcacaggaagaacctgccaagcttggtcatctatgacgccacatcagcacagtaggaccccagaaaatggcctgaccaggaactactgcaggaatcccagattctgggaaacaacccctggtgttacacaactggatcccgtgtgtgaggtgggagtactgcaacctgacacaatgctcagaaacagaatcagtgtcctagagactcccactgttgttccagttccaagcatggaggctcattctgaagcagcaccaactgagcaaacccctgtggtccggcagtgctaccatggtaatggacagagttatcaaggcacattctccaccactgtcacaggaaggacatgtcaatcttggtcatccatgacaccacaccggcatcagaggaccccagaaaactacccaaatgaactctatgtttgggaatgggaaaggataccggggcaagaaggcaaccactgttactgggacgccacgccgagccctatgaaa

SEQ ID NO: 256537 - DNA, 365 bp, Homo Sapiens
tcttaggttagctctaaacaaagaataatcaatactttctgagttggatatattccctgtttatcataatttcaaagatccttacttctgttgtgtgaatattattgcacatgtgatcagtagagtgggaagtgttactgggactcctaattttttcttccaggtattgcttatggctttcagctgtgtgatatctgaagcgatactctttctcaattattcaaatgattggccttcatctttttttaaatcgcagcctgcagtaaccaatagaataccagtagtaaccagtagacacattcttcccatcgtgaacgtgagagctatatttaacgtctattcaatgcctaacttaattggcacaa

SEQ ID NO: 256538 - DNA, 1162 bp, Homo Sapiens
  misc_feature (87)..(137): n is a, c, g, or t
  misc_feature (281)..(586): n is a, c, g, or t
  misc_feature (588)..(604): n is a, c, g, or t
tgcaacccgcgcagggcacggggtcggcaacttccccgcttggccccccggtgaaaccccgggggcggggctttaaagcgcaaggcnnnnnnnnnnnnnnnnnnnnnnnnnnnnnnnnnnnnnnnnnnnnnnnnnnngagaccccccccagttcttatgagggaagcttagcctgttaagaaggcttattaccatagcccacaagaagctgccttgcttattagataaactgtccagcccaagccaaagtagcagacatattgcaattcaatttcaaaaannnnnnnnnnnnnnnnnnnnnnnnnnnnnnnnnnnnnnnnnnnnnnnnnnnnnnnnnnnnnnnnnnnnnnnnnnnnnnnnnnnnnnnnnnnnnnnnnnnnnnnnnnnnnnnnnnnnnnnnnnnnnnnnnnnnnnnnnnnnnnnnnnnnnnnnnnnnnnnnnnnnnnnnnnnnnnnnnnnnnnnnnnnnnnnnnnnnnnnnnnnnnnnnnnnnnnnnnnnnnnnnnnnnnnnnnnnnnnnnnnnnnnnnnnnnnnnnnnnnnnnnnnnnnnnnnnnnnnnnnnnnnnnnnnnnnnnnnnnnnnnnnncnnnnnnnnnnnnnnnnnttaataatgattagccaccttgccttcctcagaaatgagacttttccctccagaaaaatctctgtaaatgatacagccaggcctgaattttgaggccagggctacctcagattccattcctccctgttttctgcagctgtaaatgcctctgccatctcctgctccaggggctgccctgagacagaacatgaatacaagtccagaccctctacccagcatcagctctgcagtctcaaatcagtctcccgaccacagtactctattcaattgttcaccttaatactttgagcaagaaagactgcttttattatagaaatgacttttataaatattgataaaagtataagatgaaaggaagcatatactaaaaattagatttatgaagaatagcagttttccttcttggttggaagatttgtagcagtgattaaatactgtttatgcaattctgcactgcacataggaacttcttcggatatggtgtaacaccaagtaatttacatacatgccagcttccaactgacttacagtaaccatcagtttaaatgactgttttgc

SEQ ID NO: 256539 - DNA, 372 bp, Homo Sapiens
gaaaaggaggaaagacaggttagctggggatgatgacggatctgaagcaaagccattcagtgaggctgaatgatggacccttcatgccagtgctgggatttggcacttatgctcctgatcatactcccaaaagccaggctgccgaggccaccaaagtggctattgacgtaagcttccgccatattgattcagcatacttatacctcaagagagaggaaatattctacaccatcaagctatgggctactttctttcgggcagaattggttcacccggccctagaaaggtcactgaagaaacttggaccggactatgtagatctcttcattattcatgtaccatttgctatgaagggttcttactgagagaggc

SEQ ID NO: 256540 - DNA, 2015 bp, Homo Sapiens
  misc_feature (1825)..(1909): n is a, c, g, or t
aactgaaaatccacaagacagaatagccagatctcagaggagcctggctaagcaaaaccctgcagaacggctgcctaatttacagcaaccatgagtacaaatggtgatgatcatcaggtcaaggatagtctggagcaattgagatgtcactttacatgggagttatccattgatgacgatgaaatgcctgatttagaaaacagagtcttggatcagattgaattcctagacaccaaatacagtgtgggaatacacaacctactagcctatgtgaaacacctgaaaggccagaatgaggaagccctgaagagcttaaaagaagctgaaaacttaatgcaggaagaacatgacaaccaagcaaatgtgaggagtctggtgacctggggcaactttgcctggatgtattaccacatgggcagactggcagaagcccagacttacctggacaaggtggagaacatttgcaagaagctttcaaatcccttccgctatagaatggagtgtccagaaatagactgtgaggaaggatgggccttgctgaagtgtggaggaaagaattatgaacgggccaaggcctgctttgaaaaggtgcttgaagtggaccctgaaaaccctgaatccagcgctgggtatgcgatctctgcctatcgcctggatggctttaaattagccacaaaaaatcacaagccattttctttgcttcccctaaggcaggctgtccgcttaaatccagacaatggatatattaaggttctccttgccctgaagcttcaggatgaaggacaggaagctgaaggagaaaagtacattgaagaagctctagccaacatgtcctcacagacctatgtctttcgatatgcagccaagttttaccgaagaaaaggctctgtggataaagctcttgagttattaaaaaaggccttgcaggaaacacccacttctgtcttactgcatcaccagatagggctttgctacaaggcacaaatgatccaaatcaaggaggctacaaaagggcagcctagagggcagaacagagaaaagctagacaaaatgataagatcagccatatttcattttgaatctgcagtggaaaaaaagcccacatttgaggtggctcatctagacctggcaagaatgtatatagaagcaggcaatcacagaaaagctgaagagaattttcaaaaattgttatgcatgaaaccagtggtagaagaaacaatgcaagacatacatttccactatggtcggtttcaggaatttcaaaagaaatctgacgtcaatgcaattatccattatttaaaagctataaaaatagaacaggcatcattaacaagggataaaagtatcaattctttgaagaaattggttttaaggaaacttcggagaaaggcattagatctggaaagcttgagcctccttgggttcgtctacaaattggaaggaaatatgaatgaagccctggagtactatgagcgggccctgagactggctgctgactttgagaactctgtgagacaaggtccttaggcacccagatatcagccactttcacatttcatttcattttatgctaacatttactaatcatcttttctgcttactgttttcagaaacattataattcactgtaatgatgtaattcttgaataataaatctgacaaaatattagttgtgttcaacaattagtgaaacagaatgtgtgtatgcatgtaagaaagagaaatcatttgtatgagtgctatgtagtagagaaaaaatgttagttaactttgtaggaaataaaacattggacttacactaaatgtttaattcattcattttatnnnnnnnnnnnnnnnnnnnnnnnnnnnnnnnnnnnnnnnnnnnnnnnnnnnnnnnnnnnnnnnnnnnnnnnnnnnnnnnnnnnnnagtttcccaaccatgacaagatgagagatcattcacacctcattatattccctcccttgctaactgccattggactttttccactgagttaaacagaaacccatgg

SEQ ID NO: 256541 - DNA, 584 bp, Homo Sapiens
gtagtggtaatgaatctcttgctttagctgatcttcaaagatcttcatgcgtaaccctttctgaaaaatgttcctcagcctttctgtggtggcctatttctgcatacgtttcagccaggtcaacataggcccatctccaaatggttcgctttaacattatagtcttttcaaaatttgcatatagccaattgaaccaatctgtccacagtttccctatcttgcccctctaggctgccagtttgtagcttccttgatttggatcatttgtgccctgtagcaaagccccatttggtgatgcaggaaggcagaagtgggtgttgtctccaaggccatttttaagagctcaagagctttatccacagacccttttcttcgataaaacttggctgcatattgaaagacataggcctgtgaagatatactggtcagagcttcttcaatgtacttttctccttcagcttcctgtccttcatcctgaagcttcagggcaaggagaaccctaatatatacatcatctggatttagcctgacagctcgttttaggacgtgcagagaaaatgccttattcctccctgatgctgtgt

SEQ ID NO: 256542 - DNA, 1600 bp, Homo Sapiens
  misc_feature (1037)..(1037): n is a, c, g, or t
  misc_feature (1041)..(1041): n is a, c, g, or t
ccctcatcaccgtgtccaatcaccagtcctgcatggacgaccctcatctctgggggatcctgaaactccgccacatctggaacctgaagttgatgcgttggtgaggaggaatgggcccctcgaagtgggccgggccggccccacctgcctctgcccagatttgccctcctcctgctctgcccaggaggtggcgtccagcagtccaggacccctgcagctgcagacatctgcttcaccaaggagctacactcccacttcttcagcttgggcaagtgtgtgcctgtgtgccgaggagcagaatttttccaagcagagaatgaggggaaaggtgttctagacacaggcaggcacatgccaggtgctggaaaaagaagagagaaaggagatggcgtctaccagaaggggatggacttcattttggagaagctcaaccatggggactgggtgcatatcttcccagaaggtcagcagggctgactgggtcgagcccccccagtatgagcgggatgggctcccaagcctcgcctctgtgctctctcaccagggaaagtgaacatgagttccgaattcctgcgtttcaagtggggaatcgggcgcctgattgctgagtgtcatctcaaccccatcatcctgcccctgtggcatgtcggaatgaatgacgtccttcctaacagtccgccctacttcccccgctttggacagaaaatcactgtgctgatcgggaagcccttcagtgccctgcctgtactcgagcggctccgggcggagaacaagtcggctgtggagatgcggaaaagccctgacggacttcattcaagaggaattccagcatctgaagactcaggcagagcagctccacaaccacctccagcctgggagataggccttgcttgctgccttctggattcttggcccgcacagagctggggctgagggatggactgatgcttttagctcaaacgtggcttttagacagatttgttcatagaccctctcaagtgccctctccgagctggtaggcaattccagctcctccntgcnttcctcagttacaacaaaggacctcagctgcttctcccacttggccaagcagggaggaagaagcttaggcagggctctctttccttcttgccttcagatgttctctcccaggggctggcttcaggagggagcatagaaggcaggtgagcaaccagttggctaggggagcagggggcccaccagagctgtggagaggggaccctaagactcctcggcctggctcctacccaccgcccttgccgaaccaggagctgctcactacctcctcagggaatgcgttggccacgtcttccttctgcctgagcttcccccccaccacaggccctttcctcaggcaaggtctggcctcaggtgggcccaggcgggaaaagcacccttggccagaagtcaagcccagccacgtggagcctagagtgagggcctgaggtctggctgcttgcccccatcgggcgccaacaacttctccatcctttctgcctctcaacatcacttgaatcctagggcctgggttttcatgtttttgaaacagaaccataaagcatatgtgttggcttgttgt

SEQ ID NO: 256543 - DNA, 717 bp, Homo Sapiens
gtcacccatctcaaaacccagagtattacatgtctagcttaattgttaggttttaagacaaaaggaactgaggctcatcagagcagaacaacaggtagtccctaggaagtcacgtgggaatgagcttgaataagtttgttaccttgttggttggcagatgtacttggagtgtgtatcttaagcttttgttttttcacgggcatctttctgttttgagcaaaggcggcttcaatgatccatcctaaagaggtgccccctgaggccatcttgctggcagtctaccttgaactgcagaatggtaatactcagctggccttacagatcatcaaaaggaatcagctgctccctgcagtgaaaacacactctgaagtgagaaagaagccagtgtttcagcctgtccacccgatccagcccatccaaatgccggctttcaccactgtgcagagaaagtgatacttcacttttggaaaactgttacctgagacccaggggagaatttactggccattttagttgtatcacagcagaatgaataaaagatggtgaaggctgttaattttgagtcaattttctacccctgacttttggccaaaagcttacttaaaattaaggatttactaagtcatcatcagctgtttttcttaatttcagccagactattaattttgagccattatgtaatagtaggcataggcaattaaaacataattttatcag

SEQ ID NO: 256544 - DNA, 2107 bp, Homo Sapiens
  misc_feature (208)..(208): n is a, c, g, or t
  misc_feature (1634)..(1634): n is a, c, g, or t
  misc_feature (1739)..(1739): n is a, c, g, or t
  misc_feature (1885)..(1885): n is a, c, g, or t
  misc_feature (2007)..(2007): n is a, c, g, or t
  misc_feature (2038)..(2038): n is a, c, g, or t
  misc_feature (2058)..(2058): n is a, c, g, or t
tgggggagccgcagcatggtctccagggtcagagaagggctccttgtcggcaggacaacggccacaagacagcgggaccccaccaggcagaacccagccaggtcgccgtcagctggttctggcagcacacgtggaggggctcagagagcacgggcaggagccagcggggaggcccccatgaggaagtggcgctgagcagggcctagangagggagggggttgggtggaggggcccctgcagaccctgcctgatcactgctctcttggaagacctcaccccaagagtatgtgcactgcaaaagggactgcaggcctctctctccttctttcagaatccttcacgcccgaccacaagcccctgatgggggaggcacctgagctccgagggttcttcctggcctgtggcttcaacagcgcaggaatgatgctgggtggtggctgtggccagaagctggccccactggatcatccatggggcgcccggaaaagaacatgcatggctatgacatcaggcgcatccaatcactcgctcacggaccacccccgctggatccgagagcggaaccatgagtcctacgccaagaactactccgtcgtcttcccccacgatgagccgctggccgggcgcaacatgaggagagacccgctgcatgaggaactccttggacaaggctgcgtgttccaggagcggcatggctgggagcgaccgggatggtttcatccccgaggcccagctccggtcctcgagtacgactactacggggcttacgggagccgcgcgcacgaggactacgcctaccgcaggctgctggcagacgagtacaccttcgccttcccgccccaccacgacacgatcaagaaggagtgcctggcctgcagaggggccgccgctgtgtttgacatgtcctacttcgggaagttctacctggtggggctggatgcaaggaaggctgccgactggctcttctccgcagatgtcagccgacccccaggctccaccgtgtacacgtgcatgctcaaccaccgtgggggcaccgagagtgacctgactgtcagccgcctggcacccagccaccaggcctccccgctggcccccgcctttgaagccgagccattttgcaggaggtgctggacgcagacctgagcaacgaggccttcccgttctccacccacaagctactgagagccgcagggcacctggtccgagccatgcggctgtcctttgtgggggagctgggctgggagctgcacattccaaaggcgtcctgcgtgcctgtgtaccgggctgtgatggccgcgggtgccaagcacggcctcatcaacgcagggtaccgcgccatcgactccctgagcattgagaaaggctaccggcactggcacgcggacctgcggccagacgacagccccctggaggcaggcctggccttcacctgcaagctcaagtcgccggtgcccttcctggggagggaggccctggagcagcagcgggccgcaggcctccgccggcgcctggtgtgcttcaccatggaggacaaagtacccatgtttggcctggaggccatctggaggaacggccaagtggtgggccatgtccggagggctgactttgggttcgccatcgacaagaccatcgnctacggttacatccatgaccccagcggtgggccgatctcgctggactttgggaagagcggggaccatgccctggagagaatgggggtgacctatggtgccctgtntcaccttaagtcgcccttcgaccccaacaacaagagggtgaagggaatctactgagggctcagaccacatgccccatcccatgctgtccatccattctcacaggtcccaaatggccctgggtcccaggaccctggacccagccagnacttgtgccctccctgtccttagcctaggcctagtcctgcgaaaacccccaaaccagatacggacagagaccaagatggcccatcctgtggtcactgactggaaggcagtctctaatccacnccaatcctcccagaaagcaaacctgtaagtntcttgggttcagggaccatncttgtagtcctttccaagcttatagaaaatgattagtaaataattgata

SEQ ID NO: 256545 - DNA, 570 bp, Homo Sapiens
  misc_feature (164)..(174): n is a, c, g, or t
acactgagaaacagtaaatatgcaactgtttgatggaggtgatttctccccacatttatagtttgattcagggcactgaaaacacttgcacataaattataagttcaatttacagtgaaaacttactcccccaccattaacagtaatcactaacttaccttttnnnnnnnnnnnccaattaacatagcaatatgacttgatactttttcatcatcatgagaaacttgcccctaaatacatgttcaagcattaagaatagttgtaaagttacatcattacgagagggaactgcagtatggatttgaaaacttcaggtaagggaactgctaggcctgcctcacttgtccctttctcttgtagccaactcaccacctcctgggatgggagacagtggattatccaatttgtgttctcattccctcctctaaacaccaaagacaatttccccaggaagccattattttgggataaaccaaaataaattttaaagtttcatttggagatttcaaagctgaaaatgctttcagcaaattcttagatcttaagaaagtaccttagatcttaagaaag

SEQ ID NO: 256546 - DNA, 1433 bp, Homo Sapiens
  misc_feature (155)..(191): n is a, c, g, or t
  misc_feature (885)..(885): n is a, c, g, or t
ctgaattccacttttctgcctgctcatttgctgccaaagaccacttggggctccttgtctagaatgctctaagacgaaatttggccagacacagggttccttgattgctctgttcaactaatagagaacttacattttgccttcttaatatcgannnnnnnnnnnnnnnnnnnnnnnnnnnnnnnnnnnnngccttaggagcttagctcaaagttcagctaacctttgacactactagtgtcatttagtaacagtaatctttgacactactagtgtcatttaggagcttagctcaacagtgcagctaacctttgacactagctagtgcatgcaagaaagggtagggaatgaagtacccttaatgcagggctcagcaacagctttatcctgtagaaaggccagataggaagtatttttggctttttgggctgtttgctttcgctactactactgtgggaatgaccatggtcatagctgtgtcccagcacaacttggtttaccaagacaagctgtgggctgtattcggtcctcaggctgtggcttgctagccccatgctctaatggattgtgttggcggcaatggcaagattcccttgctgagaacatgcagatgaataaccttatagctgggatgcagagaggagaaagttctgtaggtaataagtgcactgtattccctctgagctacttcctgggcatagttacatgtatggccagtgtgtgtacttgagccatcaggctcagacacttgttgaatatacctctcattgcattagtttgtaattgtgctagtgctgggtgctgagctcagctgcccggatgacctttccagactgaaggacatactcccctaacagctgggagtgctgctggctgggccatttnacttccagcccttatgaggagtttcccctgctgaagagccctgcctgccccagatcatacccccttcctgcctgtaacccttaccggctccatatggggtacaaagggctggcctcctcaccccaacttgggaaaccctctggggccatcccagctccagagccccttgtggggtcagtgagacctcattgtggccacattacagcccagtgcctctccctgacaagcctgtacccagccggctcagcccacagcactgtcctatgaaccttcctgcacgccattctccacctcagtatctgctttcggggaacccaacctgcgacagtgcttctgtgtgttttcagtcctgcaggtttgaactctgactttggagacttttccagttatctcgtggaatgacagattgtgcctgtatgatatcaggcacaattaatgcaaattaggcagacctatttattctagatgtgaatttgctatttattttaaatgttgattttatgtgttatgtgactctgaacttattgccaaataaaagtttgaattgt

SEQ ID NO: 256547 - DNA, 814 bp, Homo Sapiens
  misc_feature (24)..(24): n is a, c, g, or t
  misc_feature (161)..(161): n is a, c, g, or t
ctaccctttccttgaacgcactanccagtgtccaaaggttagctgaactttgagctaagcctccctaaatgacactagtagtgtcaaagattactgttactaaatgacactagtagtgtcaaaggttagctgaactttgagctaagctcctaaggcaaaanagaaagaaagaaaaacctggtacaaaagaaagtcgatattaagaaggcaaaatgtaagttctctattagttgaacagagcaatcaaggaaccctgtgtctggccaaatttcgtcttagagcattctagacaaggagccccaagtggtctttggcagcaaatgagcaggcagaaaagtggaattcagttccagtatttagcccagtctctgctgcttaaaaggccttttgagaagaggacagaagaaaagccacttagtttgcccaaagcttaaattaactaggaccacaagactacttttcaattctcctttgcaataattaagagtgccaatgcattcaaagcaactagtaattgtagtctgtaatatgcccaaatcagtagcaagtggtttatgttacataatattaatgggaatagcagaaaatagtgccgaagggtaaaatgttttaaaaaacagacaggcactatgttagggggaaagtgggagctctaagccaaacaactaaagtatttcaaaagccacgtttcacccgtaaaaacaacactggaaaaagaaaatcagctgtgcaagtcccttccaaagggacctccatgggccttgctggactgtcatatttgtgatggctgctgcactggactcatcattgttca

SEQ ID NO: 256548 - DNA, 359 bp, Homo Sapiens
gctaaagggattatattggccagactccttcattgacacaaaattttgggaagcaatttgtttgtacaatcttttttggaatggaaagatactaatatacctctaactttggagcattctcattaaaagagaaaagagtggcacggttcatctggcctgccaaatgaggattacatagcccatattccagtatctggaggatctgttgtaaaatgtggagtaaataatttcagctattggggtgcttcatttaggtattatctttatcttacaaacttccaaaaaaacacttcagctaacgttgacatatatataatatttctcactaaagctacctctaagtcctcattctttacata

SEQ ID NO: 256549 - DNA, 616 bp, Homo Sapiens
ctcaagatgggcctgaagagtatcaccctgtagtcgggcacttcatcatttctcaaaggagtccgcatagaacagtgaatagtatgagtgacatcaactttcatatgccatgcttgccctggtttataaggaaactatacacacacatttataaataaggaaatataagctctttagctcttacatattagctaatatatacattagcgcttataaaagatgacaggacaacccaccatagggattgtttgcaaatgctggggataaattagagaaggaacaaaatgaggaagtaccttggaagaagctcatgttgactgttttcagatgcaacagagaattttctccttcttcaaatttagtgtcatctaaagaattgaaagaacagagttaatttacaagacataactacgggacctctgtgcaggcactgacatttaaataccacaggcaaggaaaggttgaatgtataagctgttagacgacctaacagatcattctctgtctttcctattgctgtccgtctggtgttatatctgatcattgggtccctgacctttaagaaagtgtgtcctactccatatacagaattcatgcataatctgtttctactcta

SEQ ID NO: 256550 - DNA, 453 bp, Homo Sapiens
tcctagtgccatttttataggatgctggggcccaaaccaaaagttccacagattggcttcctgtatctctctcccagaaccttattttatgttttcactgattaaaaaaagaattatggaaatcaaaactttacaaattcataatggaagaggaaatgtccatgttaatacatcatagatcatagaccactcctgtgtaagccggttttcagtgtaagggtcatcagtgggaactggtcacataggtgacatccattgagggcagtattctgcatggacctccagaaagaatgagattgctctttgtgtcctgttgcggaaaaattactaacaattaaaaagcaaagtacagaacagtatatagagagaaggctacatttgtgtgaagggaacaggaaaaattggaatatttgtatttgatggtatgctcatgaacattgtgtaagctgcagg

SEQ ID NO: 256551 - DNA, 1352 bp, Homo Sapiens
  misc_feature (1332)..(1332): n is a, c, g, or t
cagtctacgctggcgcggcgcaacagggccgactgcagctggaagatggcggcgtccgtggtctgtcgggccgctaccgccggggcacaagtgctattgcgcgcccgccgctcgccggccctgctgcggacgccagccttgcggagtacggcaaccttcgctcaggcgctccagttcgtgccggagacgcaggttagcctgctggacaacggcctgcgtgtggcctccgagcagtcctctcagcccacttgcacggtgggagtgtggattgatgttggcagccgttttgagactgagaagaataatggggcaggctactttttggagcatctggctttcaagggaacaaagaatcggcctggcagtgccctggagaaggaggtggagagcatgggggcccatcttaatgcctacagcacccgggagcacacagcttactacatcaaggcgctgtccaaggatctgccgaaagctgtggagctcctgggtgacattgtgcagaactgtagtctggaagactcacagattgagaaggaacgtgatgtgatcctgcgggagatgcaggagaatgatgcatctatgcgagatgtggtctttaactacctgcatgccacagcattccagggcacacctctagcccaggctgtggaggggcccagtgagaatgtcaggaagctgtctcgtgcagacttgaccgagtacctcagcacacattacaaggcccctcgaatggtgctggcagcagctggaggagtggagcaccagcaactgttagacctcgcccagaagcacctcggtggcatcccatggacatatgcagaggacgctgtgcccactcttactccatgccgcttcactggcagtgagatccgccaccgtgatgatgctctaccttttgcccacgtggccattgcagtagagggtcctggctgggccagcccggacaatgtggccttgcaagtggccaatgccatcatcggccactatgactgcacttatggtggtggcgtgcacctgtccagcccactggcttcaggtgctgtggccaacaagctatgccagagtttccagaccttcagcatctgctatgcagagacgggcttgctgggtgcacactttgtctgtgaccgaatgaaaatcgatgacatgatgttcgtcctgcaagggcagtggatgcgcctgtgtaccagtgccaacggaaagtgaggtggcccgggggcaaaaacatcctcaaaaaagccctgggtatctcatctagatggcactactccctgggtgggagggaatcgggaccgcagctccctggactatggccgccgcatccccctgggntgaatgggaaaacccgaatc

SEQ ID NO: 256552 - DNA, 1196 bp, Homo Sapiens
  misc_feature (1112)..(1120): n is a, c, g, or t
tagcgaggcctgggtggcgaattcggcacgaggcaaggatctgccgaaagctgtggagctcctgggtgacattgtgcagaactgtagtctggaagactcacagattgagaaggaacgtgatgtgatcctgcgggagatgcaggagaatgatgcatctatgcgagatgtggtctttaactacctgcatgccacagcattccagggcacacctctagcccaggctgtggaggggcccagtgagaatgtcaggaagctgtctcgtgcagacttgaccgagtacctcagcacacattacaaggcccctcgaatggtgctggcagcagctggaggagtggagcaccagcaactgttagacctcgcccagaagcacctcggtggcatcccatggacatatgcagaggacgctgtgcccactcttactccatgccgcttcactggcagtgagatccgccaccgtgatgatgctctaccttttgcccacgtggccattgcagtagagggtcctggctgggccagcccggacaatgtggccttgcaagtggccaatgccatcatcggccactatgactgcacttatggtggtggcgtgcacctgtccagcccactggcttcaggtgctgtggccaacaagctatgccagagtttccagaccttcagcatctgctatgcagagacgggcttgctgggtgcacactttgtctgtgaccgaatgaaaatcgatgacatgatgttcgtcctgcaagggcagtggatgcgcctgtgtaccagtgccacggagagtgaggtggcccggggcaaaaacatcctcagaaatgccctggtatctcatctagatggcactactcctgtgtgtgaggacatcggacgcagcctcctgacctatggccgccgcatccccctggctgaatgggaaagccggattgcggaggtggatgccagtgtggtacgtgagatctgctccaagtacatctatgaccagtgcccagcagtggctggatatggccccattgagcagctcccagactacaaccggatccgtagcggcatgttctggctgcgcttctaggcgggaagcctatgtaagcaagagggcagggccggggtttgtggtnnnnnnnnnaccacaaacacagcacttcggctcctctaacctgtgccacaggtgaccaccaataaaatcctctgctgagaagtgg

SEQ ID NO: 256553 - DNA, 928 bp, Homo Sapiens
  misc_feature (286)..(294): n is a, c, g, or t
  misc_feature (362)..(392): n is a, c, g, or t
  misc_feature (634)..(634): n is a, c, g, or t
  misc_feature (780)..(788): n is a, c, g, or t
ggtctagatggcactactcctgtgtgtgaggacatcggacgcagcctcctgacctatggccgccgcatccccctggctgaatgggaaagccggattgcggaggtggatgccagtgtggtacgtgagatctgctccaagtacatctatgaccagtgcccagcagtggctggatatggccccattgagcagctcccagactacaaccggatccgtagcggcatgttctggctgcgcttctaggcgggaagcctatgtaagcaagagggcagggccggggtttgtggtnnnnnnnnnaccacaaacacagcacttcggctcctctaacctgtgccacaggtgaccaccaataaaatcctctgctnnnnnnnnnnnnnnnnnnnnnnnnnnnnnnncttgtcgggccgccctccggccctcaaaaaagctttcacaaacccattccgttttggcgccgcggggccccggtaaggctaaggtgaaacactggcaacaataggctggtttctcctaaggaagaatcccttgtggccactgagcataagtgagcttttgggaatattcctctcaccccaatttaaaacaaaaacacgacccccccgggccggggggcaaaacacccgagagcccgggtttnttctgtgcaaaacaccacaaaatttccccccaaagaaatggtgggagaagggtttttttcgtgagggaagggggggtctccccatttcttttacacgcggggcgggggaaattatccttaatattcttcgcaaaccccagagggtnnnnnnnnntctcccccaaatatacccccccgcagaaaggccctttttctcaaaattaaaattccgcacaaaaattatttgaagggcgagagaaaccgccgggggcccgatatgggggcgcccagaaattcacacagtccgcgatgaac

SEQ ID NO: 256554 - DNA, 310 bp, Homo Sapiens
tctctttcattctgatgtctcctctatgcatctcaaatgttgcctctcttcccacattcaacttcccctcagaggaagaatatgataaggtcatttagtccctattctatatggagagtccctattaggtgtctttttcctcaggtacctaatcctcactcattcatcctggccaaggtcaaaactcataatccacaatccataaagaacttcccatttttctcaaaaggggagagagggaagaaccagaaagattaacagaagcatagaattatattgtttattggcacatttaggataatttagtgtc

SEQ ID NO: 256555 - DNA, 457 bp, Homo Sapiens
ttcccgcacggattcggagaaacggccgccagtgtggtggaattcgggaggaagtttttatttttataaacaaaatctgatgttcagaggccccgtttcttacaataaatgttgagtcttagttaagcaggaatttatgaacacccatttcctgactttttgctttaatttagatttttctcccatcctgtttctagcacaaaaatttgcctgctgtgttacaaaaataaatttatgttgtcctgtgccataaagtgatatatttaatatttttattctttggttttgaacattgtaagttcctaaaaacattttattaaacaagtagacattttgttattaaaaaaatgtgatctgtaatttctttgtgcagaatgatttgaagtattgtattcagtttacatgcgttattggtttataattaatatctaatgaaaatacatgttgttatattgta

SEQ ID NO: 256556 - DNA, 963 bp, Homo Sapiens
  misc_feature (406)..(418): n is a, c, g, or t
gtggaacagattggtgtaatattctctcggtttcaaactgcttgtggcacatattttttgctgtggctcatctctatatatgcaacgcgattgtttaagcacccggaacacctggaaattttgtttgggaccggttcccaaatgtcttcaaaccgccgtgtggttggtgtccccacccaagcgtggaaccaatcccgggttccgggggttagcaatgttactgaacgccaattttaaccagatccggaatgcgtattatgatccacctctatggacgccagagcaaggcatcaaacaacaacattggaaggagaggtcacactgaacctaatcagcaggttccttaataacaaagactactaatgtatatccttaatcaccaaaggaccaccaaaaaaatacaggnnnnnnnnnnnnncatttcgtacaaaagtcacctgccagaggaaaatgttgtgtttccagatattataatacaattttcataatgtatgttctttggttgtacatgaggagtacagggaaaagatatatttgactctaaagatgcgtatcagaaataaaaattacccatccactgtttgttgttaagatgccaaagctggtgattcccctaacagacaatgaagagaaacaaaattgctcaaagcagcagtattgtaacaaataaaaacttctctagagacccagcacatataatcaacacttaaagcattctgaaaaagaaataaggccttggaaaatgtttcactctcctccattacttggttaaataaatggtgtcctggcctgatgttgcggttgtacataccctttcactagtgtttgagtggcacaagccacatttaccatgagaaagaagagatttattcataaaaatgaatttaggctgaatggcttattattggagggtaagggatttacatccaattttttaaaagtccattgctggtacaattcaaa

SEQ ID NO: 256557 - DNA, 1388 bp, Homo Sapiens
  misc_feature (502)..(539): n is a, c, g, or t
  misc_feature (637)..(718): n is a, c, g, or t
  misc_feature (1226)..(1244): n is a, c, g, or t
atgagccaccacgcttggccgggatagtatatttttatagcacttcccctactgattgctgccttctctgtgggctacaagggacccacagaattacagggaagttacagggaagcaggtttcatctcaatattgggagagatttcaaacaatcacacctgcctgagaaggagtgggctgtcactaggaatttttattcccagtccgtcaggaattttgtagaagggcttcatgtgctggtaccaataggacaggaagattttaatcagctttactatctatgtttttttatggaaactgtgtgtatgtatacatacattttccaaaaagaaaaattaaatgattatagagattatgtttttcagactactcacgtatctgcttttcttactccccacctctgctgataattcctagatcattggtttttcccccacactggaattacctggggagcttaaaaaaccctgatgcctgggtcccaccctcagagatgattgannnnnnnnnnnnnnnnnnnnnnnnnnnnnnnnnnnnnntgatatgaatgcagcctgggcactgggaaatttaaaaactccccagataattctgtgcagccaaggttgagacctcctagtctagagctttgctatannnnnnnnnnnnnnnnnnnnnnnnnnnnnnnnnnnnnnnnnnnnnnnnnnnnnnnnnnnnnnnnnnnnnnnnnnnnnnnnnnccctgcattttcactagaccccaggtgatcagctgcactagactcaacctctaaaccaagacctcccaccctcacagtctatgatcctttagtgaccctcagctgagtcctgtgctgaactgtgtttgttctccttgagcacatgcccgctgaccagggacagactggatgagcaagcaacctgctggctatggagaagagccaggctgggtaaatgtttgctgtgactaagccaggatcaaagaactgcctgttgcttgcactggctggcactgagcttgccactctgtgaactgtgcttccttcccctgcatggacctgtgcctcagtcactattatccgcaggccttctccaagggcagccctctccttgtttatccctcttaagcctgcgtgcaggaaggcacattaaccctgtggccccctgcaggcaggagggtgttgggtgcccttacctaccttgccctttttcttgtaccgtaggctgtgccgtttatgagtaagtgannnnnnnnnnnnnnnnnnnctagaagtgctgcactcaccttgtgttattggaggttgtgtaaccccctagctttgagcctggtctcagatgttccttttccgttctctgtccagccgttaccgcccccagtctgtaataaaagcctatcagccgtgcacttta

SEQ ID NO: 256558 - DNA, 1273 bp, Homo Sapiens
cagcagactttactcattagttttcaagtctttcgcaatgccaattcccccaaaattaacaatgtctctcaaaatccaagaaataaaatgtgtactgtatttacaaatataaaatttaaaaattttaagattataaaaattgaagaattacatcatctgtcaggtgagagtgtcaacctgcaaaagcaattaacttatttttaaaaaaagaaattggagaatcaaccatttaagcatgattttaagttcaagaattttcagatgttattttcttacatggcttccaactaattttatacagtaagttcaagtccatagcaaaggtaataaaactgcccagttgaccctgatagaaaactatgaaaatttataataaaatttcaagtcattttaaaaagaatatgaagccttgtttgctcctacaatgcaacaaaatctagattccttttcttgatataaatctctattattctgaaaatctaccaagagatttatgtataaaatatttgtaataactgttttacatgtgtggtgcctttaaaataatatatctgaagactaaatatgtcattaataataaaaaatacaaacaaaaacaacggctagaataggaaagactgaaagtgccaatgacaagtcatttgatcacagatacctctatgttcctacatagctctaataagttgttatgaatatgaacaacatgtatcttacttgatctcttagagacaaaaatatagatagggagatgggagttataaggtgtcaacagattcatcatttgaatcaaaataaaacaatctgaatatcatcactgcttctactatatcactacagtgtgatcgcattcagatttaaaaggtttgagtccactctcaaagacggatatatttctactttctccacagtacagtctggcttcactgagttactggtaaagacacgggcacctgattagactgaggtgctggagacccactgttcatggcttgtggaggcactgcagctggctccatcttgctaatgtgtgtgatgaatcgaagacgaagttttaaagctggttttaagttacagataatcttctctacttgctctttcacgctgtcaccagtaaacatatacttcatgtgatagaggaagtcacagatgggatccatgtaatttaaatgggtgctacactggtcaacattcagcagcatgtcataaaacgccacaccaatctctatcatacaacgagttctctcttgctgaaatctttgtaaaaatggtccaa

SEQ ID NO: 256559 - DNA, 1040 bp, Homo Sapiens
gagcgctggagtttgaagagcgggcagtggctgcacacgccaaactttccctatggcttcggtgaccagggccgtgtttggagagctgccctcgggaggagggacagtggagaagttccagctgcagtcagacctcttgagagtggacatcatctcctggggctgcacgatcacagccctagaggtcaaagacaggcaggggagagcctcggacgtggtgcttggcttcgccgagttggaaggatacctccaaaagcagccatactttggagcagttattgggagggtggccaaccgaatcgccaaaggaaccttcaaggtggatgggaaggagtatcacctggccattaacaaggaacccaacagtctgcatggaggagtcagagggtttgataaagtgctctggacccctcgggtgctgtcaaatggcgtccagttctcgcgcatcagtccagatgggtgaagaaggctaccccggagagttaaaagtctgggtgacatacacccctggatggcggagagctcatagtcaactacagagcacaagccagtcaggccacacccagtcaacctgaccaaccattcttacttcaacccgggcaaggccaggcttcccccaaatataaatgaccatgaagtcaccatagaagcggatacttatttgcatgtggatgaaaccctgattcctacaggagaagttgccccagtgcaaggcactgcattcgacctgagaaagccagtggagcttggaaaacacctgcaggacttccatctcaatggttttgaccacaatttctgtctgaagggatctaaagaaaagcatttttgtgcaagggtgcatcatgctgcaagcgggcgggtactagaagtatacaccacccagcccggggtccagttttacaccccccacttcctggatggcacattaaagggcaagaatggagctgtctatcccaaacactacggtttctgcctggagactcagaactggcctgatgcactcaatcatccccgccttccctcctgtgctgctgaggcct

SEQ ID NO: 256560 - DNA, 371 bp, Homo Sapiens
caagcccgtcaccaaggatattaggtgaagagaccagtagctgaaatgtcttgagaacaatgattatgagcttaactgagacaatggcaacaactgtgtgtttctacaaatgggaataaacgtaagactgtgtaagacactgtctgtgaactgtacatattggacaggaaacggggtgagatgaccagagccaataccagcatctggaaaagagagataagtattagaaaaggggccatccactgcaaacaaaagcttcaggaagtgtctcctaacacatctacttatgcccttagcatctagtcctctgcctgccacttagtaagtgaacagcaagtatgtgttgaatgaataaaaagcaagaagttggg

SEQ ID NO: 256561 - DNA, 619 bp, Homo Sapiens
  misc_feature (118)..(118): n is a, c, g, or t
aaacctaaatttcagaacccgtagtccccataaataagtaacccggacaaagaagaaatccaaccagaaccctgtacagcatgtgccctgtgtggttctgtgaacaccaagggtttgnaggcctgtgaaatatgggtttgctgcactttgctgagctgacattactcagttgccttgactttgagttagtcattagaagtcagtctagaccaagaaaggcaagatgatatatgtcaagcattaataatacgtctcttccgtatatcttcaagattgtagccacagtcagttcactcattgcatgtacttgtaactctttctccctgaagtttgtgacagcctctattgctgaagaacttggcacaatttagggatgaatttaggttggggtagtgtctatacacatggaaggggtcatgcctcctctcactcgtcaaacgtacccatgtccagggtcagcgacagtttcctctgagatcatggacgaatgcagttgggtggtagcagcaagagaatcactgtcttggtaacacacaagagaaattgtgagtttctaatttattccctcttgagcctattttcagaaaaatgaaaccaaatgggcttcatggctttttct

SEQ ID NO: 256562 - DNA, 409 bp, Homo Sapiens
caaaatcaagatagttacctggcagatgattcagacaggagtcacagaaataatgaaatggcacttctagaatcaaagaatctttgcatggtccctaagaaaaggaagctttatactgagccattagaaaatccatttaaaaagatgaaaaacaacattgttgatgctgcaaacaatcacagtgccccagaagtactgtatgggtccttgcttaaccaggaagagctgaaatttagcagaaatgatcttgaatttaaatatcctgctggtcatggctcaaccagcgaaagtgaacacaggagttgggccagagagagcaaaagctttaatgttctgaaacagctgcttctctcagaaaactgtgtgcgagatttgtccccgcacagaagtaactctgtggctgacagta

SEQ ID NO: 256563 - DNA, 1295 bp, Homo Sapiens
  misc_feature (882)..(981): n is a, c, g, or t
  misc_feature (1049)..(1113): n is a, c, g, or t
  misc_feature (1126)..(1146): n is a, c, g, or t
caatgcttgtccagtcaatcccaggttaatcttaatataacaacttatacatgtaaaccatataacttttatgaaattaaatatcctcatataaatttcataacatatgttaagttacaaaagaaagtaaaagtcaacgaggatatgggggaagccaaaaggaatacaaatctaacaaatgaacctaactatgtacaaattatgcaaatcacataatttgcaggagtgtggaaagaaagaaaagaactcatctaggcaacttttgaaaccagtacttagatgctacaggtcaaacacaaaaacaacagtacacgattaaggaagtaaggtgcctccatagtgactgcgcctccctggggcacaggttgaacagttcacctacagcactgacatggcctaagcgaatgtcctgtcaatctgagagccaggtttctccctgtcacaggaagaaactacacataaggaaaggggcaggtgagacaggaacagcaggaactagacagctacagaaaccaacagggcgggtaaatgcacaagcacgtgtcatagatccacttcccagctctgtcccaggagggcccagaagcaacaagcacagccagtgcccaggtcttggttgctaaatcccagtctccagtgagggagggctccctggagaagcagctgggtgcagagctgggacaaggaaaactgaagacatcccaaaataaacaagtgcttaaataaggatagggcacaggagacaatctccaggagctcccaatggccaaagcgtggaaacagtatcagattatgactcacagaatccaacaaacagcccttgcgttcatactgatatataaagaaagaaatcgtaggtcaggcgcagtggctcatgccttnnnnnnnnnnnnnnnnnnnnnnnnnnnnnnnnnnnnnnnnnnnnnnnnnnnnnnnnnnnnnnnnnnnnnnnnnnnnnnnnnnnnnnnnnnnnnnnnnnnnctgggcatggtggtgagcacctgtggttctggttactcaggaggctgagatgggagatcacgtgagcnnnnnnnnnnnnnnnnnnnnnnnnnnnnnnnnnnnnnnnnnnnnnnnnnnnnnnnnnnnnnnnnnagaccctgtctcnnnnnnnnnnnnnnnnnnnnngctgaagggactgctctttcttagagatgaattccaattaataaacgtcaaaggaatgaggaaaatgcaaaaatcacctttgaaaactaagttaataattactgcattgcaagacccaccagtggatgctgaaattaattagtgggtag

SEQ ID NO: 256564 - DNA, 933 bp, Homo Sapiens
gctgggtggcgaattcggcacgagggccgtgtctcgcagtcgtggactcgtgcagctggggcgtccgcagccgctcgtcacccgcgtgatgctgtttctggcgttgggcagcccgtgggcggtcgaactgcctctctgcggaaggaggactgcattgtgtgcggccgccgcgctccgaggtccccgggcctctgtctcccgggcgtcctccagcagcgggccttcggggccggtagccggctggagtacggggccttcgggagccgcgcgccttctccggcgtccgggtcgagcgcagatccctgtttattgggaaggatatgttcgattcttaaatacgccatctgacaaatcagaagatggaaggctaatttatactggcaatatggcccgagcagtgtttggtgtgaaatgtttctcttattctacgagtctgattggccttacatttctgccatacatttttacacaaaataatgctatttctgaaagtgtgcctctgcctattcaaatcatattctatggcatcatgggaagctttacggtgatcaccccagtgctgcttcactttattacaaaaggctatgtcattcgattgtaccatgaggccccaacagacacttataaagccattacctacaatgctatgcttgcagaaacgagtaccgtgtttcaccagaatgatgtgaagattccagatgctaaacatgtatttaccacattttatgctaaaacaaaatcactgtgtagttaatccagtgctcctttccaaaccgtggaggactatatccctctaatggggttatgaccaagaacaattttattttggaatatggaaaaaacccggggaggagaaaccgcattaagatgacaaatgaacctaatttggtatggtccgggctcaaaggtgattttacgcttttaatgtattat

SEQ ID NO: 256565 - DNA, 794 bp, Homo Sapiens
  misc_feature (226)..(295): n is a, c, g, or t
  misc_feature (518)..(526): n is a, c, g, or t
  misc_feature (764)..(764): n is a, c, g, or t
cgcagatgaactacatccaggtgacgccgcaggagaaagaagctatagagaggttgaaggccctgggcttcccagagagcctggtcatccaggcctatttcgcgtgtgaaaaaaatgagaacttggctgccaacttcctcctgagtcagaactttgatgacgagtgatgccaggaagccaggccaccgaagcccccaccctacccttattccatgaaagttttatnnnnnnnnnnnnnnnnnnnnnnnnnnnnnnnnnnnnnnnnnnnnnnnnnnnnnnnnnnnnnnnnnnnnnncaagcaaacagtccagcttcctgtcctcctaaagtggcccctgttcccatctcccgggccagacagctgtccccccgtcctcctccccagcccagcctgctcagagaagctggcaggactgggaggcgacagatgggcccctcttggcctctgtcccagctctctgcagccagacggaaaggcggctgcttgcctctccatcctccgaaaaacccctgaggannnnnnnnnatcctcttctaggatgaggggaagctggagccccaactttgatcctccattggagtggcccaaatctttccatctagggcaagtcctgaaaggcccaaggccccctccccagtctggccttggcctccagcctggagaagggctaacatcagctcattgtcaaggccacccccaccccagaacagaaccgtgtctctgataaaggttttgaagtgaataaagttttaacacctacatnccaccaccaacccaaccaaaaaatcctgtc

SEQ ID NO: 256566 - DNA, 1328 bp, Homo Sapiens
  misc_feature (1315)..(1315): n is a, c, g, or t
ggcctgggtggcgaattcggcacgagggcgcggcgcgcctgggcgctaagatggcggcggcgtgagttgcatgttgtgtgaggatcccggggccgccgcgtcgctcgggccccgccattggccgtcaccatcacgctcaaaacgctgcagcagcagaccttcaagatccgcatggagcctgacgagacggtgaaggtgctaaaggagaagatagaagctgagaagggtcgtgatgccttccccgtggctggacagaaactcatctatgccggcaagatcttgagtgacgatgtccctatcagggactatcgcatcgatgagaagaactttgtggtcgtcatggtgaccaagaccaaagccggccagggtacctcagcacccccagaggcctcacccacagctgccccagagtcctctacatccttcccgcctgcccccacctcaggcatgtcccatcccccacctgccgccagagaggacaagagcccatcagaggaatccgcccccacgacgtccccagagtctgtgtcaggctctgttccctcttcaggtagcagcgggcgagaggaagacgcggcctccacgctagtgacgggctctgagtatgagacgatgctgacggagatcatgtccatgggctatgagcgagagcgggtcgtggccgccctgagagccagctacaacaacccccaccgagccgtggagtatctgctcacgggaattcctgggagccccgagccggaacacggttctgtccaggagagccaggtatcggagcagccggccacggaagcagcaggagagaaccccctggagttcctgcgggaccagccccagttccagaacatgcggcaggtgattcagcagaaccctgcgctgctgcccgccctgctccagcagctgggcccaggagaaccctcagcttttacagcaaatcagccggcaccaggagcagttcatccagatgctgaacgagccccctggggagctggcggacatctcagatgtggagggggaggtgggcgccataggagaggaggccccgcagatgaactacatccaggtgacgccgcaggagaaagaagctatagagaggttgaaggccctgggcttcccagagagcctggtcatccaggcctatttcgcgtgtgaaaaaaatgagaacttggctgccaacttcctcctgagtcagaactttgatgacgagtgatgccaggaagccaggccaccgaagcccccaccctacccttattccatgaaagttttataaaagaaaaaatatatatatattcatgtttatttaggaatggataanaaaatcaaaaatc

SEQ ID NO: 256567 - DNA, 510 bp, Homo Sapiens
  misc_feature (40)..(40): n is a, c, g, or t
ttgttgtaaactggcctcctacagggcggcccacgaaccncctctcgcctcaataaccccatggaacaatgaatctcccgtcaaccatcgtcctcaatactcaaaagccccgttcactaaccgtggaaggccgcgtcttcctctcgcccgctgcctacctgaagagggaacagagcctgacacagactctggggacgtcgcgggggcggattcctctgatgggctcttgtcctctctggcggcaggtgggggatgggacatgcctgaggtgggggcaggcgggaaggatgtagaggactctggggcagctgtgggtgaggcctctgggggtgctgaggtaccctggccggctttggtcttggtcaccatgacgaccacaaagttcttctcatcgatgcgattagccctgatagggacatcgtcactcaagatcttgccggcatagatgagtttctgtccagccacggggaaggcatcacgacccttctcagcatctatcttcctaccttc

SEQ ID NO: 256568 - DNA, 803 bp, Homo Sapiens
  misc_feature (45)..(130): n is a, c, g, or t
aggaagagggaagcccattataaaaccatcagatctcctgagaannnnnnnnnnnnnnnnnnnnnnnnnnnnnnnnnnnnnnnnnnnnnnnnnnnnnnnnnnnnnnnnnnnnnnnnnnnnnnnnnnnnnnaggaacataactcaaaataatgagagccatgtatataacaaatccacagccaacataatactgaatgggcaaaagctggaagcattccccttgaaaactggcaaaaaacaaggatgccctctctcaccactcgtattcaacataatattggaagccctggccagagcaatcaggcaagagaaagaaataaagagcacccaaataaaaagagaggaagtcaaactaccctctgtttgcagacaacatgattctatatctagaaaaccccatagtctcagcccaaaagctccttaagctgatacataaattcagcgaagtctcaggatacaaaagcaacatacaaaaaccactagcattcccatataccaacagttaagccaagagccaaatcagaaacataatcccattcacaactgccacaaaaagaataaaacacctaggaatactctagaaagatctctacaacaagaattaaaaacactcttcaaagaaatcagagatgacacaaacaaatgggaaaacataagcaatttacacattcaatgttattcctatcaaactaccaacaacattcttcacagaactagaaaaaactattttaaaattcatatggaaccaaaaaagagcctgaatagcaaaggcaatcctaagcaaaaagaacaaagctggaggc

SEQ ID NO: 256569 - DNA, 1052 bp, Homo Sapiens
ggcgaagtttagggaatctggacaggatgcagaattggatagggagggttgtccaaaagaaaactgaaaattggagaacaaggggcagggccgagcctaaactggggtaggggctaggagacaagaatttgaggacaagagctgggctgagtagttcactttaggcatatccttgccactgccctctctgagggggtcagaagcaggggctgcaggggtagttaggagggctcctcaggtctaggtttcagcctgtagccgttggcggagctcagccagccgtcccaaaagagcagtcacatcttcagaggccagagcctgcctggcgcggccttgccagctgatggccctctctgtgaggcactgcagggcctcgccctcgggcagccgcacaggcagtctctgcagggctaccagcagtgccaggatggtctccaggcgcgggcgccttgagcgcatacacagtggacacaggaatttggtgtcccattcccaccaggccagcagtggggatgaggtgggattgggcctcggagagctgaggaggcgaggcactgacacacaccgcccatggaaccagtcctgacacaggtcacactgcagagctcccgccccagccagcacctgcccacacacacagatagaggttgtagaggaggccgtgctcgatgatgccagtggactgggcttggccgaattggtgcgacgcagctgcaggataccctccttctccttctgttccccctccttgaaggccacgatcacagagcctgggtccctgaggtcctgcgcagacagccccagcagctctgtgtcagatttgtacaaccccagctccttctccatccaccggctgcgcttggtgctgtctgagccggcatctgcacatgggcagagaacctcaagcagcgtgtagcaagaattcttcttgagaaaggtcttggaggccttctccctccaggagtgcgctgtcagtacctgtagctctagctgtctcagctcctccagcctgcagcagctgccatatgctgtggttctcatccagggtcacc

SEQ ID NO: 256570 - DNA, 894 bp, Homo Sapiens
  misc_feature (187)..(187): n is a, c, g, or t
  misc_feature (504)..(512): n is a, c, g, or t
atacccatttaataattatgagatgttattacatacattgtacgcttatatactaagcagctttgcgaaatgtttgtaatgcatgtggatagtacacggttaattcagagatcttcactgtagtgaacaatggatattttaaagaatagtcccaacaataaaccacagagctgacaaaaatgccacntaatctgcatcatttccaggagctctgccacatattcttcctggcccgtaccaagtctcttagcccctctagaagagctaagaaaatgcaggtgtgcacctctgaacagcccatacttggcttttctgaagcaaattcccatggaaaccacattgaaggaagaggcaaaggctggtaggaaatcagctgaatcagcctgggtgccctagacccagtcatgtttgttggaccaaattagctgtcttttcatttcatgctatatagaactggcagtttacacttctgattaatacattgtctccgatcaggaggtttannnnnnnnncctaataaaatctgaaaggagattgggcagaaccaattagtaatcttacattacacattgtccctaggtatataatcaagaattaacagcagttatgattatatgattataatacatgcattttaaatactacagtaacagacagaggctcagacactaaattccaaagataacatatgccaaacaacattgaaacaaaggattttagagctggagatatctcgatgtttttctatggtcatctcttcatttcttcaagagattgtctatttataccagggatacaaaattatggctcccagttctgacttaacgtgtgaggttgggtaatttacctgtcttcctgtgtcccagttttcccataagtcaaagaaaataacaa

SEQ ID NO: 256571 - DNA, 607 bp, Homo Sapiens
  misc_feature (77)..(77): n is a, c, g, or t
gcccttctcctgtgcactgctgcccacacgtttcacctggttggcataggcaatagttgggttgggtgggtcctccnggtaggggcccgggtaggtgtctgggagaggtgccacgtggaccactcccttctggccatccaggttgcggaacttgtagggactgatgtcaatcagggagctcaggtgaccgtgatacgcatgatctaataccaccacgtcctggtgtcccgtgtagtggcgagccagcctcagggccaggtcattggcttctgacccagaattcaggaaatagaacacacagagctgctccggcagggtctctgacagcctctgcgcatagtccacgatgttgtcatgcaggtaccggctgttggtgttgagcacctggttctgctcatgtgctgcttggaccacgagagggtggcagtgcccaacgtgcgccacattgctgatgcaatcgatgtattctgccccctgttcatcgtacatgtactgcccttgggcccggacaatcttaacaggatcctcgggaaaaaagagtctgcaggaagagctgtggggacaggcaaggagtggacagccatgtctgaagaccgaaagggtgaag

SEQ ID NO: 256572 - DNA, 1112 bp, Homo Sapiens
  misc_feature (118)..(118): n is a, c, g, or t
  misc_feature (897)..(897): n is a, c, g, or t
  misc_feature (911)..(912): n is a, c, g, or t
  misc_feature (936)..(936): n is a, c, g, or t
  misc_feature (938)..(938): n is a, c, g, or t
  misc_feature (946)..(946): n is a, c, g, or t
  misc_feature (952)..(952): n is a, c, g, or t
  misc_feature (958)..(958): n is a, c, g, or t
  misc_feature (960)..(960): n is a, c, g, or t
  misc_feature (962)..(962): n is a, c, g, or t
  misc_feature (968)..(968): n is a, c, g, or t
  misc_feature (981)..(982): n is a, c, g, or t
  misc_feature (990)..(990): n is a, c, g, or t
  misc_feature (994)..(994): n is a, c, g, or t
  misc_feature (998)..(998): n is a, c, g, or t
  misc_feature (1017)..(1017): n is a, c, g, or t
  misc_feature (1028)..(1029): n is a, c, g, or t
  misc_feature (1036)..(1036): n is a, c, g, or t
  misc_feature (1047)..(1047): n is a, c, g, or t
  misc_feature (1052)..(1052): n is a, c, g, or t
  misc_feature (1060)..(1062): n is a, c, g, or t
  misc_feature (1064)..(1064): n is a, c, g, or t
  misc_feature (1067)..(1068): n is a, c, g, or t
  misc_feature (1081)..(1081): n is a, c, g, or t
  misc_feature (1089)..(1089): n is a, c, g, or t
  misc_feature (1091)..(1091): n is a, c, g, or t
  misc_feature (1098)..(1098): n is a, c, g, or t
  misc_feature (1103)..(1104): n is a, c, g, or t
  misc_feature (1110)..(1110): n is a, c, g, or t
tccggaattcccgggatgctcgagttcctgcgcgggactgccaaggcacgaccacgggccggaaggctgccaggcccagtgggcaagcgaagaaatgaatccacctgcatacgcgcgncgcttcggggcggggccgagtgcgaaccttgagccccaaatcccgacccaggcaggggcggggcccggagcggggccttggaggcccagcccgcgcggcgacgtctccgcgtggcgtcacggcaccgactgacggccacccaccatggccgcagaccagcgcccgaaggccgacacgctggccctgaggcaaacggctcatcagctcttcctgcagactcttttttcccgaggatcctgttaagattgtccgggcccaagggcagtacatgtacgatgaacagggggcagaataaatcgattgcatcagcaatgtggcgcacgttgggcactgccaccctctcgtggtccaagcagcacatgagcagaaacaggtgctcaaaaacaacagccggtacctgcatgacaaaatcgtggactatgcgcagaggctgtcagagaccctgccggagcagctctgtgtgttctatttcctgaattctgggtcagaagccaatgacctggccctgaggctggctcgccactacacgggacaccaggacgtggtggtattagatcatgcgtatcacggccacctgagctccctgattgacatcagtccctacaagttccgcaacctgggatggccagaaggagtgggtccacgtggcacctctcccagacacctaccggggcccctaccgggaggaccacccaaaccaagctatggcctatgccaacgaagtgaaacgtgttggtcagcagtgcacaggagaagggcagaagattgcagcttcttcnctgagtctctgccnntgtgggagggagatcattcccccncnggctactntcccantggcanananatccgnaaggcgggagggnntttgttgnaaanaaanccaggttgctttggccggnaagaaccactnntggcctncaactccaggnaaaanttgtcctnnnangtnnccatggcaatccntggcacgncncctgttnctcgnngcgcancc

SEQ ID NO: 256573 - DNA, 612 bp, Homo Sapiens
acatatccaggttggcctcagtttcctctctcccataggtactcatgctctaaggctgaggtccccctacaaccaatactttacctaactactccccccataccgcccccctggggcagatttttccttttcctcaaattttacagaaactttagtatatagtttataactttgtttttccctaagttgttcagtggtagtctttttaaattgtttcatgtacatttcttcaataagactgaaaaatccttgaaaatacagtgcaaatgtcatttcttttcaagttaactacttcagacatctatttgagtattaaaactaaaaaaagtatatatttaagaatgagacaatgaaagagaggaaagacaacaattatttttgaaatgcattagagataccaatgaaagaaataaaccaatgactgattttgagaattaaagggtgtttatggattttaccaggttaacttcctcatttgacacataaaaaaaatctgatgtccaaagacatgttcaactactagaaaagttggaatcagaatcaatcctaattctcattttggtgttcttttctatatcattccttatgctttatctaaaatatactggggac

SEQ ID NO: 256574 - DNA, 827 bp, Homo Sapiens
ccacccatgtgtgagagctctttgacttggccaataggggcctatcttaatgcacttgtttggacacatttctgatcttatttgtaaaggctgcataaaggagaggatgaaatgctgtaaaagtaggaaatgaagtggaagctggaagaaaatgtaattggtggtacagctatgggccagatggtggaggggagggtggggacacctgccggcaagcagagtgtcacagctggctttcctcacttgggaaaagggtactgccggtctagcagcctcctctgtactcagccaggacacccagcgcgtgggacctgtttgtgtctgttttgcttccttgggaacggcacagtcactcaccctgccatttgcggaaatgacctggtgcactttgactgttaagcaatgcgttattgctgtagtcaaggttagtgcaagcaaggaaacattcccagtaaggtatttgtttccattttctgtctgtgcttctgtcagaaacttgctaggactttagtggccaataaaaaagaaattcctaatttcaaccttatccaaggattgtgggtttttacttatttgtttgtctcaccagttgagaaactccagtactggtcacctatcctgataaatctgcctttcagaaaacctgcaagggctgtttttcactattatggcaagagacatgtattaaatggaacaggaaaggtaagttactcaaaactgcctttgggagtcagcagaaactgaaatggcatctagaccttcactgtaactgtcttcatttcaaattaataggaagtggcgtttgaactgagattctaaaacgttct

SEQ ID NO: 256575 - DNA, 620 bp, Homo Sapiens
  misc_feature (66)..(103): n is a, c, g, or t
  misc_feature (225)..(271): n is a, c, g, or t
accagcttaaaaatgcatatcaaaatgtaaaatgcctaaatcagcattgtgggaatcatttaagtnnnnnnnnnnnnnnnnnnnnnnnnnnnnnnnnnnnnnngtttggaagaaaggccttttgctcacctgcaatttctaattttccaataacacaataattatactagttcatatttattgaagttattatgtagaagacgctgtattgagaagcgtaggtgnnnnnnnnnnnnnnnnnnnnnnnnnnnnnnnnnnnnnnnnnnnnnnntttactcaccaaaaatgtggggcttaaagagattgagcaacttgctatagatcacagatctgtttttaaaaatcagctgcatacatgggggaaagaacaccaaacaattctaagaatatgctccaaatgatacaaaattatatacctgtaaaagagcttattgcagtcttaggttgcattaattgaagaagatggtccaggaaaaaggaggtaatgaccttgcccaaatccttggacctcagaattcctccaggggtctgttttcagtatgatgaacacagtttacgtggaatatggataaaccagggggaacgtggccaagacgaccctcgtgccgaatcctgcagcc

SEQ ID NO: 256576 - DNA, 506 bp, Homo Sapiens
ctttgagcctggcctcttatgtcaggatcaattctcacaagtagttcccgaccttcatgcattctgaaaagaaagggcaccccacctgttgttatatgtgtccagattaaattattcccaaggagtgtgaaaccactgttacaaatgcaagctggagataatatggaactttttaaagaaggcaatagaaagcataacataacatataaaattattagcacattgcatgaattatggtaaatgttaatatactcaaaagatattggctactgcctttattttaaatatagcttttcaaacatataatgtttgcatttttgtcattattcttcaaaacagcatttctggggggttattattcttcaaaataatctggtggggtgaccttccttcccaaaatgtctctgtaatattccactacatatgcaatgggtacatatacaatgaaaagagtagaaaacaaaaatgtttatcctaataataagcacataaagagaatttaatgt

SEQ ID NO: 256577 - DNA, 742 bp, Homo Sapiens
  misc_feature (496)..(591): n is a, c, g, or t
caccatcttcccacagaagtacggactgctccccctcacatgcgtcctacctgtgaactctgggaagcaggaaggcccaagacctggtgctggatactatgtgtctgtccactgacgactgtcaaggcctcatttgcagaggccaccggagctagggcactagcctgacttttaaggcagtgtgtctttctgagcactgtagaccaagcccttggagctgctggtttagccttgcacctggggaaaggatgtatttatttgtattttcatatatcagccaaaagctgaatggaaaagttaagaacattcctaggtggccttattctaataagtttcttctgtctgttttgtttttcaattgaaaagtaattaaataacagatttagaatctagtgagagcctcctctctggtgggtggtggcatttaaggttcaaaccagccagaagtgctggtgctgtttaaaaagtctcaggtggctgcgtgtggtggctcatnnnnnnnnnnnnnnnnnnnnnnnnnnnnnnnnnnnnnnnnnnnnnnnnnnnnnnnnnnnnnnnnnnnnnnnnnnnnnnnnnnnnnnnnnnnnnnnnataaaaattaataaataaaaagtctcaggtgaccaaggctcctgaagctagaaccaggtttggataaagattgaagagccacaggccactcttccctctgagcccgacgcgtgggtcgacgatatcccgaaattccggaccgtaccagcct

SEQ ID NO: 256578 - DNA, 611 bp, Homo Sapiens
  misc_feature (450)..(450): n is a, c, g, or t
  misc_feature (466)..(466): n is a, c, g, or t
ccagaacctgtgcattaagagaaagcaatgttgcccttttgaatgagaaaattttttctgtcaatcgcaggttatttgattaagataggttctttctgtatatgaaacgctccccgcaaattcactggcagctcagaattaatctggaaagaaagcctgccaggaaataaattcaaatacagtatgagctgcggggatatttttgtgtctacaccaggtttgaaataagtaaacaaatacaagaggttcatataaaagggcaaatgaaaacctttcctacagttcctatgaacaacgtaccaacactttctgatttcttctacagctgtagaataccatctttcagaaagttggctggctttatttctaactccttattgaagctaaggggtgcttactaaaaggaggcagccatataggccttttaaaggcctggttctaagtcctttntaaagccatggaacanaacctgatacatcaccctaacagagcattaagttgtaactgagattgcaatacctgtcaccatgcagccgctgatagttctctgaactaaaaggactaattgtactttgaggccaatgctgctttctgggtatattctccataca

SEQ ID NO: 256579 - DNA, 942 bp, Homo Sapiens
ctggaattaagggatggggagaaggttctggatctctgtgctgctcctggagggaaattaatagctctgctgcagtgtgcttgtccaggttatcttcattgtaatgaatatgatagtctgagattgaggtggctaaggcagacgttggaatctttcatcccacagcctttgataaatgtaattaaagtgtctgaattggatggcagaaaaatgggagatgcccagcctgaaatgtttgacaaggtgttagtggatgctccgtgttcaaatgatcgaagctggttgttttcttctgactctcagaaggcatcctgtaggataagtcaaaggaggaatttgcctcttctacagatagagctgttaaggtctgcaattaaggccttacgtcctggagggatacttgtatactctacatgcacgctttccaaggcagaaaatcaagatgtgatcagtgaaattttaaactcccacggtaacatcatgcctatggacattaaaggaatagcaaggacttgctcccacgacttcacatttgctcccactggccaggaatgtgggctcttagtgattccagataagggcaaagcctggggcccaatgtatgtagccaaattgaagaaatcatggagcacaggaaaatggtgacatgaatttgtaaactgtgtttatgtgttattatatttatatttctgaactcagtacatgttaatatttaaataattatgcagtaactttctctgggtctgtttggaatcctatttagttaatactttagcatcttagaatctaggcttgagaattgttcaggtgtatttttttcctagaaatatatctgtaacaatgatttaaggtggtgcagatggtgtttgttctatattataaatctgctgtctttgcttggcattttatagttaaattaattagaatatgtggttttatgca

SEQ ID NO: 256580 - DNA, 788 bp, Homo Sapiens
ggaatgtgatgtattttaatggcaattcagatgcctctacaataaaagagaatcagtttgacccacctattgtggctagatatattaggatctctccaactcgagcctataacagacctacccttcgattggaactgcaaggttgtgaggtaaatggatgttccacacccctgggtatggaaaatggaaagatagaaaacaagcaaatcacagcttcttcgtttaagaaatcttggtggggagattactgggaacccttccgtgcccgtctgaatgcccagggacgtgtgaatgcctggcaagccaaggcaaacaacaataagcagtggctagaaattgatctactcaagatcaagaagataacggcaattataacacagggctgcaagtctctgtcctctgaaatgtatgtaaagagctataccatccactacagtgagcagggagtggaatggaaaccatacaggctgaaatcctccatggtggacaagatttttgaaggaaatactaataccaaaggacatgtgaagaactttttcaaccccccaatcatttccaggtttatccgtgtcattcctaaaacatggaatcaaagtattgcacttcgcctggaactctttggctgtgatatttactagaattgaacattcaaaaacccctggaagagactctttaagacctcaaaccatttagaatgggcaatgtattttacgctgtgttaaatgttaacagttttccactatttctctttcttttctattagtgaataaaattttatacaaggagta

SEQ ID NO: 256581 - DNA, 724 bp, Homo Sapiens
cccgcctcaactgtaatggaaggtatagctctttaacaaaacatttcaagggaacaaaaaacttgcaacccctgtgttaaaaatggccgttaaccttcttgaaccttgaagtaaaatcaatttcctagcccactgccttaattgttgtttgccttggcttgcccaggcattcacacgtcccctgggcattcagacgggcacggaagggttcccagtaatctccccaccaagatttcttaaacgaagaagctgtgatttgcttgttttctatctttccattttccatacccaggggtgtggaacatccatttacctcacaaccttgcagttccaatcgaagggtaggtctgttataggctcgagttggagagatcctaatatatctagccacaataggtgggtcaaactgattctcttttattgtagaggcatctgaattgccattaaaatacatcacattccttgtgctgttccctttgaagatctgccagttgatctggttggaactgtaagctacatagaactctgtggtatagcaggacttcaggtagtgtttggcaccttgggtctggatccctgtgattatgacttccttttgcatgtccacctggatccaaggtttagaggcaaattctgctgcaagtttttctacactccaagcattataagatccaccattgtttaatcttgctaatctgggctcccagtaacccagctgtgccga

SEQ ID NO: 256582 - DNA, 777 bp, Homo Sapiens
  misc_feature (117)..(117): n is a, c, g, or t
ccatcccaccaagaccctccccgaaagaatgaagcaaaccaaacttcactatctcctcaatgcctcaataaatagttaccctcccaaataaaaaaaataatttatttcttaataaanagctataaggcctaaagccccattttaccatattcacccctagaccacccctcaaaatttccatctttttttatttgaaaataaagcaaacagaattgggattggctaacttataaataaaaacaaacatgatacaaggttttttgttcatttgtccttagtttttaaaaacaaaagtgttaactagaatctaacaacagatcaaatccaaacacagcagtccagtggagaatcaaaacttttccggctttattctctgggaaaacccctgggctgttttcattcctattggtccaggccaccattctatgatatgaaggcctaaattagggaaagctagggtgagctgtgcaaattcagggtgtctgagccacctgttgtttggtgtgtgatgggggtggaggcgcacacagtggtgttctcgctagtgttcaaatcacagaaacagggaacgtaactagggtgaggtgagcaaagcactcaccttgggcacaaaatttaaggagtgccaaaaaacccagtaaccaagataaatactattttaatgcaacatttttaaaaaatcacaattaatgtaaaaagtctatgatggacaatgtatcaaaaatttaaataagaaggattcatccccatacttattcaattcagcctcactttccc

SEQ ID NO: 256583 - DNA, 820 bp, Homo Sapiens
  misc_feature (193)..(202): n is a, c, g, or t
cacgagggaatacattacaaaacaaggtttcacgatccgcaacacccgggtgcatcacatgagtgagcgggccaatgaaaacacagtggagcacaactggactttctgtaggctagcccggaagacagacgactgatctccgaccctgccacaggttcctggaaagactctccaggaaatggaagatactgannnnnnnnnnaaatcacagtgtgagataatttttttcctttaaatagttgtatttatttgaaggcagtgaggaccagaaggaagttttgtgctttggcagactcctccatgttttgttcccttccccctgagtatgcatgtgcctgttcagagtctccagataccttttttataaaaagaagtctgaaaatcattatggtatataatctacccttaacagagcttttcttattacagtgctaaaatgatttctgataaaatggtccctaactcaactagaaggctaaaaatacaagaatgaaagaataagcagagtactcatgatgcctttgagaaaaatcaaaacatcatgtagggtgacctagtttccaaaccaataaataagtagtattgtaatattaaaggaaaactgttccaatcatttaaaagtacttattaagtactgctttttacagttatgacaactgtttctttctatgcatataaatcaaggaaccaaatatctgtagccatggaaatgtctgactagaaatatttatattgaattctgaatacaaaatgtccctgtggtagaaaacttactctttatgcctggtgcagtataattcccaagtgtactgtctaccag

SEQ ID NO: 256584 - DNA, 669 bp, Homo Sapiens
  misc_feature (565)..(565): n is a, c, g, or t
cttctctgaagacttgcagcaaggcttgctgaggctcacagaagatagccccagtgttttggagtggttttgaatgtgattctgagatcagactgactgagctggaatcctggctttatatcttaccagctacacaaccttggagtcttagaaattttttcttttcaataagcagtcatccttactttccctcaagatgacaaacagttcgttcttctgcccagtttataaagatctggagccattcacgtattttttttatttagttttccttgttggaattattggaagttgttttgcaacctgggcttttatacagaagaatacgaatcacaggtgtgtgagcatctacttaattaatttgcttacagccgatttcctgcttactctggcattaccagtgaaaattgttgttgacttgggtgtggcaccttggaagctgaagatattccactgccaagtaacagcctgcctcatctatatcaatatgtatttatcaattatcttcttagcatttgtcagcattgaccgctgtcttcagctgacacacagctgcaagatctanccgaatacaagaacccggatatgccaaatgatatcaaccgtgtgtggctaatggtccttctaatatggtgccaaatatgatgattcccatcaaagacatcaagg

SEQ ID NO: 256585 - DNA, 517 bp, Homo Sapiens
aaaactgattcacacagtaaagacagttgccaaagtaatctgcaatgaggaaatcaatgaaggatctggggttgtacgtcatgtcttggtttagactacactttagaggggatatgacggtaggaaaacctggttggatgtattacagagacatacacatataaatgagtaagacccgagaccagaatgagggtaatggagatggaaacaaaaatcaaacagaaagagcttttaagtgaaaaattagatcttataaaaggaccatgtaattttaaatgactctaaagaattgtattccagacacctgaatgattgatgggattaatacacgagatgggtattgggatatggcttatgacagaagatgatgcatttaattttagaaccatagagacaaggtaacaagatttaaatcaggaagaatttaattgtaaaatcttatagaaaaatatggaagaagtcagctacacagagacagcagttgaaaatgaatcattcggctgggcatggtggctca

SEQ ID NO: 256586 - DNA, 974 bp, Homo Sapiens
  misc_feature (196)..(196): n is a, c, g, or t
  misc_feature (417)..(454): n is a, c, g, or t
aaggagggaactgttcatcagtctttgtgcccctggaatggtgcctgtgtgtttcatgtggacattgttcacggctggcactttggcaaccttggtctttcctatgagtttgtctagaggagtgtgtgagtgggaaaaactgccgtgggagttgacaggcagttcattggactggtgaatgaatggcccaagaganagagtagaatcactgctgttcaccatcacactcatcctcttgatggattcagcagggctcccggtgggggggcccctccctgactggtcatgccggacgttcaccgcatttgctttattcgtcacacagttgaggccgatgctatgggaagatgttaccgttgaggggtagggaggcccagagtgagccacacagtttttcctaaaagactccatggaatnnnnnnnnnnnnnnnnnnnnnnnnnnnnnnnnnnnnnntgaaccaacagtggggaactgtttttgcgtttctttcctgagccgccactggtactgctactggcattttgacagttagtgctgttaccagaagactccttgggcctcaaagatttgctggatttcaatttctgaggtttcctggacatgggggaggaaggaaccgaggaaaggccagagggcgtggaaggggatgaggatgaagaggacacttgtctggactgcatactgcacacaggatccatcgcccctgaagcagcaggctgtgcatttagtgtggttccatgagctggtaccgatttgctatttggggagatgcaggtagatgagagcaggactggggatgtagagacggtggctgctgccagatagctgactccacattgtgatgtcggcacagagtttgtccggtgaggaatacgtgtggagatgggtgaggtggtactgggcactggtgggattttcctgaaaaaaattagaggacagtgaatgacactgaccacagccattcacagagact

SEQ ID NO: 256587 - DNA, 519 bp, Homo Sapiens
  misc_feature (33)..(33): n is a, c, g, or t
gtgagaaataaagcaaattcggtgaacgtcggncatgaccagtcagggaggggcccccccaccgggagccctgctgaatccatcaagaggatgagtgtgatggtgaacagcagtgattctactctttctcttgggccattcattcaccagtccaatgaactgcctgtcaactcccacggcagtttttcccactcacacactcctctagacaaactcataggaaagaaaagaaagtgctcacccagctcgagcagcatcaacaacagcagcagcaaacccacaaaggttgccaaagtgccagccatgaacaatgtccacatgaaacacacaggcaccatcccaggggcacaaggactgatgaacagttccctccttcatcaggtaggaaatggactgtgagccccatgggaatgcccatttcttctcccttaagatcttttgtcagctcagaaatgtgtttggttgggttggttggttggtttgtaaacagatattcagcttcatggtgtcttcttaaaa

SEQ ID NO: 256588 - DNA, 525 bp, Homo Sapiens
cttttgggatcaaaccaggaatatgaatctgtaattattaagctcattgccaacccacaagatatgtttctgaaaacctgtagtttcttaatttaagtccatccccttcattaactctacagttgtgactcacactgatcccaaacttttaagtgctaaatattaacatttagcattaactgtcttgtcaagcgaaaggccttctctacaacctagtccatctcacttctggtgctacctgagttggacagaattctagctcatggttgctaggaaagctaggcctctgatcatagaagcagatagcttcagtcccagtctaggcctagataaatgactcttattaccacaacccttattattttccaatttcctttctcacatactgtacacaggtagtattttcaatgtgaatccaaagcttgtctggttctctgaaaataattttttcccctttaggttctttacattgtgataatgctgtatttaaagagaatatttaaatgtaatattaaagaaatattc

SEQ ID NO: 256589 - DNA, 633 bp, Homo Sapiens
gtggatcccccgggctgcaggattcggcacgaggaatagagctgctcaaaatctttgtggtagtttccttagtttttgtaacctgaggcatatgttccagagaacagggatatttgtctggtccagtgaccttggtgatcatagtcataattgaaagatgcctatggcatgcttaaatcagcattgtcaactgatttgttgttgtattattttcacttcttggatctatgtagtagttgtaataacaaatatttaaatagctatttttttgatgccattaaaaaaatcatactctggccttttttcccccttactgttgtttcccagatcttttaaaaattcatcccatatccagaaagtaccagttataaagattgctgaccaagcaaagttttgcatcaaagtgtcacctcattgctctgaccaaagactgactgttgtggttttaactcctctctgtaaagcattttgcattttccccaagctcctttctgaaagaagacccagtgcagagcggcctttactttcaatttctactgctgaatagactacttagagaaaatgtgagtttcagtgtgaacagaatggattaggatgacgagtttgatgggcattttcagtactgtatctaag

SEQ ID NO: 256590 - DNA, 746 bp, Homo Sapiens
taaagccagtcttcactagccacgaatggctacccaaaggaaacacttggtgaaagattttaatccttacattacctgctatatctgtaaagggtatctgatcaagccaacaacagtgacggaatgcctccatacatctgcagaatcctactggatgtccacttggatgtcctgaagccacctgaaactcagcatatctacgaatgatcaaatgggatgccagcactcagttatccaagcaagaaatatgctccatgcttgactctttaccctcactaacaaaactgggcaaagtcctgctggtctctctctttaatacttctcaaatctgtccctttagtttcatccctctgttactgttctcattcagattcttattacatctcaccaaagccactgcagcacattcttaactgtgtccaagtggtaataattaaaaacagcttactgtctttatcattatcactcttaacccaccctaaaatttcctaaaggtatcccgttgacctcaggatacattaaagctacttagtggtgactggtttctgcctaccacttcctcccctaccacctaacactcacacatacaaatacttggttcaactgtttgctctccttgaaatgaatgcctcctctgtgcccagctagcagttacccatcctttaaaactcatcccctctaagatgtgccctaccacctgcagatttgggttaagtgtctcaataaaatcttaaatgaataaatgc

SEQ ID NO: 256591 - DNA, 1209 bp, Homo Sapiens
ataacacacatcacactgtttaagagtgggggaaagaatagtcatactgttagagcacaatgtttcctgaaaagaaactgatcaaaacgtttgaagcctttttagttgcctcaaagtgtgacagccactcaatactgctcctaacagtctgctttcagataacgtcataaaataaaataactgtgtgaaaagccatggccttcaaaaaactttatttggttatgagccaagctctgataggaaaagcccacctacgaaaaaaaggtgtgggtatttaagctggtctgattcacagagcttgtacattcatgactcaaaataacacaccctcaaacccaaatgattctaaagccatttcaaccttaaatcatgttattcccttagatgtgcttacattagctttaaaaaatgatctacgtgcagagaggagctgcgccttcctcacaattaattgaaacatgaccaaaaaacgggggataggcaaaaaagtgacatttaaatagcgtatgagggtctctcctcctttactcaatgaacacatatccagaatgagattgaaatggaatcaatgcccaggagcctctcaaagagagcatctccctgtagccaacatgatctggatcctcctaacacaaagcaacccaactactccagctacacaaagccagtaggcctacatatgaaacgcaaaggggttgcatcccccatggtttaaacctaacccatgttagctgcaactccactacagtcttgatcacttagctcaggaaacaaacacccagcaacaaccctcgtatctcattaataccaatctgtggccctcactgactcagtggtacttttttataaaaatatctgaagaagtggcaaacggttacaacggatgtcaggtcgaagcaattccaaaagctgagaaaacgcttcatccgctgcttgtcttctccccctattgctacagttctgccaccaaagggggaaaattacgtgaatatgattgttgtgaccaagccttggcaaaagtcaataaataacagaacctgtcaagggcagagcaattttatgggcaacctcttctagttgcaaatgtgggggttgggaaaagtgggagagaggcatgtgtgcaagaaagagataagggtccttttgggaagggtttggtgacccagccccagctcaatgccagcagactaggacccgctaaaacccatt

SEQ ID NO: 256592 - DNA, 1096 bp, Homo Sapiens
  misc_feature (45)..(45): n is a, c, g, or t
gcctgtattcaattcccccgtttgggcacaaaccttttgttgccnccattgtgcatatagacatttagtgaatgtgaccgaggtcattattcgtgtttcaggcaagaatgtcttgaaaacacggacaagcttcgcaggtcaatagggtctcgtaggtaaaatgcctggactgctgcagccaccaatctggggcgctgctttagcactgccacaatgcccagctggaaggaagcagtgtgctcgatgaagtgaggcctgaattttttctgggtaccctctgatgcgcctattcacagcagctcgtatagattctgaagcaagtattttttctgaatgtgctgtgattatattcaatgcttgtggaattgtggggggtgtggtgggtaaccaagattctgctccagattttcttggtgcagggataatacacaattccccatggcagaaaaataccctattggtgctattttcaggatccagccatttagggagaaagtcagcagcttctattaacaagaattcaccatcattgtcttcaatccttgctactaactctggaaattcctttgtgatctgctttattacataaacaataaaccattcatcctcaatgttatccccaaactttgtcacgccaaacatatgagcaggaacacctcctttcccaggtttatatttaagattgaaaggctgattctgccagatgtaggggaccagcataggtgcaaaccgagtgattattctctcaatgtacttctgaagaatctctttatgtttatctgagtcccttgactcatctggtatcaggaacaggcagtactccactgtgtcttccatcgtagcaagcttcatggtttcttccattcttctttgaaaaggttctagggcctctccttcgcgtctctgctgtggcacctttccttagccgcctctccgactgcgagagctgatcgagagctgccaccggccgccgaagcctggatcaggctctgtcccgacgcctgaccggaacctgaagccagcggaaatcctgagagaaagtctgaaacccactcgcacgcgtgggtcgacgatatcccggaattccggccagtac

SEQ ID NO: 256593 - DNA, 837 bp, Homo Sapiens
ccaccctctgccacccagtcctcccagctgccatgtttcaaagacgacctttacctcctgcctttggattgactctgcatttgaccacggactccagtctgtgtgtagggagagagctgagtaggaggcctccactccggatcgaggcctgtatagggctcgtttccccacacatgcctatttctgaagaggcttctgtcttatttgaaggccagcccacacccagctactttaacaccaggtttatggaaaatgtcaggccttccccacaactcccgtctaactgctgtcgcccccctacttgctggctctcagaagcctaagggagtccctggggtcctgaattctttccccaaagacgaccagcatttaaccaacctaagggcccaaaggccttggacaactgcatggagctgcactctaggagaaggaggggaaccagatgttagatcaggggagggagcaggagtgtccctcccgtcagtgcctacccacctgtgaggcagccttctgatggcctggcccaccttccccagaaccaggggaggcctgaggcttcagttttactctgctgcaaaatgaaggcgggcctgcaagccgactacacctacggaggctgttgaggacaatttcattccattaaattaaaaaatactgactggctggcaggcaggtgccatgtctgggaacagggacgggggagcttcacctttttgtcttggcttttctttgggctgtgggggggcatccatttccagggtcggggaggaaataccaaatgcattgttgttctgctcaatacatctcacttgtttctaataaagaaagcagctgaac

SEQ ID NO: 256594 - DNA, 656 bp, Homo Sapiens
ccagacgagctgtaaaacatgaacggaagagtggattatttggtcactgaggaagagatcaatcttaccagagggccctcaggtatgtgcggaaagggtcatatctgacagtaggggattagagggtgtaattgcagacacctctgctgctgagccggattcacctggcctcggggcgggcaggccacaacctagaggtttcgtgcaacgcttcggggtgcttagagaaaatatattgaaatccatcattagccagatacgggtctgaggaatccacctcaaaatccagttggatgaacacaaatatatatagtcaagaaggggttcttttgtgcaaaatcgtgcttagaaaagccttttttaaaagcctgctttttttagcctgctttattcgtggataccacatccttcttttccggttgcctgttctatccctccccctatgagggaccgtttagtaaaatgggagcataaacggtgtggactctgaatgcatagccgttttcctgcagctaggatccctccctcgctcctttgatttctgggaacttcatttacaatgtcaactagaatgttaaagcaggaagagcccttagaaatcttttattacacaggttcccaaacttggttccgccacaaaattacccagggcttta

SEQ ID NO: 256595 - DNA, 1078 bp, Homo Sapiens
  misc_feature (140)..(148): n is a, c, g, or t
agaaatgaaataagaaaaattgatgcaaggactccttcaagttaagatttgtgatacaaatattttcatcttttaacagggcaagctgatgtgttcacatctcagtttcaagctgcctctttcactaggaacatcagtannnnnnnnnaaaagcacatttacaatgctttcccatcacccttgctgtgtttttgtagcacctatagccataactggcacctgggggcctgcgttgctggcagtttcccttacatttctttggagtcttttcaactgctgtggttttacttagaagtcagtgctttgcatatttgatttcctgagactgtttgaatagtctttctcagaaaactgtgccagtctggctgtgaacagctcttctccgaggggagctggacagtagcctgctcgtgttggtatgcttggacttgggttcccagccatgccctgctatcttctctccctaatccctcttatcctgtccctgccctagtgacatcactgcccacatcttgccatccctttaaagaagagaacaacatttgaaccagtcccagttagaaaaagattaaaatcctgctcagggaatctatgcaaagcctccataaaaacaattcctatttgttgtttcagcagctgatgcagaaatgattttaaacaataaaacccgaccggataattcaaacttctgtaaggtaataatctgttgtgaagacagaagtccctacttaagatgataggtatgaaatttgggaacaaaggtaaccttaagtttcttgatttgagtgtgtattttaaagatcatcatcatcttgacagtgcagttttgagataatgaaaacaaaaatgagttttaataagctttaaatggcatggtattttgaggtgctaaggtaaagagaaacattgttttatgaagtggctcatgtgggtatatatatgttggtgtgctgtgctgctagctattccatggtcttcatcagtataccacattgcctggaaatccactccaacatcgaccagggctttggagatctgagctgactgctgaaagtgaacgttatcatctgctgttcca

SEQ ID NO: 256596 - DNA, 474 bp, Homo Sapiens
gtggccagtctgtgagctatagttcccaacacctggtctagactcttctgcccttgctctgcagcttctttcctgttgattgggcattcagggaaggagtttaaaaagtgacactcatggctcatgacaaatgagatactttgggagtgtggaaacatggcttgatatttgccttcagatatttttgcttatataagttctaaatggaagtgataagttcattcttagggtccaagttgaaaggcagtggttcttttgtgaacaccactaactacattcgaaaagcctctccaattccacattccaagtctataacagctttggaaatgagtaacaatgacctctcatgtagtagattaaagcagaggcctttgccatatgattgttttttggcttaaatgtttgcttgccctgtaactgtaatactttggttaccagaatcacttgaaaacaaatacaataaaaaaatttctc

SEQ ID NO: 256597 - DNA, 1049 bp, Homo Sapiens
taggtagcgaggcctgggtggcgaattcggcacgaggagcacgtcctccacggtcaccgtcacggccccggcccccgccgccacaggaagcccagtgaaaaagcagaggccgcttttaccgaaggagactgccccggccgtgcagcgggtcgtgtggaactcatcaactgtccagcagaaggagatcacacagagcccatccacgtccaccatcaccctggtgaccagcacacagtcatcgcccctggtcaccagctcggggtccatgagcacccttgtgtcctcagtcaacgctgacctgcccatcgccactgcctcagctgatgtcgccgctgatattgccaagtacactagcaaaatgatggatgcaataaaaggaacaatgacagaaatatacaacgatctttctaaaaacactactggaagcacaatagctgagattcgcaggctgaggatcgagatagagaagctccagtggctgcaccagcaagagctctccgaaatgaaacacaacttagagctgaccatggcggagatgcggcagagcctggagcaggagcgggaccggctcatcgccgaggtgaagaagcagctggagttggagaagcagcaggcggtggatgagaccaagaagaagcagtggtgcgccaactgcaagaaggaggccatcttttactgctgttggaacaccagctactgtgactacccctgccagcaagcccactggcctgagcacatgaagtcctgcacccagtcagctactgctcctcagcaggaagcggatggctgaggtgaacacagaaacactaaataagtcctcccaggggagctcctcgagcacacaatcagcaccttcagaaacggccagcgcctccaaagaaaaggagacgtcagctgagaaaagcaaggagagtggctcgacccttggacctttctggctccagagagacgccctcctccattctcttaggctcccacaaaggctctgttaagcaaaaagtggtgacaagcaaactggcctatgcccccaaccaccacagacccacagc

SEQ ID NO: 256598 - DNA, 898 bp, Homo Sapiens
  misc_feature (536)..(554): n is a, c, g, or t
  misc_feature (873)..(873): n is a, c, g, or t
gagttcctccaaggtcatatatggtcagtaatgaagcaaaaattcatggtatgtgacttaaagactttctaagacattgtacccatgggatgtttccaagcttcttgatctttaatcttttagcaaccttctgatactggatttaccttcctaggtgtggtgccctccttctggaatttagatctctggggcaaaccctgtcaggatgtgcctctgtgtagttaacactgccccagacagcagctctgatttcagtcacagttctgctgagaagcctgtctgcccctggcaggggtgaggggagggttgttggtggcagatgtagtcagaggcagaggagaccaatggcagacagggtggacctgcaggaaggtagccagaaggaaagaccttgggttttacccaaggtcaaggtggctgtgatagaagagcgaaaggcaaaagtaactaactgaatttcagaattcagaagtaaaagagaaaggaggaggatccctggaccagggactttcacaggaaccaaacatgattcatgnnnnnnnnnnnnnnnnnnngcaagcttatctgactgatcaagaagacattcttcagaatatactggcaactaaataattttcacaccaaaaatacagacactaaatgagtgtttccttactgggattaatcacattttgataattcattagctctgtatcttctaggttgcttaattcatttagcaaatccacagcttaggtaccacctcgaggggagggagggtgggggtgttgaatgaagcaattcaacttagaatcaaattttgtaaacaagagttagtagcacagtggcacagtagattgtcaaggaaaacaacaggagtgggcacagagtcantcggccttgcctgtgcggtcttgcc

SEQ ID NO: 256599 - DNA, 363 bp, Homo Sapiens
ggcagatagggtttaatgttgttgacttttcaaattagaattttttttctatgaaacttaggcttttatataacaaagtatgttatctcattgttaccgccgtttttcactactagccttttcagtatgcccttaaaatgtattggaaaggttccatgttaaatgacaaatatctttttcagtatgaatttttgatctgtagccacaataagattttcatttttcagtgctcaggctctgtagcatgtatgctgaatgcttttttccttagcacctttaacagtaaggtgttactgcattttacggatcaggcctgtgaacatgggcacagtgaggttaaataattcacgtggccacaacctg

SEQ ID NO: 256600 - DNA, 594 bp, Homo Sapiens
  misc_feature (568)..(568): n is a, c, g, or t
  misc_feature (573)..(573): n is a, c, g, or t
ttaagccagagtcagtggtttgtgttctcattaaaatgtttgtttaaatcctatgtccaattcaagcctatctaactacatttggtaggattaacatttcatataacaaatggggcttaattaaaaactttaacttggaataaaggaacagggatcactttatcttctgccttcatttaccttagtccaagattcttgcaaaacaggcaactgaacaaacattaggtttatgtaggtaaaatgtgaaagcatttctcctccactttttaaaatttaatttacccagtacagcggggcaccagattacttgatctttgtattttgcagttttgagcctttgtgtcaatcccaagcacagagaggatctgccaaggaaaaacatttgcatcttcggagtagacattttgcagtttgtttaataacaacttctaaagtaagttgaattcatccattgtcactggattcaccagtgggatgttggcattgtggggatttgcctgagtactgttgtcattctgcttagccggggacgggtcagtttcttgggccgggggcattgccatgtgcngtgtngcaaggtctttaggaaggaga

SEQ ID NO: 256601 - DNA, 651 bp, Homo Sapiens
  misc_feature (508)..(508): n is a, c, g, or t
  misc_feature (634)..(634): n is a, c, g, or t
ggctgcaggattcggcacgagtacgaattgtaatataaattcgtattattgccaccacgtaggacacagaacagctccatcgccctgtacatgtcctgttgctgcctttgtgtagtcactggagatgtgggttttatttttattattttctccatttgatagatagtgccgacttgattcacttcatccattccagggccaatttttcactgttgattgtcaggggctctgctctgctgtttctccagccctctccagtgaaagagatgtaactgcagtgccatagttgtcagcttgttagttattggcaagtcttggttggattttctattcttcattgtgggctgtccttgcctgtacacctagcatgctctggaaccctttgtggatttatgagaattcaagctaattccaacagtggccaaagaaaaaaatagccagggaaatatgttattgctaaccatataggcctcagagtgaaaacgggcttttggagtattctgctttngaattatttattttaagtctttctccagatgtccaggacagatttttaagatttgggcataatgtttaaaatggaagatgggtatgtcctgtaagattttaatgaccccaccttggtcccccccangctgtcctcacctgccc

SEQ ID NO: 256602 - DNA, 585 bp, Homo Sapiens
gtaccaccaaatgtcaaagaatcccgaaaatacaggcagacagccagtcatggagcaggaacagcagtgcaattgtaagagatcatcagcatacacacaaatagccccaagcacaaagccaatccacttaggggaacaataatagtaataagaataaagacagtaatattaaaaatgacaagagtagaatcttggcacatgctgtgttcttcatcctttgtcacaggtgaaatgcacatctgaacagagacaggcatgggaaggaggcccaaaagcgacatggcaaaccaccgggcaggggactcgctctttgttgcttcccaaacacttagacgccagcagcatgggttggtgtgctgggctggttaaggccgatggtggagcagagccaacctgcaaaatccacttcctcagcatcagatctcttgataaaagcatgaaccatgagttgcttcaaatctgctctctctgcggggttttttattaagcatttattcacaaaatcttgaaattccagactgaacactccactgggcagttttggaggaggctcgttgactatgtaatccaacaactcaaaaattg

SEQ ID NO: 256603 - DNA, 1562 bp, Homo Sapiens
  misc_feature (1129)..(1137): n is a, c, g, or t
  misc_feature (1519)..(1519): n is a, c, g, or t
  misc_feature (1528)..(1528): n is a, c, g, or t
  misc_feature (1545)..(1545): n is a, c, g, or t
ctcctccaaaactgcccagtggagtgttcagtctggaatttcaagattttgtgaataaatgcttaataaaaaaccccgcagagagagcagatttgaagcaactcatggttcatgcttttatcaagagatctgatgctgaggaagtggattttgcaggttggctctgctccaccatcggccttaaccagcccagcacaccaacccatgctgctggcgtctaagtgtttgggaagcaacaaagagcgagtcccctgcccggtggtttgccatgtcgcttttgggcctccttcccatgcctgtctctgttcagatgtgcatttcacctgtgacaaaggatgaagaacacagcatgtgccaagattctactcttgtcatttttaatattactgtctttattcttattactattattgttcccctaagtggattggctttgtgcttggggctatttgtgtgtatgctgatgatcaaaacctgtgccaggctgaattacagtgaaattttggtgaatgtgggtagtcattcttaaaattgcactgctgttcctgctccatgactggctgtctgcctgtattttcgggattctttgacatttggtggtactttattcttgctgggcatactttctctctaggagggagccttgtgagatccttcacaggcagtgcatgtgaagcatgctttgctgctatgaaaatgagcatcagagagtgtacatcatgttattttattattattatttgcttttcatgtagaactcagcagttgacatccaaatctagccagagcccttcactgccatgatagctggggcttcaccagtctgtctactgtggtgatctgtagacttctggttgtatttctatatttattttcagtatactgtgtgggatacttagtggtatgtctctttaagttttgattaatgtttcttaaatggaattattttgaatgtcacaaattgatcaagatattaaaatgtcggatttatctttccccatatccaagtaccaatgctgttgtaaacaacgtgtatagtgcctaaaattgtatgaaaatccttttaaccattttaacctagatgtttaacaaatctaatctcttattctaataaatatactatgaaatnnnnnnnnnggatgaaagctacttttgcttttgtggtaagcttttcagtttctttagtacacaagaaatactggtttagccaagcaacactggtgagggggaaaggtgaagatgaggaggaggctggaaggcagaaacaggacaccgagttcagtgctttggactaatggggcttcctgtaatttcaatctctggactcagtccagcctcttctcacccaacacccttatctgtgactcttccaaccaccttccttgtggggacctgtgaatagatccctgtatattcctttgatctcttttatacaaggggaaaagcagctgatgggggggacttggggagccaaatctgaggaaaaattgaccaaaacattttctttatcctcacaggncattttctncatttttcccattattnccaattaggttgagcct

SEQ ID NO: 256604 - DNA, 414 bp, Homo Sapiens
tttaagtaaaaatttcagcaagaataatcttaaaatctctctaaggaacctacaattagttcttgttttcttttctgtttggagaccttcctgccacctttaaaattgtatttgttattttttaaattggtaaggaatcaaaaatcttgtcttcaaaaaactttgtatcatttataaattctgtgatagtaaatatatgtaaataattacagtacatagcataagcatcaacaactatttaaactgcttgatattgccttcagttgcactaaaaaatgtccttttgacaaatttcactttttagaagtctagtagtaataggtcacattaacaaggttgccaaacaattgcttcctttcgaggcaaacatcatttagaaaatacatgttcagggccacacatggtggctcacac

SEQ ID NO: 256605 - DNA, 853 bp, Homo Sapiens
ggcagttggaacagctgtatcagtgggcacaggtaaaaccaaatagtaaccaagttaatcttgcctcctgctgtgtgatgccaccagatttgactgcatttgctaaacaatttgacatacagctgttgactcacaatgatccaaaagaactgctttctgaagcaagtttccaagaagctcttcaggaaagcattcctgacattcaagcgcacgagtgggtgccgctgtggctactgcggtattcggtcattgtgaaaagtagaggaattatcaaatcaaaaggctacattttacaagctaaaagaaggggttcttaactgacttaggagcataacttacctgtaatttccttcaatatgagagaaaattgagatgtgtaaaaatctagttactgcctgtaaatggtgtcattgaggcagatattctttcgtcatatttgacagtatgttgtctgtcaagttttaaatacttatcttgcctccatatcaatccattctcatgaacctctgtattgctttccttaaactattgttttctaattgaaattgtctataaagaaaatacttgcaatatatttttcctttatttttatgactaatataaatcaagaaaatttgttgttagatatattttggcctaggtatcagggtaatgtatatacatattttttatttccaaaaaaaattcattaattgcttcttaactcttattataaccaagcaatttaattacaattgttaaaactgaaatactggaagaagatatttttcctgtcattgatgagatatatcagagtaactggagtagctgggatttactagtagtgtaaataaaattcactcttcaatacatg

SEQ ID NO: 256606 - DNA, 565 bp, Homo Sapiens
  misc_feature (518)..(518): n is a, c, g, or t
tagaatcaaactcttcatcatcaactagaagtgcagttgacatggcctgttcagtccttggagttgcacagctggattctgtgatcattgcttcacctcctattgaagatggagttaatctttccttggagcatttacagccttactgggaggaattagaaaacttagttcagagcaaaaagattgttgccataggtacctctgatctagacaaaacacagttggaacagctgtatcagtgggcacaggtaaaaccaaatagtaaccaagttaatcttgcctcctgctgtgtgatgccaccagatttgactgcatttgctaaacaatttgacatacagctgttgactcacaatgatccaaaagaactggctttctggaagcaagtttccaaggaagctctttcagggaaagcattcctggacatttcaagcggcacggagtggggtgccgctgtgggcttactgcgggttattttcgggtgcatttgtgggaaaagttaggaggggatttattccaantccaaaagggcttacatttttttacaaggcttaaaggaggggggttc

SEQ ID NO: 256607 - DNA, 680 bp, Homo Sapiens
aaagtgctgggattacaggcgtgagcaccgtgccgggccagtgtttttaactgtccacacttactaaattttccagtacttcttcctatggttcatgatagtaaacacagaaacatataaggaacattattagagttaccagatgttagctgttgcatatgtgcacattcctagattcaagggtgtttttgccttaaatttaagtgggtcattggttgtcttgggaagatcatggaaaattcgggattttttagaattctgaaccaaaatatgttttgagtgtttcttaggtaaatgtgtggatcttccaccttccacattcagactgcgggactacacttcataaatgcctttttatttccagttatggattcaactaaatgactgccttgggagcacataattactttgcctaccctttttccccctttgctgttgtggctcgagtttggttctcacctgagaagatgcattgagcatatgttgttacccagccctggcttaatggtgtcctgtggggtaggggtgggaggacgaggggcacggggccagagcatgtgaatggatcatggttggacagctgtgacctgccagcactgcgggtaagcaaaactacaaaccgttctttcctctgtgacattgaataaaccttaataaaattcataattagcacatactag

SEQ ID NO: 256608 - DNA, 1047 bp, Homo Sapiens
  misc_feature (964)..(964): n is a, c, g, or t
tgtcgctacaacctgtccgagagcgccccgctcatttataatagctttgcccagttcctagttaaggagaaagggtacgataaggaattgctcaatgtgaccccagaggattgggatttctgttgcaaaggtttggcattggatctagaagatgggaacttccttaaacttgcaaataatggcactgttctcagggcaagccatggcaccaagatgatgactccagaggtgctggcagaggcatatggcaagaaagagtggaagcacttcttgtcggacactggaatggcttgccgctcaggaaagtattacttttacgacaactactttgacctgccaggagctcttctgtgtgccagggtggtggactatttaacaaaactgaacaatggtcaaaaaacatttgatttttggaaggatatagttgctgctatacaacacaattataaaatgtcagcttttaaggaaaactgtggaatatattttccagaaataaaaagagatccaggcagatatttacatagttgtcctgaatctgtgaaaaaatggcttcgacagctaaagaatgctgggaaaattcttctgttaattaccagttctcacagtgattactgtagacttctctgcgaatatattcttgggaatgattttacagacctttttgacattgtgattacaaatgcattgaagcctggtttcttctcccacttaccaagtcagagacctttccggacactcgagaatgatgaggagcaggaggcactgccatctctggataaacctggctggtactcccaagggaacgctgtccacctctatggaacttctgaagaaaatgactggcaaacctgaacccaaggttgtttattttggtgacagcatgcattcagatattttcccagctcgtcactatagtaattggggagacagtcctcatccggggaaggaactcagagggggatgnaagggcacgagggagttcagaggccttgagggagttcagagcctcttagaagaaggaaagggaaattttgaggggaccaaaag

SEQ ID NO: 256609 - DNA, 586 bp, Homo Sapiens
  misc_feature (556)..(556): n is a, c, g, or t
cgggacctcaagctgcggaaattcatctttaaggacgaagagaggactcgggtcaagctgtaaagcctggaagacgcctacattctgcggggagatgatgattccctctccgacaagcatggctgcccggcttacgtaagcccagagatcttgaacaccagtggcagctactcgggcaaagcagccgacgtgtggagcctgggggtgatgctgtacaccatgttggtggggcggtaccctttccatgacattgaacccagctccctcttcagcaagatccggcgtggccagttcaacattccagagactctgtcgcccaaggccaagtgcctcatccgaagcattctgcgtcgggagccctcagagcggctgacctcgcaggaaattctggaccatccttgggtatctacagattttagcgtctcgaattcagcatatggtgctaaggaagtgtctgaccagctggtgccggacgtcaacatgggaagagaacttgggaccctttctttaactgagctcatgccccacggaggacttaggcaggttccagggagtnagcgagggcagcgggaaagggagttcttcc

SEQ ID NO: 256610 - DNA, 611 bp, Homo Sapiens
cggcgatttagtatttttttctaatagactatgttcaacaaataagtaattctcgaatagttcagattaaaacatacaggaaccaagtacatacccagcatagaagaactttactaaaggcttcttggaaagcccttttttgaaacgacagtatcgtaagtaacatatcatttataatagaaatcttgacccagtgcagaaaaataaatatagtaaaatttatttatctttggccagttttccaacacccaggtattagccttgaagttgaagagataagggttcttgtatattatttttcatttgtgttctacaattaaaggttctgctttgatttgtcaaataatttataaaaattttggtctcaaaacaaatgtttgataaaacttttttttaaatttggggttgaaatgtctaaattgaatgctaaaagtaaagtaaaagtgaccactattaaaaatgtatagggaaaaaagtccagcccaaagtgataaaatagtgacccttttgtaggggtgtttattgtttggttaagtctgctaaattacggtatgcattatctggtgactatttgtgcctgaaaattccttttgtattaaaattctggaaaa

SEQ ID NO: 256611 - DNA, 361 bp, Homo Sapiens
caaatgagacaagcaaaaacaagacataagcattgtcaaataaggcacatgtaaaaatctacacacattatccagtgaaagacaatatatatatatttgaaggtagaaataattacaaaaatactgacatttctaaagcattagcatatttgttacaaacaatcaccaactaatccccattcagaaaactgttgaaatttcacgtgtgagtatttgaagaattcagttagtggcaaaaagttgtccatactatgagaaatgtaatatggaaattataaaaagttataaatgttcataaaccccatggtcatcataatgtaaatgtccttgagtgcaccaagttgatatttcctcatcaatt

SEQ ID NO: 256612 - DNA, 1212 bp, Homo Sapiens
gaagaaaggagagaatattgagcagattctcgactatctctttgcacatggacagctttgtgagaagggcttcgaccctcttttagtggaagaggctctggaaatgcaccagtgttcagaagaaaagatgatggagtttcttcagttaatgagcaaatttaaggagatgggctttgagctgaaagacattaaggaagttttgctattacacaacaatgaccaggacaatgctttggaagacctcatggctcgggcaggagccagctgagaccaggccctgcctaggccctgccgcagaaccaccatccctgggaggccctgcagagcccacctgtggggaaagagaaggggcagcttccggattttcttttgggggttagaaggtcaggtgtggagactgctcgccagtctctgtgagcctaggccctgagctggggaggtgggggaagatttgggcatgtgagtgcccccagaactgtcctggctccttccgtattaaacgcatttgcattttgagaagtgtccttcccacttcagccctccggagagactaccctagtctttctggggtgtttatgtcctcagctgaagcctggcctagttgctgagaggggctggggagatggggcgggagggccagactcagtgctgctgtggagctaggtgcttcccccttcccctgagactggtggactgaactccagtcaagttgagttcaagtgaaagattcttccagggttttattttttcccctcctaacaaagtctcatagtgttaacactggttctgcaatatctctgaggtgcaaagaatgcacttttccctatggggcccagagtttgccttttctgccaggcagtcaccacgcttccctaccccagcctgtttcttttggcttggtttggaccacagtcctctggctacccagggttttagagcccctgctctaggaaacagtttaagaaatcattggccccttcccagcacattgaatgggtaagcagacaggccatgatttagttggccagcactaactccacctctgttctccttgaacagcttcccctccagcccactgctttaggatgacacaatgaataacacctactcatagaaatcactctctctggtttgttttgtattatgttgtacatcattaaagatctaaatgactagtccccattttctttgagggatcaggaaagaacctgg

SEQ ID NO: 256613 - DNA, 475 bp, Homo Sapiens
gtctgcaaatccctgggggcaaagaatgcacttttccctatggggcccagagtttgccttttctgccaggcagtcaccacgcttccctaccccagcctgtttcttttggcttggtttggaccacagtcctctgctacccagggttttagagcccctgctctaggaaacagtttaagaaatcattggccccttcccagcacattgaatgggtaagcagacaggccatgatttagttggccagcactaactccacctctgttctccttgaacagcttcccctccagcccactgctttaggatgacacaatgaataacacctagtcatagaaatcagtctctctggtttgttttgtattatgttgtacatcattaaagatctaaatacaaaggatatacagtcttgaatctaaaataatttgctaactaactattttgattcttcagagagaactactaataaaaatctaaaaggtaa

SEQ ID NO: 256614 - DNA, 946 bp, Homo Sapiens
  misc_feature (797)..(797): n is a, c, g, or t
  misc_feature (799)..(799): n is a, c, g, or t
  misc_feature (817)..(817): n is a, c, g, or t
  misc_feature (876)..(876): n is a, c, g, or t
  misc_feature (919)..(919): n is a, c, g, or t
  misc_feature (924)..(924): n is a, c, g, or t
gcatttccttctgtcatccattgcaaagacgtaccagcttcagggtagtatggaaagatccctggtctcgcagtcagaagacccgagttcaagatgtgggatctctgaacatggcccttcagttctttcttccgagagctgtgctgatggccaagtaagatgagggctatgaaaagcctctgtagactgcaaaatgagcatgggagaggctgtcattattctggaattgggagacagatttacagagggcctgaacacaggattgaaggtggtgaatttccattcggctgcctgggcgtctgcatgtataaaaagcaaacctaagtggtttttttctcctccaagtgaagatgaaagtgttaaaaatagcaaggaggtgaaagtgttcaaaatagcaaagtggcctgtctcctcttctcctaagcagactgtccaaacagacgcccagtaggaaggagcaccttttgatactgggcacgtggtggtgatgcctcctctctcctagcacaggccgtggctttgtcatctccagccctaactgggagcaccgagggttccaaccaggcaaatgcaggccctaacgggctctttgaaaacgggcttttctagaaccaggaacctcaagtaaaaactcccccagctacctctaaggcccatcacactcctgtctcacgcccacctatgagaaaggaaaaggtgatggtcattgagctgggctgcagaggagtgtgaggtgcagacaccatgaggtacccacagccaggaaaacgaggatggtcggggagacgcgccagaangnagctggggcccctgcgtngggacccctcagtggttcccagggggcgtggggacttggcgcagtccttttcagagggnctgttttaccaacaggaaaccgttacattaaaacctgcttcanacccntggacttcagcaatttcatgtt

SEQ ID NO: 256615 - DNA, 477 bp, Homo Sapiens
  misc_feature (427)..(427): n is a, c, g, or t
aataagtatcagcaaaataatggttatcacgtaactgaaggccacaaagggcagggccacagcacatattgatggaaggaggagcccaagagatgaaaagagctttcgcacagtgatcaatctgagaaagattccctggacaaaaggaaatctgccagctgacctcctaaaattgtaacagcttgcagcagcaataaaaggcagggaggacagaactccactatctctgatgttaacatggagcagagtactgatatacgttggtaggtatgttaggatgatggtgcataaccagaaatggctgaaaaaacccaggaaaatggcccaaagtggtaggcatgtgaccatcgcctttatggggacagctcgtccaggagaactgggctgttgagccagtgaggacaggatgtgctccttttccctaacncttatgcacgggtgatgcatggggtcatcataaatcactgtgaaccatag

SEQ ID NO: 256616 - DNA, 1057 bp, Homo Sapiens
tgcaagcatgcatgttgcctgtcctgtagattggccttatcaggtttctgggtgcctctgccttaagatcctgaaggcaaattttgtttcaacagtttggaagtcatctgtgggtccagcttgactttggaggaataagaagatacttctagagtatgggaatgattccagataatttctgggatttgaatctacttgagtttaagggcctgggacctaatttggtttagtatagaatttgaagaattaatttataggcagctgaatacccaaaacttgggtggtggtcctgtggtttggctgagctgtccgggcataacctggttctctgttatgttaaggctttctgggaagccagacactctgcgcacgagtgaaacatgaagttgttttctgaggacctgttttggtgggattgtttgggcagaggactgtgtttatgcagggcaaatcccagaaagataagaggaagctagagaaacttaatgtacctgaattcttcatggtgtatttgcaaactaacttaacatagattcttttgactatggtaagtttgaatctctccttgccaaacaacattataagtttagttttcttcttcctcttgcagccggtacagaaaggtgtaagtggtggctgaaaattgaggaagcttcatctgaccaatgtgggtgctggtttcttgtgaaatgtgtccctaagcctccttctccttgcaggcagccacccacccaggtgtctaagataggacatgctcctttctttctctaatcccatcctgaggttgccggcaaagccaatatgaccactactgagaaatagtaatgacttctacaaatgcaagggtcttaccctcctctttcccttaaacaccctcccttttccttagaccccgtttttgccatcccccaaatgtgtggtatggtgaaactaatcccctgaatgtgaattgctatccttattgccctattaaagaagagccagctggtatattgtcaggaagcactatttaaaatgtgaactgttatagagtaaataaataaatactctacaggaa

SEQ ID NO: 256617 - DNA, 1379 bp, Homo Sapiens
gggaaatagggctttaataattttgacctcaactaaaaatgatatgcaatagtctctgtgtgtgtttgaaatacattgtgttctcagagatttctacattctcacgttctagtgatttggggcatgggcttaatagcagatgtacagtgtattcctgcattattgtgattccccttaaagcccagttcttgctgtcttctaccaggggctgctgactccagttacccatggaatgcaggacctgggaggggtagccattagggtctttcaaaactctttggatctaagcatttgtctctccttaagtgccaatcacaattggatatggaaggactgtgatttctgcaatgaacccaaacttttagagtaaaaagccaaatttaaattataagacagaagggaaaaaagagaaaaactcaagtctattacttgtagagtccaattcttagcaatggaatccctctaggattctagtttgggctttgtctggatttgcttttctcagttgtgctttgaagtgaataagctttgttacaaattaattttttattagttccaatattagttggagttaacttgaattgattgtatgtagcacagcacttttgcagtaagattggtgtgaaatactaaacactatggattttgtaggtgtcaggttaaatggtcaagggatacctacattaagtcatatattaggtattgatgatcttacttcttttctgttcccctgtacaaaacacttacctaacccagcttgtggttttaggacagccaaagctcactgttgttggttagtcctaatcactacacgggtctcataaatgagacttgtttgaattttggtacattggagcatgttggttggtattacacggcagcatttcgaatgagtgcagctctgtgtctgtcagaaaggagagataagactactttgaagggaattaaatatgtgagtcctctttttaatggtgctttttgtaacctttaatgctgaggtacagagctgcttttcaatatttcataaaggagtggcagacaagagtggattttaaagctgttcttcaaacgtaatttgtcactggactctgacacacctggaaattatatgatatgatacatacagaaatgttgtgggttttttccataaaactttaataaaagtattatacagcaataaacaaaaagaaaaacaaagggcggccgctctagagtatccctcgagggggcccaaagcttacgcgtacccagcttctggtacaaaaggggtccctataggagtcggtattataagctaggcacttggccgcgtttcaccaacgtccgcgaactgggaaaaacctgcaacctggggactctgggacggaccctacctctgg

SEQ ID NO: 256618 - DNA, 922 bp, Homo Sapiens
  misc_feature (345)..(365): n is a, c, g, or t
ggggagcaggactgattgaattacggaaaatgcctgtaaagtctgagtaagaaacttcatgctggcctgtgtgatacaagagtcagcatcattaaaggaaacgtggcaggacttccatctgtgccatacttgttctgtattcgaaatgagctcaaattgattttttaatttctatgaaggatccatctttgtatatttacatgcttagaggggtgaaaattattttggaaattgagtctgaagcactctcgcacacacagtgattccctcctcccgtcactccacgcagctggcagagagcacagtgatcaccagcgtgagtggtggaggaggacacttggatannnnnnnnnnnnnnnnnnnnnggggcttaacagttttagaatacattgtacttatacaccttattaatgatcagctatatactatttatatacaagtgataatacagatttgtaacattagttttaaaaagggaaagttttgttctgtatattttgttaccttttacagaataaaagaattacatatgaaaaaccctctaaaccatggcacttgatgtgatgtggcaggagggcagtggtggagctggacctgcctgctgcagtcacgtgtaaacaggattattattagtgttttatgcatgtaatggactatgcacacttttaattttgtcagattcacacatgccactatgagctttcagactccagctgtgaagagactctgtttgcttgtgtttgtttgcagtctctctctgccatggccttggcaggctgctggaaggcagcttgtggaggccgttggttccgcccactcattccttctcgtgcactgctttctccttcacagctaagatgccatgtgcaggtggattccatgccgcagacatgaaataaaagctttgcaaaggcacgaagca

SEQ ID NO: 256619 - DNA, 687 bp, Homo Sapiens
  misc_feature (581)..(601): n is a, c, g, or t
caggaccaaggcagaggggtgctcatagcgggcgctgccagccccgccacgcttgtctttagtgctccaagtctaggaactccctcagatcccagttcctttagaaagcagttacccaacagaaacattctgggctgggaaccagggaggcgccctggtttgttttccccagttgtaatagtgccaagcaggcctgattctcgcgattattctcgaatcacctcctgtgttgtgctgggagcaggactgattgaattacggaaaatgcctgtaaagttctgagtaagaaacttcatgctggcctgtgtgatacaagagtcagcatcattaaaggaaacgtggcaggacttccatctgtgccatacttgttctgtattcgaaatgagctcaaattgattttttaatttctatgaaggatccatctttgtatatttacatgcttagaggggtgaaaattattttggaaattgagtctgaagcactctcgcacacacagtgattccctcctcccgtcactccacgcagctggcagagagcacagtgatcaccagcgtgagtggtggaggaggacacttggatannnnnnnnnnnnnnnnnnnnngggcttaacagttttagaatacctggtccttatacaccttattaatgatcagctatatactatttataatacaagtgataatccga

SEQ ID NO: 256620 - DNA, 2039 bp, Homo Sapiens
  misc_feature (72)..(90): n is a, c, g, or t
  misc_feature (1755)..(1811): n is a, c, g, or t
  misc_feature (1883)..(1891): n is a, c, g, or t
aacactatggccactctataagagccgacctaggagtaattcactgtcctcttctgggatcgtcatggcttnnnnnnnnnnnnnnnnnnngacaaaacaggaaaataatccacaatgcttggggcgcctactctgagcttggctgggcatccattcagtaaataagtcataagctacaaactaagatcagggtaactgtcccttgccctcctgcttctctttgaaccacatgccctacggtgtttcaccaccatcaacaactttacttcattaattcgatatcagaaccttaaaacactactgaatcttagacaaaaggtcctcagcagattacattgataaagaaacaaatacagatttgaatataagtcattgccattattgttttctttacatctcatgatccacttcaatattaaacacatacatacacacacacaaaaccacatcaaacattcagatgccctgaaattgtggagacagcactcccagtattggctggataagaacatggtcctttttctacacggacattactccaagttcggctgtcaccacactctgccctcaccctggctccctgcatacagacgtttccagccagtcccatgcccacaccagcacgagcatgtgcaagaattcccttcgtggtcccaatggcactacacatttcacgttcaatcacagacagcccttccaaaacagaggctccttaaatcttgtttcccaagcatgcactataagaaactggaaacggggcaaagttccagctaaccgaggaatgaacaggtgaccagagctcagtctctggccccctccgagtccggggagcctctgtgctttgacgcagccttggtgcgagatggagaggcagggcaggttagttgtgcggagggacatgtttgtatgcattaaagctacagcagaggtctgcgctcctgtttctgcttcactctctatcattctcctcagtctcaatactcattcaatcgcaccctctggccttgtcttagcttaatgtggttagagctaaaaggcaggaaggaaagaaggaatggctgggggagccctgagagaggtcgcagcacatgtgaggaagagggtagagcaggagctttgttggtggaaggagagccacttcctcctccaacacagcatggggacagcacagggaaacaggatcacccagggcaaatacccctctccacatgcccacatttttagtccccaccactgtactcaagagctgggcaagctgctgaaaagggcaagaaggaacactcagcagtacacgtcttcctgtcctgggcacccttgtcaagtattgaccaaaacctgaaacatgatgtttaaagtgatgaatgcaatatgatcctaggtgtgtaacaaactgcagaaacacatgctagtttgggttagattataatcatctgaagcacaggataaccgagaagcaaaattccattctggtacaaacacccaatttctagaaaagagaaaggaaaagaagaaatacgacgtgagcttttttgatcagaagactccatgaaatgagagcggtggtaatatgaatccacgtgatttttcaagtcttcctgttgtacagtcatcaaaatgaccaggtttgtgctgcaaaggagccagcaccatgtggctactgctttgattgttctcagatgaatgtttatacaaaataatatcttatcttcatttagtttataaacatacacagtgctgtccctttcaaattaaggnnnnnnnnnnnnnnnnnnnnnnnnnnnnnnnnnnnnnnnnnnnnnnnnnnnnnnnnntacttttggttttggcaacattaaaaaagaaagaaatataaaaagcaatgtggcattggtccctattcattnnnnnnnnngggtacttgggcacgacacaatcagaattagtttgttttctaaaattcagagtatctgggattttaaaagtagcactttttaaaaagttcaacaagtcaccggacgcgtgggtcgacgatatcccgagaattcgggaccggtaccgcc

SEQ ID NO: 256621 - DNA, 1306 bp, Homo Sapiens
  misc_feature (284)..(303): n is a, c, g, or t
  misc_feature (830)..(840): n is a, c, g, or t
ggacttatattcaaatctgtatttgtttctttatcaatgtaatctgctgaggaccttttgtctaagattcagtagtgttttaaggttctgatatcgaattaatgaagtaaagttgttgatggtggtgaaacaccggtagggcatgtggttcaaagagaagcaggagggcaagggaaagttaccctgatcttagtttgtagcttatgacttatttaatgaatggatgcccagccaagctcagagtaggcgcccaaagcattgtggattattttcctgttttgtcnnnnnnnnnnnnnnnnnnnnaagccatgacatcccagaagaggacagtgaattactcctaggtcggctcttatagagtggccatagtgttctgtcaaaacacttgcttccattttcagagataaaaatcattgattacaaaaaaacaaacaccaagacaacaaagcagacccgtcatcactcggcggacgcctccgaatcacaccgcgacccacccgaacaaccacgtagcgcgatcctcaaaataagaattcttttgtggcgccccctcccccctcaaaaaaattttcttaaaacaattttttttggcgcccgcggcccccaaaagggaagcggaaactgggcccaaaactgttctccaaagaagaacctgggccaagacacaaggacgttggtattccccaccaaataaaaaaaccccccccggggggcaaacacgaggttttcttaaaaaaaatccccagagggggttctggtggggccctttccgggggattcttcccacggggggcccccaggcgaagccctttaatactaaatttaagcgnnnnnnnnnnngtgggccccttattgggaggaaaggggtggaaaaatttcctttaaaacatttttcggccgcaaagtggggaaacccctctcacacaatggctgcgtggtgagacccctcgaaatccccgccggtgcggtttctccaacccccctttggcgcgccttgtgtggaatataaaatatattcgcccccggggggaacaaaacgcggggggaaaaaacaaaattttctcccctttttgcgccgcgccgctttcaaaaccaaccatcgggtggggaactaccccaccccattgatatctgttttctcacatacaaaacaccacttttctcttctcactaacacccctttttggggggaaatattgggggcctggtgtatttcgtcatcgcacaaacccacaaccctattgtgtgtggcatatcattttgtgcgggagaataatgcgctgagcgagaagacatcctccacggg

SEQ ID NO: 256622 - DNA, 889 bp, Homo Sapiens
tggggttaaatcagtggagggtaaaagcactggaaaatgtgcacaggtcataaacacctgtcagtctcaaagtgctttggccagtagcccataacattgttccaacttttcaaaaagttgtctggaatgaaattttattttcttgactagctgattaaatttgtacccctacaaactacacaaacaattaggtgtctttagtaactttcaggaataattattacaaagtttgaaagcatcatgctattgacatacactgtttacagaagagttttgaaattgtggataatgagatgtatgcgcaatttggaaattaattggacaacacgtaatggctctcagatattatatattagtaagtgtgcctttaagaatgtatgaaatatttcaaaagactgagtagaacaaatttaagagtatatttttagaatctaatatgtgttctaaatggagctgatattcaggagaatgtgcacagtcactggtgtctttaatgtcctgctccaccacagcccagcaaagtcactgctaatactgggcacacagaggaggtcaaggcctggctctcagccttaaaacgatgtggaaagtttccttttatgcacaagacgtaattaacaaaagagcatgtgtttgtatttcccaagcagaatgtgctcaactcccttctcacctctcccatatctgactcctaattatttctcctgaatgggtgccctcccacctccctaaccattaccccacagggatgctgctcccttaggttgctgaagctcccattcttggaatgctgaagggaggccattaattgttggtcatcctgtcaatatggctcacgttcaggttctgtgccgtgtgttttcctctttctggaagagctaaagacaga

SEQ ID NO: 256623 - DNA, 730 bp, Homo Sapiens
  misc_feature (698)..(698): n is a, c, g, or t
ggggttcccgcaaggtcgctttgcagagcgggagcgcgcttaagtaactagtccgtagttcgagggtgcgccgtgtccttttgcgttggtaccagcggcgacatgacggggtacactccggatgagaaactgcggctgcagcagctgcgagagctgagaaggcgatggctgaaggaccaggagctgagccctcgggagccggtgctgcccccacagaagatggggcctatggagaaattctggaataaatttttggagaataaatccccttggaggaaaatggtccatggggtatacaaaaagagtatctttgttttcactcatgtacttgtacctgtctggattattcattattacatgaagtatcatgtttctgaaaaaccatatggcatagttgaaaagaagtccagaatattccctggtgatacaattctggagactggagaagtaattccaccaatgaaagaatttcctgatcaacatcattaaagattatgtaaaaagttaaaaggcttatgagcctaagtttgttcctatattaccatatttactgaattttctggaaaagtaactttaataaagtttaatctcagaaattgtcatatctggtttcaagcattgtacaatttgagactgagtaatttaacaataagtaaaaagtggacatgctaaacacatatgagagactacctactctntctggtcattcttgacttggaaaacggtatgg

SEQ ID NO: 256624 - DNA, 638 bp, Homo Sapiens
accaccgcactcgagtctgggcaacagaatgagacctcatttcaaaagagaaagaaaaagcacgactgaatcatttcactttgtattctcctccttgctctcattccttttgtgcttcatgcattgtgtgtgacaattggatgcagccgtaattattgtcagtaacttggtttttaagcttcagactgtatttcctcctcacttgttaacaccagaagataaatgaatgtggctcttggattgaactacatctacagggagctgaacttcccatgttgaccttgaattctagagtatgcttatgctgattcttgagaaattggtatgtgccgcgcctttggaattgataccttaattttcagtgaatattattggtattattattaaagagaacactttaagccacgagtaagagcttttcctccttttgagaagtgaggtacacaagagtatactgcagctgtgggagtgatgggtggggtggggcactgttgaagaatatttaataccacgaagatgtcaccagtataatattaaatagaaaaagtaggttataagacagtggatccagtagaatcctattgtgggtaagtgtgtatatgtagagaaaatgactaggggctaggcacagtggctca

SEQ ID NO: 256625 - DNA, 908 bp, Homo Sapiens
  misc_feature (894)..(894): n is a, c, g, or t
aaagaaaccaatcacattgaactaaaaattttaaatttcagttacaattttatgaaattcaaatatctcagaatcgcattgaggtactagatgaccaagtgttcattctgttcaatattgcccacgagatctttcatatcactagttcctgggcttgactgactgttaaaatacagagtgttttcaaaggcgccctcttgaggtaggtgcacacgtcttttctatataaaagaaataggcggcaaggccagcacccgttaaaatcaggaggatcacaatgatgactactccggccacgttggaagacggtttagaagggtccatcttccgtgtgtcagcttttgttgtaagtaactcatgagtaggtttagcatcaataatttttggtcttttacaaatatatcctttgtaggatgaacagtgaatattactccaaaacccagaagacgcatgtaaagctacacaatcattccgttcaccagagggatctcctgtgttcccagttgaacaaaggagaccggactgttattttatcccacagcccacgtcccttcaacatttctgaacaatcctatcccaaaaattggttttacttttaagtggctcaacccgatatgacagaaaactggattctgcagcactttcaatggaaaccagagaggaacccattcgaagacattccagagaagcttggccccagtttcttgtatatgaggactcaatatagtaacagtgaccatggaaaggaatccatgctgtgtgatctgactccgggcatctgccaggcagttgtgggggttcagtagcagggatttcatctgatcttttacagagaaagtaaaaactttcattgcaatgtgctgtcttccagtagccatcaagatccagataaanacatgctgatttca

SEQ ID NO: 256626 - DNA, 1461 bp, Homo Sapiens
  misc_feature (1054)..(1064): n is a, c, g, or t
atgagccactgtgcccagcctggtattgataatttatattcagataatttgttatggctctttaatatcccacaaggggctctaaaaagcaaacattcaagagtatgtagtttttagacattaagttaattattttaaacagtgacagcaaaacacaagtgattaaatatagtttatttgttccaatgactaaattttacctcatttattaatctggtcattaaggaatatatttaataatattatgtaattattctttttatgcatgatacacctagaaaaatgccttttgtttctattgatggctttgttgtttggagctacttttgattacttattgcagtttcccaatttagtctttactttatctaactcacaaagtaaaattaactgatcacatggcaactactgtatttaaatagttctggaaaaatgaaagtgctttttgctgcttggtaaatgggtaatgcccttgattccttgactgtaggacatagctgatctaaagtactctgtcagttttaccttcacccatgactgtcattagttgtcaaagttgaaaagtactttagctgtgagaaatccttgtatgtttttattataagaggtataatcatcctcaaagcctgtttttattacatgatgtggactgattattttttctatcacagtgttaacagatggattttattgtaaatacaaagaaaacatattgattattgtagtattcttatgtcacctggccttttgcgtgagattatttattatttctagcaaggctttcttcctttcttattgcccagagactgactgatacatcttttgttatttttacacataaattaaacatagcctttttggacaaattcactaaatattaatgtataaaatgtaattgagtaaatttttatcagaattttaaaaataaaagagcttagactcagtagaactcagtagaagcttcactatttactccagcgtgtgtaaattgtacttactctattctcagagtatatttactgtccttaccattggattctttccctttgctaannnnnnnnnnngttaatggtagctgcgactttaggtggggtatattttcttctcctaagagaatagacagtttttccagattcatcatcattgactgtcaagaaaggacccttcagcaaggctgtaccctcaatgcagttgatggcctgtcttcacggatttacagacttggcctgatgcccatgtaaattcaagctttggcttgtggtaacaaccacaagaagacaagcatctgtggtgcggaggcaagcaggctaactaggagttgacaagctaagaaagtgaaactgttctttcttagttaactgtctttctctggagctctgttattttgagtataatatttccatgacacttagtaaatgcaagctaaaatgtaataataataaattgtactggagaaaccta

SEQ ID NO: 256627 - DNA, 585 bp, Homo Sapiens
  misc_feature (89)..(89): n is a, c, g, or t
  misc_feature (508)..(508): n is a, c, g, or t
  misc_feature (516)..(516): n is a, c, g, or t
gtgagtgcgagtgaagaccatttatgactgccaggcagacaacgatgacgagctcacattcatcgagggagaagtgattatcgtcacangggaagaggaccaggagtggtggattggccacatcgaaggacagcctgaaaggaagggggtctttccagtgtcctttgttcatatcctgtctgactagcaaaacgcagaaccttaagattgtccacatccttcatgcaagactgctgccttcatgtaaccctgggcacagtgtgtatatagctgctgttacagagtaagaaactcatggaagggccacctcaggagggggatataatgtgtgttgtaaatatcctgtggttttcttgcctttcaccagtatgagggtagcctcgggacccgggcgcgcctttactggttttgccaaagccattccttgggcattttaggcactttacatcttcttctatggctgtttcttacaaggcaaacaaaacaaaattagggagttttagggaantgttgggnttttgcaattagggagttggttttccaggcaacctttggaaagggcttaggatttggattttgtttttt

SEQ ID NO: 256628 - DNA, 379 bp, Homo Sapiens
caaatctgtgatcttctgttcagcatacacatcagcaaagtgagaagatgagcactaaatataggctctattaactttacttttagatttactggcttcaaaaagtgcctattctgagcaacataaacgttattccttacatatgtatgtacacacggtacccagagtcgtactgtgcagccttcaaagaaagtcactcacttccaatatcccctctcaagcggctaccgtgaaacgggctgcaaacacattccctgagcataccttgctgatacagattctttatatttatatcctactggatggtagcatattgctaagggttcctgtactctgcttcaagggaatgtaagctttatggcattgaaacatttaggaa

SEQ ID NO: 256629 - DNA, 1012 bp, Homo Sapiens
  misc_feature (763)..(763): n is a, c, g, or t
  misc_feature (780)..(780): n is a, c, g, or t
  misc_feature (799)..(799): n is a, c, g, or t
  misc_feature (835)..(835): n is a, c, g, or t
  misc_feature (846)..(846): n is a, c, g, or t
  misc_feature (849)..(849): n is a, c, g, or t
  misc_feature (852)..(852): n is a, c, g, or t
  misc_feature (864)..(864): n is a, c, g, or t
  misc_feature (883)..(883): n is a, c, g, or t
  misc_feature (908)..(908): n is a, c, g, or t
  misc_feature (913)..(913): n is a, c, g, or t
  misc_feature (919)..(919): n is a, c, g, or t
  misc_feature (922)..(922): n is a, c, g, or t
  misc_feature (933)..(934): n is a, c, g, or t
  misc_feature (938)..(938): n is a, c, g, or t
  misc_feature (948)..(948): n is a, c, g, or t
  misc_feature (952)..(952): n is a, c, g, or t
  misc_feature (958)..(958): n is a, c, g, or t
  misc_feature (964)..(965): n is a, c, g, or t
  misc_feature (976)..(976): n is a, c, g, or t
  misc_feature (982)..(982): n is a, c, g, or t
  misc_feature (991)..(991): n is a, c, g, or t
  misc_feature (996)..(996): n is a, c, g, or t
  misc_feature (1002)..(1003): n is a, c, g, or t
ctttggtcagttggcagcggcaagcgcgctgcggttccggtggcgccatgtcgttctgcagcttcttcgggggcgaggttttccagaatcactttgaacctggcgtttacgtgtgtgccaagtgtggctatgagctgttctccagccgctcgaagtatgcacactcgtctccatggccggcgttcaccgagaccattcacgccgacagcgtggccaagcgtccggagcacaatagatctgaagccttgaaggtgtcctgtggcaagtgtggcaatgggttgggccacgagttcctgaacgacggccccaagccggggcagtcccgattctgaatattcagcagctcgctgaagtttgtccctaaaggcaaagaaacttctgcctcccagggtcactaggcgggcagcccacacccaccccagacggccaccacactgaggccacacgttggccattccaccttggagttggaaccctgggcgtcgagacaggaaggcagggcgcagtggttgaaacatcaggacactcccaaggccccggctctgaacaagaccttttcgtttcttggaaaagagactcatttgctgatggttcatgccttctgctgggacaggcctgggctgtgcagccacactgtcggctgacttagccccctgctcactctaggtgcctccaggaggtgagccctgggtgcagctggtctctgaatgacgttacaccctcaccttcttttcctggccctgtctctggactctcccctgtnaggcccaattccaaganagactctcgtcctcaccgnagcttaggcccacatctcccaggctgcttaggaganagaatggaaanggnggncgcccctgccanccgccctggccctggtcantgcatgatccgctctggtcaaaccnttcangccagncanagtggggatgnntgtnactgctgggnaggnaggtgntggggnnacccttgcctntcgtcncgagggggnaaacnaaaccnntttaaaaat

SEQ ID NO: 256630 - DNA, 1133 bp, Homo Sapiens
gtagcgaggcctgggtggcgaattcggcacgagggttcaccgagaccattcacgccgacagcgtggccaagcgtccggagcacaatagatctgaagccttgaaggtgtcctgtggcaagtgtggcaatgggttgggccacgagttcctgaacgacggccccaagccggggcagtcccgattctgaatattcagcagctcgctgaagtttgtccctaaaggcaaagaaacttctgcctcccagggtcactaggcgggcagcccacacccaccccagacggccaccacactgaggccacacgttggccattccaccttggagttggaaccctgggcgtcgagacaggaaggcagggcgcagtggttgaaacatcaggacactcccaaggccccggctctgaacaagaccttttcgtttcttggaaaagagactcatttgctgatggttcatgccttctgctgggacaggcctgggctgtgcagccacactgtcggctgacttagccccctgctcactctaggtgcctccaggaggtgagccctgggtgcagctggtctctgaatgacgttacaccctcaccttcttttcctggccctgtctctggactctcccctgtgaggcccaattccaagacagactctcgtcctcaccgaagcttaggcccacatctcccaggctgcttaggagacagaatggaaacggaggccgcccctgccagccgccctggccctggtcactgcatgatccgctctggtcaaacccttccaggccagccagagtggggatggtctgtgacctgctgggaaggcaggctgatggggcacacccttggcctctcgtccacgaggggagaaacctaaaccctgtttcacaatctgtgcggaagtagcttgcctcacttctgcttaggaaagcggctgttgctccataactctaaccagcacagggctgaggcctgcagtgcacacctgcagggaggcccttcccaaggtgtggtgactgtgccttactgtacatgctcggaggcctggccatataggagggtgggtgatgctgaaatcaccccccatcttaagtaattactttctggagtaatcaggtggaaatccatagacaaatgaaacattcagatgt

SEQ ID NO: 256631 - DNA, 761 bp, Homo Sapiens
cagatcgccgaagcgtcggactaccgttggtttccgcaacttcctggattatcctcgccaaggactttgcaatatatttttccgccttttctggaaggatttcgctgcttcccgaaggtcttggacgagcgctctagctctgtgggaaggttttgggctctctggctcggattttgcaatttctccctggggactgccgtggagccgcatccactgtggattataattgcaacatgacgctggaagagctcgtggcgtgcgacaacgcggcgcagaagatgcagacggtgaccgccgcggtggaggagcttttggtggccgctcagcgccaggatcgcctcacagtgggggtgtacgagtcggccaagttgatgaatgtggacccagacagcgtggtcctctgcctcttggccattgacgaggaggaggaggatgacatcgccctgcaaatccacttcacgctcatccagtccttctgctgtgacaacgacatcaacatcgtgcgggtgtcgggcatgcagcgcctggcgcagctcctgggagagccggccgagacccagggcaccaccgaggcccgagacctgcattgtctcctggtcacgaaccctcacacggacgcctggaagagccacggcttggtggaagtggccagctactgcgaagaaagccggggcaacaaccagtgggtcccctacatctctcttcaggaacgctgaggcccttcccagcagcagaatctgttgagttgctgccacaaacaa

SEQ ID NO: 256632 - DNA, 1043 bp, Homo Sapiens
  misc_feature (891)..(891): n is a, c, g, or t
  misc_feature (988)..(999): n is a, c, g, or t
gcttgcaacgagcgtatacttcctaggtacggggcctgggtggcgattcggcacgagctggaattgggcctatattgcagggtttgatgatatggtggaaattcttgcttctcttcagaaaccaaagaagatttctttaaaaggctcagatggaaagttctacatcatgatgtgtaagccaaaagatgacctgagaaaggattgtagactaatggaattcaattccttgattaataaggagtgtatatgacaggaaaagaacttcgccagtgtatgctaccaaagtcagcagctttatctgaaaaactcaaagtattccgagaatttctcctgcccaggcatcctcctatttttcatgagtggtttctgagaacattccctgatcctacatcatggtacagtagtagatcagcttactgccgttccacctgcagtaatgtcaatgggtggttatatttctgggggcttgggagaccgtcattgggggaaaatattcctcttttgaattctttggaactgggggaaatgccctaccatggtaagattttccaatttggtcctttttcccacttaagggggaagaaaaacccctttttggaaaggtctcccccagaaaaaattttggtgggccccaattttgtcccgccccctgtgggaaccttccccatttaaaattttaacttggggcgcttcttaacatctgggggggacaaactggggcgggccctcccccctttaattgggggccgaaaaaaacccaggaacaggggcgggcccctttatttttttctcccccaaacagggaagctccattggggtggaaaacgaggttcaaaccaaaatgtggaaaagggcctttggaaattggtggcgtgggcgaacttccacganccggcgaaagaaagagccctcttcttaaactcggagaaggtccgcgccccttcaaaaaaaggaaacctttctcttcccctcacaccaggggaagaannnnnnnnnnnntgtgcggggcgaaatatgggggggagtcaaaacactccgccgcc

SEQ ID NO: 256633 - DNA, 381 bp, Homo Sapiens
aagaataacaagccgcgctcgtgccgaattcggcacgagtgattattttttttatttaaagggatagttgattcctggggtgttttgaaattaagttggaattaagttgcttaagcatatttatgttgtgagaacccttaatatgaggtttatcatgccctttttcaagcagatttatgagcagatttctgtcacataagtcgtcttctgcctaagtatcctaatatttcaatgcatcaggggagcgctccactggataagcattttatttcccgcatggcatagtgtttttgcactaaaggctcaaagtgtgagaacctgttctggatttgtttgaaattatttcaccaataaagatcataaataaatgtttctttcaag

SEQ ID NO: 256634 - DNA, 429 bp, Homo Sapiens
tgagccaccgtgcctggctgaaatccattttttagatgagaaaactgaggcttacagagatcagatggtttgtcctcagcctcattgtagctaacaaattcaaggtcaaatgtatacctaaattatttggctccacatttagttcaagtgctctttctgtacaaggctcccactgaatggaaaaatctggctattattatttttctcttaactctccaatgttcaggttaaaaggccaatgttttaaaaaagtatgggcccatacttaataaatccttacccaacgtagttgaaaatgtttttagcattttgattctttaggcgaaatgtatttggcaattccctcttttaaggaatgcttcagatgtttgttacaccttatttgaatgattggcataaggatgtatataggaggggccataatctgcc

SEQ ID NO: 256635 - DNA, 719 bp, Homo Sapiens
  misc_feature (578)..(578): n is a, c, g, or t
  misc_feature (704)..(704): n is a, c, g, or t
caagagctcatgccacccggttcctgcatgccagaggagcccaagccaaagaggggaagacgatcgtggccccggaaaaggaccgccacccacacttgtgattacgcgggctgcggcaaaacctacacaaagagtgcccatctcaaggcacacctgcgaacccacacaggtgagaaaccttaccactgtgactgggacggctgtggatggaaattcgcccgctcagatgaactgaccaggcactaccgtaaacacacggggcaccgcccgttccagtgccaaaaatgcgaccgagcattttccaggtcggaccacctcgccttacacatgaagaggcatttttaaatcccagacagtggatatgacccacactgccagaagagaattcagtattttttacttttcacactgtcttcccgatgagggaaggagcccagccagaaagcactacaatcatggtcaagttcccaactgagtcatcttgtgagtggataatcaggaaaaatgaggaatccaaaagacaaatccgacttgaatattcctggacttacacaatgccaagggggtgactgggagtngtggatatcatggtataattatatcccggagttgggggagggaagacacaattcccttgattggggtttgtgcaaataagcataaagataccttgattctcttacctctaaagcatatatgatgtngagaaaggagaaata

SEQ ID NO: 256636 - DNA, 362 bp, Homo Sapiens
caatactggaaacttgctgaatgaatgaatgaatgttctctctctgaaaattaggacataattccaatttaagtcccgataaaaggagccacgaagaggcaaaagaattaggcaggaaaggttggggtagtggttacactagatgctttacaggtatttatagggcaggacttaaactcttggtttgataaaatatatgaaggagcatataactgacagctcagctccgttttgcagagtgtcagccagcacttctctctacacaaaacagattagtaacatctcttcctgccagagggcttacatgttgcaattctcttgtaaaaagtttctgaatatttaatagttgacgttgaatgact

SEQ ID NO: 256637 - DNA, 662 bp, Homo Sapiens
tatccctaggaaaaaaagaaaccccagtaagggctgcatcatataatatccgcacccatatctggaccccctcattatgtcaaaggacacatcacagtactctttcatcttttatgtgtgtgagccaaaatttacctgatacaaagagatgtacaaggtaattcttattaaaatatctaatagagttgtttttcataatacttttattcatgtgtctataaattagtagtaaaatagcttataaatataaaaatacaaaaaggtctatttgacccaaatggttaatggtgatgcttatttctgttaaataccaagagttagtcaaaactttgcagatacaaaccgtaaggcaaaaaaaactggtgagactgattacaacaaatttagagagttcaatgtgctatgaattcacacaactccagttcaacagagaccatgaacaaagtaagagacatatgacaaagtgggagaagttacttacgatgtatgaagtcaacaagaaatcaacatgtagaatatacatgaaacatgagaaaatcagttcaaaaaagaaagtaatactaatataaaaacagacaaagaattaaaataatttctaagactcccaacaacctaacaagcatacaaagaaatgctcaaaataggccgaccgtggtggctca

SEQ ID NO: 256638 - DNA, 849 bp, Homo Sapiens; identical to SEQ ID NO: 15347
  misc_feature (635)..(635): n is a, c, g, or t
  misc_feature (637)..(638): n is a, c, g, or t
  misc_feature (641)..(642): n is a, c, g, or t
  misc_feature (663)..(665): n is a, c, g, or t

SEQ ID NO: 256639 - DNA, 755 bp, Homo Sapiens; identical to SEQ ID NO: 15348
  misc_feature (688)..(688): n is a, c, g, or t

SEQ ID NO: 256640 - DNA, 816 bp, Homo Sapiens
ggggtggcgggggaggggacgctgagggcccatgtgctgaaaatccgaagtgccgcggaaagtggagagctgacaaggaaggtttcgagcgttttgctggcaaagggatttcttacaacctccaggcatgcgtctttctgccctgctggccttggcatccaaggtcactctgcccccccattaccgctatgggatgagccccccaggctctgttgcagacaagaggaagaaccccccatggatcaggcggcgcccagtggttgtggaacccatctctgatgaagactggtatctgttctgtggggacacggtggagatcctagaaggcaaggatgccgggaagcagggcaaagtggttcaagttatccggcagcgaaactgggtggtcgtgggagggctgaacacacattaccgctacattggcaagaccatggattaccggggaaccatgatccctagtgaagcccccttgctccaccgccaggtcaaacttgtggatcctatggacaggaaacccactgagatcgagtggagatttactgaagcaggagagcgggtacgagtctccacacgatcagggagaattatccctaaacccgaatttcccagagctgatggcatcgtccctgaaacgtggattgatggccccaaagacacatcagtggaagatgctttagaaagaacctatgtgcgcctgtctaaagacactgcaaggaggaggtgatggaggcccatgggggatccagggagacccgggaaataccaagaaaggcctattgggtattgaacccctggggccaaaaccagccttcttcc

SEQ ID NO: 256641 - DNA, 710 bp, Homo Sapiens
  misc_feature (460)..(460): n is a, c, g, or t
  misc_feature (560)..(560): n is a, c, g, or t
  misc_feature (611)..(611): n is a, c, g, or t
  misc_feature (616)..(616): n is a, c, g, or t
  misc_feature (623)..(623): n is a, c, g, or t
  misc_feature (659)..(659): n is a, c, g, or t
  misc_feature (672)..(672): n is a, c, g, or t
  misc_feature (683)..(683): n is a, c, g, or t
gtagggggtgagttgcaggggctgggacagagcaccagcatcctgcatcattagcagcacgtgggaaccctagtgtatgggtgcaaggccacttgcctcagttttccaggcgttcccaggggcctccatttctcatcttgaaaaaagcagcaaggctttggtaccagagggtcttggtgtaagtgcaaatctgcttcagatatatattagctgtggatttggggctggttacaaggcttatctgagcctcactcttttcttgggagataagggaaaatagtccttgcctgatgggctgcagtgaggattcaattaggcaatgtcccttagagctctggggagctgtgaaaccggtgatgccaggctgatgtctatgaaatgcactgggagtgaggaaagggtcacagatctccgcctgggtgttggaatatccagagaccgtgggaggctcccggcagcncccatgctagtgttctccaccaaagacagaggagacaggtgatgtgcataggagagctttgccttcctctctcacggaaccacaggctgtcagagccttngctccgcagcttccagtttgacaaccttcagagaaccatagtgatataggnagttnaaaaagnagttacttcgggcagatagttagggtattggaagtnccttggtaaggantttcccttttnattgaaaaagcagccccttgaattccc

SEQ ID NO: 256642 - DNA, 735 bp, Homo Sapiens
  misc_feature (627)..(627): n is a, c, g, or t
cacgtgctcccagaagacctggaattcaaaagaaatggagctattctttttctccctctttcataactggatgcagctgctcatactcaatcccatattcagcaagtgtgaagctggacgtgatgcaaaataaccgatgccctacaaaaagggcgcatctttaagagttttaatgccagtgcttaattcgaatgaggggattttaagtgtctgaagaggcattttctagggaccagtgggtgactgagtaactgaaatgctgctttcactccctaacaccatggatctggttgtgcataggatgtgggaggaggggctggcagggccgccttcagaggctgcagggcctcagcctcaggatgcatttaatgtatcctggccacagttgcagccaacggttcttgaaagctcggtaaggccctgcaacgcagagcctgcttatgtggatctatttatgggaacttcttaaaaggaccccagaatagctctttatctttcacaagagacacaaattctaattgagttaattatctgggcctttcactttggatgctctgaaacatctgttgatgttgtgtgaatgggtatatcaaaatgtttgccaggttgtattagccattgatagcnaaaactgatagtacttgcttgtgtttaaaatacatataccgagctcagcctgagttgtactacttctgggccttggacctatcaccccttgggctcagttctcattga

SEQ ID NO: 256643 - DNA, 869 bp, Homo Sapiens
  misc_feature (128)..(144): n is a, c, g, or t
gcgtgcctgtagtcccgagtagctgagattacaggcgcccgccaccacgcccagcatgctgatcccattttcaatgaagaattgcttccagttactttgtaactgccaggtcccagcagctggctttnnnnnnnnnnnnnnnnntgggctcattttacagtcaatttccaatgatgtctatcaaaatctggctgtggaagactggatccatgaccatatgaatctagaaggcaaaccaattctattcttttggcagaattctccctctgttgtaattggtaggcatcaaaatccttggcaggaatgtaacctgaatctaatgagagaagaaggtataaaactggctcggagaagaagtggaggaggaacagtctaccatgatatgggtaatatcaatttgactttctttacaaccaaaaaaaagtatgatagaatggaaaatctgaaattaattgtgagagctctgaatgctgtccaaccccagctggatgtgcaggctaccaaaagatttgaccttttacttgatggacagtttaaaatctcaggaacagcttctaagatcggccggactactgcctatcaccattgcactttattatgtagtactgatggggacgttcttgtcttctttgctaaagagcccttaccaagggatcaagagcaatgccactgctagcatacccttccttagtgaaaaaatcttttgggaaaaagatcccccctctggacctgtgaaagtactaattggaatgcctggtgcctaccagagtatgcctggcttatccatccaaattggataaatccacctttccacccttaataaaaaccccaaccggggatggaagaaacacctgggttttcccctgggc

SEQ ID NO: 256644 - DNA, 1230 bp, Homo Sapiens
  misc_feature (340)..(516): n is a, c, g, or t
  misc_feature (1055)..(1055): n is a, c, g, or t
cactaaagaaagttcacttgaacctctttatagcattgatactaggtgaacagaaattacctgactaataatttgtctaacatcatatatcagaattttattgtatatgatgaacaaaacttaaaattttttaaatttaatttttaaatactgtttcagagttctaaaaaggcagttttttaaaaaacttaagttgataaaaactgtaagaataatttagcagaaatagaaccagaatgtagaagagtagtcatgtaacagcagtaataacatacttcagcttccatataggaatagaagtggtagagccaaaagtgatttaggagaagttataaggtannnnnnnnnnnnnnnnnnnnnnnnnnnnnnnnnnnnnnnnnnnnnnnnnnnnnnnnnnnnnnnnnnnnnnnnnnnnnnnnnnnnnnnnnnnnnnnnnnnnnnnnnnnnnnnnnnnnnnnnnnnnnnnnnnnnnnnnnnnnnnnnnnnnnnnnnnnnnnnnnnnnnnnnnnnnnnnnnaacattgagtccacttaacacttaggtgttagaagacctaactttctgtaacaattaaccttatactttgtttgtcatcgaatatttgttgaatgcatgtcaggtaatggtcttgattgtgatagcttcaaggtggaacatactgtaatctccagatgctaggaagttagtctaataattcactgcagaaaattgattaagtggctgtccttttaattaagagtgtggagtcataaacttaagttcttcatatagtgacaagagtccttagagattgttattcaagttccttagaaattgttatttaggtataatatcatcttgtctttgactagagcttgaaaccttgttatctgattgtgtaccactccaaattccctgccttctgcaagttgaatgtcttgctgaatgtgtctaggggttcatcttcagtaatcgacattccactagtgccatagttaacttcatgacatgtagacattcaaaacttgagccttggatgttcctgtggacctgacagttaaaatataaaaacctangattcaattccaactttctttgtttgccttgggtgaataacttattttttggaaaataactttaagtggcttagacactgataaaattacgctgggttggtgacgctcatctcttttggcttaccttaagcctatttaatcttgaattaataaagtctaggaaaaaatgagtggg

SEQ ID NO: 256645 - DNA, 806 bp, Homo Sapiens
  misc_feature (33)..(33): n is a, c, g, or t
  misc_feature (540)..(581): n is a, c, g, or t
gatgtggagtagggccgagcgcggaagcaaggnggctgctggggtgtttgtcgcagcgggttttcctcggcggtttgcggagctgctaggatggagcaggttgcggagggagcaagggtgaccgcagtccctgtgtcagctgccgacagcactgaggagttggccgaagtcgaagaaggagttggagtagtgggcgaagataatgacgcagccgcgagaggagcggaggcctttggcgacagtgaggaggacggagaggatgtgttcgaggtggagaagatcctggacatgaagaccgaggggggtaaagttctttacaaagttcgctggaaaggctatacatcggatgatgatacctgggagcccgagattcacctggaggactgtaaagaagtgcttcttgaatttaggaagaaaattgcagagaacaaagccaaagcagtcaggaaggatattcagagactatccttaaataacgacatatttgaggcgaactctgatagcgatcagcaaagtgagacaaaagaagatacttccccnnnnnnnnnnnnnnnnnnnnnnnnnnnnnnnnnnnnnnnnnncccagatgatctgaaaaagaaaaaagcaaaggccgggaagctaaaagacaagtccaaaccagacctggagagctccttggaaagtttagtttttgatttaaggacaaagaaaagaatttctgaagccaaagaagaactaaaggagtccaaaaagcccaaaaaagatgaagtaaaagaaacaaaggaattaaagttaaaaagggtgaaataagagatttaaagacg

SEQ ID NO: 256646 - DNA, 877 bp, Homo Sapiens
ctggctggaatctctcagcctcacctgccagacaacaccccctccttcctcaccctgtctcctgcattctcctgaaaccttcatccacacaatgcctcccaacctcactggctactaccgctttgtctcgcagaagaacatggaggactacctgcaagccctaaacatcagcttggctgtgcggaagatcgcgctgctgctgaagccggacaaggagatcgaacaccagggcaaccacatgacggtgaggacgctcagcaccttccgaaactacactgtgcagtttgatgtgggagtgcagtttgaggaggacctcaggagcgtggacggacgaggggaggtccccaaccggggctggagacactggctggagggagagatgctgtatctggaactgactgcaagggatgcagtgtgcgagcaggtcttcaggaaggtcagatagccggagaggagccaagatccctccagacagcaccagctcacagacgctcttgttgtgcccccttcaagcccagattgtgcccaggtcagctgtcccttcctctggccacctttccctccctctgggtccctcctcacccctccccgtgttaatctgtaacttgcagcccccaggccaaagtcctttctcacactccactgcccaatagtgacctcacttccaggtcaaggtctggcgtcccaaatgaaagaagcaggcaaagggaaggagcccctgagaacaaccaatctccgctctctcctgtccatttgacctcttcttttccttctaagaaagaactaagctttgggcatttggcgattagtgaaaattctatcctgatggacttctggaaaactgtgactggggttcaagagtttaaacaggggctac

SEQ ID NO: 256647 - DNA, 500 bp, Homo Sapiens
ctggaatctctcagcctcacctgccagacaacaccccctccttcctcaccctgtctcctgcattctcctgaaaccttcatccacacaatgcctcccaacctcactggctactaccgctttgtctcgcagaagaacatggaggactacctgcaagccctaagcagcccccacagacatcagcttggctgtgcggaagatcgcgctgctgctgaagccggacaaggagatcgaacaccagggcaaccacatgacggtgaggacgctcagcaccttccgaaactacactgtgcagtttgatgtgggagtggagtttgaggaggacctcaggagcgtggacggacgaaaatgccaggctgcccttggcatgaattctccagccagagccatctcctgagctccagggcaatgttttcaactgcctacaaaatacagttggccctccatattcatgggttctgcatccacagcttcagcaaactgcaaatggaaaaatatttggg

SEQ ID NO: 256648 - DNA, 462 bp, Homo Sapiens
aaaacagcatctctcccctcccaacccaatgtctcccaagccccggttggggacctccccctttcctgccacacacacccaggtgctccctcctccccaggttaactatggtctggcattttcgtccgtccacgctcctgaggtcctcctcaaactccactcccacatcaaactgcacagtgtagtttcggaaggtgctgagcgtcctcaccgtcatgtggttgccctggtgttcgatctccttgtccggcttcagcagcagcgcgatcttccgcacagccaagctgatgtttagggcttgcaggtagtcctccatgttcttctgcgagacaaagcggtagtagccagtgaggttgggaggcattgtgtggatgaaggtttcaggagaatgcaggagacagggtgaggaaggagggggtgttgtctggcaggtgaggctgagagattccagcctgtgccgaa

SEQ ID NO: 256649 - DNA, 1683 bp, Homo Sapiens
  misc_feature (44)..(44): n is a, c, g, or t
  misc_feature (70)..(73): n is a, c, g, or t
  misc_feature (76)..(76): n is a, c, g, or t
  misc_feature (147)..(147): n is a, c, g, or t
  misc_feature (385)..(385): n is a, c, g, or t
  misc_feature (537)..(537): n is a, c, g, or t
  misc_feature (711)..(712): n is a, c, g, or t
aaggagctcacagcctgggggctgagaccccgaatgtgcagggngcggggaagaaaagaggtgaagggannnnggnaggcaatgcagatacaccgtggcccaagcagagggggtgcaaggcaggcacaggcagggggcctggggcgnatggggaggtggagaaccggcagccctgcctagacctgaggactgtagaccccacacgtttgaaggctgccctcccccaccaggatggcactgcccgggcaccctgtgggaggcccagctcctccacctgccctgagccgggtccagcctcacaaaggcccctccacccaggactcccaaccatgcagactcccggtggagggcaggaagctggggtctggggcccagccgggacgtngaggtggggcctatgagggagcagatgaagtgtgggtggccctgggaccctgggcaagtcccttaggaacttccaggatcccatagaagcccctgagccagctaagatgggaaggaagcagaacccaacgaagcaggaggggcctccaagangcctggcccctcaaacctgctctctgttggggaagctcaggagtagataggtgaaaagcagggggacccacctggggggagggggcagcagacagagcagccaggcgggcagcagagcagggacacgcacacacggctcaccaccagcaccccctttaataaaacatggggggnngtcatgtgacaggaagaagggggtgaaataggaccatttacaaccacagaaaaacctctgtacatgtctagcgcctggcagaggggggcagcagggcagcagcgggctggagccagccctatttgtagaggatatcgtagtgtccaggccggtagagaaggtagaccttgggctcggagccctcagggaagatgtgcggattggtggtgccgccctcgccgcggtccatgtactccacctggatggacacgctgagggcctgggccagcgcaatgatgtggatgtggtcgctctccttgcacatgggctccacctcctgctggcagaactccttgacagtccgtccaccctcgatgaagtgctcgaagaacttgctctcgcgctgcaggtagcccgaggtgagcagccgcaggtagaccacaaggtagtcggaggtgctctggtcattgaaggaggccagcaggtcggcgacagaggtctgcttctccacctgctcaatcaggtccatgaacgtgttgtggaaatcctcaattgtgaattcagtgaagccctgggacaccaggtcttccttgctcttggcagacacagccttgaaccgctgcaactccttgctgtcatccagcagtgcctccaagtgggagaatccgaaagcccgatagaaacagttgccgtcaggcctggtcttgcggatgtacgagtactttttgtggaggtccttgatcttctgttgatagatgttgtcatcttcagcatactccttgtataggaccgagagctccagccgctctgacaccagagggttctgcacagcaatctcttgctgaattcggtcctgctgagccatgatggcttcatcataggccagacagttaacaccttcggagtcgctgcccagcggctcctgcttctgctgctgaggttcctccgccgccatctttaaacagcgccgcactaccgaccgcttccgggtt

SEQ ID NO: 256650 - DNA, 965 bp, Homo Sapiens; identical to SEQ ID NO: 74845

SEQ ID NO: 256651 - DNA, 2015 bp, Homo Sapiens
acactattagaaaatgctctggaggtggcggggagttgttgatctgtgaggacagattgaaagcaactcccagggtggccttgtccacctccccatcgagaatatggctgccggcctctttgaagattgtggtctggcataaggagaggtgcaggcgcctggttctgagcaccttggaatttccagccgcacagcatctggtgccctcccctccaccctcacaaggagctgccatcctgtttggattttctgtttgtggaccagaaacaaacgtttttccaaaggattagcaaataggttgatttcctgtgtaacgctgctctggggcctcttcctcatcctggcagaaggagcctggagcccatgaggcagccagcactgtgcccttgctcagtcgtgctgtcccctccctctccctcagtctcttctccatgcccaagtcagtttccagccgctggtcttcatggcattcccagcacagccgggcaccaagaggcaaaacccaaggcctggcttggccgtgttaacgattgtacagacatttttttaaataactttgtgtaatacttttctggaatagtaagttcttgttgaactgtcacaggtgagcttctaggaacacaccaggtgtggttacttccactgggtgtgtccatggtcgtggtctgtgcttttgtaaacgaacagaacacttgaaccacctcccgaattgggtcatcggcttctttacgttgatacttaagagatttgcagctctctttcaaggaaacttcccctactgaaaggcataaaaaggttaaaaaagaaaatccgagagtcccaattccctgtataacagcattaaaataatctgcctgcctggaaagatgagaacactgttgcacaacccaaaatgtgtttttaatttgtgaaaaattaccatggtgagtcagacagtcattttaaacagctgaacagagactatcatcagcaaatagagctcagctttgtagctgcctttaaaatccttgtcccaaatccggtgagctctgcttgctgccgccgcgctcctgggtgatcactcagacgggtcagtgggaataacgggccaacaagacagctttttacatgtgtccaaaggatggcctttcgaaggccgtggaagtatttcactgttggaagaagtaaacaagaatgacattccagatgggaaatagaattctctctcttgcctttgaccaacatggtactaaggggtttcttctttcccaatgtatgtacgtgccctgctgggggccttactttatagaatgagagcatccgagcttccctaatgaatctggctagttctgtgtctggctgaggatacaggagtgggacatccactctcggatccctcagagcacagaaaccttcagctttgctgtctctgaagtatttcctccagtttccctgcgggcccctatgtttgagtttgatggctgctggatcctcactcaacgaaaactcggttggaaactgttccgcctggcagtccttttttgttgttttccatctcatttcccttccatctgaaagtggcattcagctgacttgctcatttagactgttcacggagtctgaatctgccaacgtggtgttggaggctccaccttgaaaagggccacagtcagggcaactttccccatacaggaaaacttgaaaattacatcaacagtctacgtcacagccaaattatatttcctttataccaaacaaaactatggagaactaaaagtacatcacacaaaacgtttatagtgttttgcatgtgacctatttcagtatttatataactagattagtgctttctagcaaacggttctgttaattagcgagtcactgttgattctgctgtggtggtaggttgataccgtgtaactaatcccgtggatgcctcctggttatttttgtccaaacgaagcagccgtggtagtagctgtctatgattcttgctcagcaaagtaaaataaatgttaaatatggactggaagaat

SEQ ID NO: 256652 - DNA, 944 bp, Homo Sapiens
  misc_feature (914)..(914): n is a, c, g, or t
ggcctgggtggcggctagtctgcatctgagtaacatggcggcggcggcggtagccaggctgtggtggcgcgggatcttgggggcctcggcgctgaccagggggactgggcgaccctccgttctgttgctgccggtgaggcgggagagcgccggggccgacacgcgccccactgtcagaccacggaatgatgtggcccacaagcagctctcagcttttggagagtatgtggctgaaatcttgcccaagtatgtccaacaagttcaggtgtcctgcttcaatgagttagaggtctgtatccatcctgatggcgtcatcccagtgctgactttcctcagggatcacaccaatgcacagttcaaatctctggttgacttgacagcagtggacgtcccaactcggcaaaaccgttttgagattgtctacaacctgttgtctctgcgcttcaactcacggatccgtgtgaagacctacacagatgagctgacgcccattgagtctgctgtctctgtgttcaaggcagccaactggtatgaaagggagatctgggacatgtttggagtcttctttgctaaccaccctgatctaagaaggatcctgacagattatggcttcgagggacatcctttccggaaagactttcctctatctggctatgttgagttacgttatgatgatgaagtgaagcgggtggtggcagagccggtggagttggcccaagagttccgcaaatttgacctgaacagcccctgggaggctttcccagtctatcgccaacccccggagagtctcaagcttgaagccggagacaagaagcctgatgccaagtagctccagggaacgcatgtggatcctagacagcgccttatctatgattgagtgtccgtgtaaataaattcctacttagactccgggnacccagccgagacaagagaaagatccttgt

SEQ ID NO: 256653 - DNA, 524 bp, Homo Sapiens
  misc_feature (426)..(426): n is a, c, g, or t
  misc_feature (437)..(437): n is a, c, g, or t
  misc_feature (458)..(458): n is a, c, g, or t
  misc_feature (480)..(480): n is a, c, g, or t
  misc_feature (490)..(490): n is a, c, g, or t
  misc_feature (504)..(504): n is a, c, g, or t
gagtatgtggctgaaatcttgcccaagtatgtccaacaagttcaggtgtcctgcttcaatgagttagaggtctgtatccatcctgatggcgtcatcccagtgctgactttcctcagggatcacaccaatgcacagttcaaatctctggttgacttgacagcagtggacgtcccaactcggcaaaaccgttttgagattgtctacaacctgttgtctctgcgcttcaactcacggatccgtgtgaagacctacacagatgagctgacgcccattgagtctgctgtctctgtgttcaagggcagccaactgggtatggaaaggggagatctgggggcatgtttgggagtcttctttggctaaaccaccctgatcttaaggaagggatcctggacagattatgggctttcggaggggacatcctttttncgggaaagganttttccctcttatcttggggntatgttttgagttaacgtttantgatggatgnaagttgaaagcggngttggttggccagacccgtt

SEQ ID NO: 256654 - DNA, 1351 bp, Homo Sapiens
  misc_feature (1232)..(1232): n is a, c, g, or t
tccactgacaaaaaaaatagctttgcttccaaatagcacaagtctttaaagtgacttttcccaacaataaatatagaaaatagcctttaacaagcgtcttttagcttggtcagggttgtatcatttgtttggaaagtacatccttcccctgcagtcagaagaccccagacagcctttccagttctcccgagtctttggtgcgcacagctgccggcgggaagtctcactggcggcagagccactaagtccctcctgacgggatccacaggaatcttctcgatgtaccaggagcctctgcccatcacaggagggcaggcccatgtagaacagactctaacaaacctgcagctggaaactggatcccttttaaaccagccgccaccacagctcggctcacccaccaggcgccgtccgtgaaggctctctctggccctcacggtcagccaggctgccggtcacaccgaaggggtctttggcgggtgaacctgctgcatgagctgcgggcgcttcaccctgggcttcctccgcttcggcctgctcttggccttgttgatttgtaccacaaagaaggccaggaccaccatggctcccaggaaggcaaagacaggaatggtctggcccacctcctggttgtagcggccaggcatgatccctccaggaatgtcccaggcgccgctctctccaggggacaagggcctcacttgagggcgattcgatcgaaagttgggtaacaccaccttgtccaggtcaatggagagtagcttctgatgtttccaaaggttactgggcgccgtctcgtttaaaggctgtggcttggcccaagacaagcgtggacaggctggtagaggccgaggttttgggtctcccaaatgggcctccagaaccttggagtaccgatgaagatggtttccttccatcctctctggagtgactgagcctgctccactgggagggcgctggcggttcccagagtgactgaggctaggcggtgtcaccccatacgatgtgtactggaggagggcatccagaagccaaaagcagtccttctgtcggtgactgtcatccaagcaattggagtccccatacagtacaatccggcctccaccctcagctggaatctgataaagtcccaaaatggggacgttttcaacaactgctgtttcctgctttaaaacctccaatccttggtccttgaaagtctgtgttatcacgacgccatcttctggaaactntgcgatgctgcaccctgacgcataatacatgtcatggttggccagggtgaactccccttcatacaggccatcgctgaaccccatgttccacacagacagcagctcattcagagctggga

SEQ ID NO: 256655 - DNA, 1012 bp, Homo Sapiens
agacaagccaagaaatatgtttctttattttcattcccatatagcagagatggaaccaggacagtgatgctggaaaagcctgcctcgatcaagtcatcacataagttaatgtcagaaaacctgtatttgaatttgactcctctatccttactctggaaaattggacatcttgacccagtggctgtgagggctaaattagatgatgcagaaagtgcttggcatgcagtagatatgcaaaacaataacttatgacactctccaagcaggggaaaaaagtcttcatgccttctaactaataatacaaacgtatgcagtgtctttccaccctggcttgagtttaacaaatacaaattgaatagaaaaaattagtcaaactccataaacaagtttataacaaaaattctagtggctacaacactcaataatgttttcacatcgtttgtgaatccattccctagatgcatttaaagatgtaggagaaactgtttcagatcctctgggaggacgagtttggttatcttatgatgctgctggattccaaaacacttccgaattctaaggcggcaataactgcatcaaagaagggggcccttctctctccaaaaaagagctgggccaaagggctctctggaggcaccagctccacaggacgtttgccttcagcattcttggcctgggtgtccgctcccaaaatcccatgagcaggcaggccagctcttcactggctgtccctggccactgcatgaagtggggaatcctgacctttcccttggttcacgtccgctcctgactccagaagcttcttgacacaggctctctgttggttttcacaagccaaatagagtggagtgcccaggtggctgatcttatggtcaatgttgcccccataagctataagagagttgacacactccacgtggcctctcctagcagcttcatggatgggggatgccagatcactctcaggttgaacgctggctccgtgctgagctccatgctttaataaaatctt

SEQ ID NO: 256656 - DNA, 431 bp, Homo Sapiens
  misc_feature (161)..(161): n is a, c, g, or t
atttgtattgacctgtatgtctacaccaagctagaggaacagagaataacccaaagtataattcagggtttgctcctgaagagcactttgtttcattcacattttcctaataggaaaatgtggcttgcattgacaagtaaaaaatgagacctttattaaanctaaagactgggtacagcagggtagtgccctggcaggcagtctgtctttcccatcagtcaaggtgagtcccagaaactttgcctttctatagatcaccatagattcccaaagcatgttgccttaatttcttccaactttgaagctcacatacctagaggcaggcaaaaatgcagctgtggttttacttgaactgcttttctattcttggtttttgagacagaatatacatagtagatgaaattacatatgcaaaattctatagcctatga

SEQ ID NO: 256657 - DNA, 417 bp, Homo Sapiens
agaaatagctggaaagactggagtccgcaggagggcatggaaggccatgtgattcaccgatgggtgccttgcagcagagatccaggtaccagatcccacatcgacaaggcagtgcttctggtccagattgatgataaatatgtgactgtaattgaaactggggtactagaacttggggctgaagtgtgagccagtgtttattataaagacatttctttttccctctcaattccaaggcattggaaaaagagaggaacaagcagaagatgcctgcaggtatcactttgatcctatgtgggagcgactgaaaatagaatgagcttggttaagcacctctcctttgcccttcaccctgactcctgtcactgtctccatccccaaataaagctgaaatatttttttaagttagctgccgag

SEQ ID NO: 256658 - DNA, 1081 bp, Homo Sapiens
tgcctggaatggggcaggctgagcagtcacacatgcatagaggcacgctgagaacctggaggggagactgcagagtgccttccctgatgctgcagccggaagtgatccttccctccacctggcccctgggacactgtgctctgcagtgtgcagggcctgatggcactgctagattgctccttcagctcagggccacagcttaaacagctttacctttcccctcagcacctgtcccactatcttgcacacaggtgctctaaccatgtttattgaacaaaggagggaaactgatttcactttcacttgttcattatcattccaatttttatgtgaaaatggcacaacccatttggggtaccctcaccccaaaataaaagcccaagtctacctttgactggtaccaccttttttgtggtttcgttggtgagaaacctttatctttttcatacctttctattctcaatcacttctccaaaagtgtgtctttccagctctgatttactcaaaacacaagcattactgtttagagattctagcccatgggttatcaggctagatattacctctcctgttcacttagttatactttattattgctaacaggctggggaggcagaatgactctgtcaccactaggagccattagggcttcttccctggaggactgcctgcttgctttctggggacactagccctcatttcccttctgtggtacagtggggcaaattatttgtattaagcaaacatttatgggaaacaacccgctcccgaaaacggagcccccaaagtaaagcacaaccctgaaagattatgaactatgaattgtctctggtagagataaatttctgcaaacatatctcagtcttccctctgtttctctggtgattaagaagttcctttttggtaaggaaaaggatttttaaccatagagttaggcatcatggaaattcaaaccagatttcttaatacctggtcttcctcaaagagaaataataacagtaatagtggtgctgggaacaatatggcagattattgaatgaaattgattaacttgaataaaatgctgtgaattttctctaat

SEQ ID NO: 256659 - DNA, 2301 bp, Homo Sapiens
  misc_feature (621)..(621): n is a, c, g, or t
  misc_feature (1520)..(1520): n is a, c, g, or t
  misc_feature (1530)..(1530): n is a, c, g, or t
taataaattttattttggtaattgtaaaaagaaaaatcaggaccaaaactaaaggcaacttaaaaagttcaaatatataatccttatgtgatagagatttataatttccaggccctctctggggaaggaatgcccaaagggcaaaagggaaggcaacaatgccatcacacaattcagtcaatcagaagagaagctggtaggagagttcaacagggcatgaagaaagggagagaacagcaatagttctgccatacagaactcagtccatcttgaggttaacatagatataccggatgaactttagggaagaaaaaaaggagatggtgcccagcatgaggaagaagacataaccagtgagtaaggagtagccgaagaactctactgtctgtactgccccagacatgttggagcgccgggcataatagaaaactgagtagaggaagatgaagaggccggtggagccaacactcagcacagatcgccaccaccagcggtaatcctccccagacaactggaagtagggtgagtgcaatggagatgcaagccccccacacttcagcaggatggcgaagacaaagaagaggatgccgtacaaagtgtactgctccccgacccccatanctgtggcaaagatgtagtacagctccacagagatggcactgaaaggcaggaagcctccaacagtcatgtggatgacagtagacttgtaccagggctggggtggaatctcccgggcgatgttcttggtgcgacagggtgcatcaaaggggctggcgttgttcttcccaaagatgcctccaatgacagtgaggggaaagcccaccagcagccaaaccgtcagaagcagcaggatggttgtggctggcagagcctgtgtcgaaccattggcccaatgcactgagttcaccacactccacgtcaggaagaaaggcacagagaagagactggtggtgagaatgatgttccacacccaacgctcgcctccaatctgccggtagaagtggctggacacgtagccagagatgcagcaggtcagggcatacaacaagatggctgctgagttaatggccccatgacggtgcacattgaacatgcccagcagtgccatgacaataatgccagtgccaagggccaggaactgggcacccacgccaagcacagcacagagcagaccacggtatggggggaagcggaagacatctgtatggataattttccagccattgtcaccctggtcaaagtcatcaccagaacctgcagaggtggtctcctcatctaagttgtaccgagccaggtcattccgaagcacacgcattagaatgacagccacaaaacccaccagtaaaaacacaagcaccatggagttgatgatggacaaccaatggatttccagtgttcgaggaaagaaaccaccatcgtcaccacggcgcctgtcactccgacgctccactgaagtctcagaccagcgcacgctataagtgtgggtaaggcctaggaactcgtcaggtcgtaacccatcncaagctgtgngggcttgacgtcccgcactgaaacattggcaaatataattcggtctccatggaattctaggtggaagtccaaatgggtccagagtcctatcttgtggctgtgtggcaggaaaccactctcctccatgtagcccacaaagccccggattggcaagtcatctaccacaaattcaaagtagtacagttcttcaatggcctggcgcagctgctccacctgtgcagaactgagctgcatgtggcacagaattctcttctccacgttttcccgaaagcggatctcatacaaagactcagccattcggtccccatccagcacttcacccaggctaaggcttttgtgacgtatcttctcagggcagcagactggaagctgatagtagtggtaagtttcctgagggttatggtagggtcccactttgttgacatacagaataacagggtcgccggccttgtagtgtgtcacgccttccacccctggcccatggcctgtgcccagcaacagtatcaggattggcaaccactggcagctccaacttcgagggttccctacgactgtcatccttaaggcagtggaaccgcgcgggaagggctggccgaggcggcgccagcggccttcgcgcccccgtagctgcccttgggctcctgctggggtctctcccacagcggcgcggtagcggcgggttggagaggacctgccgaccgacttctacggggttgcccgttgctgcgcctgacagcggcggctgcggctacaccgcgctggacaccgctc

SEQ ID NO: 256660 - DNA, 894 bp, Homo Sapiens
ggacctgaaagggtggaggtgaaggcagtcgactctgcagggacatccaggagcatgagtctgccgttagagtggcaggctgcttcagccccctccccttttggtcctggatgtaagtgggtgcccttagagatgtagctcctagtgttgaccctccctccgggggcccatccctgcagtgccattcttcctgacgtggagtgtggtgaactcagtgcattgggccaatggttcgacacaggctctgccagccacaaccatcctgctgcttctgacggtttggctgctggtgggctttcccctcactgtcattggaggcatctttgggaagaacaaccgccagcccctttgatgcaccctgtcgcaccaagaacatcgcccgggagattccaccccagcccctggtacaagtctactgtcatccacatgactgttggaggcttcctgcctttcaggtatcctccctttattccatggctattactgtcaggttcctgacctcaatttttcctgtccctactcatccagtaccctaacccaacccgttgatccctggttcagtggtaccattcagagatcattaaatggttcctcctatccccaagcaggactgagcttgaatgatatgagagtgtctcacttataaagctctccggagacatttcccccttcaccttcctggtttctgactttaatgcctatggacatcatgtggggtttaaagcccatttgatgacccatttactttgttgaatacctctttgtgccagggcaagaaataagttggaataaaatggacaagatccctgccctcaatctatttagggaaagatattcttgaaatggagaccggcctaatcctaaggcaaaaaatcccccatggaacccaggaaa

SEQ ID NO: 256661 - DNA, 395 bp, Homo Sapiens
  misc_feature (352)..(352): n is a, c, g, or t
ctagaagagacacaggtgaggcctaacttgggctttccgctaccgtcctgcaggcattattgtcatggcactgctgggcatgttcaatgtgcaccgtcatggggccattaactcagcagccatcttgttgtatgccctgacctgctgcatctctggctacgtgtccagccacttctaccggcagattgggaggcgagcgttgggtgtgggaacatcattctcaccaccagtctcttctctgggtgaggactttcctttccctgggtgggcctttctgggacttagggaatgaaggaacacattgtgggctgggtcacagtgggcttcacacctgttaattcctagcactttnggggagaccgagggccggaggattcaatttgaggcccaaaagt

SEQ ID NO: 256662 - DNA, 660 bp, Homo Sapiens
  misc_feature (40)..(40): n is a, c, g, or t
  misc_feature (131)..(131): n is a, c, g, or t
  misc_feature (179)..(179): n is a, c, g, or t
gtcccggagtagctggactagggggcatcccaccacatcngacttattatggttttgggttgaaatacaccggtggtttctgaactaccatttagttaaaagaggtttgaaaagaagggccccaaaacggntttaagagtaacacccttaatcactaaataaatttatactgcccaaangattaagtttgaatttcattcaattacagtaacagcagaagtgcagtaaagcatttacacttatgggcattactactttattattaggaaagacaatccattttcctcaaaataaacataccaactgcaaaccaagagtttgccaacagtacacacccaacagctaaaaataccataattggcaataggcttccccattttgacaaggctttcagtgtatgttgtaattccaatgcttcatatcaagctggttcaaacaagattctttcaacacactaatatttcaattaaaaaggcatgttcctttgataagatctatttttcaactgtccactaaatttcttaatggctatctctttagagactcttaattaaacaagttatgattagagtggctggcgttaatattgccaatgcaaacactgaccttttcaggaagagaaattgaagagggttataagaattctcaaaatagggccgg

SEQ ID NO: 256663 - DNA, 1140 bp, Homo Sapiens
  misc_feature (255)..(255): n is a, c, g, or t
  misc_feature (269)..(269): n is a, c, g, or t
  misc_feature (390)..(390): n is a, c, g, or t
  misc_feature (1094)..(1094): n is a, c, g, or t
gaatgtgggaaagagttcagtcggaaacacacacttgttctgcaccaacgaactcacactggagaaaggccttatgagtgcagtgaatgtgggaaggcctttagccaaagctcccaccttaatgtacactggagaattcacagcagtgattatgagtgtagcagatgtggtaaagctttcagctgcatctccaaactcattcagcaccagaaagttaactctggagaaaagccttatgagtgcagcaagtgcggngaaagccttcactncaaagacccaacctcatcaggcactggaaagcccacactggggaaaaggccttatgtgtgtagtgagtgcgggagagaatttcatccggaaacagacacttgttctggcaccagagggttncatgctggagaaaagctttaagagtgtagcaaatgtgggggaaagtcttaggccaatgcccccgacttactatatggtggggaactagcagtagttaatgagtgcagcagatgcaggaaagcccttcccctggaggctgaaccttacccgccattgggaatttcacaccggacacaggccttagcagtctaagcaatgtgctgtctctgttcagcccaacagctcaccctagagtggaactctgggagcagccattgggagggaaccatcagtaagaagtgaaacttcatagatatggacattcccactggggaaaatccctgggagtgccaagtatgtgagaagctttcagcagctgggttgcactttttaaatggctattggcctttgctggggcaggagccatctgctcctaccatctggcagaatcatactgcgtttaccatttaccccagcatgcttgtgacgggcagacctctcttctctccccagtccctaaaaggtgttgtgagtggtctcacagcccactaagggtcttaatttcctctcttttgatgtaaatggcatggaaataatcagctttgttcaagaggacacagaaggattctgcaaatagcctgcagagacttacctgtgttgattgatttcatatgatgctcgttatggatatatccaatatccaagtcacccagctcttgaactgnctgcttcacattgctcatgataataaaggcctgttctttaagcccc

SEQ ID NO: 256664 - DNA, 787 bp, Homo Sapiens
  misc_feature (656)..(656): n is a, c, g, or t
  misc_feature (659)..(659): n is a, c, g, or t
ctctagccatcgtctgccctttcaaatatctggtctacatgaaaagccaaagaggaaaggccaaaacataaacaaaaggaattactacacaaggcatgaggtcaaaagcttgagtacagtgtcccctttagatcacgggagaaaggcgtccacacagagcctttagcaggaatttccactctgaggcttcagaacatgctgaagatggggctctgagggtgccactaccatcctggaggccaccaagtggggtggaaacagtgaagagcaggtctcacatgcccgaagaccaccagccaactacacattggtggccctggtggagcatggctgggcgacagcgtccatccccaacactgagccactcctgtcctggatgacttcctgcttaggtccgtcacatttcagaagagagctggctttctggaagcctacgtttcccattcatcacagaacacgacagagtgcacacatcctggtatccttggtcttcaaaggccatttccagcagaccctctaacccaggcttgttctgcaggaagtgaaaagggacaaatgaagatttgaggggcagcctgcagctacttggcacaggggaaccaaatggcaagggagaaggctccaccagagctgccatgctgccgtagcaggccagnacnacagcatggctgtgcacctgtgtgtgctcagcttccagaagctgtcactgaccatcccgaaggcagatccagaagataggagggtgacagcacggctggagagcactgatgtcaacgctgtgccgaat

SEQ ID NO: 256665 - DNA, 599 bp, Homo Sapiens
  misc_feature (507)..(507): n is a, c, g, or t
ctcaagcgatcccactttaccctcccagagtgctgggacaacaggcatgagctaccaagcctggcctttagaccacacttttgaaaatagagattgtgtccttcttcactgtagtagcccagtatcaagtacatagtaggtatacaaaaacatttgttcaaagaaaaaggaagcaggcagggagataaaaatccccctggagtaaataacattgttaagtgtttgccttagccttatgttggtggagcagtttttctgtttaccatttattttattaagtttgttataacttaagctgttgattttagggcatggccattatgtttattatatattattacagatagactatttgtctgggtttatattatcaataaaaggattataattgccaagataatatattgtccttaataagaaatctccttttatttatcaaagcatggaaagagaagtttagaggtcatggttagtagaaagaaggaagtgtgtgtcaatagataattntctattgacacacacttgttgataattaaaatagatcatttcaatctggctgctgggactactaaagaaacttgactccaagcatttggccc

SEQ ID NO: 256666 - DNA, 529 bp, Homo Sapiens
aaaggactccatagtttatttttatggcaaaagtcttattccacacagttttaagtgtgacattagaaatcaaagtttgaggttatagcacaaacgaagtgtggacttttatatttagggaaaaaaaccaacaaaacagttctgctcatttacaaatgagtcaattagacaaacaaagcagcaacttctgaagcaggactgtctatacagcaaggacccttaagaagcaataaaggtacatacaatgaatctgtatacagaaattttattcaattttaaaagaaaatgaggactttagacaaagctttaccctataacaaagcaaatctgtccagctttaaaccaaattctgagagtagccaacttctattttcagcagctggcaagagcaccctcaatgagttctactgacatttctattttcttcatcccatatggtataaaacaaaaccaatctagactccttgataagctttatgtggtcatttgagttttacaaatggtttctctaatggtatgccaaaatcat

SEQ ID NO: 256667 - DNA, 294 bp, Homo Sapiens
tcaggtgatctgcccaccttggccacccgaagtgctgaggcatgagccacgcccagccgagtatctggctttttaatattctgtatgatatgaagtagaatgtatgaacaaagcacttctgcatgtcatagtatgatagttgtctggaagaaaagcacttctacagttgtttgagttgcaatttgaatgactttttttcatggaacatttttttacttgaaaatacagacaagctgtggttattcaggtttgaatatatggcagacatattctcagaagtaatgtaataagctc

SEQ ID NO: 256668 - DNA, 1230 bp, Homo Sapiens
  misc_feature (1150)..(1150): n is a, c, g, or t
  misc_feature (1157)..(1157): n is a, c, g, or t
  misc_feature (1171)..(1172): n is a, c, g, or t
ggcctgggtggcgaattcggcacgagggcaggagactgcctccagtcacgagcagcctgcctctggactgatgcagcagacctttggccaacagaagctctatcaagtgccaaacccacaggctgctccccgagacaccatctaccaagtgccaccttcctaccaaaatcagggaatttaccaagtccccactggccacggcacccaagaacaagaggtatatcaggtgccaccatcagtgcagagaagcattgggggaaccagtgggccccacgtgggtaaaaaggtgataacccccgtgaggacaggccatggctacgtatacgagtacccatccagataccaaaaggacgtctatgatatccctccttctcataccactcaaggggtatacgacatccctccctcatcagcaaaaggccctgtgttttcagttccagtgggagagataaaacctcaaggggtgtatgacatcccgcctacaaaaggggtatatgccattccgccctctgcttgccgggatgaagcagggcttagggaaaaagactatgacttcccccctcccatgagacaagctggaaggccggacctcagaccggagggggtttatgacattcctccaacctgcaccaagccagcagggaaggaccttcatgtaaaatacaactgtgacattccaggagctgcagaaccggtggctcgaaggcaccagagcctgtccccgaatcacccacccccgcaactcggacagtcagtgggctctcagaacgacgcatccccccgaggcgttcagtttcttgagccaccagcagaaaccagtgagaaagcaaacccccaggaaagggatggtgtttaatgatgtccctctgcataacccgccagatgctaaaggctctccgggacttggtggatggggatcaaccgaatgcctttctccagtacaggcagcaccccggaataacatgtccacgttcttccacctcctccaaggaatcctcactgtcagcctccccagctcaggaccaggcccttgagatgggtgtctccagcctaatggcactggtcactaccgactggcggtgttacggatatatggaaagacacatcaatgaaatacgcactttgtcaagggagctgttgcaaatgctgnctgcctnccggactcatcctnncacacagggatgaagcggagctgcaacgagtcgaagacttccaccagatcctgagtca

SEQ ID NO: 256669 - DNA, 485 bp, Homo Sapiens
  misc_feature (63)..(182): n is a, c, g, or t
gtgggccgcccccgctggaagtggaagaggctgggaggattatggcccgtctcacaggtcacnnnnnnnnnnnnnnnnnnnnnnnnnnnnnnnnnnnnnnnnnnnnnnnnnnnnnnnnnnnnnnnnnnnnnnnnnnnnnnnnnnnnnnnnnnnnnnnnnnnnnnnnnnnnnnnnnnnnnnnngccctccgcacctccatctaagccttgggactccttcctgccgaagccccgagcccaaaaacgggaggttaccgggtggaagccccggcacccaaggcgtggtttcattcccaaacctgccacctcactcatacaagcaacaaaaggacacacagatggagactgcagcctcagtttcctcagctgtaaaatgcgctgaaccacagggccttcctccctgtaccactcagctcgggttccgtaacaaagtgccacagacaggtggtttaaaacctcacagacctggccgggcacagtggctca

SEQ ID NO: 256670 - DNA, 1821 bp, Homo Sapiens
cccaaacaataccctcttccgctaaggggcgaccctaccccaaccaacgaggcctgcgtggcgctcgggtcggcttcggtcgctaccgctcccgctctgccacccccgccaaccgccgctcgggcctccgtcgctgccgcgtcgctttctcgctccttggatcgcacatcctcccagatgcagcgccgggacgaccccgccgcgcgcatgagccggtcttcgggccgtagcggctccatggacccctccggtgcccacccctcggtgcgtcagacgccgtctcggcagccgccgctgcctcaccggtcccggggaggcggagggggatcccgcgggggcgcccgggcctcgcccgccacgcagccgccaccgctgctgccgccctcggccacgggtcccgacgcgacagtgggcgggccagcgccgaccccgctgctgcccccctcggccacagcctcggtcaagatggagccagagaacaagtacctgcccgaactcatgggccgagaaggactcgctcgacccgtccttcactcacgccatgcagctgctgacggcagaaattgagaacatttagaaaggagactcaaaaaaggatgatgaggagaattacttggatttattttctcataagaacatgaaactgaaagagcgagtgctgatacctgtcaagcagtatcccaagttcaattttgtggggaagattcttggaccacaagggaatacaatcaaaagactgcaggaagagactggtgcaaagatctctgtattgggaaagggctcaatgagagacaaagccaaggaggaagagctgcgcaaaggtggagaccccaaatatgcccacttgaatatggatctgcatgtcttcattgaagtctttggacccccatgtgaggcttatgctcttatggcccatgccatggaggaagtcaagaaatttctagtaccggatatgatggatgatatctgtcaggagcaatttctagagctgtcctacttgaatggagtacctgaaccctctcgtggacgtggggtgccagtgagaggccggggagctgcacctcctccaccacctgttcccaggggccgtggtgttggaccacctcggggggctttggtacgtggtacaccagtaaggggagccatcaccagaggtgccactgtgactcgaggcgtgccacccccacctactgtgaggggtgctccagcaccaagagcacggacagcgggcatccagaggatacctttgcctccacctcctgcaccagaaacatatgaagaatatggatatgatgatacatacgcagaacaaagttacgaaggctacgaaggctattacagccagagtcaaggggactcagaatattatgactatggacatggggaggttcaagattcttatgaagcttatggccaggacgactggaatgggaccaggccgtcgctgaaggcccctcctgctaggccagtgaagggagcatacagagagcacccatatggacgttattaaaaacaaacatgaggggaaaatatcagttatgagcaaagttgttactgatttcttgtatctcccaggattcctgttgctttacccacaacagacaagtaattgtctaagtgtttttcttcgtggtccccttcttctccccaccttattccattcttaactctgcattctggcttctgtatgtagtattttaaaatgagttaaaatagatttaggaatattgaattaattttttaagtgtgtagatgcttttttctttgttgtttaaatataaacagaagtgtaccttttataataaaaaaaagaagttgagt

SEQ ID NO: 256671 - DNA, 1020 bp, Homo Sapiens
  misc_feature (825)..(854): n is a, c, g, or t
ggccggatccccttgttgaggtttgtcctgccattatgtctcgttggcacagtcttgtctgacatggggcgctaaccattggttatgaacgcgagggtttaatccttgatgagcgtccttaagtcagctaggggagaaactgatcactgggacatttggagagtgcccctgccacttaggatcacgtttggcccagcgcccgaggacctgtcctgggaggcggatctcaaggggcgaaagacgtgtccgtgtggaatacggagaatgtaagtgataggacatgggctgaaagattttcatggctgaaaaactcggatcgaactctattcaggagggccttccctccgcaccaccatcagaccttttcgaaacctactccctccctctaagtatctctcgacacagtattctggggctagatttcaaaaacccaacgtaatggaaaagtcaggttttacacagcctaattttgttgttttttttgtatatccatttaacgttaaaaattgcatcaactatttaattcatgaggatctttcatattaaaatttaaccttaagattcaaccgccatgtgcttttataaaggaaacattttttagagacgtctgagctcacttttacatggtggtgcctactgccgttaatgtttgtgattttaaatcttaaacagccctgaattttgaaatgtagcctagtttgggattctgcaactacaactttacgggatgcctcaaatcaaaactaagagaaacttaacaagcctttacttcaggaacctttaaggcaaggcaatgtcatttttgaaactaacaggtttgtgtgnnnnnnnnnnnnnnnnnnnnnnnnnnnnnnattataaaaggtacacttctgttatatttaaacacaaagaaaaaagcatctacacacttaaaaaaattacccacgcgtccgcgacgcgtgggtcgacgatatcccgagaattccgaccgtaccagcctgctttataaaaatagcgggaggctttgttcatataccc

SEQ ID NO: 256672 - DNA, 898 bp, Homo Sapiens
  misc_feature (797)..(797): n is a, c, g, or t
gccgtgaatcccagacgaggcattgggcctttccacgcccctgggtggcggcttcctgtggtgtttgtggacgtcctctgcctgtgccctgaatccgctcctgaggctaagcgctcccaacgagaagggtccacgggaagccctcacctctgtaaacacaccctgggccagcgctcgcatccgaggggagccgccggatgtggaagaagactcggctttcctgcagccatttagtgccgccccatgctaggttatttgacattgtgcagtgtagagttgccttaaagtgcgtgatctgccagtgctttcttcaagtcacccttgccccgattcctcatgtttgcgctccccagggttgctcaagtggaaattttgtcagctgtttagccttttcgtacttggcgtgatgtcaacttcacttctaatctgcaaaagcagaagctgtttcctagtttacctcgcgtgtgtttacctatatggagtagctcgcagagatcacagaaatgcttgcagcctaaggcagggttttcagaccgtgggtcccagcccatttagtaaaatgggaaatcaattagcaagtggtcaccagcattacacagcaatgaagcagaataaagtaggccagaatgcatcatgtagtaaaggcaaatactgttttgtgaaaccttttcacccatacatctaaatgtgagaactgggttgcaatgccaagaacatttccttggctggcgaagttgtgaagccaaaataaaggtggaaaaccactaactaacagcattctgttcttgatctggagnccccaccccccatgtagcccggcgcgtccctccccccgaattgcacgccatctctaccgcattaaatactcgctcgcatgtatatcgaggcagacacacga

SEQ ID NO: 256673 - DNA, 659 bp, Homo Sapiens
gggggaatattctgtgatgctctgactcccctagtctgtagacggaattggcatacggtctaatttgtgtagtaagcacctttgttcatactagtagtgactgtattcttgattcagcctgatagctaccatgctgctgtcaaaaccaaccagaggggagcttgttcttctgctgtagtgtgcagtgactggcctcacccaggactttgatgtgagaatgagcactttcctctatcaggaaatttcaagtgtttcctgttattcgtagctcaatgtaatgcctcagttcattttcagttgtttgattatatgtgactaatatgtattttttattcaaacaagacttctgtacatgtttcttcaaaacagtttattaactgtcttcagtcttggattacatcaagtttataattttggcaaattgttaagacactgtgaagtcagcgttaaccatgtgcatacaacttaaggaattttttcctcctcatgtaaattttacttttcatgcttatatagtttcaacttttatcttcatagtaatttctcatctactcataataccaaaagttaagtcatgctgttttgtgtgctctcttgctaaagaccgcagagaccatacctgttgtcaaagagggtgtaataaactggtaatataatca

SEQ ID NO: 256674 - DNA, 354 bp, Homo Sapiens
gatccagttaagaaatcaatgatagaagctataattgtgttgagcatgcaatgtgtaccagatgctaagctgtacactttcagatgcatttcctaaatcagctaaatattaccaataagtaggtatcagtatccctaatccatagtcagcaaatgatggagtagaaaggttcattaaaattggaatatctcagaagtcaagatctctatgtgaaataggagacaaatcatatgttccaacagcattaggaatcaagtagtgaaaatggcaaagctcccatattgaatgacaaagtgattcgtgacagataaaacaagaaaaaaaatattcagagtgcatggtaattattgtatg

SEQ ID NO: 256675 - DNA, 898 bp, Homo Sapiens
  misc_feature (859)..(872): n is a, c, g, or t
  misc_feature (898)..(898): n is a, c, g, or t
ttttccaagttgacatgtgtatttattgcacaaatatcccctagaactgggaggttattataatacaagtgtacatttgagaaatgtatacagaacaagaaacagctatgtacatatccaacatctaagtaacttagaaaaagcagaacaatctcataagacatctaccagaagtaggcattatgtaaaatctgtttttttaagtgatcatccccagagtatgccaattggaacaaaacaaaatctgtactagtatgtttttattgcacttaacattttcaaactcaaaattaagacatattaataaaagccagaaatatttaaaatcaaaccaattagtttatatacaagaaaaaattagttttaattctataatgtaaaagatcccttttttatttcctgtttcaataaacaggttttttttgatatgtaacaactgtctgtaccataacttgtaaaaattatttagaacaagccaaaactcttttcacattcatcataatgaccacactttaaagtagcagcagctcattccttgggctttgcgtaaggaaagaatgactatggtgaaggtaatagaaattatagaaggattaggaattacaaaactcaggaatgggaagcagtggggaggaacaaaacagtaactcaggaatcctataaggattaatgattctttaagaaactataggtcatttccttcccagcaaagcttagctttaggaacaacaatagcatgagccacccacttattgaggactagaatttctaaacggtaattaaacattttaaataaagaacagtttgatggttaaggagacacccagacattatccaagtgctatacagagctacaatnnnnnnnnnnnnnngtacaaggctgggcacaaggtgtcan

SEQ ID NO: 256676 - DNA, 665 bp, Homo Sapiens
ccatttgcatctgaaccttcactaggtcagttggattggctaaaaactggccaataacaccagccatcatccctccaatgactgatttccaaaggggataatgctcatcttcacttttgccaaacacaacctctcggagatgttcatatcgtgaccattcgacctccagaatacactgggtaaaaaagatcattaaaaaggtaactttggctatatgtatctatatgcttatgtatgtataaaataagaggacattccgacatggcctagtcaatctctctagctgtgtctttgtctcatggggccgcagactctgcccttccccacacactgtctgatctttctagaatgaattctcccttctctgctttactaacatctccttgtctttcaggactcaactcaaaaacatgtttttcagaaactgctctctgacctttttatcatattgattagaaattaactcttcttgcttatctttccatcagaccatgagcttctccaggcaggctctatgtgtttgtttttacttaccccagatgccctagtacataccttggtacgcagcaggcattttcattaaataaagatacataatttcattggagaatttattgtaatttttcagctaagcatcaaaacgtatgaaatgaatcttagctgta

SEQ ID NO: 256677 - DNA, 1363 bp, Homo Sapiens
  misc_feature (979)..(1012): n is a, c, g, or t
  misc_feature (1275)..(1288): n is a, c, g, or t
  misc_feature (1341)..(1341): n is a, c, g, or t
  misc_feature (1353)..(1353): n is a, c, g, or t
  misc_feature (1355)..(1355): n is a, c, g, or t
  misc_feature (1361)..(1361): n is a, c, g, or t
taaatagttaaaaagacgaggaaaaaattaaaaagatgaggttattgatctcaggaattgtatttgccaagtgagaaggaaaaaatattcacaaaggcttgtacatactttgatcctgaggaacacctctggtgtcttcatgtgccacatagtcttcctcactgactgtctgcctttgcaaggcaaggctctccggtaggcctcgagatgaaataacaagtcctttatttcactcagcctgccaggagtggagaaggaatggctagggagtcctagccccaggggcttcatggcaatacggaccccagatgtctccctggagctctgccaggatccattcaaggccaagaaagtatgattgggagaggaggggtggagatgtagattcctaacaattctgtgacccagcatacatgtatgctctttaggctcttaagcatccttatttttccaaatataatatccaacaatcccaagtgtagtaaaaacccaagggtttctcctgccacatccactcacttcaaactctgattttaaacactggcaatatccagtcagagcctccaagctgagctctagaaagagaaagctgcaaaaaacctgtgcaacaaaacttgcactcatattactgacaagggtagatataaaacagcgcattcttttccatgacactgaagagcaaagaagagtgtaacttgggggcaataagaaattggaggtcaccacctcccaaatcctacatgaggtctatttggaaaagacctccttttttaattcaaaaatccttcaacctccaccattctttcataaagcttcacattctcttggtgaagcccactgttaaaatgcacaggcgttacctggaaaaggaaacacatagccttaacaatattcttctgtactgaactgaagagtgagaaagagtctatggagctataatacggtagtgtatgaatctggtactcaaggaaagtctgtnnnnnnnnnnnnnnnnnnnnnnnnnnnnnnnnnngtgggtgaacgaataaatgagtggataaatgaggggtcagttttgagagtgagagaaacatggaaattagactcaaatcccaaggcaccacatggaatagttccaggaatagttctgcaaaagtttccctgatgagctataagcagcaaaaatttagtgagtgttcaaactgaaaggaggcctggaattgtggctttaatttggagggaaaaagggagtccaaaattcccagggcttatttgttgatatctatctagggctgnnnnnnnnnnnnnntagccacaaatccaaaatgattgtgcagtcacatggtacccactgcccattcnttgaccagtgtncntcatanaa

SEQ ID NO: 256678 - DNA, 1522 bp, Homo Sapiens
  misc_feature (116)..(124): n is a, c, g, or t
  misc_feature (131)..(162): n is a, c, g, or t
  misc_feature (182)..(196): n is a, c, g, or t
  misc_feature (279)..(310): n is a, c, g, or t
  misc_feature (357)..(449): n is a, c, g, or t
  misc_feature (492)..(504): n is a, c, g, or t
  misc_feature (515)..(516): n is a, c, g, or t
  misc_feature (519)..(676): n is a, c, g, or t
  misc_feature (1034)..(1034): n is a, c, g, or t
gttggcgccgtgttttttccccccggggggggagagagattattattttccaacccgggtttcaaagaggtgggttgtgttaacccccccgcgggggaaacacgatgtcttcccannnnnnnnnttttgtnnnnnnnnnnnnnnnnnnnnnnnnnnnnnnnnagttttggtgtatttttttnnnnnnnnnnnnnnntttaaaaaaaccaacggcgggccgcggggggggatatatattttaaaaaaacccccgggggggcccccttggtttaaagacannnnnnnnnnnnnnnnnnnnnnnnnnnnnnnnggggggggttttttagaaaaaacggcggttgggcccccccggggcgnnnnnnnnnnnnnnnnnnnnnnnnnnnnnnnnnnnnnnnnnnnnnnnnnnnnnnnnnnnnnnnnnnnnnnnnnnnnnnnnnnnnnnnnnnnnngggggggcccccgcccccaaaaaggttttaagaattttttttnnnnnnnnnnnnnccccctccccnnttnnnnnnnnnnnnnnnnnnnnnnnnnnnnnnnnnnnnnnnnnnnnnnnnnnnnnnnnnnnnnnnnnnnnnnnnnnnnnnnnnnnnnnnnnnnnnnnnnnnnnnnnnnnnnnnnnnnnnnnnnnnnnnnnnnnnnnnnnnnnnnnnnnnnnnnnnnnnnnataaaagtattttttaataaatcaatgtatttcaatgttgtaacatgatagcccaatgctatatcaaggtagcaaaagtgaagattcctggtattttgatataaacactatgaatgacagtacacttgcattcaacttcacaagaaattatcttcaggtccatgaagattctttgacagctgtaacacttttcaaacagtaaagatgtacatgtattgaaagagaagacaacgaaagcctactaactgatctggggctctaaaccatactgaagagaaagagatacaatggttgtatgggctagcttgctgaaaaaaacatctaaatcttttaaagaaagaaaatacagcaaatatcnaaagttacagagtagcttacagaaaatggagtccataaggagacacacagattagaaccctgaagcagtgaatgtgtttctacccgttttgtgatggaaaagaagccatggatatcgagtcctgcagctgtctgtggtgttgaatctcctcatacacacaatgctaccaatggactaaaaccagaattccctgctctgtacaaatgctggtgatgggtaacttgctctattgctgtgggtcagagcaacagctggctggattcaggcatcaggacgaggctaagatcatacaccactgccttctacactcctacagagtcacactttccaaagctgatgctccccttgtaagggtttaaaaaaaaaccccaagggtatttaaagcaaacagcagaaaccagaagcttctgaccctctaacatgtattactgtccaacccaccatgagaagtatgttcacttggtgacaacaaagagactccgctcggc

SEQ ID NO: 256679 - DNA, 440 bp, Homo Sapiens
  misc_feature (76)..(76): n is a, c, g, or t
  misc_feature (83)..(83): n is a, c, g, or t
  misc_feature (88)..(88): n is a, c, g, or t
  misc_feature (352)..(352): n is a, c, g, or t
ggccccaaccggggggccccccctaggaccccccaatcccggaaaggccaccccggaaacctgggataaaagggcnggatttnccctncccttaaaaaaggatttaaggatggtttttccaagcaagcctaggcccatacaacccattggtatcctccttcctcctcaagtatgggtttaagagccccagatcagtaagtaggctttccgttgtcttcctctttcaatacatgtacatcctttactgtttgaaaagtgttacagctgtcaaagaatcttcatggacctgaagataatttcttgtgaagttgaatgcaagtgtactgtcattcatagtgtttatatcaaaatnccaggaatcttcacttttgctaccttgatatagcattgggctatcatgttacaacattgaaatacattgatttattaaaaaatacttt

SEQ ID NO: 256680 - DNA, 603 bp, Homo Sapiens
catatctacatcttcaggaatttccttagcactttaacaataacagaataaaatataaacactattaaatgtttctaaacagtaactttctaatttgacacctatgtagaaatataatcacacaaagtaaatgaagaattttgttactaagtacactttaaaaattatgggttatttataaaagagcaggtgaatttacaaacatgtaattttaaattatgtaccaagcccttaaaacacacacatacaagatcttttttgaaacttattttcaatgtatgttacttgacttaataatcctatagcctttaaatctattttaaaacttatgaaataaaaagaaatacagtggaagaatactctaaaaaaggataaacacaaacgatcctgtttcccaaaagagagtgtccaaacctgtcttaagaactgctttacctcttagtctctttagacagcagcaatgaatttacaaacatggagcacaggaaagcagcagatggcaggacatgggctggagtgtgaagaagctcactaattgcgggtatgttttctgttaagggtagttgtaccagctcattctctaaagtttcgtttagtttttca

SEQ ID NO: 256681 - DNA, 447 bp, Homo Sapiens
  misc_feature (434)..(434): n is a, c, g, or t
ggtatcactgcattagatagcacttccagtacaatgctgaaaagagtggtgttccttgccatgttcctgatcttagtaggaaagcatttagttggaaacatcaaggatgatgctagatgtagggttttttgtagtagttctttatcaaattgagtaagttctcctgtattccttctgtgttgagaggttttatcatgaatggatattggattttgtcaaatgctttttctgtacctattgatatgatcatatttaatctttgaactgctaatgcatgcaatggattgcactgaatatcaaatgttgaacaaggcttgcattcctgatttgctaacattttaaggatttctgcatctgtgttcactgggaaatattgatctgtagttttcctttcttgtaatgtttttgcctggctttggtattagggtaatccngggcctcacaaaa

SEQ ID NO: 256682 - DNA, 1753 bp, Homo Sapiens
  misc_feature (1501)..(1551): n is a, c, g, or t
agccatttcagcagccccgtcaaccgctgctccgtccctttccccagccagacactcactcccattgaccatctggtcccaggagctcaggaggaggaccccaggggagaggagagctgtgagagcaccggcacccccagaagactctgcttcttagcccacattcctccgggccttatggagaatgaggattcagccttgacttcttgcccaaggcctgctactggggtagcaactgacagctcagaaaggagctgagctccctctgccctgccagttgtcagtcaggcagggagggagtggctgtgttggtttggggaactaatttccacggacggctgcccgtggacaccaggtggactggttcactaatcaagtcagccatattgttctctggctaagtttggttccagccaacgtcatctgctcttcagttcctcactgccttcttgggatactaagacttgaattttttggggactattaagggtgttagtcttggagaagacacagcctcaccttctcacttgctgtgggtgaggggccatttaagtggactgggagacagtgcgcagtttgtatataattccctttcttgtggaacagaagactgaggcctgcaggttccgatgtgtctccatgggctgtgctcccctcttcctactgtcagtttctgaaacttctgactggcctcccagttatgcctcctcctcaagttcctggcccgtggatgttaaagctgctcgattcccaggatctcggctgccttttcctctatcttgagccctataaatgcccacgggacccccaccaccagcctcttgaagtggctccacagctcctgtccctggaacatcctgtcagtttggtcataaaccctgagccagatgaaatgagccaccgtgaacagacatctgccatgcccccaggtgggctttcggtggcccctacccggtaccagttctctctgagaaactggaagatgtcttgttagcataagtggtcttcattcccacctggagggtttgggagaggagcaaagcagttgaaaactagttaatgagctacaagagtcaaatagtcctctgaatggagcccccatcacaaaacagtgcccaggaggctggctcctcaagctacccatgcccagcgccctaaagcaggaccagatgctttggaattggggtgaaacacccacatggcagcctgctagcagcagtgactttgacttctggtcttaaagagtccctcacttcagccccaggagctattggtgggttttagcagttttgtctttaccgtttttagttctccttgattctttgttttcttcctttatcgtttttaggtttggtatgtgttgttttatttccatggttcctcaagtttcctttttaaacatttgcatttgctggacaattgcaattttttttaaaaaattcccctacccctgtttaaagctgaaaaatacatttggttcatgtgcattgtttacaaagcnnnnnnnnnnnnnnnnnnnnnnnnnnnnnnnnnnnnnnnnnnnnnnnnnnncaacttaatatattttggattaatatttggtatttcttttaaagtattttttgtgctgtgaacattttctgccaaagaccatgatgtgtgtctgtatgtttaagttatcgtaaatatttaaaatgtaaacatggctgttttgttatgccaccctgtaccaggattgctgccgcattccactgggtataacagtattttaatt

SEQ ID NO: 256683 - DNA, 456 bp, Homo Sapiens
  misc_feature (326)..(326): n is a, c, g, or t
  misc_feature (392)..(392): n is a, c, g, or t
tgcaggttccgatgtgtctccatgggctgtgctaccctcttcctactgtcagtttctgaaacttctgactggcctcccagttatgcctcctcctcaagttcctggcccgtggatgttaaagctgctcgattcccaggatctcggctgccttttcctctatcttgagccctataaatgcccacgggacccccaccaccagcctcttgaagtggctccacagctcctgtccctggaacatcctgtcagtttggtcataaaccctgagccagatgaaatgagccaccgtgaaacagacatctgccatgcccccaggtgggctttcggtnggccctaacccggtaaccagtttcttctctggaggaaaactgggagatgttctttgtttaggcatnaagtgttctttcatttcccacctgggaaggtttttggggagagggagcaaagcagtttgaaaaa

SEQ ID NO: 256684 - DNA, 2320 bp, Homo Sapiens
  misc_feature (468)..(468): n is a, c, g, or t
  misc_feature (586)..(586): n is a, c, g, or t
  misc_feature (589)..(589): n is a, c, g, or t
  misc_feature (639)..(639): n is a, c, g, or t
  misc_feature (2287)..(2287): n is a, c, g, or t
  misc_feature (2310)..(2310): n is a, c, g, or t
cacgaggccaggggggagccggggcggccgttgcggggcgcgctctcgagaggcggcggcggcccagggtgtcccgtcggtctcggcgccgggaagaggcggtggcgctgcccgcggtggcgggggttggcgacggagcgcgttggtgccaggaccggggtccgaggcgcgctctccgcccacagaaatgagccgtcagactgctacagcattacctaccggtacctcgaagtgtccaccatcccagagggtgcctgccctgactggcacaactgcatccaacaatgacttggcgagtctattttgaatatccagtctgctttgactatgtgttaccgcccattcttcaatgtcagagtggccatcttgtttgtagcaactgtcgcccaaagctcacatgttgtccaacttgccggggccctttgggatccattcgcaacttggctatggagaaagtggctaattcantacttttcccctgtaaatatgcgtcttctggatgtgaaataactctgccacacacagaaaaagcagaccatgaagagctctgtgagtttaggccttattcctgtccgtgccctggtgnttnctgtaaatggcaaggctctctggatgctgtaatgccccatctgatgcatnagcataagtccattacaaccctacagggagaggatatagtttttccttgcctacagacattaaacctccccggtgctgttgactgggtgatgatgcagtcctgttttggctttcacttcatgttagtcttagagaaacaggaaaaatacgatggtcaccagcagttcttcgcaatcgtacagctgataggaacacgcaagcaagctgaaaattttgcttaccgacttgagctaaatggtcataggcgacgattgacttgggaagcgactcctcgatctattcatgaaggaattgcaacagccattatgaatagcgactgtctagtctttgacaccagcattgcacagctttttgcagaaaatggcaatttaggcatcaatgtaactatttccatgtgttgaaatggcaatcaaacattttctggccagtgtttaaaacttcagtttcacagaaaataaggcacccatctgtctgccaacctaaaactctttccggtaggtggaagctagacacatgaaggtaaataaaaagaaaggctgttaaatacaggaaacagttgcatgtagtaacactaatatatttaaaaataagtcaacagtaaaccactgaaaaaatatatgtatatacacccaagatgggcatcttttgtattaagaaaggaagcattgtaaaataattctgagttttgtgtttgttgtagattgattgtattgttgaaaaagtttgtttttgcgtgggagtgtgtgcctgcgtgggtgtgtgcgtgtttgggtttttttcctttaactgacaagccatcttgagtggtcatgggccactgcttttccctttgtgagtcaatacatagtgctgctgtgtgctttttttgtgtgtatttgctaatttttattaattttagtttttcattaaataaatttgacttttctgtaaattcagggttttcccttttttgtaccattttaaagttagtatcttttgatatgcatatttgtttatggtaaaaaatttataacgtgttcaatattttcttttcccccattaatcagttcattagaaatattttaaaatcagctattttgtgaagccatgagttccagaaagtaaaggtgacatcggaaaaataatcaaaagctatttaaagcatctataaggtgctctctttctgtcttctacagatgagtcacacctttgagcttaatctttgaaaggttagagaataaattgatttttataaatactgcaaatcaggcttttgtttcctttttcagatatcttggacaaatcacatattttaaaatttgttcttgtatttattggttttgcagaagaaggcatcgtcatgcacagtatttgtaattaaaagcaaatcatttgtttaaaaaggcagtttgcaaaaaatgtttttggtcttttataattctcattaaaagaatatctggcaaattaaaaaaatcttactgtgtctgctttagctctaagtttgataaaatccgaaggttattttcctgtttcattccatactttaattatatagcaggaaagctgtgtgttgtccatttttaaggtgcgggagaacttaactcctaaatcacagccaaataactggggggataggggcctctgggaataggtctttcccccatgcccntgccccttcttgccccaccattntggattcctt

SEQ ID NO: 256685 - DNA, 688 bp, Homo Sapiens
  misc_feature (463)..(464): n is a, c, g, or t
ctggcccatagattaaattctttgtgaggccaagattgtagctttgatcttcatatggggtgtttagaggtattccattttgtggccacaaagtatatttgtaatcctagccggctatcatgaatattttattggtcacaggaagaaccagctaagaacatatgaatagatcagtgcaatactgtcatcatcctggaataacttgatgctgttatatttattgatttgcttatgtgttaatggcacataaagcaatgagcattaacacttgaagtttttcggtagtatcatttttgtgtatggagactgtatctgccattttttcacaataggaaggtttgttactgtatcttcacagatgattggttaagattgctttccaaagtcacatttattctcaccttcacatggtgttttaatgagcacttatgaaactaaatatgaaccataaagagtggatggnnactgataaattgagagtaattatgcagtttaatcagttggtaatattgaatcatatgtatttttatgtttagagtacaggattgttttaaattgttctttttgacaagttgagattagtagtttattgtcaaatagtaaagagatagctaatgattgtgatatactgtaataagatctatcactttatatgatacattataagtttcaattatttcatttttgt

SEQ ID NO: 256686 - DNA, 510 bp, Homo Sapiens
ttttcggcacgaggaggccttccagaggctcaacttcctgtaccaggccgcccattgtgtccttgcccaggaccccgagaaccaggcgctggcgaggttttactgctacactgagaggaccattgcgaagcggctcgtcttgcggcgggatccctcggtgaagaggactctctgtcgaggctgctcttccctcctcgtcccgggcctcacctgcacccagcgccagagacgctgcaggggacagcgctggaccgtacagacctgcctaacatgccagcgcagccaacgcttcctcaatgatcccgggcatttactctggggagacaggcctgaggcccagctcgggagccaagcaggtgagagattccaaaccactacaacccttgccaaacacagcccactccatttcagaccgccttcctgaggagaaaatgcagactcagggttccagtaaccagtgatggattcaccccatctcccaaataaagtttacttgttttacattcaaaa

SEQ ID NO: 256687 - DNA, 902 bp, Homo Sapiens; identical to SEQ ID NO: 77165
  misc_feature (600)..(609): n is a, c, g, or t
  misc_feature (623)..(623): n is a, c, g, or t

SEQ ID NO: 256688 - DNA, 1333 bp, Homo Sapiens
gggtatcaatataagtgatgaggattttcttttgctggagcttttgcactggtttaaggaagaattttttcactgggtgaataacgttttgtgcagcaaatgtggtggacagactaggtctagagatagatcattactgcccagtgatgatgagctgaagtggggtgcaaaggaagtggaagatcattactgtgatgcctgccagttcagcaatcgattcccaagatataataaccctgagaaacttttggaaacaagatgtggacggtgtggcgagtgggccaattgttttacactgtgctgccgagctgtagggtttgaagctcgctatgtttgggattacacagaccatgtctggacagaagtctattctccttctcagcagcggtggctgcactgtgatgcatgtgaagatgtctgtgacaagccactcctttatgaaataggatggggcaagaagctttcctatgtcatagcattttcaaaagatgaggtagttgatgtcacttggcgatattcctgcaaacatgaagaggtgattgccagaagaactaaggttaaagaagcattacttcgagacactattaatgggcttaataagcagaggcaactgtttttgtcagaaaacagaaggaaagaacttctccagaggataattgtggagcttgttgaatttatatctcccaaaacccctaaacctggagaacttgggggaagaatatctgggtcagtggcttggagagtagcccgaggtgaaatgggtctacagagaaaagaaaccttgtttattccctgtgaaaatgagaagatttctaaacagctccacctttgttacaatattgtgaaagatcgttatgttcgagtttcaaataacaatcaaaccatttctggatgggagaatggcgtgtggaaaatggaatctatattcagaaaagttgaaacagactggcacatggtatatttggcccgaaaggaaggatcatcttttgcttatatttcctggaagtttgagtgtgggtcagttggcctaaaagtagatagcatttctattagaacaagtagtccaacttttcagactggaacagtagaatggaaattgcgatctgatacagcacaagtagaactgacaggcgataacaggcttcactcctatgctgatttttctggggccactgaagttatttttggaagcagaattaaagcccaagagatggtggatgtcccttgggccacccaccccagctgtttagacaaagctttaaatgaccctgaagaaaattggttgggagaataattataaattccgggaccttttggagacccggaacattat

SEQ ID NO: 256689 - DNA, 1864 bp, Homo Sapiens
  misc_feature (1559)..(1559): n is a, c, g, or t
  misc_feature (1732)..(1732): n is a, c, g, or t
gagatccaagcctgcaactggtgagcctcagaaggggcaaccagagcctgcaaaagaccagcaacagaaggcagctcaacaccacacagaggaacaaagcaaggtgcccccagagcagaagagaaaggcgggctctacctcatggaccgggttccagaccaaggctgaagtggagcaggtggagctgcctgatggaaagaagagaagaaaggtcctggcgctcccctcacaccgaggccccaaaatcaggttgcgggacaaaggcaaagtgaagcccgtccatcccaaaaagccaaagccacagataaaccagtggaagcaggagaagcagcaattatcgtccgagcaggtatctaggaaaaaagctaagggaaataagacggaaacccgcttcaaccagctggtcgaacaatataagcagaaattattgggaccttctaaaggagcacctcttgcaaagaggagcaaatggtttgatagttgatgatggcagcaggctgggtaagaagctgggttgtgtactttctggtgacactcctgggctcctccccatcccccgtgtctctcactgagggaaagaaaatccccaagggcactgccactgtgcttggaggtgccctggactgtgtacatctgaactttggtccatcctttgatgtgtggttcgttagccacaaagagaaatatctgaaagtcaacatgatgcttcttgcatattatccagattattgtatgaagttgtgtctataattattaccaatttttattctttatttctcaaatggaaacacctgaaaaagcattctggagtgctgaatttttaagatgtatattttgttaagcatattctctaaatgagatattgtgtggctttttagtaacaacgtcctttctaatacaaaaaaaaccacgaattcgccccatacaaccccattaactgcccttcgctgtccctatatcgccttcatcctcctcctcatatactacacttcccgacacactaaccctttaaccgctcgtctcttcctcctcccataacccgttgcccaccttatccattttacaccgctcacacaccttgtcctttttcccctcacgctacgctctcctagccaacacaacctcctactccttactggtctgtcaccatatcccccactacttcgccctttgaacgtctactcccccttgttttgttttgttttccccccttatacccttcttcccaatacctggttcccccccatttgtcgctttccttcgcctacctcccgttcgctacgtcacctgacctctcccttccgccatttctctgttaccctcatttctttccatactatctttatttttttccctcctttattcgccattatgaccgtcactcatcttgtactttgtgtctcatgcacgaaccttgcgcactccgcacttctacaccctttctctacacaatgtatatccgctccgcccaccccccaccattttcctcatgtcttgtgctgtctcgcccacaaacatcaaccgcccctcgtgtgtgcctcccgcagtcctcccgcctntcatgattcgccgcgtcttcgctttctaccactcactttacctccgtcgccttgttctcgccattcccaatatgcccgcacacggtcttctcattctgcctgttcactcgtctctcgtgaccatccccacctccgctacacaccccatgttgttctcctatgttctatcagtntctacaccacgcacttctccactgattctctcacgcccagttacacctcgcatgtctgaccttgctagtcctcacgatccgccatagtcgattatcagaactatatttgcctatgatctcgtatatttgccc

SEQ ID NO: 256690 - DNA, 588 bp, Homo Sapiens
attgtttacatcctgagactgttctacagtttctttgactcctggcatttgccctaaggacctatagcaagctgtttctaggatcagaaactcaagagaggcatttctctgctttttcactaaaggtcagttgttttaatttgaaacctgaaatgcctctttagcaaaagcctgtggtatggggtaaagccatgtaagaagagaatagtctcagtcacatatgaagaggaaaatttgcagctgccagtgctttccttgtggccctgccaaccagctcttccaggacgaactcagtccagcatggttttgatgtaaccatccatgcttttatttttgttaagtcttttgtgactgggacagttaattttagtagctgaagaacgtctagttgtttgcttgatatttgtgaacatttactgcatggatcacaaaacaatataccctgtatttcttacacgccacttatatgcagcaaggagtaaatgtgttactagattcgggtagtgcattttgtcactgaatctgaccttgagaatgtacattaattcttatattttacataatgtatgtgttgtttaagaaatgtat

SEQ ID NO: 256691 - DNA, 726 bp, Homo Sapiens
  misc_feature (444)..(577): n is a, c, g, or t
cttacatcttcccagagaactatgctgccacttcacatccactcaccacatcccacctacagactaccacctttcgagatcaggaccaacctggaaaatgccagagttggctatgccttttcagacattgatttggacagctcaccaacccctgaaggggccgttcagcctggttagttttctacctactccgagtgtcctcccctgccccaccagattgctgcaggggcgcggtgtgcctggcagccaaattgttgacacttcttttttcctatgcactggttttacacagctgtcatttttctttcaaaattgcagcagtcccacagatgtgtgcatttggacaaatagtacttaaaaacaaaacaaacaagcactcagcccagctcctcaatactacctggaaaaagcattggcattattttcaataaatatcaagcactnnnnnnnnnnnnnnnnnnnnnnnnnnnnnnnnnnnnnnnnnnnnnnnnnnnnnnnnnnnnnnnnnnnnnnnnnnnnnnnnnnnnnnnnnnnnnnnnnnnnnnnnnnnnnnnnnnnnnnnnnnnnnnnnnnnnnnctggggcccccgcccccgccccccaaaaaattttttaaaacttttcttttggcggggcggggccccaaaggggaaaggaaacaggggcccataattgttttcccaaaaaaaacccggggaattaaataaggggtgtggattccccccac

SEQ ID NO: 256692 - DNA, 367 bp, Homo Sapiens
ctgatgtgccccccaccctctcacaggactggaaggagcagtacatccacgagaactacagccgggccctgaaagggaaagaaatcgtgaaccaggtgagcccacgaagcctccccacccaccccctgccctcatggccatcgcctcttgggggcccccgcctggattcaaagttttcacactgagttccccagagatctgagggttttctgttcagacaagatgaaagcagaggccgaacagaaaggactcttgcccccaaagccagcattgatcagacagcctcttctcctgtgtattgggtatactggtgttatgcttgaaatcacatcttaaaagaagaatggggctgggctcagtggctcat

SEQ ID NO: 256693 - DNA, 1042 bp, Homo Sapiens
accccgggacgggggccaagcccccttaaaaaaggggccacatgcagggcagtttggcagagtggttgagtgccaggggtcgacaaaggacccccatgatgttagcgtgtgccccaggtcgttggcagcccctcgtggtagtggtgaggcgcccggggtgcaggagtgcccagcctttcctcggggaggagatcacacagtcgtagcgcaggaagcggcagccaccccccttcatagtccaggcccttgtggttgagggcaacgttgagggtgaaggtggatgagtcgtggtgtggccgcagagacggctgctcgtctggccggtagcgaaccacaaagttcatcaccgcccgcgccttggtgtggtaaccgggaaacaggctctcggtcatggggcccacatacgtccgcagcagctgcagccactggtcctcgtaccccacctgcttcatgtggatgtccacggtgggcacattctcgtagcctccagccagccttgaatcctcatgccggccgcctgaccactggccgtagtgctccatctctgccaccagctcatcacacatttgttctgacagcagtgggaaccagtacacgtccgggcatggctgctccacgattccttccccttccagggcccggctgtagttctcgtggatgtactgctccttccagtcgacggggttgtcgaagatctgccagaggtcggggtgcaggtgctccgtgtcgtatctggaagtggccaggagccggccaaattcatgctgattgctcagatggaggaagatgcccttgtctcgaaagctcttacagaaggccatgtccgggtctgtgtcactgcccgagaacacatccctctggggcagctccatccgcagggtatcaccccggatcacataggcctgggagatgtatggtacattccacacacccactcgcttccgctgcaccagctccacgtagtcctcggagcgggcgtagtactcatcggggctcagggcgccccagaagttgatcccgggaatccggaccggtccagccg

SEQ ID NO: 256694 - DNA, 581 bp, Homo Sapiens
  misc_feature (266)..(387): n is a, c, g, or t
  misc_feature (392)..(436): n is a, c, g, or t
  misc_feature (440)..(446): n is a, c, g, or t
  misc_feature (448)..(449): n is a, c, g, or t
  misc_feature (454)..(469): n is a, c, g, or t
  misc_feature (502)..(510): n is a, c, g, or t
gggtgaagaagaaagagtgaatatgaaggttcccagagatatggatgatgccaaggctctaggaaaagttttatccaaatacaaggacaccttttatgttcaagtacttgtagcttattttgctacatatattttgtatccttttaactgaaaaaatgttttctaattttgttcaagaaaaagtgtaaaaggtctgctcttcatttatacataactattttccttttaaaatttgttattgcagtgtgacaatattaaataattgnnnnnnnnnnnnnnnnnnnnnnnnnnnnnnnnnnnnnnnnnnnnnnnnnnnnnnnnnnnnnnnnnnnnnnnnnnnnnnnnnnnnnnnnnnnnnnnnnnnnnnnnnnnnnnnnnnnnnnnnnnaaaannnnnnnnnnnnnnnnnnnnnnnnnnnnnnnnnnnnnnnnnnnnnaaannnnnnncnnggggnnnnnnnnnnnnnnnnaaaaaaatttttaaaccctttttggggggcggnnnnnnnnnaaaggggggaaacgggggcaaaatgttttccccaagaaacccgggaaaaaacaaagggggtgttttccccc

SEQ ID NO: 256695 - DNA, 1091 bp, Homo Sapiens
  misc_feature (502)..(502): n is a, c, g, or t
cgaaagggttgtagacatggcggccatcaggatgggaaaactgacaaccatgcctgcaggtctgatatatgcatctgtaagtgtacatgcagccaaacaagaggaatccaaaaagcagctagtgaaaccagagcagctccccatatatactgcaccaccgctccagtctaaatatgttgaagagcagcctggtcatttacaaatgggctttgcttccatccgcactgcaactggttgttacattggctggtgcaagggtgtttatgtctttgtgaaaaatgggataatggatacagtacaatttggaaaagatgcttatgtctatctgaagaatcctcctcgagattttcttccgaaaatgggagttattacagtttcaggattggcgggcttggtttcagcgagaaaaggttccaagtttaagaaaattacttatcctctgggactggccactttaggagcaactgtttgctacccagttcagtccgtaataattgctaanggtaacagcaaaaaaggtatatgctacaagccagcaaatttttggagcagttaaatcattgtggacaaaaagcagcaaagaagagtcactccctaaacctaaagaaaaaactaagctaggatcctcttccgaaatagaagtacctgcaaaaaccaactcacgtcttgaaacactcagtgcccttgccaacagaactcagctctgaagcaaagaccaaatcagaatccacttcaggtgcaacccagtttatgcctgaccccaagctcatggatcacgggcagtcccacccagaagatatagatatgtacagcactagaagctgaagtagactgcatgcagagactacacagaaaactacaagatgtgtggcgttgcaaataatgatgaaaataaatcatgtaatgggtaactgatacatagagtattacctaaaccaagtttctcccttacatttccaaatatgccatttgataaattacataagtggttaacacacaaactgtgaatgcagtgtaaacaatattaaatgattgatgaggagacttaggtagaagtattagcttgcatttgatgacctttaagggcactt

SEQ ID NO: 256696 - DNA, 2149 bp, Homo Sapiens
ccccttaccctcttacccctaaccacccccccacattcctccctctcccgtagcgaggcctgggtggcgaattcggcacgagggcgctcgcgagggggtagctcttctagtagtgctcggcgtcagacatggcggaggcgatggatttgggcaaagaccccaacgggcccacccattcctcgactctgttcgtgagggacgacggcagctccatgtccttctacgtgcggcccagcccggccaagcgtcggctgtcgacgctcatcctgcacggcggcggcaccgtgtgccgagtgcaggagcccggggccgtgctgctggcccagcccggggaggcgctggccgaggcctcgggtgatttcatctccacgcagtacatcctggactgcgtggagcgcaacgagaggctggagctggaggcctatcggctgggccccgcctcggcggcggacaccggctcggaagcaaagcccggggccctggccgagggcgccgcggagccggagccgcagcggcacgccgggcggatcgccttcacggatgcggacgacgtagccatccttacctacgtgaaggaaaatgcccgctcgcccagctccgtcaccggtaacgccttgtggaaagcgatggagaagagctcgctcacgcagcactcgtggcagtccctgaaggaccgctacctcaagcacctgcggggccaggagcataagtacctgctgggggacgcgccggtgagcccctcctcccagaagctcaagcggaaggcggaggaggacccggaggccgcggatagcggggaaccacagaataagagaactccagatttgcctgaagaagagtatgtgaaggaagaaatccaggagaatgaagaagcagtcaaaaagatgcttgtggaagccacccgggagtttgaggaggttgtggtggatgagagccctcctgattttgaaatacatataactatgtgtgatgatgatccacccacacctgaggaagactcagaaacacagcctgatgaggaggaagaagaagaagaagaaaaagtttctcaaccagaggtgggagctgccattaagatcattcggcagttaatggagaagtttaacttggatctatcaacagttacacaggccttcctaaaaaatagtggtgagctggaggctacttccgccttcttagcgtctggtcagagagctgatggatatcccatttggtcccgacaagatgacatagatttgcaaaaagatgatgaggataccagagaggcattggtcaaaaaatttggtgctcagaatgtagctcggaggattgaatttcgaaagaaataattggcaagataatgagaaaagaaaaaagtcatggtaggtgaggtggttaaaaaaaattgtgaccaatgaactttagagagttcttgcattggaactggcacttattttctgaccatcgctgctgttgctctgtgagtcctagatttttgtagccaagcagagttgtagagggggataaaaagaaaagaaattggatgtatttacagctgtccttgaacaagtatcaatgtgtttatgaaaggaagatctaaatcagacaggagttagtctacatagtagtaatccattgttggaatggaacccttgctatagtagtgacaaagtgaaaggaaatttaggaggcataggccatttcaggcagcataagtaatctcctgtcctttggcagaagctcctttagattgggatagattccaaataaagaatctagaaataggagaagatttaattatgaggccttgaacacggattatccccaaacccttgtcatttcccccagtgagctctgatttctagactgctttgaaaatgctgtattcattttgctaacttagtatttgggtaccctgctctttggctgttctttttttggagcccttctcagtcaagtctgccggatgtctttctttacctacccctcagttttccttaaaacgcgcacacaactctagagagtgttaagaataatgttacttggttaatgtgttatttattgagtattgtttgtgctaagcattgtgttagatttaaaaaattagtggattgactccactttgttgtgttgttttcattgttgaaaataaatataactttgtattcga

SEQ ID NO: 256697 - DNA, 1177 bp, Homo Sapiens
tttaagtgttttgtgttacctggtctcattcccctccccacacctacccatttgaggggatggagttgaagtcacctggtcacctgtaccggcccagttcggctacaacctggagtgtccgtaaacaattcctctcacccacaaaacaatgtaatcccagcgatggactggattctgaaggccacttcccaccatcatagctgccatgcccaggcagtgcctgctctatatatagagtctgcctccaatcctgctggcttcagcctggagaagggatatgggagctggagctttgatggatgaataggtgttcaccggatctgggcagaggggtcatccgctccccaggtgggcactgataaaggaaggtacaggcctcacctggaactgccaaggcagcctccagaaatgctcggctgtctcggggcacgctccactatgccagtcctgcgggattacgtccagctacttccagaaacactcagtgtcccctcccctcaggctctgcttggcctggccttgtccagtctaccctggacaagatgccgtgtgtttgaggcccagcagagtaagcccttggccgtgatgtgttctgaaacacctgttaggggttccctccatatgttcagagcctctctgggatgaagtttcaagccagaaaacccagtcgaggctcaagtttgaatttcagcttcactgtgtggctctgggcattgactgtttattaagcacctactgtgtgccaagcgcttttacgtggcttctccctcagccagccttgagaaagctggaggtggtgtcatcacctccattttacagacaaagcagctgagaccccagcgaggggcggagacctgtcccacgatcacccagccaggagtcgtggcagaacggagcatcagccagaccctgttgcgggcgttgtcatcaagggagcttgaatggagggtctggtgtcagatacagccgactccagccccagctcatcccccatgatgctgtgtgacccactgggcactctggtgagggagctttccagacatcaacagcccactctgcttccctttctgagtcccctgtccagcactgcctagtgttggagggtagaccaaggctgtgcatgattcaccccctccttccatcctggagctggcagtgaataaaagcccgtatttac

SEQ ID NO: 256698 - DNA, 547 bp, Homo Sapiens
  misc_feature (495)..(495): n is a, c, g, or t
cagccgcaggatgcatgggcaatggacccaacagctttccaacatataagatgtacagtgggtatgccactacttcatctttgccgttttgtccaaatagagtctttgggactgctgccaatggcccaaagtcaaatgcaactgctgtctctcctagagatgcggtatacgcccttcctttattgagtactagactttcctcttcggcttctgaaagtattatcacgttagtgggtgtctgcggctcacgtagtgagtaaattctgattacgttgtctgatgttaacagcactacgtggggatccaggatttcacttggataccatgcagcatgctttagagtcagagaggtggaactggtgaaaaatctctccgcaactggagtggtactacaattcactgttgattttccaccttcaaattcagaattcttccccatctttaggtaattctaataccataagtcttttattcctataagtgctacatgatggntgtgttgggcttacaagactgatagattcacaaaggttggattatgcaagca

SEQ ID NO: 256699 - DNA, 913 bp, Homo Sapiens
aagtttccagccctgcgagcgccgccgggtcggccgatcgtcccccatacctcggccatgcggcccctgctgctactggccctgctgggctggctgctgctggccgaagcgaaaggcgacgccaagccggaggacaaccttttagtcctcacggtggccactaaggagaccgagggattccgtcgcttcaagcgctcagctcagttcttcaactacaagatccaggcgcttggcctaggggaggactggaatgtggagaaggggacgtcggcaggtggagggcagaaagtccggctgctgaagaaagctctggagaagcacgcagacaaggaagatctggtcattctcttcacagacagctatgacgtgctgtttgcatcggggccccgggagctcctgaagaagttccggcaggccaggagccaggtggtcttctctgctgaggagctcatctacccagaccgcaggctggagaccaagtatccggtggtgtccgatggcaagaggttcctgggctctggaggcttcatcggttatgcccccaacctcagcaaactggtggccgagtgggagggccaggacagcgacagcgatcagctgttttacaccaagatcttcttggacccggagaagagggagcagatcaatatcaccctggaccaccgctgccgtatcttccagaacctggatggagccttggtgtctccctggggccagggccaccttcctggggcctgctatgaactcactgcctctgtcctcacatctgagctcagcgtgatgccttcttttcctgctgtggggctgcagttgaactacctgggcaactacatcccgcgcttctgggacttcgaaacaggctgcaccgttgttgtgacgaaagctttgcgcaacctcaaagggcattggggga

SEQ ID NO: 256700 - DNA, 2956 bp, Homo Sapiens
  misc_feature (19)..(19): n is a, c, g, or t
ccgccgggtcggccgatcngtcccccatacctcggccatgcggcccctgctgctactggccctgctgggctggctgctgctggccgaagcgaagggcgacgccaagccggaggacaaccttttagtcctcacggtggccactaaggagaccgagggattccgtcgcttcaagcgctcagctcagttcttcaactacaagatccaggcgcttggcctaggggaggactggaatgtggagaaggggacgtcggcaggtggagggcagaaggtccggctgctgaagaaagctctggagaagcacgcagacaaggaggatctggtcattctcttcgcagacagctatgacgtgctgtttgcatcggggccccgggagctcctgaagaagttccggcaggccaggagccaggtggtcttctctgctgaggagctcatctacccagaccgcaggctggagaccaagtatccggtggtgtccgatggcaagaggttcctgggctctggaggcttcatcggttatgcccccaacctcagcaaactggtggccgagtgggagggccaggacagcgacagcgatcagctgttttacaccaagatcttcttggacccggagaagagggagcagatcaatatcaccctggaccaccgctgccgtatcttccagaacctggatggagccttggatgaggtcgtgctcaagtttgaaatgggccatgtgagagcgaggaacctggcctatgacaccctcccggtcctgatccatggcaacgggccaaccaagctgcagttgaactacctgggcaactacatcccgcggcttctggaaccttcgaaacaaggctgcaccgtgtgtgacgaaggcttgcgcagcctcaagggcattggggatgaagctctgcccacggtcctggtcggcgtgttcatcgaacagcccacgccgtttgtgtccctgttcttccagcggctcctgcggctccactacccccagaaacacatgcgacttttcatccacaaccacgagcagcaccacaaggctcaggtggaagagttcctggcacagcatggcagcgagtaccagtctgtgaagctggtgggccctgaggtgcggatggcgaatgcagatgccaggaacatgggcgcagacctgtgccggcaggaccgcagctgcacctactacttcagcgtggatgctgacgtggccctgaccgagcccaacagcctgcggctgctgatccaacagaacaagaacgtcattgccccgctgatgacccggcatgggaggctgtggtcgaacttctggggggctctcagtgcagatggctactatgcccgttccgaggactacgtggacattgtgcaggggcggcgtgttggtgtctggaatgtgccctatatttcaaacatctacttgatcaagggcagtgccctgcggggtgagctgcagtcctcagatctcttccaccacagcaagctggaccccgacatggccttctgtgccaacatccggcagcaggatgtgttcatgttcctgaccaaccggcacacccttggccatctgctctccctagacagctaccgcaccacccacctgcacaacgacctctgggaggtgttcagcaaccccgaggactggaaggagaagtacatccaccagaactacaccaaagccctggcagggaagctggtggagacgccctgcccggatgtctattggttccccatcttcacggaggtggcctgtgatgagctggtggaggagatggagcactttggccagtggtctctgggcaacaacaaggacaaccgcatccagggtggctacgagaacgtgccgactattgacatccacatgaaccagatcggctttgagcgggagtggcacaaattcctgctggagtacattgcgcccatgacggagaagctctaccccggctactacaccagggcccagtttgacctggcctttgtcgtccgctacaagcctgatgagcagccctcactgatgccacaccatgatgcctccaccttcaccatcaacatcgccctgaaccgagtcggggtggattacgagggcgggggctgtcggttcctgcgctacaactgttccatccgagccccaaggaagggctggaccctcatgcaccctggacgactcacgcattaccatgaggggctccccaccaccaggggcacccgctacatcgcagtctccttcgtcgatccctaattggccaggcctgaccctcttggacctttcttctttgccgacaaccactgcccagcagcctctgggacctcggggtcccagggaacccagtccagcctcctggctgttgacttcccattgctcttggagccaccaatcaaagagattcaaagagattcctgcaggccagaggcggaacacacctttatggctggggctctccgtggtgttctggacccagcccctggagacaccattcacttttactgctttgtagtgactcgtgctctccaacctgtcttcctgaaaaaccaaggcccccttcccccacctcttccatggggtgagacttgagcagaacaggggcttccccaagttgcccagaaagactgtctgggtgagaagccatggccagagcttctcccaggcacaggtgttgcaccagggacttctgcttcaagttttggggtaaagacacctggatcagactccaagggctgccctgagtctgggacttctgcctccatggctggtcatgagagcaaaccgtagtcccctggagacagcgactccagagaacctcttgggagacagaagaggcatctgtgcacagctcgatcttctacttgcctgtggggaggggagtgacaggtccacacaccacactgggtcaccctgtcctggatgcctctgaagagagggacagaccgtcagaaactggagagtttctattaaaggtcatttaaaccaccg

SEQ ID NO: 256701 - DNA, 328 bp, Homo Sapiens
gcaggattcggcacgaggtttaagcaagctcaggccatggagtccagtggagtcagttcgtgttcctgttgtgccacttctttctcaccctgccttcccgaacctcagtttacccatttgtcaggttggtttagcaaaagcttcttcctttcaacattgtgattggggtaggggaaatgaacactggtggaagcttgtcactctcgtcctttcatcctgctttgtacactctgagaaaggcttattgggcagaggctgcccttctgaggtgtggatggaactgttggtgacattatttttattaatttatttttaaagacagggtctc

SEQ ID NO: 256702 - DNA, 507 bp, Homo Sapiens
gttcagcattatttaactacaacacactgctgcaaatatttcacagtaattatcaaaatttaatgggctctaatttaaaatgttatttaataagtatagatttaaattgagaattatctttgagtagatgtaatcacaaagtgcattaactcttgttggaatattttatggctattccaaagtatagagtgcctaaattttgtgttgaaaatgtctttcatgacggtattaagttttctgaaattacacatggcttttaaaatttctaatgtatccaagatgtgcaatgttgttaggatctcattcttcagtgcatgaaaagctactaccctcagaacattttgtgttaattgtacctgcaagaacacctcaggcaagccaagaagaaatgaaacccaaataaaacttgaaaatgcaccttaaaaatatatatacatataatagttttgaaatgggattctgctttattttgatggaatggccattaaatacacattttgagataat

SEQ ID NO: 256703 - DNA, 1063 bp, Homo Sapiens
  misc_feature (849)..(849): n is a, c, g, or t
gggacatcccaagattgggagagggttcatctgatcgtggcaggtggttatgacgagagagtcctggagaatgtggaacattatcaggaattgaagaaaatggtccaacagtccgaccttggccagtatgtgaccttcttgaggtctttctcagacaaacagaaaatctccctcctccacagctgcacgtgtgtgctttacacaccaagcaatgagcactttggcattgtccctctggaagccatgtacatgcagtgcccagtcattgctgttaattcgggtggacccttggagtccattgaccacagtgtcacagggtttctgtgtgagcctgacccggtgcacttctcagaagcaatagaaaagttcatccgtgaaccttccttaaaagccaccatgggcctggctggaagagccagagtgaaggaaaaattttcccctgaagcatttacagaacagctctaccgatatgttaccaaactgctggtataatcagattgtttttaagatctccattaatgtcatttttatggattgtagacccagttttgaaaccaaaaaagaaacctagaatctaatgcagaagagatcttttaaaaaataaacttgagtcttgaatgtgagccactttcctatataccacacctccctgtccacttttcagaaaaaccatgtcttttatgctataatcattccaaattttgccagtgttaagttacaaatgtggtgtcattccatgttcagcagagtattttaattatattttctcgggattattgctcttctgtctataaattttgaatgatactgtgcccttaattggttttcatagttttaagtgtgtatcanttatcaaagttgaattaatttggcttcatagtataatgagagcagggctattgtagttcccagattcaatccaccgaagtgttcactgtcatctgttagggaatttttgtttgtcctgtctttgcctggatccatagcgagagtgctctgtattttttttaagataatttgtatttttgcacactgagatataataaaaggtgtttatcataaa

SEQ ID NO: 256704 - DNA, 463 bp, Homo Sapiens
  misc_feature (338)..(396): n is a, c, g, or t
tggacagaaactgtcttattgattctattcccttacttataatataaaggagcatatctagataagttctaaagtccttctagctccaaaaggcatgattaactctgtgaggcactgtgaaaaatctggagattatgaagatgaatctcttccaataatatgatatataaaggtgactgggattctatgaggaattaaatgaagactataagtgcacgaccaaaagaaaacctgtaacagaccctactaatcaccttaaaataatctgctccaggttataaaatcttaaaacctgagagctgaagtcagagtacatactcacctctttcaaattatannnnnnnnnnnnnnnnnnnnnnnnnnnnnnnnnnnnnnnnnnnnnnnnnnnnnnnnnnnattcctgagtcaccatgaatacctttaaaaaattctagacctttgggccaggcatggtggctcatgc

SEQ ID NO: 256705 - DNA, 447 bp, Homo Sapiens
catataatttgaaagaggtgagtatgtactctgacttcagctctcaggttttaaaaattatattagtgggaccagttatgacaagaataatcattatagtacttttcagattttataacctggagcagattattttaagttgattagtaggttctgttacagtttttcttttgatcgtgcacttatagtcttcatttaattcctcatagaatcccagtcacctttatatatcatattattggaagagattcatcttcataatctccagttttttcacagtgcctcacagagttaatcatgccttttggagctagaaggactttagaacttatctagttatgctcctttatattataagtaagggaataggaatcaataagacagtttctgcccaaagtccatgttaccagttgggtgacagagctgggaaatacgtaggagatctat

SEQ ID NO: 256706 - DNA, 416 bp, Homo Sapiens
gcacaagtgtacttccatttacagcccctgagtaagtccaggacaaagtctccaggctctgtattccagaacaccgcctctccagtagggaagactccgggagcatcctgccttcccaggcgggaatggaggccaggaggctttgcccaaaccttgactgtgctattgccaagtgaccagctctggggcctggctcctctgccacttgggaaaggactcggcaaatgggcttcccttcaccccagtccctgctccccagccaaagaccctgagttccagcccagggtaatgaggggaagtaacaaatacacctacttttaatccaaataaaggaaaaatgtttgccaccatggagtttataaaaataacaatgcattattcgggtattaataacaataaaaatgtcaaactgtcaa

SEQ ID NO: 256707 - DNA, 851 bp, Homo Sapiens; identical to SEQ ID NO: 169546
  misc_feature (570)..(612): n is a, c, g, or t
  misc_feature (614)..(623): n is a, c, g, or t
  misc_feature (625)..(626): n is a, c, g, or t
  misc_feature (630)..(636): n is a, c, g, or t
  misc_feature (638)..(643): n is a, c, g, or t
  misc_feature (645)..(654): n is a, c, g, or t
  misc_feature (728)..(728): n is a, c, g, or t

SEQ ID NO: 256708 - DNA, 693 bp, Homo Sapiens
gtgaatgacctggggaacaaaggctacctggtatttggcctcatcctcttcgtgtgggagctactgcccaccaccctgctggtgggctacttccgggtgcaccggcccccacaggacctgagcaccagccacatcctcaatgggcaggtctttgcctctcggtcctacttctttgaccgggctgggcactgtgaagatgagggctgctcctgggagcacagccggggtgagagcaccagtatgtcgggcagtctaggctctgggagctggtatggtgccatcgggcgtgacggggctggtatgggggcagccagacgaagaccactcctctgctcttctcccaggtgccaggaccaggcggccaccaccacagtctctactccaccccacagacgtgagcccccttccctccccacagaatacccaggccccagtccccctcaccctaggcccctgtgccaagtttgtctgccgcttcttgcccaggatcctgggggtcgtggctaccccctcctctggccggctccttgctgctcctgtcatagtgagcttgtgccgtccccctaggatggggggcatggccctggctgccagatgcccacagcaccctggcatgacctgccacctctgcttccacaccggagccagctacctctcctgtgcctgccactcaataaacagtgtttgcgcccc

SEQ ID NO: 256709 - DNA, 477 bp, Homo Sapiens
gcacgaggggatgaatgctcattggctcttggccaacaattatacaagggcttgtgcccacatcctgtagctgtggtttagggacgctgctcatgagtgacttcttatgcttagtggcaggaaactttagtcactgatgtgtaaactcacctttggtctgcacctcccacaacgtgctccgaaagcagttaggggactaggcctcttgatttccttgtagataccagttccccagaagctaaggaaaaactctgaggccttggagttactgagagtggaccaatacttgtcttattctacctgattttggcaactgcttaaggttcttctgtatccacaaaaaggaattatgatatcctctgctaaaccctctctttagcctcaaagcccaagaccaaaaaaaatgagccatatttcattgcaggcctgctgccaatgtgaaatataaggaataaagtcatgagactgcttctcaac

SEQ ID NO: 256710 - DNA, 1026 bp, Homo Sapiens
ttccggtccccaagagacccgcggagggaggcggaggctgtgagggactccgggaagccatggacgtcgagaggctccaggaggcgctgaaagattttgagaagagggggaaaaaggaagtttgtcctgtcctggatcagtttctttgtcatgtagccaagactggagaaacaatgattcagtggtcccaatttaaaggctattttattttcaaactggagaaagtgatggatgatttcagaacttcagctcctgagccaagaggtcctcccaaccctaatgtcgaatatattccctttgatgaaatgaaggaaagaatactgaaaattgtcactggatttaatggtatcccttttactattcagcgactatgtgaattgttaacagatccaaggagaaactatacaggaacagacaaatttctcagaggagtagaaaagaatgtgatggttgttagctgtgtttatccttcttcagagaaaaacaattccaatagtttaaatcgaatgaatggtgttatgtttcctggaaattcaccaagctatactgagaggtctaatataaatgggcctgggacacccaggccacttaatcgaccaaaggtttctttgtcagcccccatgacaacaaatgggttgcctgagagcacagacagcaaagaggcaattttgcagcaaaatgaggagaaaaatcacagcgactcttcgacctctgaatcagaagtttcctcagtgagccctttgaaaaataaacatccagatgaagatgctgtggaagctgaggggcatgaggtaaaaagactcaaggtttgacaaagaaggtgaagtcagagaaacagccagtcaaacgacttccagcgaaatttcttcagttatggtaggagaaacagaagcgatcatcttcatctcaggataaagacaaagatagccgttgtacccggcagcactgtacagaagaggatgaagaagaggatgaagaggaagaagaagagtcttttatgacatcaagagaaatgatcccagaaag

SEQ ID NO: 256711 - DNA, 718 bp, Homo Sapiens
  misc_feature (639)..(639): n is a, c, g, or t
  misc_feature (645)..(645): n is a, c, g, or t
  misc_feature (656)..(656): n is a, c, g, or t
  misc_feature (665)..(665): n is a, c, g, or t
  misc_feature (678)..(678): n is a, c, g, or t
  misc_feature (690)..(690): n is a, c, g, or t
cacgagatccagggcacgttctcgctgcgggcctcagccacaggcatgatcatcatggacggtgtggaggtgccagaggagaatgtgctccctggtgcatccagcctggggggtcccttcggctgcctgaacaacgcccggtacggcatcgcgtggggcgtgcttggagcttcggagttctgcttgcacacagaccggcagtacgccctcgacaggatgcagtttggtgtcccactggccaggaaccagctgattcagaagaagctggcagacatgctcactgagattaccctgggccttcacgcctgcctgcagctcggccgcttgaaggaccaggacaaggctgcccccgagatggtttctctgctgaagaggaataactgtgggaaagccctggacatcgcccgccaggcccgagacatgctgggggggaatgggatttctgacgagtatcacgtgatccggcacgccatgaacctggaggccgtgaacacctacgaaagtacacatgacattcacgccctgatccttgggagagctatcacgggaaaccagggcgttcacggccagcaagtgagccgctccattcaggggccccgaaactcttcaagcccctttcttggagagatgcctgggctnggaccntaggagcgttnttgttcttnagctttaggaaangggaggttggcngattggagttgggaatttaagagacatt

SEQ ID NO: 256712 - DNA, 637 bp, Homo Sapiens
caaaaggctattgcccactatgaccagcagatgggccagaaggtgcagctgcccgcagaaaccctccaggagctgctggacctgcacagggacagtgagagagaggccactgaagtctacatcaagaactccttcaaagatgtggaccatctatttcaaaagaaattagcggcccagctagaaaaaaagcgggatgacttttgtaaacagaatcaagaagcatcatcagatcgttgctcagctttacttcaggtcattttcagtcctctagaagaagaagtgaaggcgggaatttattcgaaaccagggggctatcgtctctttgttcagaagctacaagacctgaagaaaaagtactatgaggaaccgaggaaggggatacaggctgaagagattctgcagacatacttgaaatccaaggagtctatgaccgatgcaattctacagacagaccagactctcacagaaaaagaaaaggagattgaagtggaacgtgtaaaagctgaatctgcacaggcttcagcaaggagttatcaagaacacgtgaaacaactgactgagaagatggagaacgacagggtccagttgctgaaagagcaagagaggaccctcgctcttaaacttcaggaacaggagc

SEQ ID NO: 256713 - DNA, 1529 bp, Homo Sapiens
  misc_feature (682)..(696): n is a, c, g, or t
  misc_feature (1256)..(1256): n is a, c, g, or t
  misc_feature (1262)..(1262): n is a, c, g, or t
  misc_feature (1274)..(1274): n is a, c, g, or t
  misc_feature (1338)..(1338): n is a, c, g, or t
  misc_feature (1378)..(1378): n is a, c, g, or t
  misc_feature (1401)..(1401): n is a, c, g, or t
  misc_feature (1409)..(1411): n is a, c, g, or t
  misc_feature (1413)..(1413): n is a, c, g, or t
  misc_feature (1416)..(1416): n is a, c, g, or t
  misc_feature (1425)..(1441): n is a, c, g, or t
  misc_feature (1446)..(1446): n is a, c, g, or t
  misc_feature (1453)..(1453): n is a, c, g, or t
  misc_feature (1460)..(1460): n is a, c, g, or t
  misc_feature (1491)..(1491): n is a, c, g, or t
gaagaagtgaaggcgggaatttattcgaaaccagggggctatcgtctctttgttcagaagctacaagacctgaagaaaaagtactatgaggaaccgaggaaggggatacaggctgaagagattctgcagacatacttgaaatccaaggagtctatgactgatgcaattctccagacagaccagactctcacagaaaaagaaaaggagattgaagtggaacgtgtgaaagctgagtctgcacaggcttcagcaaaaatgttgcaggaaatgcaaagaaagaatgagcagatgatggaacagaaggagaggagttatcaggaacacttgaaacaactgactgagaagatggagaacgacagggtccagttgctgaaagagcaagagaggaccctcgctcttaaacttcaggaacaggagcaactactaaaagagggatttcaaaaagaaagcagaataatgaaaaatgagatacaggatctccagacgaaaatgagacgacgaaaggcatgtaccataagctaaagaccagagccttcctgtcacccctaaccaaggcataattgaaacaattttagaatttggaacaagcgtcactacatttgataataattagatcttgcatcataacaccaaaagtttataaaggcatgtggtacaatgatcaaaatcatgttttttcttnnnnnnnnnnnnnnngactgtaaattgtgcaacaaagatgcatttacctctgtatcaactcaggaaatctcataagctggtaccactcaggagaagtttattcttccagatgaccagcagtagacaaatggatactgagcagagtcttaggtaaaagtcttgggaaatatttgggcattggtctggccaagtctacaatgtcccaatatcaaggacaaccaccctagcttcttagtgaagacaatgtacagttatccattagatcaagactacacggtctatgagcaataatgtgatttctggacattgcccatgtataatcctcactgatgatttcaagctaaagcaaaccaccttatacagagatctaaaatctctttatgttctccagaggaaggtggaagaaaccatgggcaggagtaggaattgagtgataaacctaattgggctaatgaagaaaacttctcttattgttcagttcatccagattataacttcaatgggacactttagaccattagacaattgacactggattaaacaaattcacataatgccaaatacacaatgtattnatagcnacgtataatttncaaagatgaactttaaaagatgctgtgtaactaaactgaaataattaaattacttattatttanaatgttaaagcttattatagtcttttctaattcttcaaantcatactatgaaatctttctaantttccccnnnanagnatatgggannnnnnnnnnnnnnnnnaacanatttaanaaagatnttaagtttacctagtatatgtacactttctnttatctctcaaaagtcctaggaaagagaagatgatctt

SEQ ID NO: 256714 - DNA, 681 bp, Homo Sapiens
aaggtagcgaggcctgggtggcgaattcggcacgaggcaggtgcgctcgcccgcgggggctgcggcgcggacgaccgaagaaaaccacgacttcctggaaaagtcttcaccgtaaatattaatctctttggcatgaagaggaaaacactgcagctaatttttcatgggataacaaaaatataaactgcaatttcttttattttttccctttcgatggtctttttaaacgaggagtaaagatttcaacgccaggtccattttccaaattttgtaccagaaccttgaggatgcttgtctctcgcgcgcttctccgcagaccgaaccctctccggaactcagagctgttcacccaagtcagcggaggaggcctcctgggacttgagcctgagggtggcgaagaaccctaggcagagatcatcaacttggtaccgatgagtgacgcggagcttgaacattccagcgacttgctccagggccactcccagttaagaggctgagtgttaactgcaagaggctgagtgttaactacgccgttggctccaggaaccgaaccgggtttggatacagacccagtcacaccatccatgaaaagctgtttctataatatgaaaaattgttaaatgacgctttagtaaaagccatttaaagatcttttctaataaatttttcatctttccaaac

SEQ ID NO: 256715 - DNA, 1322 bp, Homo Sapiens
tgtttgtttgtttttggggggttttcttgccttggttgtctggcaaggactttgtacatttgggagtttttatgagaaacttaaatgttattatctgggcttatatctggcctctgctttctcctttaattgtaaagtaaaagctataaagcagtatttttcttgacaaatggcatatgttttccacttctttgcatgcgtttaagtcagattatacacaaaatggagtttattttttagattaactgtgtttctccgacagctcacctctctctgaccacccagacatttccttcctgtgctccacgttcttctgtgtgattaaaataagaatattatttttggaaatatgcaactccttttcagagatcaggagggatttatgtagcagctatttttactgcaaaagtaattcactggaaaaaaaatggtatttgtaagaaagctttatttttatctcagctctaatgtaaagttaaagttactgtacagagctgaaggacggggggcggtacgggtcttgatgaaacctcttgaacgaagcacagtttgtcccatctttgttcactcgtgtgtctcaaccatcttaatagcatgctgctcctttttgctcagtgtccacagcaagatgacgtgattcttattttcttggacacagactattctgaggcacagagcggggacttaagatgggaaagagaaagcatcggagccattcattcggagaaaacgttttgatcaaaatggagacttttgtagccgtctcaaaagagcacctgagtcatgtgtattcccggcctttataaatgacccggtcaagttggtttcaaagtccgacaggcttgtctgtttactagctgcgtggccttggacgggtggctgacatctgtaaagaatcctcctgtgatgaaactgaggaatcgggtggccgggcaagctgggaagagcaaagccagactgcgctgcctcaatacccacaaaagaccattcccagtatacataagcacaggatgtttttctcaagagggatgtatttatcacttggacatctgtttataatataaacagacatgtgactgggaacatcttgctgccaaaagaatcctaggcagtggctcattgtatgtgaggttgaaccacgtgaaattgccaatattaggctggcttttatctacaaagaaggagtttcatggggttcagcctaacagttatggaaactacagtccttataaaccattggcatggtaataaacagatcttaagtataaaaattttgtaattgggcctttactctctcaataataaagtattttgtttatata

SEQ ID NO: 256716 - DNA, 699 bp, Homo Sapiens
tttcatctgcctccatcttaagtgcaattccttcagctgtaagagctcccagtttcttattctttgctttcttaacctttcccttgatgctggccacatcaattttagtttcagtagaagcttccttaggtttcacaattggtttttccttaggtggaataaatgctttgtttctttcctcgtgtctcttactgatggcttctgcttgtttagcctttattgcttccattttctgccgcttcttctgatttgccttcaaaaagtattcaccactagccaattctttatcgatctgactttctggttgtggtggtgggaatggcgtatattctttcttaacagtttttttctttggttccttgcgtttattcacatttttgtgtttgaactgtggcaaaaatctctcccaactttgtgatcgtaattcagaatcttttgccaactctctcttaatcattaagcttttaatgttataaattggatgaatattcttcatagtatcaaggactacttttctaacctcttttaagccactaaaaggtccaatggctgaaactgtgtttccctgaaccataatgtaacaattagttaagagttccaatgccttcaatgtagatcctttgggaccaataagccgttgtcttcgtttaacaaatctctctttattccttactaaagaacctattttaatgatgtcac

SEQ ID NO: 256717 - DNA, 837 bp, Homo Sapiens
  misc_feature (541)..(541): n is a, c, g, or t
  misc_feature (550)..(550): n is a, c, g, or t
ctcatttcttaatttattaacaatgtatacatttgaaaaaatatatacaatatttcaaaacaagcccttcaagactatatttaagcaatgacatccaaggaagcagaactcaggtaccatgtaatatttggaaaatatggtgacttgaagattaagatttctcttccttgctggttactctgaagtctccaatatacaaaggttgctcctaacgtggttttcttattgagccaagcatcttgatgggtcaatcccagtttcattttctccagtactacaaaaattaaaaagaaataaacagaaaataatttacttaattatttcacaaagataaacaatagtctatagttttaaaaaagactactaataaaataaaaagtgcattaattagtttgctaaatgctacaaaaaggattgcaatttaactatactgtataggattcctgaggcttcacttaaaaatcgagtttatatgagaaaataattcaaggaaagggtgtctgctgactgtaagctcaagatgaatgtaattaacacgagnacaagcaanaatcatctcatccagcactaggaaggcaaaaattccactgaattctaaagtgatttagataaagtgattttgagtagtgtgcttggttcttggtgccacattttgagaggctgtgaaaacctgtagcttatcccagagagtgcaactacttcattccagaaatggtctggaaatcaaatcaaaggaagaagtcgagaggcctagtgaagagctgttttggggccaacactattaatggtgttcaatactgagatatccccagtaggaataaaatcaacgaagatttc

SEQ ID NO: 256718 - DNA, 1881 bp, Homo Sapiens
  misc_feature (323)..(323): n is a, c, g, or t
  misc_feature (354)..(458): n is a, c, g, or t
  misc_feature (1430)..(1438): n is a, c, g, or t
  misc_feature (1690)..(1696): n is a, c, g, or t
  misc_feature (1716)..(1716): n is a, c, g, or t
cgcctccagctgccggcaggacctttctctcgctgccgctgggaccccgtgtcatcgcccaggccgagcacggaaatctactttcttcaatgtgttaaccaatagtcaggcttcagcagaaaacttcccgttctgcactattgatcctaatgagagcagagtacctgtgccagatgaaaggtttgactttctttgtcaataccacaaaccagcaagcaaaattcctgcctttctaaatgtggtggatattgctggccttgtgaaaggagctcacaatgggcagggcctggggaatgcttttttatctcatattagtgcctgtnatggcatctttcatctaacacacggagtttnnnnnnnnnnnnnnnnnnnnnnnnnnnnnnnnnnnnnnnnnnnnnnnnnnnnnnnnnnnnnnnnnnnnnnnnnnnnnnnnnnnnnnnnnnnnnnnnnnnnnnnnnttgaagatgatgatatcacgcacgttgaaggaagtgtagatcctattcgagatatagaaataatacatgaagagcttcagcttaaagatgaggaaatgattgggcccattatagataaactagaaaaggtggctgtgagaggaggagataaaaaactaaaacctgaatatgatataatgtgcaaagtaaaatcctgggttatagatcaaaagaaacctgttcgcttctatcatgattggaatgacaaagagattgaagtgttgaataaacacttatttttgacttcaaaaccaatggtctacttggttaatctttctgaaaaagactacattagaaagaaaaacaaatggttgataaaaattaaagagtgggtggacaagtatgacccaggtgctttggtcattccttttagtggggccttggaactcaagttgcaagaattgagtgctgaggagagacagaagtatctggaagcgaacatgacacaaagtgctttgccaaagatcattaaggctgggtttgcagcactccaactagaatactttttcactgcaggcccagatgaagtgcgtgcatggaccatcaggaaagggactaaggctcctcaggctgcaggaaagattcacacagattttgaaaagggattcattatggctgaagtaatgaaatacgaagattttaaagaggaaggttctgaaaatgcagtcaaggctgctggaaagtacagacaacaaggcagaaattatattgttgaagatggagatattatcttcttcaaatttaacacacctcaacaaccgaagaagaaataaaatttagttattgctcagataaacatacaacttccaaaaggcatctgatttttaaaaaattaaaatttctgaaaaccaatgcgacaaataaagttggggagatgggaatctttgacaaacaaattatttttatttgttttaaaattaaaatactgtgtannnnnnnnnactccatgaaatgcaggttcactaaatgtgaacagctttgcttttcacgtgattaagaccctactccaaattgtagaagcttttcaggaaccatattactctcatgatacttcattaatctccatcatgtatgccaagcctgacacatttgacagtgaggacaatgtggcttgctcctttttgaatctacagataatgcatgttttacagtactccagatgtctacactcaataaaacatttgacaaaaccnnnnnnnccccccacccaaaaccaaanctttggcgggccccctcccgccccccaaaaaaattttctaaaccatttcttttggggggcgggggccccccaagggaaaggggaaacttgggccctaaccctgttttcccttaaggaaaaaccctggggccttggaactaaagggcgttggggattctccccccc

SEQ ID NO: 256719 - DNA, 660 bp, Homo Sapiens
aagtagatttcccaacatttggcaatccaacaataccaattttcagtgaggttccaaatcttccaatgaagctgaataaagaaatggtagaaggaatggggggcacacagagtgagcagtaccaagagttccgtaaacagtgttacacggctttcctccacctgcgaaggtattctaatctgattttgaacttgttttccttgatggttgatgcaaacattccagatattgcacttgaaccagataaaactgtgaaaaaggttcaggataaattccgcttagacctgtcggatgaagaggctgtgcattacatgcagagtctgattgatgagagtgtccatgctctttttgctgcagtggtggaacagattcacaagtttgcccagtactggagaaaatgaaactgggattgacccatcaagatgcttggctcaataagaaaaccacgttaggagcaacctttgtatattggagacttcagagtaaccagcaaggaagagaaattttaatcttcaagttaccatattttccaaatattacatggtacctgagttctgcttccttggatgtcattgcttaaatatagtcctgaagggcttgttttgaaatattgtatatattttttcaaatgtatacattgttaataaattaagaaatgag

SEQ ID NO: 256720 - DNA, 861 bp, Homo Sapiens
gggggctgtcgccgccgtcgtgcgtgccgctcggcggaggggacgggcctgcgttctctcctccttcctccccgcctccagctgccggcaggacctttctctcgctgccgctgggaccccgtgtcatcgcccaggccgagcacgatgccccctaaaaagggaggtgatggaattaaaccacccccaatcattggaagatttggaacctcactgaaaattggtattgttggattgccaaatgttgggaaatctactttcttcaatgtgttaaccaatagtcaggcttcagcagaaaacttcccgttctgcactattgatcctaatgagagcagagtacctgtgccagatgaaaggtttgactttctttgtcaataccacaaaccagcaagcaaaattcctgcctttctaaatgtggtggatattgctggccttgtgaaaggagctcacaatgggcagggcctggggaatgcttttttatctcatattagtgcctgtgatggcatctttcatctaacacgtgcttttgaagatgatgatatcacgcacgttgaaggaagtgtagatcctattcgagatatagaaataatacatgaagagcttcagcttaaagatgaggaaatgattgggcccattatagataaactagaaaaggtggctgtgagaggaggagataaaaaactaaaacctgaatatgatataatgtgcaaagtaaaatcctgggttatagatcaaaagaaacctgttcgcttctatcatgattggaatgacaaagagattgaagtgttgaataaacacttatttttgacttcaaaaccaatggtctacttggttaatctttctgaaaaagaatacattagaaag

SEQ ID NO: 256721 - DNA, 478 bp, Homo Sapiens
ctgccacaaagctagaaagggacaaaacagcacttgcttccctatggccacatggatagtccctggatatccttgctgtggtagaggtcctctacccattccagccactgatagcagggggattttccttcctaaggagaacagatgtaacagctttgcaaagtaccggcccataggaatcaaatgggtgagatcagctttgggcctgaccccagcaagaccagcatctccagaccccagcctttctcctcaggcctaagagagtcagggaaagagaggagactgtcccagagaccttctcctcgggtcagccagatagtctggatctatggtgtgactcaagctcctccttacccagtgggggtaaggccaggcctctagctacttggagttgtctgtaataatcttgaaaggcccaagggcctgtccccatcctgacttaaaggcatctgcttccctgtttcatatcacatgacag

SEQ ID NO: 256722 - DNA, 587 bp, Homo Sapiens
gctatccagacagagcagctaccctcagctctagctgatactacagacagtacaacagatcaagaagtatggcagtgacaactcgtttgacatggttgcacgaaaagatcctgcaaaatcattttggagggaagcggcttagccttctctataagggtagtgtccatggattccgtaatgtgtagttttgcttgacagatgttgtaatcaagggcctactctaacagtgatttatagtgaagatcatattattggagcatatgcagaagagagttaccaggaaggaaagtatgcttccatcatcctttttgcacttcaagatactaaaatttcagaatggaaactaggactatgtacaccagaaacactgttttgttgtgatgttacaaaatataactccccaactaatttccagatagatggaagaaatagaaaagtgattatggacttaaagacaatggaaaatcttggacttgctcaaaattgtactatctctattcaggattatgaagtttttcgatgcgaagattcactggatgaaagaaagataccatatggatccctggtttaacaaatacgaattctgt

SEQ ID NO: 256723 - DNA, 1228 bp, Homo Sapiens
ggggactcttccggtccctaaagcaagaaggaagaccgagaaaaggaagcggaggagaatcccggggcatacgcttgacacacacgcatacaaaaagagctttagtctcgaaagaggaattaccgaagtgtcgagagaggaattttaagaagtttacaactccgtcttcgccctaaacgcacgctgacccggaaagtaatctcctgaagctaggtcaaaggcgggggttctacggatgccggaaggagggtgcgcgcccatccttttagcaccgcgagaggcgccggtgtttcgagccgtggcaccggcatcggctgacactgctgcctccagctagttatttcgtcctcttccgttcttcacccctacaccttggaggtgaacttctcacctgagggctgtaaagactcgtttgaaaatggagagccaagaaccaacggaatcttctcagaatggcaaacagtatatcatttcagaggagttaatttcagaaggaaaatgggtcaagcttgaaaaaacaacgtacatggatcctactggtaaaactagaacttgggaatcagtgaaacgtacaaccaggaaagagcagactgcggatggtgtcgcggtcatccccgtgctgcagagaacacttcactatgagtgtatcgttctggtgaaacagttccgaccaccaatggggggctactgcatagagttccctgcaggtctcatagatgatggtgaaaccccagaagcagctgctctccgggagcttgaagaagaaactggctacaaaggggacattgccgaatgttctccagcggtctgtatggacccaggcttgtcaaactgtactatacacatcgtgacagtcaccattaacggagatgatgccgaaaacgcaaggccgaagccaaagccaggggatggagagtttgtggaagtcatttctttacccaagaatgacctgctgcagagacttgatgctctggtagctgaagaacatctcacagtggacgccagggtctattcctacgctctagcactgaaacatgcaaatgcaaagccatttgaagtgcccttcttgaaattttaagcccaaatatgacactggccatttttgtaaacgagaccaccaggccttcttcactaagactttgtattcaacttagtttaatgtagatttgccattagctttttcgtaaaataaaagcacagaacagattaacataaaaaaattacttgg

SEQ ID NO: 256724 - DNA, 1805 bp, Homo Sapiens
  misc_feature (189)..(189): n is a, c, g, or t
  misc_feature (1737)..(1737): n is a, c, g, or t
  misc_feature (1744)..(1744): n is a, c, g, or t
  misc_feature (1756)..(1756): n is a, c, g, or t
  misc_feature (1775)..(1775): n is a, c, g, or t
  misc_feature (1781)..(1781): n is a, c, g, or t
ggctgctcctttctagatgagtgaaaggattgccccagcccatacagaggtgctccttgaagggccccatggtatgtctccatacagtatctcctcgtctccacacagtatctcctcatgtctccatacagtatctcctctcgtggttttatcaaaggacttttctccccataagcttactgtttacanagtctctaaaagatgggtggccaagaattatacaaagcatctacatgaccagtgatttctaagggccacacagctggtttggtttattatgtgaaaagcatatcacacggagtatacaggaaatacctcaagtatttgttgaaggagcatcatcaatttctccttgaacatacagcctccacaaaggaccatccctcatactagcatacttgaggaaaagctaacagcttatctacccacacctttgcattgctatggactgaaggtttaaagtgtagaatcgttttggctactcagcaggaatgtcatctgggccattctgtaggagaaaaagcctctaccaaaagtttgcacttgacccagaatgctttgctcttattttcaaactctgtgccacccagaaaggaaaattagtagtggtcacctgcagttttacaagttgctaggcatttgactttagtgatacaaaaaagataaagaaatggagttatatttagtacccagtttgctgggatggggacggggagaactggagaaactgggtggcggtctggagaatgcttaccatcaagtctctgcagcaggtcattcttgggtaaagaaatgacttccacaaactctaaacagacaaagtgcaagtgaaaacaaagctaacgtcaagagcctaccaaaacaacccaaaatggctgcagccatcaccactacactaagtcatacacgctcggccaccaggagttgcagaacatacctccatcccctggctttggcttcggccttgcgttttcggcatcatctccgttaatggtgactgtcacgatgtgtatagtacagtttgacaagcctgggtccatacagaccgctggagaacattcggcaatgtcccctttgtagccagtttcttcttcaagctcccggagagcagctgcttctggggtttcaccatcatctatgagacctgcagggaactctatgcagtagccccccattggtggtcggaactgtttcaccagaacgatacactcatagtgaagtgttctctgcagcacggggatgaccgcgacaccatccgcagtctgctctttcctggttgtaacgtttcactgattcccaagttctagttttaccagtaggatccatgtacgttgttttttcaagcttgacccattttccttctgaaattaactcctctgaaataatatactgtttgccattctgagaaaattcagttggttcttggctctccattttcaaacgagtctttacagccctcaggagagaagttcacctccaaagtgtaggggtgaaaagggaagaggacaaaagaacctactggaggcaagcagtgtcagcatacgccgggtgtcacgactcaagacatcgggcacctcccgaggtgatgaaaggatgtgccatggctcatcttttcaagtcaactagtatttatcaagctgctctgtggaaggtgctggggacaggatggtacctgtccttaaaaccagaatgatcagactcagtggaaagagagttacaagagttacttgaacaacntgtctcntgattataaaantaaagatggagtgataaantacacntagaatagagttatagataagcta

SEQ ID NO: 256725 - DNA, 581 bp, Homo Sapiens
ccgttataaagtgtgccacatggacttaccgagcatggagagaggattttagctaggatttgaacacttggtgctgggaacctcagggtattgcttgccactaagccatgaaaccagagacaaaatctctatactgccctgagttggggggaattctcagtgccaactgtggctggtcctcattcaaagggacggtcagtttggtgtcaacatgaaacaccaagatgtctgtctctgaagcgtgattttaaaatccccatgcctgtggctgcgcttcctatttctagggctgggaaacactccttgcatcaaggggtcacttacagaacaaagaatcttttgggggaaacttcctctaaaaccctctcatatatagacagctttgactggagggtccatttttcttccaggatggtgttactgcagttgaaagggcaatatgaagttactttcttaatgtgacctagcaataggcatagctacgtggcactatattctggccagactcgatgtgtactctaacttaagaaataaatcagtaaggcagaacaaagaaaagagcataacatctaaaataaatt

SEQ ID NO: 256726 - DNA, 637 bp, Homo Sapiens
cacgaggcagcaaagacggcagagaacgagagcgagacaactccctccctccgttcaggaaactgccagggacagtcgacagggaccgccctcttgtcaggacaactgcctgctgctagggtctgttgccaaggtcaacccatcaccaggaactgtcactggggacgagtccatgttcccaagggcagcccttctcttctgctggttaattccagactggtggtgggacccaggtaaccccctctcccacccccgccgacttctcccctttccccagcctcgtgcctctgtccctcaccacggtgtggacagtgccgcaccctcaacataggccatgtggggagtggctgcccctgcctcagggtcattctcctgccatgcgagggcactcgccttctgccttctggttcctcacccctcagaccagccaggaacctctcagagctgaagcaggccctgggggcagaagtgccagatgacagtcagaggcgcaggagccccccctccccacccccaccctgtaactccagctgccactccatctccagctgctctcaatggcttccaggtgtgttggtcggggacagccaccgccttgagtctggccaaggaggtgattaaacagctcagcttctca

SEQ ID NO: 256727 - DNA, 527 bp, Homo Sapiens
tgttaaaatataaagctacatccacagaaatgccaatatgtgacattagtatgaaatttactacagctccatttaacattccaactggttgctgtgtggaatatggcataattgtaataaattatttaggaaagcaagcaaagatgtaagtttttttaatttaaggggaaaaaatgggagccttgctctccaaatccttaaaacatgctatgaaacaaccttcctgaatatactgtggtgccaagtagaaaggttaactgaaattaataagccaatggaaagaaagaaatattaataactgctgatggaaagactagctagatgtcactgtgataaagatgagatccacgtttacatgtgatattccaaatgaattaaaatgctaagcttagaacgaacaatacttccggtctaactccgatcagggtataaaggaacttcatgtgtattggcaaggtagatcaactaagagaagaagtggtaactgtgttgccgatactgtaaagacctcgcaagacggaattggc

SEQ ID NO: 256728 - DNA, 1167 bp, Homo Sapiens
tcaataatgaagagcatgaatatgcatcgaaaaaaaggaaaaaggaccattttagaaatgacacaaatactcaaagtttttatcgtgaaaaatggatctatgtccataaagaaagcacaaaggaaaggcatggctattgcaccttgggataatcctttaatcggttagacttctcaagtgcaattcaagatatccgaaggttcaattatgtggtcaaactgttgcagctaattgcaaaatcccagttaacttcattgagtggcgtggcacagaagaattacttcaacattttggataaaatcgttcaaaaggttcttgatgaccaccacaatcctcgcttaatcaaagatcttctgcaagacctaagctctaccctctgcattcttattagaggagtagggaagtctgtattagtgggaaacatcaatatttggatttgccgattagaaactattctcgcctggcaacaacagctacaggatcttcagatgactaagcaagtgaacaatggcctcaccctcagtgaccttcctctgcacatgctgaacaacatcctataccggttctcagacggatgggacatcatcaccttaggccaggtgacccccacgttgtatatgcttagtgaagacagacagctgtggaagaagctttgtcagtaccattttgctgaaaagcagttttgtagacatttgatcctttcagaaaaaggtcatattgaatggaagttgatgtactttgcacttcagaaacattacccagcgaaggagcagtacggagacacactgcatttctgtcggcactgcagcattctcttttggaaggactcaggacacccctgcacggcggccgaccctgacagctgcttcacgcctgtgtctccgcagcacttcatcgacctcttcaagttttaagggctgcccctgcccatcccctattggagattgtgaatcctgctgtctgtgcagggctcatagtgagtgttctgtgaggtgggtggagactcctcggaagcccctgcttccagaaagcctgggaagaactgcccttctgcaaaggggggactgcatggttgcattttcatcactgaaagtcagaggccaacgaaatcatttctacttctttaaaaactccttctaagcatattaaaatgtgaaattttgcgta

SEQ ID NO: 256729 - DNA, 564 bp, Homo Sapiens
  misc_feature (14)..(14): n is a, c, g, or t
  misc_feature (30)..(30): n is a, c, g, or t
  misc_feature (52)..(52): n is a, c, g, or t
  misc_feature (117)..(117): n is a, c, g, or t
  misc_feature (132)..(132): n is a, c, g, or t
tcctgaaggcaaanacaccaactcccaatncaatagaccttttccgaaaagnacaaaagtcctacaaaaacgctttcaacaaaaaggtactgaacaaaacctcctcccaacagctgnctgtcctccactaancatatacaacgtgggggtcacccggccctaaggtgaatgaatgtccccacccgtcctgaaaaaccggtaataggatgttgttccagcatgtgccagaggaaggtcactgaagggtgaggccattgttcacttgccttagtcatctgaagatcctgtagctgttgttgccaggcgagaatagtttctaatcggcaaatccaaatattgatgtttcccactaatacagacttccctactcctctaataagaatgcagagggtagagcttaggtcttgcagaagatctttgattaagcgaggattgtggtggtcatcaagaaccttttgaacgattttatccaaaatgttgaagtaattcttctgtgccacgccactcaatgaagttaactgggattttgcaattagctgcaacagtttgaccacataattgaac

SEQ ID NO: 256730 - DNA, 1514 bp, Homo Sapiens
gggttgccttctagcttgctggtaactttggcgcctccgccaagccctgccagactcccctggctgtgatggcattctgtgccatcctccttgtccccagcctctgcaggatgccctccctacccacctctccctgggccttccctgtccactgggctggattcatgttcaaaccactggactggcagggcaacgacttcttcccacctcaagatgaggtcctcgcccccctgtcttggcataaaaacacctttaaagcatgagccatgtgcttcttgccccttctctgtcctgttccaatctttctgcctcccagtcactccctgggcactatgggatcactgtccccccacctgtgtggccacaccatgtgtcctgtcaatccagaactgcctctgagctccaggctgaccacagatcagccacagcctgatgcctgcagccccactttgctcacccttcccctcccctcctccttccttccacacagcaagcctacctttctccatccatgctcaccatagcccccttccttgtgacctggaccctccattgtacctggctgagactgtcagcctcctggaggagtggggtccaccttcttcttgccctatgcagtgcaagctcacttctcacccagcaaggttgactcatctgcctccatgtctctggggctttgctgttgccctgaaacctagctgggctggtcttgctcccagcttgcttccccctcctcggatgtccctttgcaggcccctgtcgttcctccggcaccagtgtccttggctgccatggcaagctcatcaggggcttgtaccctggtcaccaagcatggtagcagctgcctgcattgtatctccatctggtcactgcaggtgccaacccttcatcccccatgttttcctgggccatggagggctgacctccgtttctggggaatgtggctgagctgtggtaaccagctacaccccaggtgctctttccatggtggtgcctgctcatcttgctgatgcaaactaggaagttaggctgcatctcggagtggctttcgctggagaggtgctttgctgtctctcagactcagtcactgtgttccctccccgcctctcttatctccatggctgtttgcagctctcccaggtactttggggtctgagctggaattcctttgtggtttgctcttctgcttctcactcttgtattaagaaggattccacaaagggagagtggcatccctgctgctgctgtgccagaccagagtttcctgaggggccctgaccctaaccctccagctcagccctgtacacctgaccctgtaaatgagtggggtttgctgactgtaatccctgacaccagtaaaaccaaaaggactcttgggggctcagtgtgagagccagggttacctactctgccaagtgaggacaaactgctaggctgtatcccataatttcaggatgagaaacattaacaataaaaatttgtagtaaacataacctcatgaagaacttataaaa

SEQ ID NO: 256731 - DNA, 809 bp, Homo Sapiens
cagtttgtgagtaaagctgtctggaattaagttaccaaaaatacaaagcaaaaggactattattttgggttgaagctccaaaactgacagcatctgataatctgttggtttatttcacttttcattaaatgaacattgatgagagaagatgccacttacccaagctttagagaatccctagtggaagattatatgataaactttcagtcctgacataacactagggcatttctagagtgtcattgctaaaacctcactgaacagacgcagccaaggtctgtgttcagcacttggtctctgttgttacgtaaaataataagcatttaaaatagtttacagatatttttgaccagttccttttagagattctttcagagaagaaaccagatctgacctgtttattgttggcgcttgttgaaaacgagctttctttcccatgatagtgcttcgtttttgaagtgttgaagctgtgctccccttaaatcgtggcaggagagattaaggtaattacaacactcagttctatgtcttacaagcactttgtcttgtctctgcaagaaaattcgattccagtcatttcccataaaatacagacattttaccaacataatatgctttgattgatgcagcattatgctttgggcagtattacaaaatagctggcgagtgctttctgtatttaaatattgtaaaaagaaaataagttataactgttataaagcagaacttttgttgcattttttaaactgttgaagtcactgggtatgtttgtttgggcaatgtttcccgcagtatttattaaaacatac

SEQ ID NO: 256732 - DNA, 702 bp, Homo Sapiens
gtctctgtaagccagtgtcttacacttactgtctagtcacagaaccctggggcgttatctgggacagcctggtagctgagaggtccctgggtgtggtgacagtgtagcaagaagcatttgcccttcttgagtctctctcccccacagcgcttcagcatggaaggcatctccaacattctgcagagtggcatccgccagacctttggctcctcaggaactgacaaacagtatctgaacacagtcattccttacgagaagaaagcctctcctccctcagtggaagacctgcagatgctgacaaacattctctttgccatgaaggaggataatgagaaggtgcctactttgctaacggactacattttaaaagtgctctgccctacctaaccttgccctttggaccagcctcgctgcaggaggtcactgagcaagagtcattccatcacagggactgcatgagaccatgtaacctccgacatgtatttaaacgtgtatagcttaacctggattaaacaccgagcaagcgcgcggggtcctttgccgttggcttctagtgctagtaatcattggatgcatgatggggcagggccggtgatggtgcctcccccttgctggtgtcaggagaggggaaggcagccgctttcaccgctcattatgtagtcgggctacagccctcaaaaacagcttatactcgttaagact

SEQ ID NO: 256733 - DNA, 393 bp, Homo Sapiens
  misc_feature (280)..(280): n is a, c, g, or t
  misc_feature (305)..(305): n is a, c, g, or t
cattagggcgttaaaagcgtgctggggctgctgctgcaagtggtgaatgggggactcgggaaactgcccccaatgcccatgcggtgggccagggtgaatggtgcaagcccattggtgccgtcggggaagcgcccgtggttcatggccatcatatggtctgccatttccagtccttccgtttttgcgaattctgctccgaagaccgagggcgggctcgtcgcgtccaggaccggctcagcagcacatagaggggaccttcctggcgtgcaagatgcgcctntgtcgcgatgtcggcgccgaggtcntcgcagcggccgctggggcagattcggagccgttcccttttatttcccctccgttgccctcacagctcggcaggaccgcccggcagct

SEQ ID NO: 256734 - DNA, 622 bp, Homo Sapiens
agcttcagagaacctcctacctcagccttccaagtagctgggactataagtgtacaccaccgctcccggctaaagccgggactttatttcagactcttcatttcatattgttaagggggagtcagaccttctgtattcaaggtatgcatcaagactgtggacgctggcatttgtgtaatcagaacgttttatgagatggttagccagcccttcccagcagtaagtcagcttgctgcatttgaaacttacatactggcaagtcaaaaagaaagtcttcatcattgcccatgctcaacagaggaaaggaacccatggcagacatcattaataactaaaactaaatgaaaaatattccagccttagatattctgatacactccttatttttgagggctgcagaaaaggttaacattcagcttctggaaaagaatactaaaattccttctgaatactaaatatgctcaagtccactgttgaactatctaccaagatgaagcctgctggagtttcaaaaatgtccccagtgctctcaacctctgtgcgtctctctccacatcaagagtgaagtcagaagttatgtgaataacccaccccacccccccacaaaaagtgacccaggccc

SEQ ID NO: 256735 - DNA, 435 bp, Homo Sapiens
  misc_feature (313)..(313): n is a, c, g, or t
ataagctactgacccagcccaaccctactctcatctcaggattcaatggacaaaactgcttcctagttcaaaaagaaaaagtatgtcatcaggaacaaagcccatcaacttcacaaccatgcagcacaaatctatttgtgcctgcgcccgaaagaagcacctccctcctgtgcaagggcatgtgcactcacctgggccctggatcccactgttcctcttcatctaggacaagagctctccaaacttgagtgtgcgtgagaatcaccccagaaagctcatatgaaacacaagctggttgagctcaaacccagangttctaatttgagtaatcttgaagtaggacttgtaaatttccctgtggcgaattccttgcagccccgggaatacactatgtctagaagcgggcggcaaccgcggggagctcccagacttttt

SEQ ID NO: 256736 - DNA, 506 bp, Homo Sapiens
  misc_feature (66)..(66): n is a, c, g, or t
  misc_feature (81)..(81): n is a, c, g, or t
  misc_feature (93)..(93): n is a, c, g, or t
caatccagctgccttgggaaggagaaaaccaaaaacacgaaagccagagctccgccggcttctggnacttaagagcaagcnttcccgggaagnccccattgtacaaaatgcccttttcctgtgcatggagcagcgttcggagggaaaggaactcctgcaaagtccgagataacagtcaagggtttcggcagtaagagaacagtcaggaacaggtttaaaagccaggagcgcatgtggtcttcctgcatcacactccctgggcgggataaaaatgatctaccgcggcggttaccaaggccgatcgtgggatgctgatggggcctggattaaaaaggtcaccagcccgccaggtgccagaagccaccgggtatccttgcccacggcagggcccacccaggggtctaactgtcctcccacctcccctctctgcgtggtgatggtgtctggactcgccactcgaggtaggttgagatggaaggtatcctcagacatcaagtggtggtcgc

SEQ ID NO: 256737 - DNA, 986 bp, Homo Sapiens
gctgggcctgcctcggacgccgccggtgtcgcggattctctttccgcccgctccatggcggtggatgcctgactggaagcccgagtgggatgcggctgacgcggaagcggctctgctcgtttcttatcgccctgtactgcctattctccctctacgctgcctaccacgtcttcttcgggcgccgccgccaggcgccggccgggtccccgcggggcctcaggaagggggcggcccccgcgcgggagagacgcggccgagaacagtccactttggaaagtgaagaatggaatccttgggaaggagatgaaaaaaatgagcaacaacacagatttaaaactagccttcaaatattagataaatccacgaaaggaaaaacagatctcagtgtacaaatctggggcaaagctgccattggcttgtatctctgggagcatatttttgaaggcttacttgatcccagcgatgtgactgctcaatggagagaaggaaagtcaatcgtaggaagaacacagtacagcttcatcactggtccagctgtaataccagggtacttctccgttgatgtgaataatgtggtactcattttaaatggaagagaaaaagcaaagatcttttatgccacccagtggttactttatgcacaaaatttagtgcaaattcaaaaactccagcatcttgctgttgttttgctcggaaatgaacattgtgataatgagtggataaacccattcctcaaaagaaatggaggcttcgtggagctgcttttcataatatatgacagccccctggaataattgacgtggaatgttttttcggtgggccttttaggaggtagccaccttgcagggaaattttcccctgtgggtgggaaggccaacttgggcccaatggcctgccatggaaggaacaagggcccactctttgaagggttaattttccttcaaggggaagccattttttgttggacaaaattgtcctctgcccat

SEQ ID NO: 256738 - DNA, 577 bp, Homo Sapiens
  misc_feature (504)..(515): n is a, c, g, or t
gcattggtaacttgaaaatagaccagcttaatgtcttcaggatgtaaaactctgaatacacggcgtctctttttcatacattgcatgtaagttgttagtacctcacaagctacagaagttcagccatgagattttgtttggcaacatgaacagatttgtgtataactgcaatggcctttttttccagatttccttattgactttttgtttgccttacctggggctagttttttatgctttgtacctagaaaacaaaaaattacattcgttgggctttttttcaaggttgggattaccacaccacctggaatatcatactgtggtttctgcctaaaattggcacatgtaagtattgaagaaaatggttatataattcagttgaaactcttggttattagatgttaggcatctcctgtatgtaagacacaaggccaaccacaacacagaacgatgttgacctgttaagtattctctgaaacatggccaaaatgcattttatgagcnnnnnnnnnnnngctattgtaaatattagtggtttacaatgcgctttagacatatttctttaacatagaatgtg

SEQ ID NO: 256739 - DNA, 874 bp, Homo Sapiens; identical to SEQ ID NO: 15898
  misc_feature (738)..(746): n is a, c, g, or t

SEQ ID NO: 256740 - DNA, 1457 bp, Homo Sapiens
  misc_feature (78)..(104): n is a, c, g, or t
  misc_feature (875)..(875): n is a, c, g, or t
ggcggtaccggtccggaattcccgggatatcgtcgacccacgcgtcgctgcttgtgtgcatttttttctccctctttnnnnnnnnnnnnnnnnnnnnnnnnnnngtagatagtgctaaatattttagctcatgaaacttggttaggatggctgggggtacaagtccccaaactacctcttgttacagtagccaggagtggaatttcgtcaaccggtacttttaaggttaggatgggacgggaaaagtgaagcaggatattagctccttataccttctcccttccatttctgagatctcacattccatctatcacagggttttcaaagagatgctgagggtaacaaggaactcacttggcagtcagagcatcatgctttgaggtttggggtgctcaggctgggagggtagaatgccattccagaggacaagccacaaaaatgccttaatttgagctcgtatttacccctgctgataagtgacttgagagttcccggttttttcctcttgtccttccctcccttctgtccttccatgtgtggggaaagggtgtttttggtagagcttggtttccaaagcgcctggctttctcacttcacattctcaagtggcagtttcattatttagaatgcaaggtggacatcttttggatatctttttctatatattttctaaagctttacatatgagagggtatagggaggtgtttataaaacacttgagaacttttttccttaatatcagaaagcaaaaaaataaaaccacaattgagatttgccctttcaaaccctcaagttttgcctctaaccaggtgtaccctggtcaccatcagagtactggaatacgggtaaccgaggaagacctcggtcctttctgntttttgatctggactcttgggagtggaaatgagaatgagtttattcctactggagcttagttccaatgcatttggctccagaaagaccccagtgccttttgacaatggccagggttttacctacttcctgccagtctttcccaaaggaaactcattccaaatacttcttttttcccctggagtccgagaaggaaaatggaattctggttcatactgtggtcccttgtaacctcaggtctttaatgtgatcactttcaaatttaaaagatccaggtggaaatatttttactatagtaataattctacaaaatacctgaattcttaacactgttatatttcagtataagtggtggctttttcttttcatgtctttgatctggttttattcctgtaattcagccacctgattttgtgaggggggggaataatatgtggtttttgtacaaacatgtttctcagtgtgttgttattttggaaaaaatgaggggagggagtttggcaagaatggagaaaatgaatgaagaaggcctaatctctctctttttcagtgaataaatggaacaccatttctggattctaaaa

SEQ ID NO: 256741 - DNA, 933 bp, Homo Sapiens
  misc_feature (69)..(78): n is a, c, g, or t
  misc_feature (198)..(232): n is a, c, g, or t
acatgtttgaacaccaattgaaacatgtccccctttcaagacttgataagtaaacttcttgttctattnnnnnnnnnngtagatgattgacagaaggctagatggatgtagactgagagaagacagacatagaggacaggtgaatagatacggatgattgataggtataagtgattgacacagattatagatttagcnnnnnnnnnnnnnnnnnnnnnnnnnnnnnnnnnnnaacagatgacagatcaagtaaacctgttctattaaaaaacatgcagacactgataacactgcagtgtgttctgccatcaggcacactcagttattccacaggaacaaacggaaggaacatccacatgcatgaaacagcacaggagtgcatgccgagcaactcaggaaagggtttttgtcttgtttttacgtgaggggaatgcacagtgtaactggaggttttattttacttttaaacaaaaaagaaaaatataccttttctttcaaaccacttttatctaagagatatctgcaggacttgctgataagagccaaccttccagggacgcataactggcacctgatactgtgcaggatcacattgtcaaggacagtaagcagacagaaaaagaacgcgagagatgctctcaaactggtcgtcgattattcttgtggaaaaaacacagcttcttacagatctaacaccaatcacaataggcatctcgctttgcaagaacaaacatatgagcctaataaaaaagaggcacttcagtattttatgcacagtcttaactctctataatgagcaagacaatgtttcctaaatgaaattatcaactgactaaaattgatccatacttctttaatctgtaaacaaaaaagagagcaaatgttttaagaaaataaagggaccgatttagaagttcaaaagaggtaaaaata

SEQ ID NO: 256742 - DNA, 771 bp, Homo Sapiens
gtacagtagaaggagcacaggacaactctcttcacacaaggaagctgtgtgtttacacaattcaaacacccagaatcaaaaccacattctcccattaacttgtgaagataataaatttgctttgataacttcctttcaagaaaagataatttttcctccccaaagcacaccaataaatatttatattaaaaaccacagttaatttaatcaggcacagaagaaaaaatcatttttacattagtctttgtagataagaaaaatttgatttacagtgcatattccaatcccaatctgggtttgtcctcaaaattttgagaaatagcataaagaactattttgccaactgtgcgtcacaattctatgattgacgtgagttgcaggcacttggcgttccaacagaggcacggcaactgcagccatcacagccacagagctccccacaacatgggaagcgtccccatctccccacacacgtgatttccagagtttcaaacacagtgtttacattcctgcgcagcaagaccatgttagccaaaaacaaacctacactgacttccgctggaaagtatttgcagaagtcatgaaatggtgtatgtttttactatcccagcaagcacttctctagggaaaaggacagttacgactatttacctgaggaaacttagaatttgtcaacttagctgttatactaaaaattatgaacttgtctctgtattatggaacaaagaaaacctccacaacttcaccatttcaaggttctaatacaagctg

SEQ ID NO: 256743 - DNA, 714 bp, Homo Sapiens
  misc_feature (87)..(121): n is a, c, g, or t
  misc_feature (241)..(250): n is a, c, g, or t
  misc_feature (667)..(667): n is a, c, g, or t
  misc_feature (680)..(680): n is a, c, g, or t
  misc_feature (703)..(703): n is a, c, g, or t
agtgtgcctgatggagaacacactgcagtgttatcagtgtctgcatgttttttaatagaacaggtttacttgatctgtcatctgttnnnnnnnnnnnnnnnnnnnnnnnnnnnnnnnnnnngctaaatctataatctgtgtcaatcacttatacctatcaatcatccgtatctattcacctgtcctctatgtctgtcttctctcagtctacatccatctagccttctgtcaatcatctacnnnnnnnnnnaatagaacaagaagtttacttatcaagtcttgaaagggggacatgtttcaattggtgttcaaacaaaaattccagcttgtattagaaccttgaaatggtgaagttgtggaggttttctttgttccataatacagagacaagttcataatttttagtataacagctaagttgacaaattctaagtttcctcaggtaaatagtcgtaactgtccttttccctagagaagtgcttgctgggatagtaaaaacatacaccatttcatgacttctgcaaatactttccagcggaagtcagtgtaggtttgtttttggctaacaatgggtcttgctgcgcaggaaatgtaaacactggtgttttgaaactcctgggaaatcaccgtgtgtgggggagatgggggacgcttccccatggttgtngggggagctccgntggctgtgatgggctgcagttgnccgtgcctcaa

SEQ ID NO: 256744 - DNA, 535 bp, Homo Sapiens
  misc_feature (267)..(267): n is a, c, g, or t
  misc_feature (299)..(313): n is a, c, g, or t
  misc_feature (386)..(440): n is a, c, g, or t
tctgactttaaagactacataattaactactattctgaagggtttaagctgtggcttacaaataaaaatattaaactaccaagttatgattagtaagacaaaccatttctaaaatcccttctaaatatatctggctatttttcaaaagtcaaatccacacgacaaagagtgaggaggctgggcacagtgactcacacctgtaatcccaaaactttcggaagtagatagaggtgagatgactgcttgagcccagttgtttgagaccangctgcggaatatagggagaccctgtctccacnnnnnnnnnnnnnnnttagttgggtgtggtcgcatatgcctgtggtcccagctacaaaggaggctgaggtgggaggattacttgagcnnnnnnnnnnnnnnnnnnnnnnnnnnnnnnnnnnnnnnnnnnnnnnnnnnnnnnntgacaaagcaaaagcctatcttttctctccctcccccaacaaaacccaaagagtgaagaaaatgtgatgctttacaccttaaaagaaattaccaa

SEQ ID NO: 256745 - DNA, 917 bp, Homo Sapiens
  misc_feature (317)..(327): n is a, c, g, or t
  misc_feature (843)..(851): n is a, c, g, or t
gggagcgtcatcagcatatgacttgcgctggtcatccggtaaatggatgtgctgtagtcccagtgctaatcatttctctccttcacagtgggtggaagtttagggttaaatgtcctttgaatgtcacctggtgagtccttgacaccttaggctcttcagaaacaatggttttgttgaggatggggaacagggaatgccgattttatatacatggtacacagagaggggtgtcacttcagaaaatcttccagcatgttcttcagaatattaatttatatgcgaggtgaggttgggaatgaaaagaacaggtcagcacnnnnnnnnnnncctagaacatacaaaagaacatggtggactttcagggagtgcaatggaaggtgaatatttccttaagggtccccgagaaatgggagtgaggggaggggacacaatggctttttgagcttacttttaccttctgatactagtcaaggtccagaaccagccaccagccaaatttctatctgggtgcgggccactgaaaatccttgttaaaaaccagatcacaaatctggggctcttggtcccattggagaaggaaggaagagcctcaaaataagtgtgcatccatgcacatattcaggaacagcttgtttagtctttacactttgcctgaaagttgcttctcctcgtccctttgtgtgcctgggtggcctcggccctgtgcgttggcaacgcaggatcaaatgtgctgcagcttttgcagaaaacaactcagaaacacaaaaccccccaacagctcaattattattttttcaatgttttcctacaagagccaagtagcaccatgtacagaagacgccnnnnnnnnnggaatattgaaatcgttctgcatgtaaaatatgggataatgacctgtttatattaaaattctgatt

SEQ ID NO: 256746 - DNA, 430 bp, Homo Sapiens
cgtcatcagcatatgacctgcgctggtcatccggtaaatggatgggctgtagtcccagtgctaatcatttctctccttcacactgtcctcctggccagcggtgggatgggggtcgaaacagccccgtcgagggcctgggagtgtaggctcttcagactcaagggagtctcgacagccgggagacttggaacgtcgatgtggaaaaagataaatcccttctggccagcgttgggattggggacactacagccccatcctgggcctgggtgtgtggcctctgcttgctcttggcagcctcgacagccttgagttttctggcgtgtttgtggactttataatgtgcctcggcctggttcgctgagttgaacctcaggtgacagatgttacaggaaatgaacagcttcttcttcagaggggaggggacaccaaa

SEQ ID NO: 256747 - DNA, 508 bp, Homo Sapiens
tctgctcaagaggcagctgtgcatcttcaatcatagattggctatgcttcatttcttctggagtcctggaatctatcattgcacggctcaccatgtccgtggcatggtctacctcctgttgcgcagttgctggtgtctctaagatttctgtcaatgtgttccctggctggttccggatcacatcaaattatcagcttcttggtctttatcatgaggcttcggctatctatagcttcaccgtcctctatgtcatatttgcttgtcaagacaagagaaatctcggtctttgaaagctgacttagtgtatttgccttgttagggtcattggggtcaactgctccttccccaagaaaagattccacggttggcacctctcccagcgaccccagcaattcactcagtaagtcatttttctcaggggcaattgcatcctggtgttccaacaggagtgagtgtgtgctgatgatttcttcaattgaaatataaatgactggtttctgtgccgaat

SEQ ID NO: 256748 - DNA, 1998 bp, Homo Sapiens
  misc_feature (957)..(957): n is a, c, g, or t
  misc_feature (1154)..(1154): n is a, c, g, or t
gggactccgaaggggcagcagccagagagggaggcggggcggacgcgaggagccgggcgcctagaacagaggcctgcacaggaggagaagtggaagacagaagagggccaagaagtgcccgtaaccgtggagacccagggtgaggacggggacacagatcccgaccccgggaaagacaacacagaaaaggagcaacgacggggagccaagaccaccgagggggcgggacgcacagaacacaccaacacccaccagctgaggaacaaagcaccagaggagcacgacgcccccaggaagaaagagacggaggcagggcccaaagcaccccagggctacggaggccggcccggagcagaaagagaccgaacggacaagagcgcagcgggccacgagcacgccgccgaggcggagaagcaccccccccagacggacgccgccaaaggcccagggggcaagtacggagttgagagggacagggcagacaagtcagcagtcggctttgattataaaggagaagtggagaagcacacatctcagaaagattactctcgtggctttggtggccggtacggggggagaaggataaatgggacaaagcagccctgggatatgactacaagggagagacggagaaacacgagtcccagagagattatgccaagggctttggtggccagtatggaatccagaaggaccgagtggataagagcgctgtcggcttcaatgaaatggaggccccgaccacagcctaaaagaagacgacgcccatagaagccgcctccagtggggcccgtgggccgaaggcgaaaaatgagtccatggccgaggagaagaggaagcgagaaggaagaggagaaggcacagcagggggccaggaggcaacaggagcgaaaggctgtgacaaagaggagccctgaggctccacagccagtgatagctatggaagagccagcagtnccggccccactgcccaagaaaatctcctcagaggcctggcctccagttgggactcctccatcatcagagtctgagcctgtgagaaccagcagggaacacccagtgcccttgctgcccattaggcagactctcccggaggacaatgaggagcccccagctctgccccctaggactctggaaggcctccaggtggaggnaagagccagtgtacgaagcagagcctgagcctgagcccgagcctgagcccgagcctgagaatgactatgaggacgttgaggagatgaacaggcatgagcaggaggatgaaccagagggggactatgaggaggtgctcgagcctgaagattcttctttttcttctgctctggctggatcatcaggctgcccggctggggctggggctggggctgtggctctggggatctcagctgtggctctatatgattaccaaggagagggaagtgatgagctttcctttgatccggacgacgtaatcactgacattgagatggtggacgagggctggtggcggggacgttgccatggccactttggactcttccctgcaaattatgtcaagcttctggagtgactagagctcactgtctactgcaactgtgatttcccatgtccaaagtggctctgcctccaccccctccctattcctgctgcaaatgtctaaccagatgaggttctggacaaacttccctcccctgcttcattaagggcttggggcagagacagcatggggaaggaggtccccttccccaagagtcctctctatcctggatgagctcatgaacatttctcttgtgttcctgactccttcccaatgaacacctctctgccaccccaagctctgctctcctcctctgtgagctctgggcttcccagtttgtttacccgggaaagtacgtctagattgtgtggtttgcctcattgtgctatttgcccactttccttccctgaagaaatatctgtgaaccttctttctgttcagtcctaaaattcgaaataaagtgagactatggttcacctgta

SEQ ID NO: 256749 - DNA, 344 bp, Homo Sapiens
  misc_feature (314)..(314): n is a, c, g, or t
ctcgtccaaccatctcaaatgttcagtgattacgtcgtccggatcaaaggaaagctcatcacttcccctctccttggtaatccatatagagccacagctgagatccccagagtccctagggggcagagctgggggctcctcattgttctccgggagaagtctgcctaatgggcagcaagggcactgggtgttccctgctggttctcacaggctcagactctgatgatggaggagtcccaactggagcccaggcctctgaggagattttcttgggcagtggggccggtactgctggctcttccatagctatcacntggcttgctgacctcagggctcctctttgt

SEQ ID NO: 256750 - DNA, 551 bp, Homo Sapiens
  misc_feature (25)..(25): n is a, c, g, or t
  misc_feature (34)..(34): n is a, c, g, or t
  misc_feature (45)..(45): n is a, c, g, or t
  misc_feature (122)..(122): n is a, c, g, or t
  misc_feature (166)..(166): n is a, c, g, or t
gtgtgggaagtcagcccaacttganaaagagagntggctgaacgnaggtggggcaggctgaagccagttaaataggatggtcccaattcacagacggcgaggctacaggtgcaaataggacntctttcaacttgagcaggaccccattacttacactggagttagnaaagcaaaggagagcgtagactttttgaactttctataagagtgtacctcccacagtatacagaagacgacgtgaaatttgatctgcaagaaaactgagtccatattcacatatgtatcaaatttgcacttcatttagaagtgtctgtcatcaagtacagcactgaattgaaactgaaaacaagagtcaagaaagagcaaagtcagccatctttatattccacatgaatcctttccctttatggtcttatttgtttctcctcagaaaagacaaaaagctgagctgtataaacacctgtgggctgggggttgagggataaatgaggggcgaaatggaagctgaaggaactgttggtcgggtagaaatcttcccagatgcactgaag

SEQ ID NO: 256751 - DNA, 842 bp, Homo Sapiens
  misc_feature (514)..(514): n is a, c, g, or t
  misc_feature (682)..(682): n is a, c, g, or t
ggatcagagataagatgggaaaaaaacatcacattgggggaaccaccaggattcttacattcttggtggtgagtgctgcagcagctcccagtccagtgctaggaaacattcccccaggagatggcatgccagtaggtcctgtaccaccagggttctttcagccttttatgtcacctcggtaccctggaggtccaaggcccccattgaggatacctaatcaggcacttggaggtgtcccaggaagtcagccattactccccagtggaatggatccaacttcgacaacaaggacatccaaatatgggtgggccaatgcagagaatgactcctccaagaggaatggtgcccttaggaccacagaactatggaggtgcaatgagacccccactgaatgctttaggtggccctggaatgcctggaatgaacatgggtccaggtggtggtagaccttggccaaacccaacaaatgccaattcaataccatactcctcagcatctcctgggaattatgtangtcctccaggaggtggagggccaccaggaacacccatcatgcctagtccagcagattcaaccactctggtgataacatgtatactttaatgaatgcagtacctcctggacctaacagacctaatttttcaatgggtcctgggtcagatggtcccatgggtgggattangaggaatggagtcacatcacatgaatggctctttaggctcaggagatatggacagtatttccaaggattctcccaaatatatgagcctgagtaatcaccgggcacttcaaggggatgatggccaaattggggggaaaatttcttaaatccttttccgaag

SEQ ID NO: 256752 - DNA, 428 bp, Homo Sapiens
  misc_feature (418)..(418): n is a, c, g, or t
attcggcacagggcaagagtaacagcagcgccgtcccgtccgacagccaggcccgggagaagttagcactctacgtatatgaatatctgctccatgtaggagctcagaaatcagctcaaacatttttatcagagataagatgggaaaaaaacatcacattgggggaaccaccaggattcttacattcttggtggtgtgtattttgggatctctactgtgcagctccagagagacgtgaaacatgtgaacactcaagtgaagcaaaagccttccatgattacgtaagttaacatataattttacaaagttacactgtcagttttctgtttaaccactggctctttaaaaaatacactgggctcatctattcttttgttttgggtacttaaggaaattgtttggtctctttttctcttgnataagtaggt

SEQ ID NO: 256753 - DNA, 973 bp, Homo Sapiens
gacatcgagatggtgtcacttaaaagagccaagattcctgttttcagtttgtggattcatcctgctggttttactttagtccctccatgtcaaagtgggcctgagaaaagctcatacatgcctcatgtgaagtgtccaccctctctgaaaatctttcttgttcaaaacagcaacgacatatcttgttaacttttacggtgacttttggaggaggggagtttggaaattgtaaaatgttatagattgttgcctatttcctgctgaaagtaaatgtttttaaaaagtatcatataaagctgaatacaaattggtttggggggagatcctttcctacccaaagtcataaatatattctttactgccttgtggaaattttatagttttgcctttcacatttgtctttagtctgtcctgaactgatttttgtgaaaattatgagttagaaattcaacttaacatttttcatattcgaagtggttgtctctgcactatttactgaaaagttcatcctttccccagtgatttgtaacactgcctctttcataaattaaatttttgtgtatgtgtgtgggtcttttgatggtttctattctgactgacatcaatttgtctaatcttgtagcagtacagtacagtcctgattactgcaactttaggaaaaggtctgataaaaaccaagatgcctccacattttgtcataattgtaaccaatttcacctctgtctccagtatcaccacaaaattgttcttcctttggagggtctcggctattcttagccaactgttccttccatattaccttctagaaattagacccaacaatttaataaatcaaaacaaacccccaagaggcatttgaaaaatttttgaattgggaatttgggaattggaaattttaaaagaaattaaatccctgggggaaaaaccccatgggcccatcctttttaaccaaaggggtggggccctttccccc

SEQ ID NO: 256754 - DNA, 881 bp, Homo Sapiens
  misc_feature (48)..(62): n is a, c, g, or t
ttttatttatggctggagtggcataaaagatttgttttccatgcttcnnnnnnnnnnnnnnngttttcagggcttctctccctccctatgcatcctacccttctgtttcctgttcttaactttatctgtacctatgggagtcatcaatggggagtgtcacagggcttggcaagaaatgtcacattgaagataagtggcctcaaactgaaaccaagcagggctgtttgtttccaaagagaaccctccactgtagggccgctcatgcaccgccacagaagcctctgccgggtcacagtcagagaagctccccgggcaccggcagcacactcagcacagctgtttcatgtgggtgaacctgagaaggtttaaagtgttgcaggcccttttcaagttttgcctccctcactctctgcaaactcccttaatgtgggccatggaagagaattttaagagacaataacagaaagactggatattaccccagagaataaagacttgcaaagcctggaacttataatgtttgaaacctggtctttcgaacttgagctatcccggttgtcagtcccacagtggccgtgcacaatgttggcctggactgaaaaaggcctctggctcctccgatttcagttcttagcaatatcagacctgtgtttctttggaacagaagttactaaaacaacctaattccaaagaagcccttttgatccagctgttctccctaaaaacattttcgctagcggattcattctctactatttaacagtggacctttaaaacgtaccgttaaaatgctttctatagtaacatgtttccacatacaaattataaaatgtgtttattttctgggcgcagtgctcatgcctgtaatcctagcactttgg

SEQ ID NO: 256755 - DNA, 837 bp, Homo Sapiens
  misc_feature (784)..(784): n is a, c, g, or t
gatctttcagtgtaattggcctgaagtgaaaaccacagcctctgatggtgaacagaccacacgtgagcctgtgctcaaagccatgtttttggctgacacccatttgcttggggaattcctaggccactggctggacaaattacgaagggaatggcagatggagagagcgttccagacagctctgtggttgctgcagccggaagtcgtcttcatcctgggggatatctttgatgaagggaagtggagcacccctgaggcctgggcggatgatgtggagcggtttcagaaaatgttcagacacccaagtcatgtacagctgaaggtagttgctggaaaccatgacattggcttccattatgagatgaacacatacaaagtagaacgctttgagaaagtgttcagctctgaaagactgttttcttggaaaggcattaactttgtgatggtcaacagcgtggcgctgaacggggatggctgtggcatctgctctgaaacagaagcagagctcattgaagtttctcacagactgaactgctcccgagaggcacgtggctccagccggtgtggacctgggcctctgctgcccacgtctgcccctgtcctcctgcagcattatcctctgtatcggagaagtgatgctaactgttctggggaagacgctgctcctccagaggaaagggacatcccatttaaggagaactatgacgtgctttcacgggaggcatcacaaaagctgctgtggtggctccagccgcgcctggttctcagtggccacacgcacagncgcctgcgaagtgcaccacggggggccgagtccccgagctcagcgttcccatc

SEQ ID NO: 256756 - DNA, 529 bp, Homo Sapiens
gctccaacgagataatttggatctccgggaagacacttgttttgccaggttttaggatcacagtgtggtaagcgcacgtccacaggcttcaggaacttgaggccatggggaccacacatcaccaaaggactcagcagtgtttcacctttctctttatctaaaggtggaaggatgctgttgtcccggcagaccttgaaatagatttcctgctcaactccttcgggaatggctccttgagggataattatactaacaccagtttctatggaactcagcacgcccccattgctgttaaatatgcctcgggctgtggccaccacagtatgaccatcttcatcttcatcctcttccacagctgaaggactcacaggaatagctttaggcactgtgctgatattatttatttgatatttaggcttctctgcatggatagagaaagtttcaactccactgtcaaactcaggaggctgtgcaaaactgtgcgatttcacaagagttttaggagaagtgggagtttttgaagacaagt

SEQ ID NO: 256757 - DNA, 891 bp, Homo Sapiens
  misc_feature (628)..(678): n is a, c, g, or t
gctgtgtccagatcttctgtctgctcatccatgtgactcagagaggagggttctgggcaggggggccttgccggactgcatgagaggacatgagttttgctttctctgctctaatattttgcttaagccaagaatccttttcttagagatgttctatatgattcctgtcaggattttctaggtttttttggattatagcttggtcattccttttggttttagtttggttaatatataatgagggaagaagatgattacattatttttgtcacttgcccatcattgtttagaagtcatagaaagaatttttaaataggccaataagtcttaaacttgagtacttggcttagaagaaagtcaaaactccttcctttttgactaagtggtttgtttctggggagctcttaatttctatttttataatcattagcctataaggaaattgtgtcttccttgttctcagggtgatctgctgaccttgttcactcatgaagcatttgggtatcatacttatagtgtctgaaacataaactgtattgagctagacaaggtatagcctcctcctcaagtagcaaatactatcaaaagctataatgcagtaggagcaaggtggtccttgttccagttnnnnnnnnnnnnnnnnnnnnnnnnnnnnnnnnnnnnnnnnnnnnnnnnnnncagtgtggagatctgacacattgttaccgtgcctcctggctggagggacttggagaacaatgcagttaagtagaatggttttaacaatacagagaaatttattcatttagataaaaatctgatttttagaactttaaaagctttgtacagtgtaaatagatttaatgtatttaacatgctttatcagcacaaataaaggattttaaaatttaa

SEQ ID NO: 256758 - DNA, 428 bp, Homo Sapiens
ggtgaagtagaactttcaggggccagaagaatgaatacaaatgtttggataactacagaggaacatctctataaaagtcggcttcttagctttaagcagatgaaacagacttcagctgatttaaatcgagtttacttaaaggcctttggcatctcactgattcccagaaaagccaaagaaccaggctcagaaaatgggcaggacattatgctgtgctgccataactggagcccaactcacactcccagtgtgaggatgccagagcctgcatcaccaccgtcagcactggacatgggcactggagcaggaggtgccgagccaccatgaccacccccaaaaactagatgtggctgctggcacagtctccagatgaactcgccaccccacagcattctgcatcaccagcttccatgcatgtgtgactagcc

SEQ ID NO: 256759 - DNA, 518 bp, Homo Sapiens
  misc_feature (468)..(468): n is a, c, g, or t
  misc_feature (483)..(483): n is a, c, g, or t
  misc_feature (493)..(493): n is a, c, g, or t
attcggcacagcccaggagtcactagccctggcaccttaattgaagactccaaagtagaagtaaacaatttgaacaacttgaacaatcacgacaggaaacatgcagttggggatgatgctcagttcgagatggacatctgactctcctgcaaggattagaagaaaagcagcaacactgatacttgtgtgcacctgatttggccaataggatcaacagtgaaaagacagaagaggcaataccagcagtccccattacagtctccacctccccgtcttcctctgggtgccaaatgatgggaagatgagcttcatctggaccatttccttctccctgtactcctgttccccttcccagttaaacaggttaggattggaaggcccttgctgtatttctgtaggagctaaggcagcccttaggagggaaaacagttcaactctggacttttcctagttgttttttttatttgnaggaggccaccttcntacctgttanttttgttcccaattcaattttcaac

SEQ ID NO: 256760 - DNA, 1138 bp, Homo Sapiens
  misc_feature (43)..(43): n is a, c, g, or t
  misc_feature (589)..(612): n is a, c, g, or t
  misc_feature (1005)..(1005): n is a, c, g, or t
  misc_feature (1072)..(1072): n is a, c, g, or t
  misc_feature (1080)..(1080): n is a, c, g, or t
  misc_feature (1110)..(1110): n is a, c, g, or t
ttcataggactcataagataacccttaaatgttaaaatgcttntagggcatgggctaattcagaattggctggtattataccagaacttaatttttgcaggcatttaaagattttcatgcattatgtacctgaaggttttgtctcttaattttctttgaaccacacctcttctccttattataagaaaaaccctcttagggtaagggaagcccaaattaactgtcctgaaattttgcattatatttaaaccataatatttgatttacttctgtcaaacaaaacactaccatttgggttctcatttgtagattatttaaaaacatgtttttcctgttaattatcaatgcatttactatcacaaggattaaaaagatcacttcaggtggtggggatgtttcatgaaacaccatggtggggagtaggtagtgggcaggcagagtgacaatcagcttaacctcctttcacctagctgttctttagaaaaacaaaaataaaagtcaaattgctttcagttttcaagagtgaaaatggagacacaagaaggatattcagatgtgcaagcaaattgcttcttttacatccttatannnnnnnnnnnnnnnnnnnnnnnngagacggagtctcgctctgccaccatgcccggcctcacaaagtattttctaaaatataatttgctatagagttcacagatgagcacttttcacattaggtgatatgcaaacaaatcactattggctcagcaggaaacagactttttgtacactctagttaacatgaagttttccaataaaacaaatgacagcgggagggggtagtgaggaattcaactctgtaatgtccacctagaatccaagtaggaaaaaaataaagctattgaaataatttagtaatatcctataggtcaccagtgatttccataaaatgctgcacagatacaaagtcttgaggtatgttacttagtaggctaaaaagagagccttgtgtgaggcacagctgacttgganacattaaagagcctggcgttccctttctgctttccattctcccaacagaaaaaaaggtcttcaaggntttggccngtcttaccgctcaccttggggtgtaggtgnctctcccctgtggggctaggggattttt

SEQ ID NO: 256761 - DNA, 423 bp, Homo Sapiens
  misc_feature (254)..(254): n is a, c, g, or t
  misc_feature (338)..(338): n is a, c, g, or t
tttgaaaacggactgcttctgccaccatgcccggcctcacaaagtattttctaaaatataattggctatagagttcacagatgagcacttttcacattaggtgatatgcaaacaaatcactattggctcagcaggaaacagactttttgtacactctagttaacatgaagttttccaataaaacaaatgacagcgggagggggtagtgagggaattcaactctgtaatgtccacctaggaatccaagtaggganaaaaaataaaggctattggaaataatttaggtaatatccctatagggtcaccagtggatttcccattaaaatgcttgcacaggntaccaaggtctttgaggtatggttaccttagggaggccttaaaagggggggcccttgttttgaggggcccagcctggcctttggg

SEQ ID NO: 256762 - DNA, 921 bp, Homo Sapiens
  misc_feature (267)..(267): n is a, c, g, or t
  misc_feature (884)..(884): n is a, c, g, or t
  misc_feature (896)..(896): n is a, c, g, or t
gctgagtggggggaaaggcaggccccacaggaagggccccctggtaggcagccgggtccctgccagcaggaaaaggggacagggacggacaggtggtgggcccagcaggggctgtgggtgaggggtacaggctgacggtggagttctggggaggggcgtgtgggtggcagtcagcagcgtttgagtccgccattggcaagctgggctgggtgtcggggcaggcagggctcctcgggcagcggctcatgagagaagacggaatcctcnccctgaggagcacgtagagctccgggtgtcgggaaagctgggggagtactggtccaggggcatggacaggtccaggtactcctggttggaggtcaaggccacgatgcggtccaggtcttccaccagctgcttgaaggtgggtctctgtgagggcactgcatgccagcagtcccgcatcatcatgtacagctcgttggtgcagttactgggcttgtccatgcggtgaccctccttcagcagcttgaaaagttcctccacaggcacaccggggtatggggagccgcccagagtgaagatctcccacaggagcaccccgaaagaccacacatcactctggtgggtgtagatccggtcaaataatgcctcgggtgccatccacttcacaggcagtcggccgttggttgtctttttatagtagtcgatgtggtgaatgtcccgtgcgaggccaaagtctgctatcttcatcacattgtcctctgtcaccaggacattcctggctgccaggtctcggtgtatgcacttcttggaggccagatactccatgcctcgggccacctgtaggcgcaggacaccaggtccctcgtgccgaattcgccacccaggcctcggtgcgtatntttgataggggntattagaacgaaggcagaagggggg

SEQ ID NO: 256763 - DNA, 1137 bp, Homo Sapiens
ggcagtactcccacgggtaaggtagcgaggcctgggtggcgaattcggcacgaggggatggcacccgaggcattatttgaccggagtctacacccaccagagtgatgtgtggtctttcggggtgctcctgtgggagatcttcactctgggcggctccccataccccggtgtgcctgtggaggaacttttcaagctgctgaaggagggtcaccgcatggacaagcccagtaactgcaccaacgagctgtacatgatgatgcgggactgctggcatgcagtgccctcacagagacccaccttcaagcagctggtggaagacctggaccgcatcgtggccttgacctccaaccaggagtacctggacctgtccatgcccctggaccagtactcccccagctttcccgacacccggagctctacgtgctcctcaggggaggattccgtcttctctcatgagccgctgcccgaggagccctgcctgccccgacacccagcccagcttgccaatggcggactcaaacgccgctgactgccacccacacgccctccccagactccaccgtcagctgtaaccctcacccacagcccctgctgggcccaccacctgtccgtccctgtccccctttcctgctggcaaggagccggctgctaccagagggccttcctgtgtggcctgccttcacccactcagctcacctctccctccactcctctccaactgctggtgagaggtgcaaaggaggcagatcttttgctgccagcacttcatcccctccagatgttggaccaaaccctcctgcaacaggactgctggaggggcagcgcgtgggagccactgaacaggcattgcagtgagaagttcctgagctttctctgtcgggtaggcatgtttgcttcaccattaagcctggactctgtggcaggtgcctgttcctcagggatcagcagtaggaggtcagtgctacgggcctcatgtaagggtactctgcccccatttgttgtgccagtggtaataatccgaaacagtgcgttgccgaccaagtgctgtcccgagatggtacgccaagccagttttgtcattttgtgccggggccaccaagggggccgtaaaaacttagaacaaggtaaccgcattaa

SEQ ID NO: 256764 - DNA, 1240 bp, Homo Sapiens
aggaagcgaggcctgggtggcgaattcggcacgaggggatggcacccgaggcattatttgaccggatctacacccaccagagtgatgtgtggtctttcggggtgctcctgtgggagatcttcactctgggcggctccccataccccggtgtgcctgtggaggaacttttcaagctgctgaaggagggtcaccgcatggacaagcccagtaactgcaccaacgagctgtacatgatgatgcgggactgctggcatgcagtgccctcacagagacccaccttcaagcagctggtggaagacctggaccgcatcgtggccttgacctccaaccaggagtacctggacctgtccatgcccctggaccagtactcccccagctttcccgacacccggagctctacgtgctcctcaggggaggattccgtcttctctcatgagccgctgcccgaggagccctgcctgccccgacacccagcccagcttgccaatggcggactcaaacgccgctgactgccacccacacgccctccccagactccaccgtcagctgtaaccctcacccacagcccctgctgggcccaccacctgtccgtccctgtcccctttcctgctggcaggagccggctgcctaccaggggccttcctgtgtggcctgccttcaccccactcagctcacctctccctccacctcctctccacctgctggtgagaggtgcaaagaggcagatctttgctgccagccacttcatcccctcccagatgttggaccaacacccctccctgccaccaggcactgcctggagggcagggagtgggagccaatgaacaggcatgcaagtgagagcttcctgagctttctcctgtcggtttggtctgttttgccttcacccataagcccctcgcactctggtggcaggtgccttgtcctcagggctacagcagtagggaggtcagtgcttcgtgcctcgattgaaggtgacctctgccccagataggtggtgccagtggcttacttaattccgatactagtttgctttgctgaccaaatgcctggtaccagaggatggtgaggcgaaggccaggttgggggcagtgttgtggacctggggcccagccccaaactgggggctctgtatatagctatgaagaaaacacaaagtgtataaatctgagtatatatttacatgtctttttaaaagggtcgttaccagagatttacccattagtcagagctcctggtg

SEQ ID NO: 256765 - DNA, 354 bp, Homo Sapiens
ggcctgtagagacgtaggccttgggcaatgtgttcagcagtctcactgttagtaaatctctcatatggcatcttccccagggagtaaatttcccacatcaaaaccccaaaagcccaaatgtcagatttgctgctgaacttgctatacatcaggacttccggtggggaccaccggactggaaatttggagcctactgagcttgtgtattcatcatccaggacatacctgcaagcttggcacggtcacaagagtgtcacaaacacacacaggctttctcaaaagtctctcctcctcaactagtatcttctacaaacgttacttttaacgaatttcctgtttttgtatctgattgag

SEQ ID NO: 256766 - DNA, 728 bp, Homo Sapiens
tctgtgtgctccaattaaagtcagaggtctttggacacagttcaagaagtagagtgtctggccgggagcttggcacagggcagtttggctaagggaggtcatggacaactgcagggcagctggataggaaagaagaacccaggatgtgaacaagttgctgggggcatacctcctatggagacttactgggggtgtcattttgggtgtgggctattggatacaggagagcaagcaaagtgttaggacaagatttctaaaccaggtataaatgtgtgcacatggatatttggactgaaaaatcagtgcacctgtgcctacaatcaggcagtaaatggttcagtggtcgcagtaagcgcagggctcttttgggaggcaaattgaaactctatttaagcaaagtgattcagaaggagacgttcaatataggcttcccctgggaacatttcctcctaaggtattaatcagggcacaaggcaaaatactccacaatattgtttgaaagctaagaatgtaactcagagacagaaaccatggaaacccacttattttctgaaatgttgcctctctttggaggagacaacgacaggatgaataagcagatatgctttacttaaaggttatgtgtgagtcagggtaccctctgaatgtctttaatatgttaaatattcaggtaaatgtctacataaagtggtacacataaaagtgaaattgtagcatagattggaaac

SEQ ID NO: 256767 - DNA, 407 bp, Homo Sapiens
ataaggcatgttttctgcatgatggaattagtctagaacctttttccttatatttcgtatgactcttctatcactcttttttgatttggtgttttgtatgtccacagggaaaagataacccttcacgtctttagtcccaaatacacaaaattacgtgactggcaccatgaagtttcagcacgtgctcttaacgtacagtgatttatgagccttgccccccaagcagccagcacataccttttcatttactgtttttttcaacttcatagcaaaatctgtattaaatttgccttatgaaaaaatagaactttttctatacttttctaacaatttcctattgttgtgagaaaaggaagatgaacatgttttgtgctagttggtagctcacaaatgtaaaaccaaaaaaa

SEQ ID NO: 256768 - DNA, 223 bp, Homo Sapiens
  misc_feature (11)..(11): n is a, c, g, or t
tgtatatttantctgaacgggagaagttatattgttaaaagtgtaaaagaataattgtgttatgaagctgccttattttttctctttttgtaagttactattttcatgtgaatatttatgtagataaaatttgcctcctggtaaccctgtaatggatggggcccagaaatgaaatatttgagaaaaacaagtgaaaaggtcaagatacaaatgtgtattaaaa

SEQ ID NO: 256769 - DNA, 399 bp, Homo Sapiens
cattgagaagtgcagccagagtgaatcatcttgttgtcatgatcttggaatttggaatgatactgtgtgatgtggcaggcagcaacagtgggagctcgaagattgatgcactgtgcatgttcaagcaacaaagtctaaaaagtgccagggcaatttcgtctcagtatatcacatgcacagcgtaaagtacgaagggcagaagaagccccatgccgctgttaaggcagggaagaaggctcactggtcctccgtcgtcagaatgtgagttccaaggctccaatgctcagtacgtcttcttgtgctctccttgcaggtggctcgctctgcttccagtatagtctgtgcctctatcagcagagtcatgttcatagtcatcctccacggtgatgtacccttggg

SEQ ID NO: 256770 - DNA, 409 bp, Homo Sapiens
gtgtaatgcactaacattagtgagctaccaactaacacacaacatgtgcatcttcctttgctcacaacaatatgagattgttagaaaagtatataaaaaggatctatgctttcataagggacaatcaacacagaatctggtatgaagctgcgcaccgcagtatatgagaagggatgatccgacagctcgttgggcagggattatacatcactgagcgttaagagcacgtgctgaaacttcatggtgccagtcacgctggattgtgtatttgagactcaagacgctaaaggtgatcgtttccctgtgagaatacactgtcaacatcatggagacccgtggtcgaagaatcatgctcaagtgaatgaataaggtgatagactaattccatcgtgcagaaatcatggcttat

SEQ ID NO: 256771 - DNA, 528 bp, Homo Sapiens
gttagaggcataattctcactcaggttattcatggccattaaggctttttccttaatgtgtggatcagttttgttgatcatgtttgcaataattgggaggcctcccaatttgcgaattgtctctagatcgcatgaataattggcagtgatgctcagactgagcaaagctacctgttggatgaaaggatcatcagatttctgaagcaaggcaaggaccttcctgagatcgcggacacccagaatctcatcaatttcataaggaaaggggcgcttctgcatggcaacgggtcttcttcccctccctctgcgctgggtctcgggctcagagtctgaatctgactctgtgtcagtccacccggactccccttcctcagaatcagggacctctgccaggaaagcctgtccgccattagcagaggctgcagcagctgctgcagccttgcccttgcccttgcccccattccgggacctggttacacccttgcctccacctttgggtaccgctccagtcgctgatgtggctttcgg

SEQ ID NO: 256772 - DNA, 727 bp, Homo Sapiens
cattgagcccactcgcaaaccagagaattaaaagaaagtgccgaagtccttaagcgctacattgtcccttttcagtaattcaccagccgacataattttaaaattctgcgaaaattgggcgcaagaatccgtaaaccggctttgtctcattaccatgaaactgtggggatcaatagtcttctgtcctgtgaaatacacttggtatgagtcacatctgcaaagcgaataagaacgctatatgtccatgtgtcgctgcaatgtgcacagcacattgccatgtcgtatactctatgtgaacacaccgtgtcagatcatctcaaacagagtagtgtgtagtgcatatatcgggttgcttgtttgtgtaagtgttgtaacgagcgttacactgctgtgatataggcgttgccggcgtgcgaatgttctagtgtggctaggatgtagagtcagtcatatcggtctagcatgccacatgcagctaacagccgtacccgtctccgcatgtcactggcagagttatgttcgtaacatatacctccagttcactgcagtgaacggctcagctctccgtagcttctcataccgccgccctctacaagcatcgttcatcagtgaggttcagacttcacatagtcagttcacactcgcagccacctctcattctaactctggtccagtcagagggcacaggtcacagcgatgctgagcaatgtggcctggtcggcacaag

SEQ ID NO: 256773 - DNA, 620 bp, Homo Sapiens
cccattgtcatatagactgggtccccacatggtcctctcattcctcatacataccatgagtgtccactgattcacaaattagttggatcacccgattgtcccctaagtggaccttagaatgaccagccgccagaatggcttggtgttggtgtgccacatgcgttcagtacgatgccaagtaatcgattttcagcgctatcacatcttcagagttcatgctagttatgggcagacatgtcaatcatttgaatgtaacgtccgtgacagatacagaccatcacctcgtgtggccttacgataactgacaacttggtcataggtttcataccttgcaaaatgcacaccatgacgacaaccgtgaatgtgagttatatctgtcatatctctcttcattaaagtccatccagtcaacagtatgagcctgacacaaatcttgcatctctcccacacgaccttatctggccactgtactgcattatcaaaagtagcccaagtgacagacgaacagctgtatgctgattccctcgagaacaaattgcaaatggtgcatcatcggcatgtactcttggcttcttagaaggatgcgatgaaatgtaccaaatggcaaatgagaatcacag

SEQ ID NO: 256774 - DNA, 1075 bp, Homo Sapiens
tggcgttctcagacgaagacgcagccgccaccgccgccgccgccaccagagccgccctgtccgcgccgcgcctcggcagccggaacagggccgccgtcggggagccccaacacacggtccacagctcatcatgatggacttggagctgccgccgccgggactcccgtcccagcaggacatggatttgattgacatactttggaggcaagatatagatcttggagtaagtcgagaagtatttgacttcagtcagcgacggaaagagtatgagctggaaaaacagaaaaaacttgaaaaggaaagacaagaacaactccaaaaggagcaagagaaagcctttttcgctcagttacaactagatgaagagacaggtgaatttctcccaattcagccagcccagcacatccagtcagaaaccagtggatctgccaactactcccaggttgcccacattcccaaatcagatgctttgtactttgatgactgcatgcagcttttggcgcagacattcccgtttgtagatgacaatgaggtttcttcggctacgtttcagtcaccttggtcctgatattccccgggcacatccagagcccagtcttcattgctactaatcaggctcagtccacctgaaacttctgttgctcaagtagcccctgttgatttagacggtatgcaacaagacattgagcaagtttggggaggagctattatccattcctgagttacagcgtcctaatattggaaatgaccagccggctgagactaccatggttccaagtccaaaagccaaactgaccggaagtggaccattatcatttttgactcatccgatacccctcaatggaaaaaagaagtgggcaactggtagtccacctttttccttaatgccttttgaagaattcccttaaaaaggattccctctccccccgaagaaccgccacccgggtggaaaagggaaccccctaaatttcctttgcccccgagccacacccggaatttcggggggaggaaatttttatttcggatcttccctaagcgtgacccccagtatttcggcaaacgggctggcccctcc

SEQ ID NO: 256775 - DNA, 1155 bp, Homo Sapiens
  misc_feature (530)..(560): n is a, c, g, or t
gaaagatctggattttgcagcaaccaactttataaagaggtccatccgctctcaatggaaaacacccaagcataccattcactaggttcggatatcaccataatataatgaattctaagagtatggggtttgatttatgggcaaccccagtacaatctaggagcccaacatgatgaaaaatactaaaagaatgcttcaccatccctcaggccattacatttccaccttatcctactcttgtattaggatatatgtatacaaatgtcaactactaatgtagttaaatttcaggagaagcatgcttaaagatacacaaggaatgtttagccttagtttttgatagtattatccaaagtgtgagttgaaagaaattaagcaaataatgttaacaaacgaaagacagatacacagcattagtgggggtataaaaacctcacctttcaattaacttgaataatgttctattttctattctacaactgagcgctagggagctaaactatttgtgaattacatcttctttaagaagnnnnnnnnnnnnnnnnnnnnnnnnnnnnnnntattcaacccctctatgcagccaaaaaccaatacaagtccttttataaaagactttaaaggtgattaatattcatttaatgctcttaatgtatttggaaatcagaaaattatttttcaccacagattccaaagaacttcaaatagagctcaatttagtagaaagaattggtgtacctgaaagcatttaacccacacattttcaataaaccctacatcttacctgcaagattcatatcatgagaaacaaatttcattttattaagacaaaaccttactgtccaatttatactcccatcagacagactatgtattggtatgttaaaagtacttttgaataaaagtggtgagaaagaaaccaaaaaagtactttatatatagttaaaaggttacataatataggcaactaaatattaacttttagtttcttttttataagatcttaaaggcaagtaagaaggaagagaaaatggaagtaccaataaattatatttaatataccattttggcttcagaagaggatttacctacagcttctgatcaaatttgttggatcatatcaatcatacttaagtggtaagaaatcatacttttcac

SEQ ID NO: 256776 - DNA, 811 bp, Homo Sapiens
gccttacagtctgtttgaggagggaaagagagagaggagaaggagacaggcaggataggtcaggttctaggggctcccatggtttgtatcttaacaatctaccattttcttttcaggccagtgtccacatcctgctcacatttgggacatctgtgaggcagggtgcctcctttttgtccctccaagaggacagttgggggacttggcctctggccgcctcaagttgggtcagcacctgctgggcctcatcctggttcatcgtgcatcaatgggagcgcacctgggttctgctgacatgtgagagcttcttcaccgaggggttcagaaaagtgtgctcatggcctgtagatctggattcaaagggagatgagaggacaagactttcctgtgtggccttcttacggcagtccacagggaagtggcctcattttctgtgtctgtactgcccagcgcccccactctcctgtgctggtcccaggccatcccttagccagagtgcagaactccagacccccaatattctctcatatcctcagaatcttcagcttccatccatggatgttggctgaatactgagtggggtcgtagaaagatctggtcctgtgagtaggggggcgaggaggaaggcagggacttcagctgggctgtctacaacctgagtctaaaacacctaaagacaggcacaacttgcccccactaggacgaatttcatgctccagaccgcctcactgcatatctagggccatgtgtattcctgctatttggccacattccttgagaaaaattgcctattaaaagaatttccttattc

SEQ ID NO: 256777 - DNA, 609 bp, Homo Sapiens
  misc_feature (411)..(420): n is a, c, g, or t
tgggtttagtgaccttaaaaaagagatcccttcccctttccaccatgtgaatatatagcggaaaggttctgtctatgcggaagatagtccctccccaaacacaagaattagctggtgctttgtcatgaacttcacagcctccattgttataactgcccaaacgtactaagacagaattaaccctatattgtattaagtaaagctgtttcaggttttattagtgattatagcataatcaaggattacccttgctaatataatgtgctctatttcttagttctctattatgttctattgatatatttgtctacccttgagccaatactactcatcttagtgatggtagcttcatattacatcctaatatcttagagaccaaactcttgcttcccctctgccctgcccaattcnnnnnnnnnnacaagcctcttgtcttgatcctttgctttttcacataatttttaaaaatcagcttgttatgtttcatgaaaaaaatgaaattttcattagaattatattggatcaatagattaataatttggaaagaacagatatactcacgattctgagtgtcattattaataaatacagtgaatgtgtctatgtgtc

SEQ ID NO: 256778 - DNA, 878 bp, Homo Sapiens
gccaaagggttatggggatcttccttgtgactgccccttgacacacgccctcctcaaatcctaggggaggccattcccatgagactgcctgtcactggaggatggcctgctcttgaggtatccaggcagcaccactgatggctcctctgctcccatagtgggttcccagtttccaagtcacctaggccttgggagtgcctcctcctgggcctgggtctggaagttggcaggaacagacacactccatgtttgtcccacactcactcactttcctaggagcccacttctcatccaacttttcccttctcagttcctctctcgaaagtcttaattctgtgtcagtaagtctttaacacgtagcagtgtccctgagaacacagacaatgaccactaccctgggtgtgatatcacaggaggccagagagaggcaaaggctcaggccaagagccaacgctgtgggaggccggtcggcagccactccctccagggcgcacctgcaggtctgccatccacggccttttctggcaagagaagggcccaggaaggatgctctcataaggcccaggaaggatgctctcataagcaccttggtcatggattagcccctcctggaaaatggtgttgggtttggtctccagctccaatacttattaaggctgttgctgccagtcaaggccacccaggagtctgaaggctgggagctcttggggctgggctggtcctcccatcttcacctcggggctggatcccaggcctcaaaccagcccaacccgagcttttggacagctctccagaagcatgaactgcagtggagatgaagatcctggctccttgctgtgcacataggtgtttaataaacatttgttggcagaaaaaaa

SEQ ID NO: 256779 - DNA, 851 bp, Homo Sapiens
ttgatcagagaaagagtttaatgattacaggcttctgagtgaggagacaggagcaaaccttcaaattcatcattccagagagttctgggctacagtttttaaggggattgtggagggtgagaggctggaaaattggagaaattgatcagttggggtagggagatgaaatcatcaggatgtggaaactgcattttctggtgactcaccttctcatgggatcctgcagaacagctgacatgagtagttttactggcatgcaggacctggcagtgccttctctgcctttgtcctgacatcgcttctgcctaggatcccccagaaaaggatagtactggtttgcacaggagcagaagtgggtgaaaatggggaaatgatgagtgtgggatgggagatgctcatgggcagggtctgtaggtctctttgagggggctcaactcacaaagtgcagatttttattgaaatatgaatgcttgtagaaaggacattttccctactgagcaatggcagttccatatttcttatcagaaaggaagtaggcctcagtctgattgaacagtgaggagagggaggattcaacacttacaagttcacctgcattgcatttcccagaagaaagaagaaaatcaataacgcatttcaaagatcacggtgctagagacagagaaccacaatttaagcttttccctgggcttagaggcggatgtctcactgccaatttcacgtccaacaccggagcctcgcagtccatttttctccccagctgttttagaaatatccccaaatatcaaggacatctgaatgagtgaaccatcagaataaggagcgattcccacagagttccaatccacagg

SEQ ID NO: 256780 - DNA, 958 bp, Homo Sapiens
  misc_feature (455)..(455): n is a, c, g, or t
acagggtaatccttggggcgccgcccgagggattcctggtcaccgggggaaccgcccaggttagggggggaaagaagaatgttagtctttcttgccagttttgatagcaagacccagattttgtagttcaggcaaactggtacaaaaagtgatggaaagggaatatgcactgttattaggcacagtgcttattttaatataaaataaagcagcttacattttcactgtaaatataggctatgtacagaattatatatagatatagctacacgtataaagcttcattataggcctctgatacaattataataacggttccctgaaccttttagagtgcaattaagaacaaaaactaaattttgtttacatgaatatggaataaatacaataatcaaaatatgactctccctaaaagtgaaacacacaagccaatccggaactgctgtgcgaaagantaaaatcgaggaaaggcaaggtttcggtaggaggacgcgatgaggggcccgccccaggcagggaatggcaatgctctaaagaaaagagacttcgtcaaacagggaggagtcagcccttgaacagcgaccttgttctctgcagcagcaaacatggcatagaatcgggaactgtcgttggacagaaggaccgatggggtgtcaaactccaccacctgtccctgggccagcaccataaacctatcggagcctagaaccgtgtgcaggcgatgggcaatggtcagcatggtacagtctgcaaatgcttctcggatggtctcttgaatcaataagtctgtctctgtgtccatggcagctgtggcttcatctaaaatcagaatcttacagtggcggagcagggctctagctatgcacaagagctgccgttcccccactgagaagttatccccattctccatcacttcagattcaagtttcagaggtagctgagcaatacattctttcgc

SEQ ID NO: 256781 - DNA, 884 bp, Homo Sapiens
  misc_feature (668)..(715): n is a, c, g, or t
  misc_feature (718)..(725): n is a, c, g, or t
  misc_feature (727)..(748): n is a, c, g, or t
ggcctagttatttgaggattttgctgtgttgttttccatgtcttctctggtcaccttggattatatataaaaatacaggaaatagataaacatgaatgtgattaataatgctgaaaaagtattagcctaccaaagacacactcaggctttagtgaataactttacataacctcagtttttaacacatgcatatcttctccaaccatgaaatcaaagcacggtgcagaacttgtaccaagtacaaaaggtccatgtatgattagcattattttcttttgcttttgtttatggacaatgttcagctgacataagcagaagttggccaaaatactgcctgtactgttaatttcctgtataattcacttaaataaaagcaggttaacctcaatgatagcagttaaaatgttctatcttatgtatttcttttaagtattaccattatggtgctactgagcgttttcttttggtaaaaagaaaaatgccatgggctgcagtcttcttccatcacttttccctaccaggtccattaatatgcttataacactagtgccagttattttatttgataatgcttatggtatttgtatatttgtttgcattccaattttgtttaataatgagtgtgtaaactgcatacgttaaataaatgtaaatactaatgtaaaaannnnnnnnnnnnnnnnnnnnnnnnnnnnnnnnnnnnnnnnnnnnnnnnttnnnnnnnnannnnnnnnnnnnnnnnnnnnnnctgggccggccgccctcggcccctcaaaaaaatttttttaaaaacattcggtttggggcggcggggccccgaaagggaaggggaaacttgggcccaaagcgtgttttcccaaagaaaaacccggggcaatagacaa

SEQ ID NO: 256782 - DNA, 763 bp, Homo Sapiens
  misc_feature (670)..(670): n is a, c, g, or t
tgggtggcgaattcggcacgaggtaaaagatgaactaaagaaaaagaagaatctcaaccgatctggtaagcgtggccggccttcgggaaccaccaaatcagcaggataccggaccagcacaggcagacccctgggaaccaccaaagcagctggatttaagacaagtccaggcagacctttggggacaactaaagctgcgggatacaaagtcagcccaggcagacctccaggtagcattaaagctctatcccgtcttgccgatcttggttatggctgtggcactgctgcttttccttaccctatgatgcatggcagagcagttcatggggtagaggaaactagcagtgaagtcaaaccacccaatgagtgaatgaggcaggaaaagagggccaggtttagaaggaagattgtgaataatcccaaagcttcttggttttattttgatatacataattttatggcctgggctttccaaatttggtttcctgggtgggttttttcctgcttttgctcaaaaactgccatatgctgacagatgcactcagggcatgagcagcggcattgtatttgtacataggttcaagtggaacacctaactaaatcatttttccttttcctttagaggtatgggcatgtctcatggttcattactactttggggctggtctanatagatgctttatgtgataaacaactgaaaccattatacctattagtttggggaagtaagcctacagtataataaagacactaacgtattttt

SEQ ID NO: 256783 - DNA, 538 bp, Homo Sapiens
  misc_feature (253)..(296): n is a, c, g, or t
ggggactgccaggggcagttggcaaaagtccaagtagagattacacccagaacaccattccttccaggagcagtaggtgggaggtttgacccagagaagccaatccttgcattccaggagtggcctgtgcctcccacctcttccttcccactgccaaaggcctgtgttgagaaagatgtcatgcaaaaggacgacggtggccaactaaagcaagtcttccttccaccctgtggcctgcacttgagccacaaannnnnnnnnnnnnnnnnnnnnnnnnnnnnnnnnnnnnnnnnnnngctatgaggctgattcctgtttggatttttgtcctcacgtgtatcattaagctggcctttgggccttttcctttctacctcccctgtgacctttcctagcctcagatctgttaattcttttggccccagccctgtccctcactgtcctctgtccttggaccagaaccctggggtcagacccatctcctgtagctgtccatcacactgacaggcttcttcctgagatatcctcaggttttctc

SEQ ID NO: 256784 - DNA, 1188 bp, Homo Sapiens
  misc_feature (386)..(386): n is a, c, g, or t
  misc_feature (406)..(406): n is a, c, g, or t
  misc_feature (599)..(622): n is a, c, g, or t
atgctttcctagatacctttggcagcaagcttactcacattccctgactgctcaatgggttgttaaagcaacatatagcacaattaattaaatacagagcgaggtgggcagaatgctcgatatcagtctctagtttcttcgttagtcttcagcattccaattcatctcaaccattcagtcactcggtgcacactttcttacatacggacacacacacgtgcatatagcgagttccggctcgtagactccagtgcagtgactagaacagacactagctactaagaatgtgtcacaatcagtgtgaactgtatgggagtaggaacaacctctggagttttatatttaccataatttatggtggaaattacaaacttacttacaaggantgggtattaacattcagaanttcaaacctttttcaaggtcaaggcaatcacacatatttaccagtatggtacacactttctactagaatgaggataggtgtctagacaatgttattacaaatttcctgaatgtgggcatttctagtccctgtaattcataaagcaaatctgctgacttggcattaagactctaaaatagtgtgatcaaactgnnnnnnnnnnnnnnnnnnnnnnnnataagaaggtgtttgtttgcagaaataacatttacaaactgtctatacagtacacaggactagtacatagaaaatagattctaacttaatgatcccctttgtgtaaggcaagactgaatctgtccccaaatttagtcagccagaggtacaagcaagaaacagtggtccatgaatgaatatgcaaatcagatgcctgcgtattaacgtattaaaaatctggagaaacaagaaattccactttttatctgtgctgattctggcttgttggatacatcaactacatttcttaaaacactaacatcacctgggtggcaacagattttgttcaagtggcagctacccaaaacagtttttgaagagtccagtatgcaaccggaggactgcagccataccaggccaatttatgtagcacttacaaaagaaaaagtatctcaatactctatccatgctattgctattcaagcaacagcaataatacaaaatattacaagacagatcacatatgattgcagtgtagaccccaaagactttttgttttggggatgctgttagttatacaagacttc

SEQ ID NO: 256785 - DNA, 423 bp, Homo Sapiens
cagctcctctcttctgtaggagctttgggttttcagaggtgcagggaaggcagttttacaggttaccgtaaaacagaggttccgtccagtgttccttatgatgcctccccatttaaaaagaaaagagatctatggaaaactgggaatgtaatgtggattctgtcagagctcctacagagcacagttgcctttagtttcctttaaagatgtaaaaatattgtataatacagttttgtccctacacaattgtatttgccaagcttagtgcattatgatacctttatttatttgttttgggcagtattactatatatatataaacatacagttactgttttatatattcttaggtcattcaaagccatgtatgctgtaaatgtgctagtctttagaatgacacataataaataactgacaagataa

SEQ ID NO: 256786 - DNA, 925 bp, Homo Sapiens
  misc_feature (191)..(203): n is a, c, g, or t
gcagaacacctccctggagaattgcaactaagatgtttatggcaatcgccctgcaagtgtctatttaattcctgaaaatgtcatttactggtgtgtttctgtaaaaatcatttctgaaaagttttgtcagcttggcttaacagctgggggaaaaaagcagcaaaatgagtcccctcaatcaagcctgtgannnnnnnnnnnnncagactcatgaatcctcctgagaattaggcttatgacaagcacccacccccttcacctactccctggtttaaaccaggtgcctgctgacacgaaggaagattccggggcattttgatcctagtcacacagtgtttctaagtgggcattactcctgtcaatccacagtcttaaagatgttcctcagacgcgggccagagaaggacagggtctctggttggggccgtgtctcccatcgcattctccctttgcaggtgctgaagtgaggaaggcccacagctcagccaagcacatggggtgcctccctcctgggccactagcccactggccagtaagagaaccagggagcctttacttagagactcaaggttcagaagagggaaatgggaagtcactgtgaaatggcccagcttggaggaggtgaccctgctgccgaatctgaccccttatcctattacctaaggtcctttcttggttactggccctgaaatcacccgctttggagatatgccttgcaaggcagcatagcagagtaggagagttagggtagggcaggtacagcctgtgctcagacctcacaggccctgcacaagcccaccaggcccccggctcccttctggcattcaccaggagagggtctgtccagaccagcaggtgggttccaggagaagggatggaggtgggaagtggtggttatggaactcctaccacttggatcttcacc

SEQ ID NO: 256787 - DNA, 475 bp, Homo Sapiens
  misc_feature (303)..(303): n is a, c, g, or t
aggtggagctttaatgggaagcgtcagtgccattgcctgggctctgggggcagctgtgagtccagatctcatggcttctgttcagggcctggtccacatccagcctctgaccttgtgcccaaaggccattcaggcaaaaagaggtggaagagtcttctcctggtaaagcccccaggaagagacgcccttgaggcttggccagaggttaaggaggggagccaggcctaagggaggcagggcaagggccttcatcttcgacccttggctcaagaccaccctggacatactcagcttcagctgaangagggagtcccaagaccaggaaggtggagactgagccaagatgggttctctggtgtcccaagagcaaggaggtggcctgagcctgctgcctgcttgagtcccaggtccaaagagaaggcccagggctctgcatgagtctggggaatgtctcggagattgaattgtgcgtgcc

SEQ ID NO: 256788 - DNA, 807 bp, Homo Sapiens
tttactggccggaattacgggatatgtcgaccacgcgtcgggagttaacacgtgcgcgagtcggtgaggctcgcacgaaaggccgccgtggcgcaatgaaggtgaaggccggcgcgctcgccggccgaggtgggatcccgaggcctctccagtccgccgagggcgcaccaccggccctgtctcgcccgccgcgccggggaggtggagcacgagcgcacgtgttaggacccgaaagatggtgaactatgcctgggcagggcgaagccagaggaaactctggtggaggtccgtagcggtcctgacgtgcaaatcggtcgtccgacctgggtataggggcgaaagactaatcgaaccatctagtagctggttccctccgaagtttccctcaggatagctggcgctctcgcagacccgacgcacccccgccacgcagttttatccggtaaagcgaatgattagaggtcttggggccgaaacgatctcaacctattctcaaactttaaatgggtaagaagcccggctcgctggcgtggaggccgggcgtggaatgcgagtgcctagtgggccacttttggtaagcagaactggcgctgcgggatgaaccgaacgccgggttaaggcgcccgatgccgacgctcatcagaccccagaaaaggtgttggttgatatagacagcaggacggtggccatggaagtcggaatccgtaaggagtgtgtaacaactcactgccgaatcaactagccctgaaaatggatggcgctggaacgtcgggccatacccggcgtcgcggcagtcgagagtggacg

SEQ ID NO: 256789 - DNA, 579 bp, Homo Sapiens
  misc_feature (204)..(204): n is a, c, g, or t
  misc_feature (343)..(343): n is a, c, g, or t
aggttatacttttattgatattaatagttctgatattggacatccctgctgtgtggtttcacctctcatggactctgacggctgctgtgccttctctgctcggcaggcggtgccctgaggcacaggtgggcgtctggggctggaactctcgctaggcgctacaacttcctctcctgccctgtggcagagccaaagccccttgcnagggctgttgccagcatgggatgagtctatgaaaacacgtggcacgcagtaggtccacagttaccactggcagcctggcaagcctggcagggcccggacggcagatgcgcttcggtgctgctgtgagtcttgtgctctngccttaggcagaaagtcctgggtttgtgttttgtgaatgaatgacgcatgagtgtgccaaatatcctttacgtgacagaagaggagagggctggcttgattgagtgtgggggggaagaacctggatcttgtaatgtaatttttgtttaaaaaaattagggaaaaaccccaaatatgaccatttcctgccattagcctgcagatgagcagctgactccccagtcccatccctccgca

SEQ ID NO: 256790 - DNA, 518 bp, Homo Sapiens
  misc_feature (28)..(28): n is a, c, g, or t
  misc_feature (104)..(104): n is a, c, g, or t
  misc_feature (404)..(404): n is a, c, g, or t
  misc_feature (480)..(480): n is a, c, g, or t
  misc_feature (485)..(485): n is a, c, g, or t
  misc_feature (497)..(497): n is a, c, g, or t
ttcactttcaacagcagtgagccctggnaagatgccggtccccagggcttcccccaggaactccatgtaacagaacagacccaggacagggaaaagcagtgcgnagggatgggactggggagtcagctgctcatctgcaggctaatggcaggaaatggtcatatttggggtttttccctaatttttttaaacaaaaattacattacaagatccaggttcttcccccccacactcaatcaagccagccctctcctcttctgtcacgtaaaggatatttgggcacactcatgcgtcattcattcacaaaacacaaacccagggactttctgcctaagggaaaaccaacaagaattcacaggcaggcaccgaagccgcatctgccgttccgggccctgcgggttttnccaggggttgccagtgggtaactgttggggacctatttgcgttgccacgtgttttttcataggatttcattccccntgctngggcaacagccntggcaaggggtttttggggtt

SEQ ID NO: 256791 - DNA, 396 bp, Homo Sapiens
  misc_feature (202)..(218): n is a, c, g, or t
ctgggcaacatagtgagaccctgtctctaaaaatatgtgtatatacatatctagtcagtgtttaacttcctaattttcccataaagatcatccttgtttttatatttatttatttgaatgaggatccaaataaagtttacaaattgttactttgttgctgtgtctttttaatctattttaaaatatagattcctcttagtcnnnnnnnnnnnnnnnnngccttacaatttgtttgtggaaggtttcccagtctggattttgatgactgtatccctgtggtgtcatttaccatgttcatttgccgttttgtttcctgtaaattggtagttggcctggttaaatgcaattcaattaacattcctccaatgctaacattttcacaaactacatgttaga

SEQ ID NO: 256792 - DNA, 401 bp, Homo Sapiens
  misc_feature (35)..(35): n is a, c, g, or t
ggagtctgcttactagtctttatcagctcttaaanacgggaaactcatcctgtccaaagttcgtggcagaaagggtaaagtttttaccaaattagtgctcagcaaaagaatgccctgcgttcccgaaagtaaaagaatgacaagctgtaccttaaaccaaaacacttcgtaatctcatccaattgcaaaaagagttattagccaaccaggtattcccagtagtgacagtggatataactgtgtagtcattcacctctgcttatatgaatactttacaacctcttttgccttttgcaggaacgtccttgtgaagacctttatctgagccactgtacttcgttatcactgccatgcagtttacatgagctgttctgcagctcaaattccattttgtgaatggg

SEQ ID NO: 256793 - DNA, 931 bp, Homo Sapiens
  misc_feature (10)..(10): n is a, c, g, or t
  misc_feature (872)..(872): n is a, c, g, or t
aagcatgggngatagttccatgatactggctgagtttgcaatagcaggtggaaccctaactattgagggagtttgcagatacctcaggattcgtgacaatgcctttaaagatccaggagagatgttcagctactaggaactgctagcaagtatagcgcgaatggctccgagctcagacactctacagctgagagtagacacttgtggtatgtggagtacagataagccaggggcaggccacggcacgctccatgaaagctaggagggagtgaaatatcagtgatcatcgcaaggaaggaggcagacaagagtaaggcacacctgactcttaggactagcagtcagaaccaggaggaaaggttttattgctatgcgggtaggtaagaacagattttacttacatccatatagttacttaaagtccagttttctgttaaacatttttcttaatatattgagccaaaactagtccagttaagctgaacttggtttttctggagatgaattgttttaaattgacaccctattgatggctcccagttgaaggaagtgagcacattatttgtactgtgaatataaatttttgcccttttatttatcttcctttgacccatttccttaaaataatggctcaaagtaatagacttcccctaatggtggggggatgggtgggttattaatgggaggtatggggggtttagcttgagatgggacttggtcttagagctagttctaaaggttgtttacttttctagggaggagtctgctactagtcttatcagctcttaaaaacagaaactcatctgtccaagttcgtggcagaaaggaacgtccttgtgaagacctttatctgagccactgtacttcgttantcactgccatgcagtttacatgagctgttctgcagctcaaattccattttgtgaatggg

SEQ ID NO: 256794 - DNA, 1210 bp, Homo Sapiens
  misc_feature (213)..(310): n is a, c, g, or t
  misc_feature (768)..(797): n is a, c, g, or t
  misc_feature (874)..(924): n is a, c, g, or t
  misc_feature (957)..(1040): n is a, c, g, or t
  misc_feature (1156)..(1156): n is a, c, g, or t
  misc_feature (1192)..(1192): n is a, c, g, or t
ggattacagacgtgaggcaccacaaccagcctggatgattcttaagggcccttctaggaccaaagttctgggaatttctagcttattctgccccctcatagcccttggcctatctatctttatccacatgcagaaacatctggcaaccccacatggctgagatgacctggtcctaggacacccttggacagaagactggcctacctagcagannnnnnnnnnnnnnnnnnnnnnnnnnnnnnnnnnnnnnnnnnnnnnnnnnnnnnnnnnnnnnnnnnnnnnnnnnnnnnnnnnnnnnnnnnnnnnnnnntctggtgaacaagaaatgtaataaacacgtggcttgccattcaagagatgagtctgaccattcactttctgtgtgccagagaagagagatcatgggtatagaccagcccctggaaaggctgctttggtcaaggctgagagcagctttgctcaaggaaattattcacgaaggtgaccactgtctttctgacctggcacagaggaaatgttggctgtgaatgtgaccaatagaaagaagcccgtatttctcagtcagtcctagaaccccggtaagtaattaacagagaataaaaatgtgtttgttaaatgacaaagcagcagtttttcaattgtaaggtctgcttgagagcctttgatgtgtgtttcttttcctgacttttcctttctttagaatttttgatggtctcacctggtgggtggggctttcagggtatgcccacaatgtacatttctcggcannnnnnnnnnnnnnnnnnnnnnnnnnnnnnccctatgatctctgtctcacctactttacagggttgctgtgaagatcgcatactacacacagggaatgctcatcagnnnnnnnnnnnnnnnnnnnnnnnnnnnnnnnnnnnnnnnnnnnnnnnnnnncagagagataaggtcttgctatgttacccagcnnnnnnnnnnnnnnnnnnnnnnnnnnnnnnnnnnnnnnnnnnnnnnnnnnnnnnnnnnnnnnnnnnnnnnnnnnnnnnnnnnnncagccagctcctaagtcttaaggctctgtgttagtgatagatgtgggccatggtgtagggcagtgcaatgtcttcgagtgaggagtgaaggtgggtaactcattggcatgggattntaggagttctgtttatttcttaatccaagtttcttnccactttaaaaacatgtt

SEQ ID NO: 256795 - DNA, 540 bp, Homo Sapiens
gcttgataaataaaaagaaaaaacatacatttctccagttggtttgctctttgcttgttgaagtaataaaccgttttaaagagaaaatacttgctgtaaacccccagtgccttcaactcttttggcagaatatttttaaagaaatccagcaagcaaactttgaggtgctaatgaaagtaaaggaaggtggtatttctagttttggcagaaatgaaaagtgtctcacaagagacatcactacccacgtggggtctggctgctttctaccaaagacatttagagaagtgaattgagtcagggtgatggtgaacactacatattttatagatggttaagttgagaattaattatgtttatcatggatggctactaataccaagctcatgattgttgcagcctcaacgtcttaggcagtaaaacttgtctgcagcactaaagggggagaaacccttatattttgcaaactgtccattcgttaaatttattgtaacctaataccaaaaactgccgtttttcatattatttccccacctcctactt

SEQ ID NO: 256796 - DNA, 1358 bp, Homo Sapiens
ggatcgatgcaccgatgaagtaaacgccttagtgcttcagacccagcaagaaattattgaaaatttgaagccattacttccagctggtatacaggataaactacatacactgatcccttgcaagaaatttgatctcagttataatctaaattaccacaagttatgttcagattttcaagaggatattgtatttcgtttttccctgggctggtcttcccttgtacatcgatttttgggccctagaaatgctcaaagggtgctcctaggattatcagagcctatctttcagctccctagatctttagcttctactcccactgctcctaccactccagcaacgccagataatgcatcacaggaagaactcatgattacattagtaacaggattggcgtccgttacatctagaacttctatgggcatcattattgttggaggagtgatttggaaaactataggctggaaactcctatctgtttcattaactatgtatggagctttgtatctttatgaaagactgagctggaccacccatgccaaggagcgagcctttaaacagcagtttgtaaactatgcaactgaaaaactgaggatgattgttagctccacgagtgcaaactgcagtcaccaagtaaaacaacaaatagctaccacttttgctcgcctgtgccaacaagttgatattactcaaaaacagctggaagaagaaattgctagattacccaaagaaatagatcagttggagaaaatacaaaacaattcaaagctcttaagaaataaagctgttcaacttgcctaacaatagagattgctttggtgaccatgataggaggaaacgaaacttgtaagattggaacagttgttatttttatgaaattactttaaatatgaattgtactaactgtacctaaatagcaaagccctgtgtagattctggtaatgatctgtctcagggtatgtgtatttttgaagggtgttatgtccttagttttaattttgagtaaagaaaaggctaaaatcatgaattagttacaagcaacagtaccaacttatgtgacccctgaggggtggggctgtgagctcttaatttgtttttgattctgaaaaactctgcttcctggcatccaggagttagagattgagcctttcatcttctttctcaaaactagtttttgatgctttctttcatgggaatagtcacttttttatttagtaaatcgcattgctggaaccaccaaggagtgtggaatgtccttgagtgtattatttatgcaagtcacagtcacgttgccatcatggcagctatgtgaaacactaataaatgtgtttttactttttattcccgttaaaactgatgt

SEQ ID NO: 256797 - DNA, 1016 bp, Homo Sapiens
  misc_feature (881)..(881): n is a, c, g, or t
  misc_feature (888)..(888): n is a, c, g, or t
  misc_feature (912)..(912): n is a, c, g, or t
  misc_feature (940)..(940): n is a, c, g, or t
  misc_feature (945)..(945): n is a, c, g, or t
  misc_feature (955)..(955): n is a, c, g, or t
  misc_feature (995)..(995): n is a, c, g, or t
agtgagtcagtagattcacttcacaattgtggtactaaataactaaatataagctatctacatataatagtaagaaaaagtttgaagaaaattatgtaacactttaaaatcaatcataatagactatttatgtagttataggtccctagcaagtttctggataggaagattgaatactattaaacacaatgtgtcttcttcaattatttgatagagtaactggtgggataattacaatgaaaaatctgctacttttacaaaaactttaaaataaattcaaatttatctaggaattaatagtagacatttggttcagaaaaaagaagatcagggagtgaaaaatgtagctgtcaggtaagtggggtagcatgcacagaattttatcataagttgtaatattcataacattattagcagatgcatttacaaaacaaagaaattcaaaagtagactttagtatgtataacatttaatgtgtaacaatttcagtattgtacattcttagaggaaacacctaattatggaataaatagcattagccaactaatcagaaataaatgactaacaattcaactttatatcctgtattagtcagggttctctaaagcaagagaaataatagtatatatgtgtatataaaagtgagtttattaggagaattgactcacacggtcacaggatgaagttccacactaggccatttgcaagctgaggagccaggaagccagtccaagtcccaaaaccccaaaagtagggaagctgaccatatagccttcagtctgtggccaaaagcctgagagcccctgacaaatcactggtgtgagtccaagagttcaaaagctaaggaacctggaagtcggatgtttgaggggcagaaagtntccagcnttgggaggaaagatgaagggttgnaaagacttcaggcaagtgttgccctttnccatntttctttctngcctggtttttatttctagggcttgcatttggccgctttnattaggtgggttgccccaccc

SEQ ID NO: 256798 - DNA, 581 bp, Homo Sapiens
  misc_feature (173)..(184): n is a, c, g, or t
  misc_feature (444)..(495): n is a, c, g, or t
  misc_feature (527)..(527): n is a, c, g, or t
atattatttggcgcgatctcttcttttttttcaaccaaagtgttgtcaggccaactgaatgatgatgtggttgctatggaaacagaaaaggctgccagctgttttaccagggatccagagacatagaggaagtagggggtggtatgagattatattttctgtttttaaaagannnnnnnnnnnnatgtatttagtagagtataaagaaaagcagatgcctatagatgtctggagcatattttcatttgtgatctaatgttttaatttgtaaagtgtacaagtcatttttaatgttaaaaattagtgaatctaacaaaaggaataaattagcaatatttgatgtggttatgaaaagttgtttttgtttctaggttcctagtttcttaaggattcagggcatgggaagtaaaacattgactatgtgccaataatggaggttgtcannnnnnnnnnnnnnnnnnnnnnnnnnnnnnnnnnnnnnnnnnnnnnnnnnnntggggcttcaagggatcctcctattcttcagncctcccaagtaggctggggtcttacaggaacaggaaactttgggttattaagga

SEQ ID NO: 256799 - DNA, 874 bp, Homo Sapiens
  misc_feature (193)..(193): n is a, c, g, or t
  misc_feature (220)..(220): n is a, c, g, or t
  misc_feature (363)..(391): n is a, c, g, or t
tgataaaggaaaaggagacttaagttgtcacagcctttggccaggagatattaagacagtaaattcagggacacaaaccttctggtcacttaattgctgtatattatcttgtactagattgattggtaatgtcatcataatatatagttaatactagcaacctaattgaacacaataggtagggctaaagcanattataatttgtataagaacttgattntaggggaaacatgccaaaccaactggaaaagaattgattattcaacatatagaattacgaaaattagttatttgagggggaaaacattagattgtcaccaatatattaaaatcaaaacagattacagaggtgtaggttatatnnnnnnnnnnnnnnnnnnnnnnnnnnnnntaggtgaatgattaacctactgccacattgtgtattaaaattgaacacacatttattctacaactgagaatttcaactcctaggtaagtactgtagagaaaatctttacttgtgtaccaggagatttgtacagggatgttccacaataacaacaacaaaaaaatgttcattaacagtagaatagataaatatatttggttttattggttacctcttgagagtaggaagaggggatgtgaacttcagggggtaaccaagttacttgtaaagccactggtaaataaaggttctgatttccagttcatgcttagtatactgatacaatttttaatagcactacatttctttctcaagtgttccaatttagattgtgagttaatgatcatcctgctgataatgtttcttaacttcagtggtagatacaggagtattattttactattctttataaaccttttttatatgtgatatttcttaataaaa

SEQ ID NO: 256800 - DNA, 979 bp, Homo Sapiens
aggaccatgggtgattttgtgtacccaaagcgctggggactgcccaccgtgtgcccagtcactgggaaggagccccagagagccggctgtctgacatgatggctcagggtggtcatccaggttgaaaactgaccgtgtgatgtttgatttgggcttcatttcgtgtgtaggagcacggttagactcactgttaaggaagctggatgcacttctctaaaaggctgcactttccgtgagcacttttcgtggtacaatccacatgacccactttctcccctgggggacgttggttcagaggttggtagcacttggggagagtatcttaacacagtttccttgacagcagctctgggaacttagtatttctgccccgaagtttttgccacactgagactttgagtagctcctggtggactcaaccctgttcaactcagagacgggcctcctctcactgatgcaaagctttaaggcttctctgactgttctgaaactcttcgtattcttgtcaagtctaaagagactgaagaaaagatttaaatactaataaaaatcagtagataatttctgtaggttctgctggaggaatacaaactgtttggtgttttaaatttaagtgtagaaattgtagaatgtggaattagcacagatccttcctggctttctgtttcacttgatcatttagcccagaccacccaggatgttttccaaaatgttccacaggcgtgtcccgctggatccatttgtccttgtcacttggagaaaggccagtccctgtgacggggcagccctctctgtccctcggtcagctcgtgtgaatcctgggacctcttccggtcgctctgcccgctgttctggggtcgactgccacgacttttgattcaagaagcttcctccaggcgggagcggctatttttcctaaatgagaattgttacattgcaaattgttgaataaaatattttgcgctccttcaagcaaaaa

SEQ ID NO: 256801 - DNA, 828 bp, Homo Sapiens
  misc_feature (376)..(564): n is a, c, g, or t
ttggatgaagaaactatttgaagtttgaatattttctttcccctgctgtgtataatctcagtgatgttaggaatctgtctcattttgatcatgcatgtagttccatgcctacctagcacagtatacagcctcaataaatagttattcaatgactgaatgaagtgagtcatactgataaatgttcattaaggcataaagtttactataaaagaaaaaccagccaaataaatataaatattaattatccataatgtgctggactgttgtaattactacctcaatctagtttaaatttatttttataagaataaatttatattttaaaacatatagggaggctgaggcgggcagatcacgaggtcaggagatcgagacnnnnnnnnnnnnnnnnnnnnnnnnnnnnnnnnnnnnnnnnnnnnnnnnnnnnnnnnnnnnnnnnnnnnnnnnnnnnnnnnnnnnnnnnnnnnnnnnnnnnnnnnnnnnnnnnnnnnnnnnnnnnnnnnnnnnnnnnnnnnnnnnnnnnnnnnnnnnnnnnnnnnnnnnnnnnnnnnnnnnnnnnnnnnntccacctctgttccaagtttgtatttgcaccttgaatggcgatttattagataaagtcgcggttttacaacctaagcaaatactgctaatcctcccccgactcaatccaccttgaggccgccttttaaatgctccgactcccttcagagaaagcctcgaggtaaaaagaaaaacctgtctggcaatccagacctgccgtcgccacgataaccagagtagcaggcaggtgtgtgcttactaaagccacggccaacagagcgaacc

SEQ ID NO: 256802 - DNA, 1473 bp, Homo Sapiens
tacctatgtaacatcacctttatcagaaaacttctcagctagatacagaaatcattccaatgacctaacctctgctcacacagaactccagaacaagatcaagctgacagtgctggaaggagacattctggatgagccattcctgaagagagcctgccaggacgtgtcggtcgtcatccacaccgcctgtatcattgatgtcttcggagtcactcacagagagtctatcatgaatgtcaatgtgaaaggtacccagctcctgttggaggcctgtgtccaagctagtgtgccagtcttcatctacaccagtagcatagaggtagccgggcccaactcctacaaggaaatcatccagaacggccacgaagaagagcctctggaaaacacatggcccactccatacccgtacagcaaaaagcttgctgagaaggctgtgctggcggctaatgggtggaatctaaaaaatggtgataccttgtacacttgtgcgttaagacccacatatatctatggggaaggaggcccattcctttctgccagtataaatgaggccctgaacaacaatgggatcctgtcaagtgttggaaagttctctacagtcaacccagtctatgttggcaacgtggcctgggcccacattctggccttgagggctctgcgggaccccaagaaggccccaagtgtccgaggacaattctattacatctcagatgacacgcctcaccaaagctatgataaccttaattacatcctgagcaaagagttcggcctccgccttgattccagatggagccttcctttatccctgatgtactggattggcttcctgctggaaatagtgagcttcctactcaggccaatttacacctatcaaccgcccttcaaccgccacacagtcacattgtcaaatagcgtgttcaccttctcttacaagaaggctcagcgagatctggcatataagccactctacagctgggaggaagccaagcagaaaacggtggagtgggttggttcccttgtggaccggcacaaggagaacctgaagtccaagactcagtgatttaaggatgacagagatgtgcatgtgggtattgttaggagatgtcatcaagctccaccctcctggcctcatacagaaagtgacaagggcacaagctcaggtcctgctgcctccctttcatacaatggccaacttattgtattcctcatgtcatcaaaacctgcgcagtcattggcccaacaagaaggtttctgtcctaatcatataccagaggaaagaccatgtggtttgctgttaccaaatctcagtagctgattctgaacaatttagggactcttttaacttgagggtcgttttgactactagagctccatttctactcttaaatgagaaaggatttcctttctttttaatcttccattccttcacatagtttgataaaaagatcaataaatgtttgaatgtttaatgtg

SEQ ID NO: 256803 - DNA, 561 bp, Homo Sapiens
  misc_feature (467)..(467): n is a, c, g, or t
  misc_feature (523)..(523): n is a, c, g, or t
  misc_feature (540)..(540): n is a, c, g, or t
tcctctcaagtgttggaaagttatccaatgttaacccagtctatgttggcaatgtggcctggggccacattctggccttgagggcctgcaggaccccaagaaggccccaagcatccgaggacagttctactatatctcagatgacacgcctcaccaaagctatgataaccttaattacaccctgagcaaagagttcggcctccgccttgattccagatggagctttcctttatccctgatgtattggattggcttcctgctggaaatagtgagcttcctactcaggccaatttacacctatcgaccgcccttcaaccgccacatagtcacattgtcaaataggcgtattcaccttctcttataaggaaggcttcagcgagatctgggcgtataaagccacttcttacagctggggagggaaggccaaggcaggaaaacggtgggagtggggttgggttccctttgtnggacccggcacaagggaggaacctggaagttccaaggattcagtggttttaagggntggacagagatgtggcngttgggtatttgtttagggag

SEQ ID NO: 256804 - DNA, 457 bp, Homo Sapiens
atctgaatagacatttctccaaagacataaaaataaccaacacgatatatgaaaaaatgctcaacatctccaatcagatgaaatctgattgcaattagagaaatgtaaatcaaaactacaatgagatatcatctcatcccagaatgctggcaaggatgtgggaaaaggggaaaccttgtacactgttggtgggaatgtaaattaccacagccactatgaagaacagtatggaaattcctcaaaaaaactaaaaacagaattaccatatgatccagcaatcccgccattggatatacatgcaaaagaaaggaactcagtatatcaaagagatacctgaactctcatgtttattgcagcactattcgccatagccaagatatggaatcaacctaagtgtccaccagtggataaaggaaatattatacacactcatatatatataatttcacaaatacac

SEQ ID NO: 256805 - DNA, 392 bp, Homo Sapiens
caaggaattaaagcggtacttcatggggctgttaccatcttgaaatgtattccaattgtggtcaaagagaaaaaaaacattgccatgaatttatttaataaaagggcatatttatttatgtttacaaacaagtttcaaaaacaaaaggaaaacatgtatgcttctacttattaacctttttcaaaatgccaacagccctcatgctgtgtgaaggtctctaaagattagaaaaatcaatacagttcactcacagttcaccaagacatcactaaactaacatgtttagacaaaaacaaaaaagactaaggttctcttgtagtttgatagtctgatttaatttgatttgcctgaaataacaaaagcatttcaagcatctttcattatgtagttcc

SEQ ID NO: 256806 - DNA, 1146 bp, Homo Sapiens
  misc_feature (859)..(859): n is a, c, g, or t
  misc_feature (1097)..(1097): n is a, c, g, or t
gcggaagcggcggcggcgcggccggggcagccatgtcgccattgtctgcggcgcgggcggccctgcgggtctacgcggtaggcgccgcggtgatcctggcgcagctgctgcggcgctgccgcgggggcttcctggagccagttttccccccacgacctgaccgtgtcgctatagtgacgggagggacagatggcattggctattctacagcgaagcatctggcgagacttggcatgcatgttatcatagctggaaataatgacagcaaagccaaacaagttgtaagcaaaataaaagaagaaaccttgaacgacaaagagacgtgagtcttgctgtgttgcccgggctggctttgcctctggaactcaagcgatcctcccacctcagcctctcgaggagctgggactacaggcgtgcaccatcatttcctcctaaaatttggaatttttatactgtgacttggcttccatgacttccatccggcagtttgtgcagaagttcaagatgaagaagattcctctccatgtcctgatcaacaatgctggggtgatgatggtccctcagaggaaaaccagagatggattcgaagaacatttcggcctgaactacctagggcacttcctgctgaccaaccttctcttggatacgctgaaagagtctgggtcccctggccacagtgcgagggtggtcaccgtctcctctgccacccattacgtcgctgagctgaacatggatgaccttcagagcagtgcctgctactcaccccacgcagcctacgcccagagcaagctggcccttgtcctgttcacctaccacctccagcggctgctgggcggctgaagggaagccacgtgaacgnccaacgtggtggaccccctggagtggtcaacacggacctctacgagcacgtgttctgggccacccgtctggcgaagaagcttctcggctggttgcttttcaagacccccgatgaaggagcgtggacttccatctacgcagcagtcaccccagagctggaaagagttggtggccgttacctataccacgagaaagagaccaaggtccctccacgtcacctacaaaccagaaactgcagncggcagctgtgggtcttaaaaatttgtggaaaatgaactggggggtccc

SEQ ID NO: 256807 - DNA, 450 bp, Homo Sapiens
  misc_feature (80)..(104): n is a, c, g, or t
cggttgtgtgacaatggtctggatggaaaggattgctgctctccattaggagacaatgaggaaggaggatggattctggnnnnnnnnnnnnnnnnnnnnnnnnngtagttgggagtaagtttgtgaatggaaacaaacttgtttaaacactttatttttaacaagtgtaagaagactataacttttgatgccattgagattcacctcccacaaactgacaaattaaggaggttaaagaagtaatttttttaagccaacaataaaaatataatacaacttgtttctcccccttttccttttaagctatttgtagagtttatgactaaatagtctgtgcaggttcatagaccgaagatactacacactttaaaccaattaaaaagaaccaaaagtaaatagaaaagacattgaatcaccaaggcctgggatcaacctgggctgtccacacag

SEQ ID NO: 256808 - DNA, 472 bp, Homo Sapiens
gcacgagttccaatttccttgactctctgtaaacatagcaccatcatacttaccctacttaatgttttcatgggacctaccgccccatgacccacatatacttgctgattctatggcttctactactccatggactctgtccatattgggtcataaccctgtccccacacctgcatgcctggcacttggcaggcttcaaaagatgatagtagatggcccctgagaccctcctatggtgagtcctccacagggcccttggacatgaaaacgcctccctctgccttcactccccagggagcgtggcagaagtgaaaggactgcaggcctggcgatggagtcccagcccggccatccactagctatagggccttgggcaacttccttcactcctccaagcttccattttctcacccgtgaaattggcattggcaatgtttgtttcataggactatctgagaaataaatgagctgt

SEQ ID NO: 256809 - DNA, 629 bp, Homo Sapiens
tgcacatctcgagagtgtgacatttaattaaccacttcattacttttggacattgagctcggctgcaggttttatggtcacatgtcatgaaagcagccttaaatatttatataaacagtggttcaaaatcatttacattatctccctatatatgaattggtaaagctggaaggattgtgtagctcacttaagttccgctccctcggttcacagacaaggaatctgattttgagtaatatttctgcaggtacgtggcttgtaagtggcacagctaggccttgcgcccaggcagtctggcaccagagtctgctcttgaccactgtactcttatgcgtctctgctgaattgagccttagatagctaagatactgccacttcaaagagtggttttaaaattggaatgctttagtaactttcaatgttgagcatttttctgtatgaaaatgtgttatccaatgatgttttttccttagtttgtagtctatcatctgggaatgacaagtgcatgatgaccttgcaggtacagtagttctgtgtaaatattctaaagaataattaagttgaatgattctgtggcaacttaaattgatactcattttactcacagggtcatacagctgcagtgtggt

SEQ ID NO: 256810 - DNA, 1706 bp, Homo Sapiens
  misc_feature (1561)..(1561): n is a, c, g, or t
  misc_feature (1631)..(1632): n is a, c, g, or t
  misc_feature (1691)..(1691): n is a, c, g, or t
acgcctgggtggcgaattcggcacgaggcggtgctctgatgaggccaggccgactggaccggcacgtcttcattgatctccccacgctgcaggagaggcgggagatttttgagcagcacctgaagagcctgaagctgacccagtccagcaccttttactcccagcgtctggcagagctgacaccaggattcagtggggctgacatcgccaacatctgcaatgaggctgcgctgcacgcggcgcgggagggacacacttccgtgcacactctcaacttcgagtacgccgtggagcgcgtcctcgcagggactgccaaaaagagcaagatcctgtccaaggaagaacagaaagtggttgcgtttcatgagtcgggccacgccttggtgggctggatgctggagcacacggaggccgtgatgaaggtctccataacccctcggacaaacgccgccctgggctttgctcagatgctccccagagaccagcacctcttcaccaaggagcagctgtttgagcggatgtgcatggccctgggaggacgggcctcggaagcactgtccttcaacgaggtcacttctggggcacaggacgacctgaggaaggtcacccgcatcgcctactccatggtgaagcagtttgggatggcacctggcatcgggcccatctccttccctgaggcgcaggagggcctcatgggcatcgggcggcgccccttcagccaaggcctgcagcagatgatggaccatgaagcaagactgctggtggccaaggcctacagacacaccgagaaggtgctgcaggacaacctggacaagttgcaggcgctggcaaacgcccttctggaaaaggaagtgataaactatgaggacattgaggctctcattggcccccccccccatgggccgaagaaaatgatcccaccgcaaaggtggatcgacgcccagagggagaaacaggacttgggcgaggaggagaccgaagagacccagcagcctccacttggaggcgaaaagccgacttggcccaagtagttgggaagtgttggctgcacgtgcgggtggtccgggaagtgagggctcactcagccaccctgagttgcttttcagctgaggtttgcacttcctctcgcggccctcagtagtccctgcacagtgacttctgagatctgttgattgatgacccttttcatgattttaagtttctctgcagaaactactgacggagtcctgtgtttgtgagtcgtttcccctatggggaaggttatcagtgcttcccgagtgagcatggaacacttcgagttcccagggttatagacagtcgttcccagtgtggctgaggccacccagaggcagcagagcattcagactccaaacagacccctgttcatgccgacgcttgcacgaccgccccagttcctgtggctccctcggaattctaaggggatcggacatgaaaggaccctgtgagccgattgtcctatctccagcggccctgtcatccagctcactcatcaatggggccagtcaggcccaggcactgggctccggaggactcaccactngcccctgctgccatgtggactggtgcaagttgaggacttcttgctggtctagtcacgcatgcaatgttgnngatgccctgggttttactgctctgagaattgttgagatactttactaataaactgtgtnagttggaaaatctaa

SEQ ID NO: 256811 - DNA, 1053 bp, Homo Sapiens
  misc_feature (921)..(921): n is a, c, g, or t
  misc_feature (932)..(932): n is a, c, g, or t
ggcctgggtggcgaattcggcacgaggcaggaatgcacgaagccaaactggaagtccgcgagtttgtggattatctgaagagcccagaacgcttcctccagcttggcgccaaggtcccaaagggcgcactgctgctcggcccccccggctgtgggaagacgctgctggccaaggcggtggccacggaggctcaggtgcccttcctggcgatggccggcccagagttcgtggaggtcattggaggcctcggcgctgcccgtgtgcggagcctctttaaggaagcccgagcccgggccccctgcatcgtctacatcgatgagatcgacgcggtgggcaagaagcgctccaccaccatgtccggcttctccaacacggaggaggagcagacgctcaaccagcttctggtagaaatggatggaatgggtaccacagaccatgtcatcgtcctggcgtccacgaaccgagctgacattttggacggtgctctgatgaggccaggccgactggaccggcacgtcttcattgatctccccacgctgcaggagaggcgggagatttttgagcagcacctgaagagcctgaagctgacccagtccagcaccttttactcccagcgtctggcagagctgacaccaggattcagtggggctgacatcgccaacatctgcaatgaggctgcgctgcacgcggcgcgggagggacacacttccgtgcacactctcaacttcgagtacgccgtggagcgcgtcctcgcagggactgccaaaaagagcaagatcctgtccaaggaagaacagaaagtggttgcgtttcatgagtcgggcccacgcccttggtggggctgggatggctggagcacaccgaaggccctgaatgaaaggtctcccataaacccctcggaacaaacgcccgccctggggncttttgctcanaatgcctccccaggagaaccagcaacctcttccaccaaggaaacaaacttgttttgtaaacggaatgtgccatggggccccctggggaagggaccggggcccctccggaaaacccccttgg

SEQ ID NO: 256812 - DNA, 1405 bp, Homo Sapiens
  misc_feature (939)..(939): n is a, c, g, or t
ctggtgctcctgtggtcctgccctggtctgagatcttggagcccttcttgaagagagggtgtccgcagagttgctgatcttcctgcccctgggggctactcttgcccagggttgggcaaagcagagtagctgggagtgtaaggagaggaccctcgtcccctcaccaacctcatcctctctccccctacccacaggtagcctcatggctgcaaactgtgagattagcaacatttttagcaactacttcagtgcgatgtacagctcggaggactccaccctggcctctgttccccctgctgccacctttggggccgatgacttggtactgaccctgagcaacccccagatgtcattggagggtacaggtgggtctcagcggggtgggatggggcacggagtgggagacagatccatctaagggcctgttagacaaatgggggaataggcagggaggagggtctctaggcaaattccagggctagaggctgagacttagtgactgaggtgctgggggttgtggggctgtgacaggcagagggaggtgtcagataccaggacaagggtgttgtgaatgctacctcctgcccctactcttgggatggctccaagggctgaggtgtgaatccccagtgtgctccaggaatggggctgtgtgagccaccgtgcccagctccctggccttaaaagtcatgtaatttaatgatcagaccccagtcacagccataggatacaaagaagcaaaggcaaagagccctgtgtcctgggcacggttacaggccagtgtagggaaagagcttctgcttgccagtgtgaagaacagaggagtttaggaagtgtgagtcaggctcagcttagtcaggcagagaccagtgggcatgggttacctgggggtaaccgcggccaggtgggcgggctggcagcctggggcccatttcctgncaaagcacctctgaccatccttctcttcacccagggtactactacaaacgggagatccttggaacggtggatggccggcgacttcgtctacaagttttgccaaaacctaagcggctggaaggagaaagaggttcttccaagtcggaactgagggtgggactattcccgggaccaaacttacggacccctcgaggcctggaaaccttccttggaaggaaggcaaggccagatgggcccttccactgaggaatgctccagctgtcctttggaaaaaaccgatgttttgtgttttgtaaagccttgccctggacttgggactattgcctgccctcccaccctctcttttgaattcacagccctggggtggaaggcggctctttagcgcaagggttttcctttatattgggctcctcaacccaggttagacctttataggaaaacccttcttcgggacaccgtgatgggc

SEQ ID NO: 256813 - DNA, 1946 bp, Homo Sapiens
  misc_feature (732)..(732): n is a, c, g, or t
  misc_feature (836)..(836): n is a, c, g, or t
  misc_feature (1836)..(1836): n is a, c, g, or t
ccaggctctatttagagccgggtatgggagcgcagcggccagatacctcagcgctacctggcggaactggatttctctcccgcctgccggcctgcctgccacagccggactccgccactccggtagcctcatggctgcaacctgtgagattagcaacatttttagcaactacttcagtgcgatgtacagctcggaggactccaccctggcctctgttccccctgctgccacctttggggccgatgacttggtactgaccctgagcaacccccagatgtcattggagggtacagagaaggccagctggttgggggaacagccccagttctggtcgaagacgcaggttctggactggatcagctaccaagtggagaagaacaagtacgacgcaagcgccattgacttctcacgatgtgacatggatggcgccaccctctgcaattgtgcccttgaggagctgcgtctggtctttgggcctctgggggaccaactccatgcccagctgcgagacctcacttccagctcttctgatgagctcagttggatcattgagctgctggagaaggatggcatggccttccaggaggccctagacccagggccctttgaccagggcagcccctttgcccaggaagctgctggacgacggtcagcaagccagcccctaccaccccggcagctttgtggcgcaggagccccctcccccggccagctctgacgtctccaccgcangggactgggtgcttctcggagctcccactcctcagactcccggtgggaaagtgacgtgggaccctggatcccactggatggcaagctcttccccagcggatggnttttcgtgactgcaagaagggggatcccaagcacgggaagcggaaacgaggccggccccgaaagctgagcaaagagtactgggactgtctcgagggcaagaagagcaagcacgcgcccagaggcacccacctgtgggagttcatccgggacatcctcatccacccggagctcaacgagggcctcatgaagtgggagaatcggcatgaaggcgtcttcaagttcctgcgctccgaggctgtggcccaactatggggccaaaagaaaaagaacagcaacatgacctacgagaagctgagccgggccatgaggtactactacaaacgggagatcctggaacgggtggatggccggcgactcgtctacaagtttggcaaaaactcaagcggctggaaggaggaagaggttctccagagtcggaactgagggttggaactatacccgggaccaaactcacggaccactcgaggcctgcaaaccttcctgggaggacaggcaggccagatggcccctccactggggaatgctcccagctgtgctgtggagagaagctgatgttttggtgtattgtcagccatcgtcctgggactcggagactatggcctcgcctccccaccctcctcttggaattacaagccctggggtttgaagctgactttatagctgcaagtgtatctccttttatctggtgcctcctcaaacccagtctcagacactaaatgcagacaacaccttcctcctgcagacaccctggactgagccaaggaggcctggggaggccctaggggagcaccgtgatggagaggacagagcaggggctccagcaccttctttctggactggcgttcacctccctgctcagtgcttgggctccacgggcaggggtcagagcactccctaatttatgtgctatataaatatgtcagatgtacatagagatctattttttctaaaacattcccctccccactcctctcccacagagtgctggactgttccagncctccagtgggctgatgctgggacccttaggatggggctcccagctcctttctcctgtgaatggaggcagagacctccaataaagtgccttctgggctttttctaaaaaa

SEQ ID NO: 256814 - DNA, 353 bp, Homo Sapiens
  misc_feature (98)..(107): n is a, c, g, or t
attacaaacgtattgtattttagacacattacaaccaggagaacaaactggaagctctataggtatgttctgaccattaaaatatctggacagtgttnnnnnnnnnntcaggagtttaacataaagctagttttccgccttgccctgaaaacctggatgatctggactctttgggtctatgttcccagatggtccccagcaggcagagccaggagggtggcccatcaggagtggcacggtccttccactgggcacatcccctccccaggccactgtactccttcattacctgcatggcccctgaagacactggagttgatgacttcctggagtggataaaatgggcctcgtgc

SEQ ID NO: 256815 - DNA, 1762 bp, Homo Sapiens
  misc_feature (23)..(23): n is a, c, g, or t
ccttgagacaatggagacgaganactctagagggagggtgaccaactgttccactttgcccaagactgataattcttctgggatatattttcagggctaaaaccagaaaagtcccaggcaagctgggacactttgtcactcttgctaaaggcctgagagtgcagaggatgcatcttatcgactacctgctcctcctgctggttggactactggccctttctcatggccagctgcacgttgagcatgatggtgagagttgcagtaacagctcccaccagcagattctggagacaggtgagggctcccccagcctcaagatagcccctgccaatgctgactttgccttccgcttctactacctgatcgcttcggagaccccggggaagaacatctttttctccccgctgagcatctcggcggcctacgccatgctttccctgggggcctgctcacacagccgcagccagatccttgagggcctgggcttcaacctcaccgagctgtctgagtccgatgtccataggggcttccagcacctcctgcacactctcaacctccccggccatgggctggaaacacgcgtgggcagtgctctgttcctgagccacaacctgaagttccttgcaaaattcctgaatgacaccatggccgtctatgaggctaaactcttccacaccaacttctacgacactgtgggcacaatccagcttatcaacgaccacgtcaagaaggaaactcgagggaagattgtggatttggtcagtgagctcaagaaggacgtcttgatggtgctggtgaattacatttacttcaaagccctgtgggagaaaccattcatttcctcaaggaccactcccaaagacttctatgttgatgagaacacaacagtccgggtgcccatgatgctgcaggaccaggagcatcactggtatcttcatgacagatacttgccctgctcggtgctacggatggattacaaaggagacgcaaccgtgtttttcattctccctaaccaaggcaaaatgagggagattgaagaggttctgactccagagatgctaatgaggtggaacaacttgttgcggaagaggaatttttacaagaagctagagttgcatcttcccaagttctccatttctggctcctatgtattagatcagattttgcccaggctgggcttcacggatctgttctccaagtgggctgacttatccggcatcaccaaacagcaaaaactggaggcatccaaaagtttccacaaggccaccttggacgtggatgaggctggcaccgaggctgcagcagccaccagcttcgcgatcaaattcttctctgcccagaccaatcgccacatcctgcgattcaaccggcccttccttgtggtgatcttttccaccagcacccagagtgtcctctttctgggcaaggtcgtcgaccccacgaaaccatagccctcccagggctgctcatctgttccaagcaggaggatgtggcaggggagggctgggagtgagtagctctgtgtttagagttggggacaaggatgacaccgaaggtccaggagtccaggacagcaggtgctggccggtggggagcggggaggggcactgagatgggcagggcctggacattccacaccctggtgctgtgcagcctctggcagagcatccgacctcttggagcaagtttctgcctctggaaagggggcgggcccttttcacaacaggctggttgtaccgagtaaacaacacgatgccatgaa

SEQ ID NO: 256816 - DNA, 481 bp, Homo Sapiens
ttgtcccccaactcctaaaacacaaaacctaactcaactcccaagccctaccccctgcccaaatccctccctgccttggaaacagatgaagccaaccctgggagggcctatggtttccgtggggtcgacgaccttgccccagaaagaggacactctgggtgctggtggaaaagatcaccacaaggaagggccggttgaatcgcaggatgtggcgattggtctgggcagagaagaatttgaatcgcgaagctggtggctgctgcagcctcggtgccagcctcatccacgtccaaggtggccttgtggaaacttttggatgcctccagtttttgctgtttggtgatgccggataagtcagcccacttggagaacagatccgtgaaacccagcctgggcaaaatctgatctaatacataggagccagaaatggagaacttgggaagatgcaactctagcttcttgtaaaaattcctcttccagt

SEQ ID NO: 256817 - DNA, 1246 bp, Homo Sapiens
  misc_feature (852)..(852): n is a, c, g, or t
  misc_feature (1134)..(1134): n is a, c, g, or t
  misc_feature (1182)..(1182): n is a, c, g, or t
  misc_feature (1222)..(1222): n is a, c, g, or t
ggggaggcagaggaacagggaagatggcggctgtggtggagaatgtagtgaagctccttggggagcagtactacaaagatgccatggagcagtgccacaattacaatgctcgcctctgtgctgagcgcagcgtgcgcctgcctttcttggactcacagaccggagtagcccagagcaattgttacatctggatggaaaagcgacaccggggtccaggattggcctccggacagctgtactcctaccctgcccggcgctggcggaaaaagcggcgagcccatccccctgaggatccacgactttccttcccatctattaagccagacacagaccagaccctgaagaaggaggggctgatctctcaggatggcagtagtttagaggctctgttgcgcactgaccccctggagaagcgaggtgccccggatccccgagttgatgatgacagcctgggcgagtttcctgtgaccaacagtcgagcgcgaaagcggatcctagaaccagatgacttcctggatgacctcgatgatgaagactatgaagaagatactcccaagcgtcggggaaaggggaaatccaagggtaagggtgtgggcagtgcccgtaagaagctggatgcttccatcctggaggaccgggataagccctatgcctgtgacatttgtggaaaacgttacaagaaccgaccaggcctcagttaccactatgcccactcccacttggctgaggaggagggcgaggacaaggaagactctcaaccacccactcctgtttcccagaggtctgaggagcagaaatccaaaaagggtcctgatggattggccttgcccaacaactactgtgacttctgcnctgggggactcaaagattaacaagaagacgggacaacccgaggagctggtgtcctgttctgactggtggccgctcagggcatccaatcttgccctccaatttacccccgtgatgatggcggcagtgaagacataccgctggcagtgcatcgagtgcaaatgttgcaatatctgcggcacctccgagaatgacgaccagttgctcttctgtgatgactgcgatcgtggctaccacatgtactgtctcaccccgtccatgtctgagccccctgaaaggaagttngagctgccacctgtgtttgggacctgttgaaaagagaaagcttccatnttaccagaaccagaattcctcttgatgtgggccacccacntgttccccgacatatttaagggtt

SEQ ID NO: 256818 - DNA, 408 bp, Homo Sapiens
tttttacagttgaaagattggcaacaatctaaatgaccataggagaaaggataaataagttgcatatttgcacagtataacaagatagttgattaaattagagccatttgatacaacatgaataaatctaaaattgtgtacaaacaaaagccaaagcaaaacttatgtgatattctttacgtcaaatttaaaagtctgcaaaacaatatgctgtactctctataaatggtaaatataaggtcatagtgtaaatacaaatgaaggtaacatgctttagatatagtaattattttggggtgggttcagggagatacaagcttcagatggacatggatgtgtgagtggatatgtatttcaagtcaaccaaatttggaaaatgttaaaatttattaaacctcaccatggaat

SEQ ID NO: 256819 - DNA, 1365 bp, Homo Sapiens
ccgggcaagcgtttgtaggcggcgctgcctagaatcaggcggtctgcttgccgcatcacgcaagatggcggccgcggcggtgaacggggcggcaggcttctcgagctccgggcccgcggcaacctcgggcgctgttctgcaggccgcgaccggcatgtacgagcaactcaagggcgagtggaaccgtaaaagccccaatcttagcaagtgcggggaagagctgggtcgactcaagctagttcttctggagctcaacttcttgccaaccacagggaccaagctgaccaaacagcagctaattctggcccgtgacatactggagatcggggcccaatggagcatcctacgcaaggacatcccctccttcgagcgctacatggcccagctcaaatgctactactttgattacaaggagcagctccccgagtcagcctatatgcaccagctcttgggcctcaacctcctcttcctgctgtcccagaaccgggtggctgagttccacacggagttggagcggctgcctgccaaggacatacagaccaatgtctacatcaagcacccagtgtccctggagcaatacctgatggagggcagctacaacaaagtgttcctggccaagggtaacatccccgccgagagctacaccttcttcattgacatcctgctcgacactatcagggatgagatcgctgggtgcatcgagaaggcctacgagaaaatccttttcactgaggccacccggatcctcttcttcaacacacccaaaaagatgacagactacgccaagaagcgagggtgggtcctgggccccaacaactactacagttttgccagccagcagcagaagccggaagacaccaccattccctccacagaactggccaaacaggtcatcgagtatgcccggcagctggagatgatcgtctgagccccccgggcactgggtggggcagggcacgagttatttaaaacagttacactgcagggtttcgcccaataaaggtggactgacattccctcttccaaggcccttgtctcccccagttgggacggcagagagacaagttcttatatctgaagaacttggaggttttggggcattcaggagttggagatagcctccaactgggtcagcctctgtctggtgggcattgctcagggtctcaaacatggacgcccactgtgggccccagcagcactgtggcctgcaggaggcatggccccaggtagggggactgttctagccagctgtggacacataggaatgctggaccagggtaccagattttttcaacaaagggggtgaagtgtcctactaaaaagaataaatgttggcagtgaattaaacaatttttcaaatgaaaa

SEQ ID NO: 256820 - DNA, 607 bp, Homo Sapiens
  misc_feature (519)..(519): n is a, c, g, or t
cttgggcaagtttgcagttgtgatggctgacccaccctgggatattcacatggaactgccctatgggaccctgacagatgatgagatgcgcaggctcaacatacccgtactacaggatgatggctttctcttcctctgggtcacaggcagggccatggagttggggagagaatgtctaaacctctgggggtatgaacgggtagatgaaattatttgggtgaagacaaatcaactgcaacgcatcattcggacaggccgtacaggtcactggttgaaccatgggaaggaacactgcttggttggtgtcaaaggaaatccccaaggctttcaaccagggtctggattgtgatgtgatcgtagctgaggttcgttccaccagtcataaaccagatgaaatctatggcatgattgaaagactatctcctggcactcgcaagattgagttatttggacgaccacacaatgtgcaacccaactggatcacccttggaaaccaactggatgggatccacctactanacccagatgtggttgcacggttcaagcaaaggtacccagatggtatcatctctaaacctaagaatttatagaagcacttccttacaga

SEQ ID NO: 256821 - DNA, 782 bp, Homo Sapiens
  misc_feature (26)..(26): n is a, c, g, or t
  misc_feature (315)..(315): n is a, c, g, or t
gagacaaatcaactgcaacgatcatncggacaggccgtacaggtcactggttgaaccatgggaaggaacactgcttggtgagcagcagtggggcccaattcaataggtggagcacaaagaagaatcatttgatttcttactgagaaaaagttcaaaggtgtggtttcataaggtaatctgttatctgtggtgagcaggttggtgtcaaaggaaatccccaaggcttcaaccagggtctggattgtgatgtgatcgtagctgaggtatgtgcttctcaggcctccaaagcttccacatttttgttggggatcaccnggttattcagtgttggggtgtattctcatcccagatttttctcatttagatcataaacataataggaaagggcctagaattgcaatcttgtgtaacttaaaaaccagcttagtttttatttcctaggttcggttcccaccagtcataaaccagatgaaatctatgggcatgattgaaagactatctcctgggcactcgcaagattgagttatttggacgaccacacaatgtgcaacccaactggatcacccttggaaaccaactggatgggatccacctactagacccagatgtggttgcacggttcaagcaaaggtacccagatggtatcatctctaaacctaagaatttatagaagcacttccttacagagctaagaatccatagccatggctctgtaagctaaacctgaagagtgatatttgtacaatagctttcttctttatttaaataaacatttgtattgt

SEQ ID NO: 256822 - DNA, 304 bp, Homo Sapiens
atgagccaccatgcccagccaactggtgagtttttataatgttctgaaaaaaagtgcattttaaaagccagcgtgttcacagtgtataaagaaagtattgcttaagaagtacttagatgggaagcgacatgaaaatcttaactaaaaaaactcttacaagcccaaaatataatgtaataaaaacgctcccaagcaaggcaaacttctagattccccaagtgcatacaggtaatggggaagccctgagcctttactggcatgaggtgctctgaagagaacagggggaaccctcttctcctcgtgc

SEQ ID NO: 256823 - DNA, 835 bp, Homo Sapiens
  misc_feature (740)..(740): n is a, c, g, or t
  misc_feature (768)..(768): n is a, c, g, or t
  misc_feature (823)..(823): n is a, c, g, or t
gggacaccacgaaagatccatcccggaagtgcttactggtcgtctccatgcgccggttcctgggcgtcttagagccaaggcgcgaggctcggagtgagaggtagagctggaggggaccctaagcgccctccgcccgggacgtgagccgctgcgcccaccgggctagacccggcgccatcatgctgcttctgccaagcgccgcggacggccggggcaccgccatcacccacgctctgacctctgcctctacactctgtcaagttgaacctgtgggaagatggtttgaagcttttgttaagaggagaaacagaaatgcttctgcctcttttcaggaactggaggataagaaagagttatccgaggaatcagaagatgaagaattgcagttggaagagtttcccatgctgaaaacacttgatcccaaagactggaagaaccaagatcattatgcagttcttggacttggccatgtgagatacaaggctacacagagacagatcaaagcagctcataaagcaatggttttaaaacatcacccagacaaacggaaagcagctggtgaaccaataaaagaaggagataatgactacttcacttgcataactaaagcttatgaaatggtatctgatccaatgaaaagacgagcatttaacagtgtagatcctacttttgataactcagttccttctaaaagtgaagcaaaggataatttcttcgaagtgtttaccccagtgtttganaggaattccagatggtcaaataaaaaanatgttcctaaacttggtgatatgaattcatcatttgaagatgtagatatattttnttctttctggta

SEQ ID NO: 256824 - DNA, 442 bp, Homo Sapiens
agattcggcatgagaaaaacaataaaaaggcagtatccactaagtgcagctgctatacttctaaagagaggtgaagtattattttttaaaagcttgccattggaggagtattttgtatccacacacacacacccatcctaatttcttatccctaatgggaaagtctatatgtaaaatggattgctttcttctgattctgaaggcaggggagaccgtggttttttgcttgttatgacaatataacacatgctgttaaatgtagttatggctgcagactatgatactgtatatcttttaaaaagcatagccagcctgttcctatacaagatatttgattatttcaaaataactaagtacttacgagctgctttgatctgtctctgtgtagccttgtatctcacatgggccaagtccaagaactgcataatgatcttggttctgg

SEQ ID NO: 256825 - DNA, 473 bp, Homo Sapiens
gtcaccgggatcatgattgcccgtggcgccctgctcaagccgtggctcttcacggagatcaaggagcagcggcactgggacatctcgtcgtccgagcgcctggactatctgcgggacttcaccaactacggcctggagcactggggctcggaacaccagggcgtggagaagacccggcgctttctgctcgagtggctgtccttcctgtgccggtacgtgcccgtggggctgctggagcggctcccacagaggatcaacgagcggccgccctactacctgggccgcgactacctggagacgctgatggccagccagaaggcagccgactggatccgcatcagcgagatgctccttgggccagtgccccccagcgtcgccttcttgccgaagcacaaggccaacgcgtacaagtagcctcaggctttcccaggggcaccctggggcgaggagagtacaataaattttattctttt

SEQ ID NO: 256826 - DNA, 1294 bp, Homo Sapiens
  misc_feature (821)..(821): n is a, c, g, or t
cttccgcctgcgcctgcgcaggcccgctccccgagccctgccaaccatggtgaacttgggtctgtcccgggtggacgacgccgtggctgccaagcacccgggactcggggagtatgccgcatgccagtcacacgccttcatgaagggcgttttcaccttcgtcacaggcaccggcatggcctttggcttgcagatgttcattcagaggaagtttccataccctttgcagtggagcctcctagtggccgtggttgcaggctctgtggtcagctacggggtgacgagagtggagtcggagaaatgcaacaacctctggctcttcctggagaccgggcagctccccaaagacaggagcacagatcagagaagctaggagagctccagcaggggcacagaggattgggggcaggaggagtctggaacacagccttcatgccccctgaccccaggccgaccctccccacaccctagggtaccccagtcgtatcctctgtccgcatgtgtggccaggcctgacaaacacctgcagatggctgctgccccaacctgggacctgcccaggaggttggagcagaaagggctctccctggggtggtgtttctcctctagggtattgggatgcatgttctgcactgccagcagagagggtgtgtctgggggccaccacctatgggacacggggtcgaaggggcctgtacactctgtcatttcctttctagcccctgcatctccaacaagtccaaggtgacagctggtgctaggggcgtggggttaataaatggcttatccttctctccaccccaccaagagaaaaacatgancacctccaggcctctttcgtcggggcgcggcaagacggaatgaaacggcgcttgggttctagcggggttccggaaccccggtttttttgctaaccaggcgggggggcttcgccggaagtcgccccagaaacacgccggcctaacctacttctcgcgcagaccgccggcgacctcccgcgtgacgaggaaaggcgcccccgcagcccccccgcggatgttggggggcggccgacagctcgagtccgcacgttagtccccagtgtgctgctacgcggggtagccggtgcccgcgccacctgagcccgccccccccgttgagcgcgcggcccaacttcgtccgcctatatggagggggtgcgcggttggtcccggccgtgcccgggacgatggcgtgcggccgtaggacggcggcgggcgggcggtgcggcgatcggatcacgcgttggcggccttgcgcggtcacaccggtgttt

SEQ ID NO: 256827 - DNA, 342 bp, Homo Sapiens
  misc_feature (194)..(202): n is a, c, g, or t
ggccgactatgtgtgacgatttgggctcctaccctatcactagcccacagtatgcacatcttctacgactcggccatcattctcaggaccccctgccctacacactattagggtgcccatgagaacctgaattcccccgaactttgattacccaattacactatgatatgtggcgttaatttaccacatcagannnnnnnnnaatcgcattaagtgaggagtcatggctttttcatttcattttagttctttaatgtggcaaatgccccatgatcatcttcactagtcatttaagatcattcattcacaaagcaagttttaagccttttgggagctcaacac

SEQ ID NO: 256828 - DNA, 626 bp, Homo Sapiens
  misc_feature (196)..(214): n is a, c, g, or t
caccacagtgagcttggctcgcctcggccggcccgggatgcactcttacaacatgtgtgactcttgaacctggagttcatcacattacgtcacagcttcccatctggttgctttcctgagtcagctacttcacacttgtcaaggctgttttaccccaaaactcagacaggactttctatgcatgttttccctcctnnnnnnnnnnnnnnnnnnnatcaccttatctcccaggacacacttgagaagtagctttttattcctagtggtgtacatttaattttaaaaaggttgcaatgtatcatgcttgttgccgaaactgtttatggccttcttgtttcagttttttcttttcttccaatggtactttagctgttgagtgcaggttacaacctatattgttatgcagatggcttctttaggaataacttttatatttatttaaaaatttttaaattatgggatgttttgttgttgatgatgtctttgttgatggtcatttgtcaatattcagtcaccaattctgctcacttcttgccatggataaaattgggtctttctggctaattaaaaaagacaactttataaagcaaagacgtttgtgatgaaagaactgctcatctaagcaa

SEQ ID NO: 256829 - DNA, 542 bp, Homo Sapiens
tatatgatattgagtctcattatgttgtctaggctaagctcaaactcctggaatcaagccatcctcccaccttagcctcctgaaaacacctgcaaattcaatccaatactatagtaattcttaagccttttggtcttagaacccctctgtaccttaaaactgaggccacttagctttcatttatgtaggatatatcaactgatatttactgtatttgcaattaaaactcagaaattttaaaaacattttctcaggagaaaccagtggaggaaaaaagaaattttaagaatacaatcatatacaagcacacatgccattaagccattacggtgatgacatcacctcaggcacctgacctctggaaacctccattgtacccttgtgagagaattgagtgtcatgtcttagcatgattatgaaaataattttgagggccaggtgctccgaacttgctcaaatcaatagcaaagcagagagaagctcaacaacttcagaactcagtaacttcaagcactaatagaataaaagaaaatctcgtgccg

SEQ ID NO: 256830 - DNA, 1001 bp, Homo Sapiens
caggcccgagctactcaggagagagggtctgtcgcttttaaaacgcattaaaggctctctcctggccttatttaacttgcctaagctaggtggagcacggctgagctcaggtaagctagcagctttccagcagaaggtgttctcccgaagaacgcagacctggggaagggttgactttttgggggcccctgctgagaacagttcaagagctccctaactgtagaggctgctggaggggcgaggggcagaaccccgggctgaatcatctcccgctttcccgggactttgctttcactttcctcagtcttgtggacagagtcaagtagattttcaaaagtgctccagaaaggccggaatagtcatgtagtggatgaaaagggcagtcacaaaactgcttaagaccagctgtcttgccagtaattgcagtgctttaagagattaattaaaaaccgcgcctacctgtaacccaagaacacttagtaccatggcacatcatgattatattgctaaaaggaagggaacagtatctgatgtaggtaaccatggactgtcatgaatatattgctataaggaagggaacaaaatctttatacgtgtgcaaagataattaaatcttggcttaaatctttggcagcaaagcaaatatccgactgactgctccttagtctgtgaactttgctctccgtgcacattacccagcctaattaaaacaagtgtgtgtgggtggagccagctatccccaccaccattcagcagagacacgatcacaccagttcagaggagctacactttatgtgtgacacggttacctgtgatacagttccctataacactttcccaaaagttgtgaactgtgcagtgcttaagtttgacatatattgtggccgaacagtgatattacagtgtgggacacaggtgtacactctgcaaggtatattctgtgggaatgtgtaatactgtgatataaacatgtgtaatcatgtggaaatgttcaacttgtt

SEQ ID NO: 256831 - DNA, 578 bp, Homo Sapiens
aaatacgagaacgggtacattcacccggtcaacctgacgtggccctttatggtggccgggaaacccgagagtgacctgaaagaagtggtgaccgcgagccgcttatgtggaaccaccgcgtcctgaccttggaggtgcgagtctgggaaaggcgcgctcccggggggagcgggccccgggaaggcgacccctgccctcagtgctctctgtctctgcttccccctcgcaatgctcctctctctgtcccaccccgcgagaacactttacaacgacgaggagattcgtttccaaaccagaggagatcaattgtacttacaaagattcccatctatttaactttattaacttctaccgtgaatgactctgcaagccttgctggtccaagtgcaatatgtaattataaatatataaatagataagagcctatcaatgtatcttttgtacaatatgttgtaaaatgtagatcataggatagctgactttgacagtcacatttataaagtaattcacttaaagatatatatttttttcaaacaagttttgctacttttgaaaataaatctttctttatattgcta

SEQ ID NO: 256832 - DNA, 785 bp, Homo Sapiens
  misc_feature (359)..(438): n is a, c, g, or t
  misc_feature (614)..(614): n is a, c, g, or t
ttctcttccttctctgtgaaataaagggggtgacaccagcttagggatgttggagacgatctgcctattacgaagataggagttataaagaaatactttttaggcaactagaaaggagtaaaaggaataaaggagtaaaggttctcagtggaaattttcctgtaataagaagcaactcctgaaccatttcttttctaaccgttagaaactaggtccacccaacatggcaattcctgccctcttctccttgtcaccacctgtgccaagtgtcatgaccgcctccagataactcatacatgttcaggacatcatggcagctcacgtttgcatattaaagggctaaggtgggagggctagannnnnnnnnnnnnnnnnnnnnnnnnnnnnnnnnnnnnnnnnnnnnnnnnnnnnnnnnnnnnnnnnnnnnnnnnnnnnnnngccccccaatataaccaaccacttttccgctgcacaccggatttctcttggtcaagactccccgggccccatccgccgtatgggggagctgttttctcctttctaccaggcaccatgcttcacatatgcctggcatttaggagatactgtctacaattgttaattctaaaggggtncttaaggccctcgcagaggccagttaaacactgccccatcacatcacacagcttcttgcacacccccctcaagttagttcaaagtagctggaacaatagcagacaactgaaactttctgttaggctaatccctctaaaagtaatggacttggggccagatgtggtggctca

SEQ ID NO: 256833 - DNA, 1115 bp, Homo Sapiens
  misc_feature (851)..(851): n is a, c, g, or t
atgacacagaattgtgccaaggggaggacagaaggaggagtcagcccccggagcagcatcatcagcatcatgctattacaatcccaaaccatgggggtttctcacagctttacaccaaagggcatcactatccctcaaagagagaaacctggacacatgtaccaaaacgaagattacctgcagaacgggctgccaacagaaaccaccgttcttgggacagtccagatcctgtgttgcctgttgatttcaagtctgggggccatcttggtttttgctccctacccctcccactttcaatccaggcaatttccaccactttggatgtctggggtacccatttttagggagctctgtgttttggcattactggatccctctcaattatctctggttctgttactgcaggagcaggcctcttcctccttgctgacagcatggtagccctgaggactgcctctcaacattgtggctcagaaatggattatctatcctcattgccttattcggagtactattatccaatatatgaaatcaaagattgtctcctgaccagtgtcagtttaacaggtgtcctagtggtgatgctcatcttcactgtgctggagctcttattagctgcatacagttctgtcttttggtggaaacagctctactccaacaaccctgggagttcattttcctcgacccagtcacaagatcatatccaacaggtcaaaaagagttcttcacggtcttggatataagtaactcttggcctcagaggaaggaaaagcaactcaacactcatggtcaagtgtgattagactttcctgaaatctctgccattttagatactgtgaaacaaactaaanaaaaaaaagccttttgttttgtatttgtttactatgagtcgttatttaatttctcttgaaaataatttcctcaaagcccaagtcaataaatgttatcagccagtcttccaaaatggtcataaactttataaactgctttgggtaaactgagcagaaggtgatacacagaagggaaaatgtgcactcatgctagtgtgaatttggtaagttgcgtgactctgcaggctgtttctgtattattttcacactcatattgcttaaatt

SEQ ID NO: 256834 - DNA, 679 bp, Homo Sapiens
  misc_feature (274)..(285): n is a, c, g, or t
  misc_feature (543)..(543): n is a, c, g, or t
  misc_feature (614)..(614): n is a, c, g, or t
  misc_feature (619)..(619): n is a, c, g, or t
  misc_feature (640)..(640): n is a, c, g, or t
  misc_feature (647)..(647): n is a, c, g, or t
caatccctaatatgtaatatttaagcaatatgagtgtgaaaataatacagaaacagcctgcagagtcacgcgacttaccaaattcacactagcatgagtgcacattttcccttctgtgtatcaccttctgctcagtttacccaaagcagtttataaagtttatgaccattttggaagactggctgataacattttactgacttgggctttgaggaaattattttcaagagaaattaaataacgactcatagtaaacaaatacaaaacaaaagcnnnnnnnnnnnnagtttgtttcacagtatctaaaatggcagagatttcaggaaagtctaatcacactttgaccatgagtgttgagttgcttttccttcctctgaggccaagagttacttatatccaagaccgtgaagaactctttttgacctgttggatatgatcttgtgactgggtcgaggaaaatgaacttgttaaactgacactggtcaggagacaatctttgatttcatatattggataatagtactccgaataaggcaatgaggntagataatcccatttctgagccaccaatgttgagaggcagtccccagggctacccatgctgtcagcaaggngggangaggcctgctccctgccggtnaccaggnctcactgccatttggagggcaagctgctccgg

SEQ ID NO: 256835 - DNA, 806 bp, Homo Sapiens
  misc_feature (160)..(269): n is a, c, g, or t
caagatcgttctggcaggaacagccagtgggaggttccagctgagcgctccccagaggtgagctgatccccagccacagcacacaggaccaggctgcgagaacaggtagacaccttggtttagatcatgacttttggggaagattgtgtgcttttgaaannnnnnnnnnnnnnnnnnnnnnnnnnnnnnnnnnnnnnnnnnnnnnnnnnnnnnnnnnnnnnnnnnnnnnnnnnnnnnnnnnnnnnnnnnnnnnnnnnnnnnnnnnnnnnaagaaaattgggtaaaaccattcttaggtttccctcattgaggtgattttcctcaatgttctgcattctcctggtgtgtcactcagtcttacagagtctactctcaacaaatactgtgcaattagactgaatcttgcattagaaccccatggtcctactctaattctgtaatacagaaaattgctgggcagagctgttgacctccatgtcatgatttatcttcaaagcacggattttagagctgtcttgaaagctgtgggtccctccagtctatctcctcaaggcgaatgtggaaggacaaagcatcctctcagactgtggtgtttggagatgatagcatcagtctggagacttttgtgaaacataaagaatcttggttatataggattccttctaaaagtagcaacgtgtatctaaattcaagtgtcatagatttaaatgtaataattccacttccatacatcactgtgagataattaaatgcaggaggtatcacaaaagtgcaaagatgttcattattgcattgttcatagtggc

SEQ ID NO: 256836 - DNA, 1663 bp, Homo Sapiens
  misc_feature (1189)..(1238): n is a, c, g, or t
  misc_feature (1245)..(1245): n is a, c, g, or t
  misc_feature (1357)..(1365): n is a, c, g, or t
acttgacagcccgctgaggacgcagcgtcagctgacctggggagtcgcgattcgtgccggccggtcctggttctccggtcccgccgctcccgcagcagccatgtcgttcttcccggagctttactttaacgtggacaatggctacttggagggactggtgcgcggcctgaaggccggggtgctcagccaggccgactacctcaacctggtgcagtgcgagacgctagaggacttgaaactgcatctgcagagcactgattatggtaacttcctggccaacgaggcatcacctctgacggtgtcagtcatcgatgaccggctcaaggagaagatggtggtggagttccgccacatgaggaaccatgcctatgagccactcgccagcttcctagacttcattacttacagttacatgatcgacaacgtgatcctgctcatcacaggcacgctgcaccagcgctccatcgctgagctcgtgcccaagtgccacccactaggcagcttcgagcagatggaggccgtgaacattgctcagacacctgctgagctctacaatgccattctggtggacacgcctcttgcggcttttttccaggactgcatttcagagcaggaccttgacgagatgaacatcgagatcatccgcaacaccctctacaaggcctacctggagtccttctacaagttctgcaccctactgggcgggactacggctgatgccatgtgccccatcctggagtttgaagcagaccgccgcgccttcatcatcaccatcaattctttcggcacagagctgtccaaagaggaccgtgccaagctctttccacactgtgggcggctctaccctgagggcctggcgcagctggctcgggctgacgactatgaacaggtcaagaacgtggccgattactacccggagtacaagctgctcttcgagggtgcaggtagcaaccctggagacaagacgctggaggaccgattctttgagcacgaggtaaagctgaacaagttggccttcctgaaccagttccactttggtgtcttctatgccttcgtgaagctcaaggagcaggagtgtcgcaacatcgtgtggatcgctgaatgtatcgcccagcgccaccgcgccaaaatcgacaactacatccctatcttctagcgtcctggcccaaggctctcaattgcactcttnnnnnnnnnnnnnnnnnnnnnnnnnnnnnnnnnnnnnnnnnnnnnnnnnngtctgtnacaagcctgtggctcacctccctgtccggggtgtagtacgctgtcctagcggctgcccagttctcctgaccctcttagagactgttcttaggcctgaaaaggggctgggcannnnnnnnnaccaaggatggacgaagaccccctccagagcaaggaggccccctcagccctgtggttacagccgctgatgtatctaagaagcatgtcactttcatgttcctccctaactccctgacctgagaaccctggggcctgggggcagtttgagcctcctctcccttctgtgggtcgctcccagagccatggcccatgggaaggacagagtgtgtgtgtccttggggcctggggggatgttgctcctcagctccctccctcagccctgcccctctgagacaataaaactgccctctctaaggcc

SEQ ID NO: 256837 - DNA, 1751 bp, Homo Sapiens
tggggaagtgcaaaaaacctttcaaaaggctttcctggattagagaaagaaagggagtgagggaggagagatgagtggctattccagaacgacataaagaatttccagccttggacggacagctgggaacgtcttccaatttggactggtgtttacaagcgggaagctaggtggaccttggattttggcgggtgaagaggctaggttgtttaaggaggtggggcgcgtttcagtggctctctttgaaaaagcccagcaagatgtcagacctgctctcagtcttcctccacctcctccttctcttcaagttggttgccccggtgacctttcgccaccaccgctatgatgatcttgtgcggacgctgtacaaggtgcaaaacgaatgccccggcatcacgcgggtctacagcattgggcgcacgtggaggggagacacctctacgtgctggagttcagcgaccaccctggaatccacgagcccttggaaccagaggtcaagtatgtggggaacatgcacggcaacgaagcgttgggccgcgagctgatgctgcagctgtcggagtttctgtgcgaggagttccggaacaggaaccagcgcatcgtccagctcatccaggacacgcgcattcacatcctgccatccatgaaccccgacggctacgaggtggctgctgcccagggcccaaacaagcctgggtatctagttggcaggaacaatgcaaatggagtggacctgaaccgcaacttccctgatctcaatacctatatctactataacgagaagtacggaggccccaaccaccacctgccccttccagacaactggaaaagtcaggtggaacccgagacccgggcggtgatccggtggatgcactccttcaactttgttctttcagccaatctccacggaggggcggtggtggccaattacccgtatgacaagtcctttgagcaccgggtccgaggggtccgccgcaccgccagcacccccacgcctgacgacaagctcttccagaagctggccaaggtctactcctatgcacatggatggatgttccaaggttggaactgcggagattacttcccagatggcatcaccaatggggcttcctggtattctctcagcaagggaatgcaagactttaattatctccataccaactgctttgagatcacgctggaactgagttgcgacaagtttccccccgaagaggagttacagcgggagtggctgggtaatcgggaagccctaatccagttcctggaacaggttcaccagggcatcaagggaatggtgcttgatgagaattacaataatctcgccaatgctgtcatttctgtcagtgggattaaccatgatgtcacttcaggtgaccatggtgattacttccggctgctgcttccaggtatctacactgttagtgccacagcacctgggtatgacccagagacagtaactgtgaccgtgggtcctgcggaaccaacgttggttaacttccacctcaaaagaagcatccctcaagtaagccctgtgaggagagctcccagcagaaggcacggagtcagagccaaagtgcagccccaagccagaaagaaagaaatggagatgaggcagctgcagagaggccctgcctgaaacccacagtgccaggcaacccttcagaaaggctttgctcctgctctcagatcagatcaagcattctttctattttattatctgggacatatttaaatacaaacatattcagaac

SEQ ID NO: 256838 - DNA, 1111 bp, Homo Sapiens
  misc_feature (896)..(896): n is a, c, g, or t
  misc_feature (920)..(920): n is a, c, g, or t
  misc_feature (964)..(964): n is a, c, g, or t
  misc_feature (1097)..(1097): n is a, c, g, or t
aagcttgcagcagcacagggacaggcacccttggagcccacccaagatgggagtgccattgaaacatgtccaaaaggagacgagccaagaggtgacgagcaacaggtggaaagtatgacccctaaacctgtgctccaggaagaaaacaaccaagagtcttttattgcatttgctccgggtgttcagtggtgtggctcgaagaagaaagaaaatttttgtcttggggcccaaatacagtcctcttgagtttttaccgaagggtaccattaggcttctcagctccaccagatggcctcccccaaagtcccccacatggcatactgtgctctggaaaacctgtatcttctgatgggaagggaactggaatatctagaggaggtacctccaggaaatgtgctaggaataggaggccttcaagattttgtgctgaaatctgcaacactgtgtagcctgccatcctgcccaccatttataccactcaacttcgaagccactcctgttgtgagagttgctgttgaaccaaaacatccaagtgaaatgcctcagctcgtaaaaggaatgaaactgttaaaccaggctgatccctgtgtccagattttaattcaggaaacgggagagcacgttttagtcacagcaggagaagtccaccttcagcgatgcctggatgacttaaaagaaaggtttgcaaagattcatatcagtgtatctgaacctattattccattcagagaaacaatcacaaaacccccaaaagttgacatggtcaatgaagaaataggcaaacagcaaaaagttgcagtcatacaccaaatgaaagaagatcaaagcaaaatccctgaaggaatccaagttgactctgacgggctaatcaccataacaactcccaataaacttgnccacgctcagtgttcgagccatgnccccttccagaagaagtcacccagattctggaagaaaatagtgnatttgattcgtttctatggagcagttgacatcctcttttgaatgagggtgaaaatactcacatgattcatcagaagacccaagagaaaattttgggattcaaagggaaaactggagcaacaccttaccagggnaagaagatgggaag

SEQ ID NO: 256839 - DNA, 702 bp, Homo Sapiens
  misc_feature (187)..(188): n is a, c, g, or t
  misc_feature (215)..(215): n is a, c, g, or t
  misc_feature (229)..(229): n is a, c, g, or t
  misc_feature (290)..(290): n is a, c, g, or t
  misc_feature (313)..(313): n is a, c, g, or t
  misc_feature (344)..(344): n is a, c, g, or t
  misc_feature (355)..(355): n is a, c, g, or t
  misc_feature (364)..(364): n is a, c, g, or t
tcggtccggtcggccattaaggccacaactcatcatcttcatttacaatgggcaactttcccttcttgctgccgctgcagaatctcatctcctccttcagtgtaatgcctcgcagggcctaccaccaagtcttcactctgtgtcattatctcttccaagaaccagtcatgttcctcctctttaagannatcaatgtccctggaggagatgatgcncaccaagcggctcnccatccggcctgtgtctgtgattgggataccgcagaaaccatgccgggccttggcctcatncacatcccgcacgcgatccttgnggctgaggaccacagagtctgtgatgaatcnctgttcatatntcttcactntccgaacttcattggcctggaattcaggtgtacagttgtggtggatgaagccaataccgcctgtaagcgccattgctatggccatcacagccttggtcagagcagaagtcaggtccacctggtctgcagtgaagtcgatgtacccagggagaatgagaaagtcattgtaggtgaggccgtctccgcagttgaagagctgctgtgctgtgagtccgtcgtctggcacgtaggacgtgcccccactaatcaggtagtcggccatggccaacacaggacaccgccgcgtgtctccgaggaccgcgccgcagagacctctgccgtctctcgtgccgaattcc

SEQ ID NO: 256840 - DNA, 1119 bp, Homo Sapiens
  misc_feature (7)..(7): n is a, c, g, or t
  misc_feature (10)..(10): n is a, c, g, or t
  misc_feature (52)..(52): n is a, c, g, or t
  misc_feature (63)..(63): n is a, c, g, or t
  misc_feature (75)..(75): n is a, c, g, or t
  misc_feature (82)..(82): n is a, c, g, or t
ccaatanaanacagccggatggaccgcttgtggcacatctctccaggacatnatttctcaagntgaggacatganttttctngaagagatatgacaaagaggaagacttggtgtagcccctgcagcatcacactgaagaggcaaatgaattctgcagcgcagcaagaagggaaagttgcccattgtaaatgaagatgatgagcttgtggccatcattgcccggacagacctgaagaagaatcggactacccactagcctccaaagatgccaagaaacagctgctgtgtggggcagccattggcactcatgaggatgacaagtataggctggacttgctcgcccaggctggtgtggatgtagtggttttggactcttcccagggaaattccatcttccagatcaatatgatcaagtacatcaaagacaaataccctaatctccaagtcattggaggcaatgtggtcactgctgcccaggccaagaacctcattgatgcaggtgtggatgctgcgggtgggcatgggaagtggctccatctgcattacgcaggaagtgctggcctgtgggcggccccaagcaacagcagtgtacaaggtgtcagagtatgcacggcgctttggtgttccggtcattgctgatggaggaatccaaaatgtgggtcatattgcgaaagccttggcccttggggcctccacagtcatgatgggctctctcctggctgccaccactgaggccccctggtgaatacttcttttccgatgggatccggctaaagaaatatcgcggtatgggttctctcgatgccatggacaagcacctcagcagccagaacagatatttcagtgaagctgacaaaatcaaagtggcccagggagtgtctggtgctgtgcaggacaaagggtcaatccacaaatttgtcccttacctgattgctggcatccaacactcatgccaggacattggtgccaagagcttgacccaagtccgagccatgatgtactctggggagcttaagtttgagaagagaacgtcctcagcccaggtggaaggtggcgtccatagcctccattcgtatgagaagcggcttttctgaaaagggatccagcacacctcctcgg

SEQ ID NO: 256841 - DNA, 995 bp, Homo Sapiens
  misc_feature (799)..(799): n is a, c, g, or t
aaggtagcgaggcctgggtggcgaattcggcacgagggcggtgtcctgtgttggccatggccgactacctgattagtgggggcacgtcctacgtgccagacgacggactcacagcacagcagctcttcaactgcggagacggcctcacctacaatgactttctcattctccctgggtacatcgacttcactgcagaccaggtggacctgacttctgctctgaccaagaaaatcactcttaagaccccactggtttcctctcccatggacacagtcacagaggctgggatggccatagcaatggcgcttacaggcggtattggctttatccaccacaactgtacacctgaattccaggccaatgaagttcggaaagtgaagaaatatgaacagggattcatcacagaccctgtggtcctcagccccaaggatcgcgtgcgggatgtttttgaggccaaggcccggcatggtttctgcggtatcccaatcacagacacaggccggatggggagccgcttggtgggcatcatctcctccagggacattgattttctcaaagaggaggaacatgactgtttcttggaagagataatgacaaagagggaagacttggtggtagcccctgcaggcatcacactgaaggaggcaaatgaaattctgcagcgcagcaagaagggaaaagttgcccattgtaaatgaagatgatgagcttgtggccatcattgcccggacagacctgaagaagaatcgggactacccactagcctccaaagatgccaagaaacagctgctgggggggngcagccattggcactcatgaggatgacaaatatagggctgggacttgctcgcccaggctggggggggaagggaaggggttttggaactccttccccaggggaaatcccacccttcccgaatcaaatatgatccaagggacatcaaaagaaaaaataccccctcaatcctccaaaggtcatttgggagggccatagg

SEQ ID NO: 256842 - DNA, 1332 bp, Homo Sapiens
tccctttccctccgttctctcgtcaccccctctcctttcttttatatatgacttgtgcggcgaattcggcacgaggctcggagacacgcggcggtgtcctgtgttggccatggccgactacctgattagtgggggcacgtcctacgtgccagacgacggactcacagcacagcagctcttcaactgcggagacggcctcacctacaatgactttctcattctccctgggtacatcgacttcactgcagaccaggtggacctgacttctgctctgaccaagaaaatcactcttaagaccccactggtttcctctcccatggacacagtcacagaggctgggatggccatagcaatggcgcttacaggcggtattggcttcatccaccacaactgtacacctgaattccaggccaatgaagttcggaaagtgaagaaatatgaacagggattcatcacagaccctgtggtcctcagccccaaggatcgcgtgcgggatgtttttgaggccaaggcccggcatggtttctgcggtatcccaatcacagacacaggccggatggggagccgcttggtgggcatcatctcctccagggacattgattttctcaaagaggaggaacatgactgtttcttggaagagataatgacaaagagggaagacttggtggtagcccctgcaggcatcacactgaaggaggcaaatgaaattctgcagcgcagcaagaagggaaagttgcccattgtaaatgaagatgatgagcttgtggccatcattgcccggacagacctgaagaagaatcgggactacccactagcctccaaagatgccaagaaacagctgctgtgtggggcagccattggcactcatgaggatgacaagtataggctggacttgctcgcccaggctggtgtggatgtagtggttttggactcttcccagggaaattccatcttccagatcaatatgatcaagtacatcaaagacaaataccctaatctccaagtcattggaggcaatgtggtcactgctgcccaggccaagaacctcattgatgcaggtgtggatgccctgcgggtgggcatgggaagtggctccatctgcattacgcaggaagtgctggcctgtgggcggccccaagcaacagcagtgtacaaaggtgtcagagtatgcacggcgctttggtgttccggtcattggctgatgggagaatccaaaatgtgggtcatattgcgaaaggccttggcccttgggggcctccacaggtcatgatggggctctctcctggctgcaacactgaggccctggtgaatacttcttttccgatgggatcc

SEQ ID NO: 256843 - DNA, 934 bp, Homo Sapiens
agcgaggcctgggtggcgaattcggcacgaggcggtcctcggagacacgcggcggtgtcctgtgttggccatggccgactacctgattagtgggggcacgtcctacgtgccagacgacggactcacagcacagcagctcttcaactgcggagacggcctcacctacaatgactttctcattctccctgggtacatcgacttcactgcagaccaggtggacctgacttctgctctgaccaagaaaatcactcttaagaccccactggtttcctctcccatggacacagtcacagaggctgggatggccatagcaatggcgcttacaggcggtattggcttcatccaccacaactgtacacctgaattccaggccaatgaagttcggaaagtgaagaaatatgaacagggattcatcacagaccctgtggtcctcagccccaaggatcgcgtgcgggatgtttttgaggccaaggcccggcatggtttctgcggtatcccaatcacagacacaggccggatggggagccgcttggtgggcatcatctcctccagggacattgattttctcaaagaggaggaacatgactgtttcttggaagagataatgacaaagagggaagacttggtggtagcccctgcaggcatcacactgaaggaggcaaatgaaattctgcagcgcagcaagaaagggaaagttgcccattgtaaatgaagatgatgagcttgtggccatcattgcccggacagacctgaagaaaaatcgggactacccactagcctccaaagatgccaagaaacagcttgctgtgtggggcagccattggcactcatgaggatgacaagtataggctggacttgctcgcccaagctggggggggaaggaaatggggttttgggactccttcccggggaaatccctcctttccgaataaaa

SEQ ID NO: 256844 - DNA, 680 bp, Homo Sapiens
  misc_feature (376)..(376): n is a, c, g, or t
  misc_feature (383)..(383): n is a, c, g, or t
  misc_feature (420)..(420): n is a, c, g, or t
  misc_feature (424)..(424): n is a, c, g, or t
  misc_feature (503)..(503): n is a, c, g, or t
  misc_feature (599)..(599): n is a, c, g, or t
cggcacgagcctgaccagtcctcctgccctaactcctccctgaccggtcctccagccctaactcctccctgaccggtcctcctgccctaagtctcctccctgaccagtcctcctgccctaagtctcctccctgaccggtcctcctgccctaagtctcctccctgaccggtcctcctgccctaagtctcctccctgaccggtcctcctgccctaagtctcctccctgaccggtcctcctgccctaagtctcctccctgactggtcctcctgccctaactcctccctgactggcctccatccaagcagagcttgaggtattgctggttccctgctcaaacccaccactggcactggcttcccatcacctacagaatanaggctanatgtctacgcttggcacagaaagtcatcaacaggccncagngcacgtgtctggtgttatcttctgctaatgcgctgccctgactcctatgctgcagctgaatggaacgagccattatccncttaggaacgctggcttctcagtaaacgattatagcccagaagccctggcatcacagaacctaactattggctaatgggtcaactatggcttcatntctctgaaataattatttcagaacataatcccaaggaccaaggttaggaatccggccctgctgtggctggttggtgcttca

SEQ ID NO: 256845 - DNA, 642 bp, Homo Sapiens
  misc_feature (87)..(151): n is a, c, g, or t
  misc_feature (156)..(156): n is a, c, g, or t
  misc_feature (209)..(209): n is a, c, g, or t
  misc_feature (216)..(216): n is a, c, g, or t
  misc_feature (219)..(219): n is a, c, g, or t
tcggtcgggcctcttggtattacgcaagcggcgaaagacggatgtgctgcaaggcgattaagttgagaacgccagagtgttcacagnnnnnnnnnnnnnnnnnnnnnnnnnnnnnnnnnnnnnnnnnnnnnnnnnnnnnnnnnnnnnnnnnagcgncgtctcgagtccggccagcgcgccggccggaaccaccaccataaagagaaagnagaattnttntctgccgttccaaacaggagagtcgcttcagagaggagctggcgtgtgtgttcagagcacaggagtgtgagccctgccaggtggctcttcccggcctgggccacgctgggtaggatggccacccaggcaccggcttcctgggaccctggtggtcttggagtgagtgagtgagcaaggccttgtcctgaggagaaagacctcaactcccctgaaggagggctgggcctggggacagggacatgagcattgtagggcctggggggttccagaggtaaggagatgggagtgggaaggtcaggagatgagactgggagggtcagatccagaatgttccacggaggcttcagggcctctgggtctggagaaatacgttcgctagaaaaataagaggctttgagaatgtctgcagtctgtactctctgc

SEQ ID NO: 256846 - DNA, 1075 bp, Homo Sapiens
tgaaccccacctcgtgtcgtcatgatctgagggctctggcaagaaatcctagtttcgtcctgtcttccctgggcttcactgctgtggcctttgtcacgggctccctggctctgtgggctccggcattcctgctgcgttcccgcgtggtccttggggagaccccaccctgccttcccggagactcctgctcttcctctgacagtctcatctttggactcatcacctgcctgaccggagtcctgggtgtgggcctgggtgtggagatcagccgccggctccgccacttccaacccccgggctgatcccctggtctgtgccactggcctcctgggctctgcacccttcctcttcctgtcccttgcctgcgcccgtggtagcatcgtggccacttatattttcatcttcattggagagaccctcctgtccatgaactgggccatcgtggccgacattctgctgtacgtggtgatccctacccgacgctccaccgccgaggccttccagatcgtgctgtcccacctgctgggtgatgctgggagcccctacctcattggcctgatctctgaccgcctgcgccggaactggcccccctccttcttgtccgagttccgggctctgcagttctcgctcatgctctgcgcgtttgttggggcactgggcggcgcagccttccctgggcaccgccatcttcattgaggccgaccgccggcgggcacagctgcacgtgcagggcctgctgcacgaagcagggtccacagacgaccggattgtggtgtcccagcggggccgctccacccgcgtgcccgtggccagtgtgctcatctgagaggctgccgctcacctacctgcacatctgccacagcttgccctgggcccaccccacgaagggcctgggcctaaccccttggcctggcccagcttccagagggaccctgggccgtgtgccagctcccagacactacctgggtagctcaggggaggaggtgggggtccaggagggggatccctctccacagggtgcaccccaagggctcggtgctatttgtaaccggaataaaatttgtagccagacccc

SEQ ID NO: 256847 - DNA, 427 bp, Homo Sapiens
ctggcgtagctcctcatcggggatcttgccctgccgcttcttcttgtagtcaaagtccaggcggcggccctccagtttcttcaggtggtgctggagacgtgggggacatgggtcacaccagtagcggccagagggccgccccacgcatggctttgacccactgtccctgcaccactggggatcctgcctgcctgagacccagagggcagtgccgaggctggaggttctggagggggtcaatgaagttctgcttgaccccgatgtcaagggagtccttcacctctgcaaggcgcttcatggactcgccggcatccagcaatgcgtcacctgtggacaagtggtgggggaagccatcataccgggcctgggaccactagactgagacactcctcagcctttgtttttgaaatagcgtttcacaggctgg

SEQ ID NO: 256848 - DNA, 1349 bp, Homo Sapiens
  misc_feature (1235)..(1280): n is a, c, g, or t
gggcgcggagctggcaagcgggtggcggaggcggcgccgacggggactgctgaggcgcgcagagggtcggcggcgcccgggagcctgtcgctggcgcggtccgggcgggaggctcggcggcgggcggcagcatgtcggtggcggggctgaagaagcagttctacaaggcgagccagctggtcagtgagaaggtcggaggggccgaggggaccaagctggatgatgacttcaaagagatggagaagaaggtggatgtcaccagcaaggcggtgacagaagtgctggccaggaccatcgagtacctgcagcccaacccagcctcgcgggctaagctgaccatgctcaacacggtgtccaagatccggggccaggtgaagaaccccggctacccgcagtcggaggggcttctgggcgagtgcatgatccgccacgggaaggagctgggcggcgagtccaactttggtgacgcattgctggatgccggcgagtccatgaagcgcctggcagaggtgaaggactccctggacatcgaggtcaagcagaacttcattgaccccctccagaacctgtgcgagaaagacctgaaggagatccagcaccacctgaagaaactggagggccgccgcctggactttgactacaagaagaagcggcagggcaagatccccgatgaggagctacgccaggcgctggagaagttcgaggagtccaaggaggtggcagaaaccagcatgcacaacctcctggagactgacatcgagcaggtgagtcagctctcggccctggtggatgcacagctggactaccaccggcaggccgtgcacatcctgcacgagctggcggagaagctcaagcgcaggatgcgggaagcttcctcacgccctaagcgggagtataagcccaagccccgggagccctttgaccttggagagcctgagcagtcccaacggggggcttcccctgcaccacagcccccaagatcgcagcttcatcggtctttccgatcttccgacaagcccatccggaccccctagccggagcatgccgcccctggaccagccgagctggcaggcgctgtacgacttcgagcccgagaacgacggggagctgggcttccattgaggcggacgtcatcacgctgaccaaccagatccgagaaaacctggtaccagggccatgcttggacggcccgtcggggcttcttccccgctcagctcacggggagggggttggtnnnnnnnnnnnnnnnnnnnnnnnnnnnnnnnnnnnnnnnnnnnnnnttccggtccaacctgggccggggacccccccggttggggcctccctgcgtttcccacggaacccccggg

SEQ ID NO: 256849 - DNA, 371 bp, Homo Sapiens
ctgaaacatcataaactgattaccagaaggtactaagatccccaggaaatgaaataccatgtattgataactacttttcattatccaagaaatattaaaaatcatgttgctacaggaataggtaatgatgacaatgtatttggctgctatggagatagggcaactgaataggccaatacaatattgaagagtagccatggataatgggatcagagttaagattttgctgacaattttaacagcaaaatgacaatgataatgcaatcttagaatctatattttcctttgcagaactcaatttcaactacattgttataactatacacttgatatagaaaaaaaatctgtatctcatggaaagtaaaactgat

SEQ ID NO: 256850 - DNA, 445 bp, Homo Sapiens
cacctgggctggaatgtggagcgtgttctcccagttgatcaccttcagctgggtttctgtgggagtaggtgccaaaaaggtcggctgccccaccagcatctcgaagagaatcactcccaacactcccaccagtccacagagttgaatgtaccctttgcggaaggaacacctcgggtgcgaatgtagtttggagtccccaccagtgaaatgtgcccaagcacctctggtgctgcttccgcgccctctgctctagggtcttcagcctgtccccacaccgacagttagacacatcatcccagaggtcgctgggctccatgctgtcctgtctgacatggctccctttctggtaatatttggaattgtgagtccacctgaacccagtgcagaggccgaaatctgtgagtttaatgtgaccatccagatctatcaaaatgttatcaggctt

SEQ ID NO: 256851 - DNA, 718 bp, Homo Sapiens
  misc_feature (625)..(625): n is a, c, g, or t
ggtaccggtccggaatttcgggatatcgtcgacccacgcgtccggtgtgccgggcactagtgatacaaaagagtgtgacagtgttcaagtctgcattttcgatcatgggctacatgccgagtgctggggcacagagatgaacaagatcggttccttcacttcttcatgccacaagtgtttattgagcacctgtgtgccaggcctcacagactcccagtgggttgaagaatggttgactgagtttgattcttcctgtaccctcggtcgtctgagctgtgtgcagacaacatccccccaccacccaagagggagggtagctcttccgccaccaggggcaagcacaggtcctggtggccccacgccacatgttagcccccctggagggggcgccagttggagacgggggctgggtgtccctggcccactcccagtcccctgtgctttacctccttgcccttgtgtctcaggtgtggtccctgcctgcttgatgaagttgctctgttcaagcctttggtgggatcatgtgtttgggggcttttaggggacccagctgcactggggcactgcccgtggcctgggtaggacatttcccagcaagggctggaggagttgccgtgccttcagncctgaatcgaatgtcagaaccagccagcggtgcttcaccctcttggggataacttgcttagttttttaataaatgttcctggttggttttcac

SEQ ID NO: 256852 - DNA, 1514 bp, Homo Sapiens
ctcaggcgaagatcaacgctaaagccaacgaggggcgcttctgccgctcctcctccatggctgaccgctccagccgcctgctggagagcctggaccagctggagctcagggagccacataacaagtaacacacatctctccatgtcttcagaacgttgagggcatgttctcaaccacttcattctcctctcccttagccagaaagaaaagttttcctaaaggaatggggaggttgttactccactccgccttccttcaagctgagtcattgtcctccaacttgaattaatgcctcacatgtgggttgaagctttgagagaagcagcaactgctgttgagcaagagaaagaaatccttctggaaatgatccacagtatcctgactgcaaaccgtttgatgggaagaactctcaccgttgaagtgtcagtagaaacaattagaaacccccagcagcaagaatccctaaagcatgccacaaggattattgatgaggtggtcaataagtttctggatgatttgggaaatgccaagaggtcatttaatgtcgctctacagtgcatgttcatctgaggtgccacatgggccagttgatcagaagtttcaatccatagtaattggctgtgctcttgaagatcagaagaaaattaagagaagattagagactctgcttagaaatattgaaaactctgacaaggccatcaagctattagagcattctaaaggagctggttccaaaactctgcaacaaaatgctgaaagcagattcaattagtcttcaaacctaagagcatttacacaatacacaaggtgtaaaaatgataaaatactattttaattgataactagttctttgttaggtataaccacttagttgacactgatagttgtttcagatgaggaaaatattccatcaagtatcttcagttttgtgaataacagaactagcaatattttaattatctatctagagattttttagattgaattcttgtcttgtactaggatctagcatatttcactattctgtggatgaatacatagtttgtggggaaaacaaacgttcagctaggggcaaaaagcatgactgctttttcctgtctggcatggaatcacgcagtcaccttgggcatttagtttactagaaattctttaccttaagcagcacacacatttactacacacacagtgttaacaaagcactgtgcttagagggtaaaaaggaatcacaaaacaagaatctttccaaagttgtctcattcagcaatgttaaggcatctgtatcaaattattttggatgtaaagattcctgtgtctcataatatgaatgtattttttgatatacaaggaactgacataaaatgtgagaaaaccacctataatttaccactgtgaacaattatatatctatctgcttcatcttttctcaaatgcatcaattctctaaaattcctatattgtaacttgcctttttttaaaaaagttagatgctgatataaagtctgcttaattgtcca

SEQ ID NO: 256853 - DNA, 2710 bp, Homo Sapiens
  misc_feature (2587)..(2629): n is a, c, g, or t
gggccgtgtgaggccagtgtgcgctactcggagcctcctcacggactgacccgcaccagtgtgacagtgagcgacctggagccccacatgaactacaccttcaccgtggaggcccgcaatggcgtctcaggcctggtaaccagccgcagcttccgtactgccagtgtcagcatcaaccagacagagccccccaaggtgaggctggagggccgcagcaccacctcgcttagcgtctcctggagcatccccccgccgcagcagagccgagtgtggaagtacgaggtcacttaccgcaagaagggagactccaacagctacaatgtgcgccgcaccgagggtttctccgtgaccctggacgacctggccccagacaccacctacctggtccaggtgcaggcactgacgcaggagggccagggggccggcagcaaggtgcacgaattccagacgctgtccccggagggatctggcaacttggcggtgattggcggcgtggctgtcggtgtggtcctgcttctggtgctggcaggagttggcttctttatccaccgcaggaggaagaaccagcgtgcccgccagtccccggaagacgtttacttctccaagtcagaacaactgaagcccctgaagacatacgtggacccccacacatatgaggaccccaaccaggctgtgttgaagttcactaccgagatccatccatcctgtgtcactcggcagaaggtgatcggagcaggagagtttggggaggtgtacaagggcatgctgaagacatcctcggggaagaaggaggtgccggtggccatcaagacgctgaaagccggctacacagagaagcagcgagtggacttcctcggcgaggccggcatcatgggccagttcagccaccacaacatcatccgcctagagggcgtcatctccaaatacaagcccatgatgatcatcactgagtacatggagaatggggccctggacaagttccttcgggagaaggatggcgagttcagcgtgctgcagctggtgggcatgctgcggggcatcgcagctggcatgaagtacctggccaacatgaactatgtgcaccgtgacctggctgcccgcaacatcctcgtcaacagcaacctggtctgcaaggtgtctgactttggcctgtcccgcgtgctggaggacgaccccgaggccacctacaccaccagtggcggcaagatccccatccgctggaccgccccggaggccatttcctaccggaagttcacctctgccagcgacgtgtggagctttggcattgtcatgtgggaggtgatgacctatggcgagcggccctactgggagttgtccaaccacgagggtgatgaaagccatcaatgatggcttccggctccccacacccatggactgcccctccgccatctaccagctcatgatgcagtgctggcagcaggagcgtgcccgccgccccaagttcgctgacatcgtcagcatccctggacaagctcattcgtgcccctgactccctcaagaccctggctgactttgacccccgcgtgtctatccggctccccagcacgagcggctcggagggggtgcccttccgcacggtgtccgagtggctggagtccatcaagatgcagcagtatacggagcacttcatggcggccggctacactgccatcgagaaggtggtgcagatgaccaacgacgacatcaagaggattggggtgcggctgcccggccaccagaagcgcatcgcctacagcctgctgggactcaaggaccaggtgaacactgtggggatccccatctgagcctcgacagggcctggagccccatcggccaagaatacttgaagaaacagagtggcctccctgctgtgccatgctgggccactggggactttatttatttctagttctttcctccccctgcaacttccgctgaggggtctcggatgacaccctggcctgaactgaggagatgaccagggatgctgggctgggccctctttccctgcgagacgcacacagctgagcacttagcaggcaccgccacgtcccagcatccctggagcaggagccccgccacagccttcggacagacatataggatattcccaagccgaccttccctccgccttctcccacatgaggccatctcaggagatggagggcttggcccagcgccaagtaaacagggtacctcaagccccatttcctcacactaagagggcagactgtgaacttgactgggtgagacccaaagcggtccctgtccctctagtgccttctttagaccctcgggccccatcctcatccctgactggccaaacccttgctttcctgggcctttgcaagatgcttggttgtgttgaggtttttaaatatatattttgtactttgtggagagaatgtgtgtgtgtggcagggggccccgccagggctggggacagagggtgtcaaacattcgtgagctggggactcagggaccggtgctgcaggagtgtcctgcccatgccccagtcggccccatctctcatccttttggataagtttctattctgtcagtgttaaagattttgttttgttggccnnnnnnnnnnnnnnnnnnnnnnnnnnnnnnnnnnnnnnnnnnnttagcaaatgccttatgtctgctctggaataaagttgcagatgcttcaaaaaaatcaagacacagcaaaactcgaactagt

SEQ ID NO: 256854 - DNA, 471 bp, Homo Sapiens
  misc_feature (32)..(32): n is a, c, g, or t
  misc_feature (55)..(55): n is a, c, g, or t
  misc_feature (81)..(81): n is a, c, g, or t
  misc_feature (122)..(122): n is a, c, g, or t
  misc_feature (130)..(130): n is a, c, g, or t
  misc_feature (151)..(151): n is a, c, g, or t
  misc_feature (193)..(193): n is a, c, g, or t
  misc_feature (199)..(199): n is a, c, g, or t
  misc_feature (267)..(267): n is a, c, g, or t
  misc_feature (353)..(353): n is a, c, g, or t
  misc_feature (356)..(356): n is a, c, g, or t
  misc_feature (395)..(395): n is a, c, g, or t
  misc_feature (418)..(418): n is a, c, g, or t
  misc_feature (440)..(440): n is a, c, g, or t
  misc_feature (446)..(446): n is a, c, g, or t
tgaacttgactgggtgaggacccaaaagcggnccctgtcccctctagtgccttcnttaagacccttcgggccccatcctcnatccctgactggccaaaacccttgctttcctgggcctttgnaagatgcntggttgtgttgaggtttttanatatatattttgtactttgtggagagaatgtgtgtgtgtggncagggngggccccgccagggctggggacagagggtgtcaaacattcgtgagctggggaactcagggaccggtgnctgcaggagtgtcctgcccatgccccagtcggccccatctctccatccctttggataagtttctattctgtcagtgttaaagattntgntttgttggacatttttttcgaatcttaatttattatttntattatatttattgttagaaaantgacttatttctgctctggaancacagntgccagatgcttcaaaacacaacaa

SEQ ID NO: 256855 - DNA, 505 bp, Homo Sapiens
gattcggcacgaggccttgaggagcctgtttttcagcaaattcaacagatgtgtgcagtgattccctccgttttgtatttgacaccttcatttaaaatgctaagatgcaatatcattcacttcaaagtggggaaaatgcagaattgtgtttcctttttatctgtgtgattccttaagaaacatgtttttaaaatatgtgttctaaatggttttttattctgtattactgctttggccatgtggctctcatgactttcattgtaccagattctcagctccctgaaacatggggacgagaagctctggaattacagcaagatttttgttccatgagcgcaatactgtatcattaacatttttaatggtatggattttatagcatctgtgtatgtttgcaaatattaagttattacatgttttaaaatgagcgtttttcatcttaaattttatatgtttgcaaatatatttttttaataaaatttcaaaaccaagttttagcacctaa

SEQ ID NO: 256856 - DNA, 916 bp, Homo Sapiens
  misc_feature (647)..(736): n is a, c, g, or t
gggagcacaacgtcgaaagcagccgttgggagcccaggaggcggggcgcctgtgggagccgtggagggaactttcccagtccccgaggcggatccggtgttgcatccttggagcgagctgagagctcgagtacagaacctgctaaggccatcaaacctattgatcggaagtcagtccatcagatttgctctgggccggtggtaccgagtctaagcactgcggtgaaggagttagtagaaaacagtctggatgctggtgccactaatattgatctaaagcttaaggactatggagtggatctcattgaagtttcaggcaatggatgtggggtagaagaagaaaacttcgaaggcttaactctgaaacatcacacatctaagattcaagagtttgccgacctacctcaggttgaaacttttggctttcggggggaagctctgagctcactttgtgcactgagtgatgtcaccatttctacctgccatgtatcggcgaaggttgggactcgactggtgtttgatcactatgggaaaatcatccagaaaaaccccctacccccaccccaagagggatgacagtcagtgtgaagcagttattttctacgctacctgtgcaccataaagaatttcaaaggaatattaagaagnnnnnnnnnnnnnnnnnnnnnnnnnnnnnnnnnnnnnnnnnnnnnnnnnnnnnnnnnnnnnnnnnnnnnnnnnnnnnnnnnnnnnnnnnnactcctagaagtaccccaccccacccctgctccttggaggacaacgtgatcactgtattcagctctgtcaagaatggtccaggttcttctagatgatctgcacaaatggctcctctcctccttcctgatgtctgccattagcactggaataaagttcctgctgaaaatccacatctcccc

SEQ ID NO: 256857 - DNA, 444 bp, Homo Sapiens
attccatagtctttaagctaaaaatcaacttaagtggcaccagcatccagactgttttctactatcttcttcatccagtgcttagactcagtaccaccggcccagagcaaatctgatggactgacttccgatcaataggtttgatggccttagcaggttctgtacgatacgggccagggccagggaggggcgcgttgcagaagggctgctggtggcagccctggtcatggcccacccgcagcacgggggcaccacccctgcccgccatggggtcgtcacagggcagctggaccggagacacgggcagcgtcatgtactggccatcggtcagcagctgtggggaggccggaatgtcagccagtgtctcaagggtctggaagcccctggaggcttgcggccctgggcgttgtctggaaagtagcactggcaggcaaaccctctggc

SEQ ID NO: 256858 - DNA, 483 bp, Homo Sapiens
caggattcggcacgagctctaacgctccccaaaaaaccatatcctcttcctctatcttaccctaagaacagatctctgaaggcctgggccacgtctccctccagaaggacacgctcatggccgcattccaaggcccaggagaggacttcattggaggctcaatctttgtcaatgtcaccatgttctcctcaggtgccaccctcaccccggcccctgactgaggtcaggacatggtgttcttgcccaatgcagacactccacccatgtgaccttgggccacctcccagcctcagtttcctcattagagaaatgggtggaaggagctgaaatagtgttattgtcgttctctgccttcaccaagatggggctctcatactagtcctgccactcacttaagaaattgaactccctcacaaactctgtgttctcactgtctctactaaaaagacaaaaatagccaggcatgttggtgcatgcctgtag

SEQ ID NO: 256859 - DNA, 588 bp, Homo Sapiens
  misc_feature (13)..(13): n is a, c, g, or t
  misc_feature (267)..(302): n is a, c, g, or t
  misc_feature (450)..(450): n is a, c, g, or t
ttcaatgaagctntgcagatcaccatgtggttgaaggttttagttgtggacacagtggtccctccttaatgatgaagatcactgccttgggcttcatggaaaacaggcccagcctggggctgcgtttggatttattgtttttattccacacttcctacttggtctctggaagttttaccacatgtaacagattcctttatatgtagtgaaaatcactatttgtagaaactgtcaggtcaaaatatttaactgactgttgacatgtannnnnnnnnnnnnnnnnnnnnnnnnnnnnnnnnnnnctgctttaagatatataccactatgtatatccagttaactgagagaattttgactctcttaataaaactgcattaagtttttgattttgtagaaattagcttttgtctaggcaactagtggttatactctgcaaatattgtaatgaanttttacttttttgatttttgtaataaaaattggtgcagataaaatgtcaaatgaacaaaccagtgttctaagagtgttactaacattttgttctaaaactgtccttcacaaattgaataaaaaactctcacactcaaa

SEQ ID NO: 256860 - DNA, 1240 bp, Homo Sapiens
ctggaaactgtgagtgtgtgggcttttctccgacgtcgagcgtggtcctagcgtaaacagatgcattcgcctctccggtttcaatctttttttacgtttgcgctttcctcaaggccggtgggtcaggagtggagccttagtcattctaacgctggaggtgtcagtaggaccaacagagtctggtgccgacacggcttactgttgcgcgctcttctaggcctcaacttcctctcaactgtgtggtaacaggacattcagttagtaatgatggttgcaggttgaatagtctcgccctagatctcacctaacttgcagtaagtatcaagtgcttgtgtgccgattaaagaacaacttcggatacaatgggaggtgtcaaggaaacgaatattttaaaaatgactacaccaaacaagacacctcctggtgctgaccccaagcagttggaaaggactggaacagtacgggaaattgggtcacaagctgtttggtcactctcatcttgcaaaccaggatttggagtggatcagttacgagatgacaatctagaaacttattggcaatcagatgggtcccagcctcatttagtgaacatccaattcagcaacttgagttggtggaaccaagtggctggattcatgttcccttaactgacaatcataagaagccaactcgtacattcatgatacagattgctgttctagccaatcaccagaatgggagagacccccatatgagacaaattaaaatatacacccccggtagaagagagctcccattgggaaaatttcctagaatgggacaactatagattttcatggacgtatcccgtccaataagggggaccttttaaaatgggaacggaaaatcatttaaacggaatcttttgggtgttattcgccgggattttaaaataaagtataggtcttggccccccttctattggaaacaaggggccgtccccgttaaatacccctaaactttgtggagaaaccggcgccaaaaaaataatttttaaatggggaagcccctgggaccaaaataaaagtgttggggggggcacacacgacaccccgcgcatgtttgccgtgaaaccagtggggagaaaaggcgcgtccccccgattatttaacctttgggcggaaccgggcagaagggttagtagcagccgcgatacacatgcgccccgttgttggggcgcggttccccggggccccgtcgaagaaagagctttttcccgagg

SEQ ID NO: 256861 - DNA, 2106 bp, Homo Sapiens
gactgaagcggggcggagacgcaagatggcggctgtggtgctggcggcgacgcggttgctgcggggctcgggttcttggggctgttcgcggctgaggtttggacctcctgcgtacagacggtttagtagtggtggtgcctatcccaacatccccctctcttctcccttacctggagtacccaagcctgtttttgctacagttgatggacaggaaaagtttgaaaccaaagtaaccacattggataatgggcttcgcgtggcatctcagaataagtttggacagttttgtacagtaggaattcttatcaattcaggatcgagatatgaagcgaaataccttagtggaattgctcactttttggaaaaattggcattttcgtctactgctcgatttgacagcaaagatgaaattctgcttacgttggaaaagcatgggggtatctgtgactgccagacatcaagagacaccaccatgtatgctgtgtctgctgatagcaaaggcttggacacggtggttgccttactggctgatgtggttctgcagccccggctaacagatgaagaagtcgagatgacgcggatggcggtccagtttgagctggaggacctgaacctgcggcctgacccagagccacttctcaccgagatgattcatgaagcggcttacagggagaacacagttggcctccaccgtttctgccccacagaaaacgtagcaaagatcaaccgagaggtgctgcattcctacctgaggaactactacactcccgaccgcatggtgctggccggcgtgggcgtggagcacgagcatctggtggactgtgcccggaagtacctcctgggggtccagccggcctgggggagcgcagaggccgtggatattgacagatctgtggcccagtacactgggggggattgccaagctagaaagagacatgtccaatgtcagcctgggcccgacccccatccccgagctcacgcacatcatgggttggactggagagctgctccttcctggaggaggacttcatcccctttgcagtgttgaacatgatgatgggcggaggtggctccttctcggctggtgggccccggcaagggcatgttctccaggctctacctcaacgtgctcaacaggcaccactggatgtataacgcgacctcctaccaccacagctacgaggacactggcctcctttgcatccatgccagcgccgacccaagacaggttcgagaaatggtagaaatcatcacaaaggagtttattttaatgggcggaaccgtggacacggtggagctggaacgagccaagacgcagctgacatcaatgctcatgatgaacctggaatccaggcctgtgatcttcgaggatgtggggaggcaggtgctggccactcgctccagaaagctgccgcacgagctgtgcacgctcatccgcaacgtgaagccggaagatgtgaagagagtcgcttctaagatgctccgagggaagccggcagtggccgccctgggtgacctgactgacctgcccacgtatgagcacatccagaccgccctgtcgagtaaggacgggcgcctgcccaggacgtaccggctcttccggtagaaccgctccccggcctgacagacccagggagctgcagctggagcccgttcccgtgcgtgttagtttggacacgaatttagtctaaaaagctgtctggttgtataaacggtgcaaacaatgtcgccacagcacccacgcggtttgcattcttttggaactcaatgtgccgatcagtggagtcagtatcgagcctgaccaccgcaagccaggaagcaggtgaagtgcccagcgctggagtgcagcgtgccacgaggagggcggtcggtgcttccctcctcgggctgtgggcacatggggccccgcaggttccttggaggagccctgagctgggaggcagcaaaggctgacctatcaaagcctcccggaggccaccgtgctgggtaccaggactcacctctgacaagcaggagaaggtaagggcccggtcagctccaaggagcgcgctccacgcgcgtgcacacagcttccctggtaataaagagctggcatctttcttaaaa

SEQ ID NO: 256862 - DNA, 269 bp, Homo Sapiens
ttaaaatttttttaacaactacctgtaagcactcaggacttaaaaagtattttgactaatatttaaaattttaaagtttttaaaaatttcttttattcatagaaattaaaagaaaaacaaatagtctcttattttttaaaggagggtaattctgaaactaatattttctatcaactacggctggtgatggtaaagttctatatattaatgttactttttcatatatatctctcttaaatgacactttggctttcgttctctctcgtgcc

SEQ ID NO: 256863 - DNA, 613 bp, Homo Sapiens
  misc_feature (403)..(403): n is a, c, g, or t
atccttggttcctatttcgatcctcctttggaatctgaaaatcggtctccatgttgtatgcagattagaagttgccttgtttgttactcttccaacacagggtatcagggagaaagaggccttatctgttcctccatcccccctgttttgacagactgctaagaattcctcaggacttcctttggttggggattttactttcccaaaagtctgatctgatttctttcaggggtagacaagcttgtcctagtgctctgcttcaggtcttatcagaagaaacccaggaatagaaaaggtagatgccttgacttttgtccctgttgtggggactaaagtgttttttgccagaattgtcaaaagctccggttcaaactctgtagagtttcatggaaaaacaaaacanaacataaaagatgcttatcgtcccggagaatgtgtaagtaagttctccagcacggcttaggttttccaaaatggaaagcaaagcttgcagacaacctgttttctctagagacacacaatgattctggccctcagtctggttccctccccttggttactctttggtcaccgatcgagtcaggctagaagggtaatacggtgattctcaaca

SEQ ID NO: 256864 - DNA, 674 bp, Homo Sapiens
  misc_feature (97)..(199): n is a, c, g, or t
gctttcaagtattatttttaaaaagaggcaccacctttactctggcttggctgaagtgatacgtgtcaccagcacagaagaaacagagctgaaggannnnnnnnnnnnnnnnnnnnnnnnnnnnnnnnnnnnnnnnnnnnnnnnnnnnnnnnnnnnnnnnnnnnnnnnnnnnnnnnnnnnnnnnnnnnnnnnnnnnnnngttatggccgcctcggttgagagttacaccatcggcttctatggttctgaggcccgttggagttggactgagccatgctaccagcttccctgggtctccagcctgcagattgcctactgtgagatttagcctccataatcaccgtaacagaatattggcatgtagcactccctcaaaacatagaaagcagaaacaaatcaattcctgccctggaggaccctccccgatctcaacacccagtggttttgacagaattgatatagaaatagaagcttcaagcaaccttacgatggaggcagaagaaggattctatggttggaaacctgccagactcacaggctacggagaagaaaggctaaatccaccagactgttggatgcacctaaaacaaattgccctccgtggcttggtttcttattaatatactcatagaaatgcacaagaactgaaagctcgatagggaaaccaaaaaaaa

SEQ ID NO: 256865 - DNA, 1146 bp, Homo Sapiens
ttccatcaaatcgctgttgaaattctgtaatgttgtgtccccatttcttttctaaccaggtctcttgtaaaagatatcttgcactcaaatgcacattaatgcttgcatgtagcccagatataagtctgtagaatgctcttttttctacacagagaccttctagccaactgtaaaaagtgttctcttcacttgtcccttgaccagaagccaaaggatttaaaggtcttttaattgtctgtggcttaaaacagttttcttcgtagatgacattccatattttccaagcatctggtcccttgtaaccagtgtagcgctcaggattaagaagcaaatctacatattcagcttcaggggactgaatgtcatcagcttcacagaagttatctgaagaatcatcatgcttggtccactgaagaacagccttctgtgtttcctcactcagagattcatccactgctccaagtcgttcagcttgttcacattcttcaatgagattattggcttcttcagaatacttgtagctcgcagatttaattccatcaggaacttcatcagattgacatggtttgacagcacagtcccttcttccacactggctgatgtcattccagaaaggacacggcctcttcaggtttaccttgtaatacctaaagtagtcactttcaagaagtttttgtagtcttgggaaaagcctgtagttattaaatctatcaatggtttcaacatcacaggtacaatcatccaagtaaccactaacctggcagaagcacctctgtgccgctgtctccgggggctgctcctctccgtggcccgagctgagcagccacacggcgcccaggaggccaaacaagaatccccagccgcggcccattgcagctccggcagcttgtcgccccacgcttgggaggccagtccgcacgctcggtcgcgggccgtgcgccctcagatgaagcccgtgcgggccggccccagcggcgccccacctccgggccgcctcccaggcccgcctcggccctcctgcctctcagcgatcgccacctcgcgacccagcctgtggacgtgccgcggcgcccgcgccggcagcccggggcctcggaacggttccttcccgccgcgtatccggaaaattccggaccggtccagcct

SEQ ID NO: 256866 - DNA, 640 bp, Homo Sapiens
cagaaaagcctgcagggagctgcctgatgtagtactggtccacagtggatgacagtaatttgcactatgattgttgtaatggaaaagttgaaaagaaatgaattaaggaaacgttttggcttttgcaaatggtattcactctgcatgagtcctcctcacttttatatggcagcatcctttcctccttcagtagcaatttaaatactatttcctcatatattctttccttcgtcaatgttttcacgtattcattcatttactctatggatatttattgaattccaaatagttataccaagcagtggtgacatgacagtgaaagataaagtccttctcctcgtggagtttatgatcaagatagaatggagatgggggaagtctgacaataaagaacaaacaagtaaatatatgatatgttagatgacagtaaatgatcaagggaaaaataaagcaggataattcaggaaagggattgcagggcatgagggatgcacttttatatagggtaattgaggcaaggttctattagaaagtaatatttgaacagagatttgaagaacattaaggagcaagccatgtggctatctggatacaggacatttcagacagagggatattcatggaagagcaagatctctgt

SEQ ID NO: 256867 - DNA, 952 bp, Homo Sapiens
cccaaggcatctctgttaaccatggccttcctcaatggcgccctggatggggtcatccttggagactacctgagccggactcctgagccccggccatccctcagccacttgctgagccagtactatggggctggggtggccagagacccagggttccgcagcaacttccgacggcagaacggtgctgctctgacttcagcctccatcctggcccagcaggtgtggggaacccttgtccttctacagaggctggagccagtacacctccagcttcagtgcatgagccaagaacagctggcccaggtggctgccaatgctaccaaggaattcactgaggccttcctgggatgcccggccatccacccccgctgccgctggggagcggcgccttatcggggccgcccgaagctgctgcagctgccgctgggattcttgtacgtgcatcacacctacgtgcctgcaccaccctgcacggacttcacgcgctgcgcagccaacatgcgctccatgcagcgctaccaccaggacacgcaaggctggggagacatcggctacagtttcgtggtgggctcggacggctacgtgtacgagggacgcggctggcactgggtgggcgcccacacgctcggccacaactcccggggcttcggcgtggccatagtgggcaactacaccgcggcgctgcccaccgaggccgctctgcgcacggtgcgcgacacgctcccgagttgtgcggtgcgcgccggcctcctgcggccagactacgcgctgctgggccaccgccagctggtgcgcaccgactgccccggcgacgcgctcttcgacctgctgcgcacctggccgcacttcaccgcgactgttaagccaagacctgccaggagtgtctctaagagatccaggaggcagccacccccaaggaccctgccagccacagacctccaataaagacagc

SEQ ID NO: 256868 - DNA, 1316 bp, Homo Sapiens
  misc_feature (1062)..(1062): n is a, c, g, or t
  misc_feature (1072)..(1072): n is a, c, g, or t
  misc_feature (1085)..(1085): n is a, c, g, or t
ctgccggctcgtactcggctcccccacctcgccgcagagctagcccgggaagcccacactggcggccacggagcagagtccctcacccccaccagctgtagctgaacgtctggatggtggagaagagcagggttccgagtctgaggaagacataaccttgtgcctgcctgcccacctctctctctggtcctgttcatctctcaggctctgagacactgaccttcactgctcagttaaaggttccagggattccactttgtctggacccatccagctgagtgaacccagggtggtggtgtatctggggagagtgaggagtgggttgtccaaacaccagggaaagagccctttggggcctcagacagaggagtgaagctggaaccatcagggaacatgagtgaattttggcacaaactgggctgctgtgtggtagagaaaccccagccgaagaagaagagaagacggattgaccggaccatgattggggaaccaatgaattttgttcacctgactcacattggctcaggggagatgggggccggagatggacttgccatgacaggtgcagttcaggagcagatgagatccaagggaaaccgagataggccatggagcaattctaggggcttatagctccaataatggaatggttctgccatcttgaaacccccattctgtttccagcccagaagaaatgctgcccctaccagatccctccttgaaccagtgatctaaggacccctcttttccctatctgcctaacagtgcctcacaaggcttgggggctggactccctctactccctctggccatagcccctcctggagatggggtcaaggcagcaggactgatcaagtgactactggttagccagaggagctcagctgaagccctggaaaccctcaggtctgagataggagttctctaggaacctggaatgagttcctgtctcctgaatgatggtctgggtgccacctgtttttaaactcttaaacctggaactccttaaatggggtaggtgggtgagattatcaaagctgaagctggctttgctgagaagcnccctacctcnttgcccttctccnccttcctgctggaatgaactaaagcagatgtcaagcaggggctggtgggggtgcctactcccttttccactctatctttagatttcaaaccttagcttacagcccctcaatatctctctgctaacaccagtgtctctttctagttaggcctctaatcttctgtttctgtttacccagcttcccagcaactttccttttttaaaatattaaaaatttaattcaggttctctt

SEQ ID NO: 256869 - DNA, 1390 bp, Homo Sapiens
  misc_feature (282)..(308): n is a, c, g, or t
  misc_feature (1016)..(1016): n is a, c, g, or t
  misc_feature (1022)..(1022): n is a, c, g, or t
  misc_feature (1040)..(1040): n is a, c, g, or t
  misc_feature (1054)..(1054): n is a, c, g, or t
ctttaaatacatgtatgccacgtatagctgcttcacaaaagggtaaaagaaattaaaaagagaaaaatgaggccattattttttcacagatctcattggcaggttaacatggctcaatatatttactgtatatatttattttaaatatatatgttgttttaaattgtgtaataattatcagaaaagcttcaacccatctaccatacatccactagcaataatatctaagatgattagtaatcaacacagagaggtgagatgagagaaaagaggaagggttgnnnnnnnnnnnnnnnnnnnnnnnnnnncttctgctttaaaaataggcttctgaggactgtgaattactatcgttaaaataacaatgatggagattccatgcactgtaaagcacttcagggaagagaacaaaaatcacaggaattgaatcaacaaaggaaaaatgagaagcacaaagaaaacctaggacatttccctttttgttttaaactgggaaattctaactccttggaggaagacaatgatactctgattcaagagagaagctaaaaaagcacaagtcacaaagatcaagttcaaaacacttatgagaatggcaaacatttgtaagcctctctaacactagaaaactagctagtgatgatgcagaagtgaccctttcattccccaaggcggaggtgagtgcgtttgcataaaaccccctctgctatcaagttggtatcctcctggcaactgtcccaatcagtaagacgttgcagtcacaggaggaacttgcttttatcctaactttaaacaatgcaaatacctccaacatagttaggatacctaagtccaaactagagcttaagcagaattataaacctttaaaatcttgacaacatttttgtgggccctgaagatgatcaaaagtgctagtatagctaccttcaaaagacttttatttcccttttacattcattatgcaaatttcacttctattcttttctcacacactactagccagcctccccaaaaanggaaangggaaaaaagtaggaaangaatggaaccaaangaaaaataagaaagcaaacggaaaggaacaaagaaacaggataaagaaaagagatcacagatttgagaaagaaaaacaattcaattcagcaaattcaccaaaacaatgtgaatatatcctaaagtgattaaactcagaaatgatgtgaatttttccagtttacacagtttgaccaaaaacagcatggctttatgtttagcaaaccaactgattcttgcttctactttcataagtgattttgcccacatatcatcccactttaattgttaatcagcaaaactttcaatgaaaaatcatccattttaaccaggatcacaccaggaaactgaaggtgta

SEQ ID NO: 256870 - DNA, 500 bp, Homo Sapiens
gctatgttgtccaggctcatcttgaactcttgggctcaagcaatactcccacttcagcctcccaagtagctgggactatagatgtgcaccaccattcttagctttatatatgtagttttaaggaagaccatctatgaacgccaggttaagaatctatgttttctagggaaacaggtcttactagcctagtaacactgataagtaaacagaattctctggaaaatgacctacctaagcttatacagctagtaattgataggaccagcaatctagtctgtcagaggatataccactaaactcttctttctaactttagtttacagtcaaaatgggattgctgaacctgggaaaaaaataaatgcttcccaatttcctatttaaacagtgtaagaattgggggtggcatttgaaggtgggagaagaagggcaaacttgttagtttactagtgtgagcggtagatttttatgccaactggaatcactgagattaaccctcgtgc

SEQ ID NO: 256871 - DNA, 1332 bp, Homo Sapiens
  misc_feature (4)..(5): n is a, c, g, or t
  misc_feature (11)..(11): n is a, c, g, or t
  misc_feature (18)..(19): n is a, c, g, or t
  misc_feature (23)..(23): n is a, c, g, or t
  misc_feature (30)..(31): n is a, c, g, or t
  misc_feature (34)..(34): n is a, c, g, or t
  misc_feature (46)..(48): n is a, c, g, or t
  misc_feature (50)..(50): n is a, c, g, or t
  misc_feature (64)..(64): n is a, c, g, or t
  misc_feature (84)..(84): n is a, c, g, or t
  misc_feature (87)..(87): n is a, c, g, or t
  misc_feature (1206)..(1226): n is a, c, g, or t
  misc_feature (1229)..(1230): n is a, c, g, or t
  misc_feature (1233)..(1291): n is a, c, g, or t
ttcnnccaaangccaatnntgtntggaagnnccnaaaaattcatgnnnanccaattcgaatctngtgaaaaaggaagaattganccntgaagaatcaaaccagttttatattaatgttgagagagaggaatggaagtggaatacactttgtgacttgtacgaaacactgaccataaaacaggctgttatttttctcaatacgaggcgcaaggtgaactggctgactgagaagatgcatgccagagacttcacagtttctgctctgcatggtgacatggaccagaaggagagagatgttatcatgagggaattccggtcagggtcaagtcgtgttctgataactactgacttgttcgctcgcgggattgatgtgcaacaagtgtctttggttataaattatgatctacctaccaatcgtgaaaactatattcacagaattggcagagggggtcgatttgggaggaaaggtgtggctataaactttgttactgaagaagacaagaggattcttcgtgacattgagactttctacaatactacagtggaggagatgcccatgaatgtggctgaccttatttaattcctgggatgagagttttggatgcagtgctcgctgttgctgaataggcgatcacaacgtgcattgtgcttctttctttgggaatatttgaatcttgtctcaatgctcataacggatcagaaatacagattttgatagcaaagcgacgttagtcgtgagctcttgtgaggaaagtcattggctttatcctctttagagttagactgttggggtgggtataaaagatggggtctgtaaaatctttctttcttagaaatttatttcctagttctgtagaaatggttgtattagatgttctctatcatttaataatatacttgtggactaaaagatataagtgctgtataaaatcagccaattatgttaaactagcatatctgcctttattgtgtttgtcattagcctgagtagaaaggcctttaaaatttttttagaaagcatttgaatgcattttgtttggtattgtatttattcaataaagtatttaattagtgctaagtgtgaactggaccctgttgctaagccccagcaagcaatcctaggtagggtttaatccccagtaaaattgccatattgcacatgtcttaatgaagtttgaatgttaaataaattgtatattcactttnnnnnnnnnnnnnnnnnnnnntannccnnnnnnnnnnnnnnnnnnnnnnnnnnnnnnnnnnnnnnnnnnnnnnnnnnnnnnnnnnntaattcaacctgctccttacctgtctcccaaaccaatccct

SEQ ID NO: 256872 - DNA, 964 bp, Homo Sapiens
  misc_feature (766)..(766): n is a, c, g, or t
ttcggcacagcggcaatgctggggccgttagtcctcacgcccctcttcaaggtgggcaagttcctgagcgctgaggagtatcagcagaagatcatccctgtggtggtcaagatgttctcatccactgaccgggccatgcgcatccgcctcctgcagcagatggagcagttcatccagtaccttgacgagccaacagtcaacacccagatcttcccccacgtcgtacatggcttcctggacaccaaccctgccatccgggagcagacggtcaagtccatgctgctcctggccccaaagctgaacgaggccaacctcaatgtggagctgatgaagcactttgcacggctacaggccaaggatgaacagggccccatccgctgcaacaccacagtctgcctgggcaaaatcggctcctacctcagtgctagcaccagacacagggtccttacctctgccttcagccgagccactagggacccgtttgcaccgtcccggggttgcgggtgtcctgggctttgctgccacccacaacctctactcaatgaacgactgtgcccagaagatcctgcctgtgctctgcggtctcactgtagatcctgagaaatccgtgcgagaccaggccttcaaggccattcggagcttcctgtccaaattggagtctgtgtcggaggacccgacccagctggaggaagtggagaaggatgtccatgcagcctccagccctggcatgggaggagccgcagctagctgggcaggctgggccgtngacgggggtctcctcactcaccctccaagctgatccgttcgcacccaaccactggccccaacagaaacccaacattcccccaaagaccccacgcctgaagggcacctggggagaccccggaaggaagacaaggaacacagcaaaaaggaccagcagcactggctgaacagatgggggacgaacaaagaagggggggcg

SEQ ID NO: 256873 - DNA, 914 bp, Homo Sapiens
ggctggaccggtccggaattccgggataccacattccccaaagaccctcgcctgaaggccactgggagacgcaggaggaggacaaggacacagcagaggacagcagcactgctgacagatgggacgacgaagactggggcagcctggagcaggaggccgagtctgtgctggcccagcaggacgactggagcaccgggggccaagtgagccgtgctagtcaggtcagcaactccgaccacaaatcctccaaatccccagagtccgactggagcagctgggaagctgagggctcctgggaacagggctggcaggagccaagctcccaggagccacctcctgacggtacacggctggccagcgagtataactggggtggcccagagtccagcgacaagggcgaccccttcgctaccctgtctgcacgtcccagcacccagccgaggccagactcttggggtgaggacaactgggagggcctcgagactgacagtcgacaggtcaaggctgagctggcccggaagaagcgcgaggagcggcggcgggagatggaggccaaacgcgccgagaggaaggtggccaagggccccatgaagctgggagcccggaagctggactgaaccgtggcggtggcccttcccggctgcggagagcccgccccacagatgtatttattgtacaaaccatgtgagcccggccggcccagccaggccatctcacgtgtacataatcagagccacaataaattctattttcccaaaaggggaacagagctaccccaccatcatctacttgacgcaccccaaatccccccgaacaccgatgacctgggaaacaatccccggcttacgcgagggaattacggtaatatgccataatatttgcgttagcctcgcccttgttcgtccccctttgtg

SEQ ID NO: 256874 - DNA, 1044 bp, Homo Sapiens
  misc_feature (917)..(917): n is a, c, g, or t
  misc_feature (931)..(931): n is a, c, g, or t
taggtagcgaggcctgggtggcgaattcggcacgaggctgggctttgctgccacccacaacctctactcaatgaacgactgtgcccagaagatcctgcctgtgctctgcggtctcactgtagatcctgagaaatccgtgcgagaccaggccttcaaggccattcggagcttcctgtccaaattggagtctgtgtcggaggacccgacccagctggaggaagtggagaaggatgtccatgcagcctccagccctggcatgggaggagccgcagctagctgggcaggctgggccgtgaccggggtctcctcactcacctccaagctgatccgttcgcacccaaccactgccccaacagaaaccaacattccccaaagacccacgcctgaaggagttcctgccccagcccccacccctgttcctgccacccctacaacctcaggccactgggagacgcaggaggaggacaaggacacagcagaggacagcagcactgctgacagatgggacgacgaagactggggcagcctggagcaggaggccgagtctgtgctggcccagcaggacgactggagcaccgggggccaagtgagccgtgctagtcaggtcagcaactccgaccacaaatcctccaaatccccagagtccgactggagcagctgggaagctgagggctcctgggaacagggctggcaggagccaagctcccaggagccacctcctgacggtacacggctggccagcgagtataactgggggtggcccaaagtcccagcgacaagggcgaaccccttcgctaccccggtctgcaccgtcccaacacccagccgaaggccagactcctgggggtgaagacaactgggaggggctcgagactgacagtcgacaggtcaaggctgacctggcccggaaaaaaccnccagggacggcggncgggaaatggaggccaaacccccccaaaaggaagtgggccaagggccccttgagcttgaaaaccggaagctggaacttaacccgtggcgggggggcccttcccggctggggaa

SEQ ID NO: 256875 - DNA, 400 bp, Homo Sapiens
  misc_feature (27)..(27): n is a, c, g, or t
  misc_feature (34)..(34): n is a, c, g, or t
  misc_feature (48)..(48): n is a, c, g, or t
  misc_feature (55)..(55): n is a, c, g, or t
ggttggccccagagtcccagcgacaangggcganaccccttcgctacncctgtantgcacgtccccagcaccccagccgaggccaagactcttggggtgaggacaactgggagggcctcgagactgacagtcgacaggtcaaggctgagctggcccggaagaagcgcgaggagcggcggcgggagatggaggccaaacgcgccgagaggaaaggtgcaagggccccatgaagctgggagcccggaagctggactgaaccgtggcggtggcccttcccggctgggagagcccgccccacagatgtatttattgtacaaaccatgtgaacccggccgcccagccagtccatctcacagtgtacataatcagagccacaataaattctatttcacaaaaaaaa

SEQ ID NO: 256876 - DNA, 1704 bp, Homo Sapiens
  misc_feature (1188)..(1188): n is a, c, g, or t
ttttccccaaattgctacttctctggggctccaggtcctgcttgtgctcagctccagctcactggctggccaccgagacttctggacaggaaactgcaccatcctcttctcccagcaagggggctccagagactgcccacccaggaagtctggtggcctggggatttggacagtgccttggtaatgaccagggctccaggaagagatgtccttgtggctgggggcccctgtgcctgacattcctcctgactctgcggtggagctgtggaagccaggcgcacaggatgcaagcagccaggcccagggaggcagcagctgcatcctcagagaggaagccaggatgccccactctgctgggggtactgcaggggtggggctggaggctgcagagcccacagccctgctcaccagggcagagcccccttcagaacccacagagatccgtccacaaaagcggaaaaaggggccagcccccaaaatgctggggaacgagctatgcagcgtgtgtggggacaaggcctcgggcttccactacaatgttctgagctgcgagggctgcaagggattcttccgccgcagcgtcatcaagggagcgcactacatctgccacagtggcggccactgccccatggacacctacatgcgtcgcaagtggccaggagtgtcggcttcgcaaatgccgtcaggctggcatgcgggaaggagtgtgtcctgtcagaagaacagatccgcctgaagaaactgaagcggcaagaggaggaacaggctcatgccacatccttgccccccagggcttcctcacccccccaaatcctgccccagctcagcccggaacaactgggcatgatcgagaagctcgtcgctgcccagcaacagtgtaaccggcgctccttttctgaccggcttcgagtcacgccttggcccatggcaccagatccccatagccgggaggcccgtcagcagcgctttgcccacttcactgagctggccatcgtctctgtgcaggagatagttgactttgctaaacagctacccggcttcctgcagctcagccgggaggaccagattgccctgctgaagacctctgcgatcgaggtgatgcttctggagacatctcggaggtacaaccctgggagtgagagtatcacctttcctcaaggatttcagttataaccgggaagactttgnccaaagcagggctgcaagtggaattcatcaaccccatcttccagttctccagggccatgaatgagctgaaactcaatgatgccaagtttgccttgctcattgctatcagcatccttctctgcagaccggcccaacgtgcaggaccagctcccaggtagagaggctgcagcacacatatgtggaagccctgcatgcctacgtctccatccaccatccccatgaccgactgatgttcccacggatgctaatgaaactggtgagctccggaccctgagcagcgtccactcagagcaagtgtttgcacgcgtctgcaggacaaaaagctcccaccgctgctctctgagatctgggatgtgcacgaatgactgttctgtccccatattttctgttttcttgccggatggctgaggcctggtggctgcctcctagaagtggaacagactgagaagggcaaacattcctgggagctgggcaaggagatcctcccgtggcattaaaagagagtcaaagggtaaa

SEQ ID NO: 256877 - DNA, 494 bp, Homo Sapiens
  misc_feature (55)..(55): n is a, c, g, or t
  misc_feature (58)..(58): n is a, c, g, or t
  misc_feature (310)..(310): n is a, c, g, or t
  misc_feature (387)..(387): n is a, c, g, or t
  misc_feature (403)..(403): n is a, c, g, or t
  misc_feature (478)..(478): n is a, c, g, or t
agagatagttgactttgctaaacagctacccggcttcctgcagctcagccggganganccagattgccctgctgaagacctctgcgatcgaggtgatgcttctggagacatctcggaggtacaaccctgggagtgagagtatcaccttcctcaaggatttcagttataaccgggaagactttgccaaagcagggctgcaagtggaattcatcaaccccatcttcgagttctccaggggccatgaatgagctgcaacttcaatgatgccgagtttggccttgcttcattgctattcagcattcttctctgncaggaccgggcccaacgtggcagggaccagctccagggtaggaggaggcttgcagcacacattatgtgggaaggccntgcatggcctaacgtnttccattcccaccatcccccatggaccgattgatgttttcccacgggtggttaattgaaaattgggtgaggcttncggaaccttgaggcag

SEQ ID NO: 256878 - DNA, 1638 bp, Homo Sapiens
  misc_feature (1481)..(1571): n is a, c, g, or t
ggggggagaagccgcgtgagatccgcgcgggtgctagctagtcctttctcgtcgctgctcggctcgcggcccgtggggtcggccccgccaccgttgccgccatgcccatgaagggccgcttccccatccgccgcaccctgcaatatctgagccaggggaacgtggtgttcaaggactccgtgaaggtcatgacagtgaattacaacacgcatggggagctgggcgagggcgccaggaagtttgtgtttttcaacatacctcagattcaatacaaaaacccttgggtgcagatcatgatgtttaagaacatgacgccgtcacccttcctgcgattctacttagattctggggagcaggtcctggtggatgtggagaccaagagcaataaggagatcatggagcacatcagaaaaatcttggggaagaatgaggaaaccctcagggaagaggaggaggagaaaaagcagctttctcacccagccaacttcggccctcgaaagtactgcctgcgggagtgcatctgtgaagtggaagggcaggtgccctgccccagcctggtgccattacccaaggagatgagggggaagtacaaagccgctctgaaagccgatgcccaggactaaggcccacggtcactgtgggctggggtgatggtgtctgaccagtggggagattggaatgggattactttggcccagggaagcccctggttctgtccctggagactctggaaatccttttgcattaaaaggactttacacacctgtgtaaaaggatgtgggagaggagggtctgaagctgagctgctaaatgaatatccctgctctgctggtcaataaaacgcttcctaatagcagcttggcgtgtatctggtcctagtgaagaggaaggcctgtgtagcagaaaggctttgggcctgagaggttaaggccacagcctgttgacacctgttttggtcctgcgaccctttactggtctccgctggctttgaatcttcctctgggctctactctggagaacataagggctgctgtggttgagtctggctagcactgtctgtggttggcagtgtgtacacccctccgttcagttccttgggggtatttttcagaaatccaaaggcaacccttcgtgcagtgctcacttttttaagtacagttgattacccttgcctgctggggggcctagccatgggccagagatggagaacccccagggggctgacaggccagccctcactcaggcacgtaccctgctgaacagtcagccactgccaacccatggcccagccactgtgtgcattagcagggaggtttgtaggccatggaggaaatgaggagacaccacctagtggagacattggggccctgctggggggatggtgtctatagctggctctgctggctccctcaggccctgcttaccaagctctggaggagggagtgctgcattactgagcaccttccttggtctttcctcannnnnnnnnnnnnnnnnnnnnnnnnnnnnnnnnnnnnnnnnnnnnnnnnnnnnnnnnnnnnnnnnnnnnnnnnnnnnnnnnnnnnnnnnnnggtgggaggatctcgagcctgcgagatcaaggcttgagtgaatcatgatcgtgcgctactgcactcc

SEQ ID NO: 256879 - DNA, 603 bp, Homo Sapiens
agcagtctcacccaaaccccagtgaaccgcccttaggattgaaatcggacccttggcaggcaaccccagggcacgccacccagattttcaacggggaccagtcctgtgaggactatgagctcttcgtggaggctgtggaacaaaacacgctgcaggagttcctgaagctggcttgagtcaagcctgtccagagttcccctgctggactccatcaccacactccccccagccttcacctggccatgaaggaccttttgaccaactccctgtcattcctaacctaaccttagagtccctcccccaatgcaggccacttctcctccctcctctctaaatgtagtcccctctcctccatctaaaggcaacattccttacccattagtctcagaaattgtcttaagcaacagccccaaatgctggctgcccccagccaagcattggggccgccatcctgcctggcactggctgatgggcacctctgttggttccatcagccagagctctgccaaaggccccgcagtccctctcccaggaggaccctagaggcaattaaatgatgtcctgttccccccaccacaacgggcaccatcagtctaacatgtc

SEQ ID NO: 256880 - DNA, 863 bp, Homo Sapiens
  misc_feature (805)..(806): n is a, c, g, or t
  misc_feature (809)..(810): n is a, c, g, or t
  misc_feature (814)..(815): n is a, c, g, or t
  misc_feature (821)..(822): n is a, c, g, or t
gggcggagcaggaaggaaaccgctcccgagcacggcggcggcgtcgtctcccggcagtgcagctgccgctaccgccgccctctgcccgccggcccgtctgtctacccccagcatgagcggcctgcgcgtctacagcacgtcggtcaccggctcccgcgaaatcaagtcccagcagagcgaggtgacccgaatcctggatgggaagcgcatccaataccagctagtggacatctcccaggacaacgccctgagggatgagatgcgagccttggcaggcaaccccaaggccaccccaccccagattgtcaacggggaccagtactgtggggactatgagctcttcgtggaggctgtggaacaaaacacgctgcaggagttcctgaagctggcttgagtcaagcctgtccagagttcccctgctggactccatcaccacactccccccagccttcacctggccatgaaggaccttttgaccaactccctgtcattcctaacctaaccttagagtccctcccccaatgcaggccacttctcctccctcctctctaaatgtagtcccctctcctccatctaaaggcaacattccttacccattagtctcagaaattgtcttaagcaacagccccaaatgctggctgcccccagccaagcattggggccgccatcctgcctggcactggctgatgggcacctctgttgggtccatcagccagagctctgccaaagggccccgcagtcccctctcccaggaggaccccctaaaggcaaattaaatggatgggcctggtttccatttggaaannaannaccnnaaacanncacaaaccacaccataacctccggaccaccaataccaaatt

SEQ ID NO: 256881 - DNA, 921 bp, Homo Sapiens
  misc_feature (826)..(826): n is a, c, g, or t
ggggctcccgagcacggcggcggcgtcgtctcccggcagtgcagctgccgctaccgccgccctctgcccgccggcccgtctgtctacccccagcatgagcggcctgcgcgtctacagcacgtcggtcaccggctcccgcgaaatcaagtcccagcagagcgaggtgacccgaatcctggatgggaagcgcatccaataccagctagtggacatctcccaggacaacgccctgagggatgagatgcgagccttggcaggcaaccccaaggccaccccaccccagattgtcaacggggaccagtactgtggggactatgagctcttcgtggaggctgtggaacaaaacacgctgcaggagttcctgaagctggcttgagtcaagcctgtccagagttcccctgctggactccatcaccacactccccccagccttcacctggccatgaaaggaccttttgaccaactccctgtcattccctaacctaaccttagaggtccctcccccaatgcaggccacttctcctccctcctctctaaatggaatccccctctccttccatctaaaggcaacattcccgttacccattaggtctcaaaaaattggccttaaagcaacagcccccaaatgcctgggctgccccccaaagccaagcattgggggcccgccaatccctgtgcctggcaactgggcttgaaggggccaccctctgggtgggttcccatccagcccaaaacttctggccaaaggggcccgccaattcccctttccccaggaaggacccctagaggggaaattaaaaggatggttcctggttccctccggggnaggaggcgcgggacgggcgaaggccgataaccttgtggggccgccccttgcgccttcaaagaaatctttcttagaacctttcctttttgggccct

SEQ ID NO: 256882 - DNA, 642 bp, Homo Sapiens
  misc_feature (13)..(13): n is a, c, g, or t
  misc_feature (54)..(54): n is a, c, g, or t
tccataaaaatgntttcctttgtgagtgaagaatggagaaaaaatccttacttnacatactttaaaaaaatttataaatgtgtacaaacaattctcatagtgtgatgacttaaaatttaaagttttgccacaatgaaaaccaacaagtgaatcactttttcaaaacttgttctcaatcagaaaaaatgaggtacataaaagccaaaaagtcaaagacaaaaaacattatagggtctacattcttcttcatatatatatttttttataatttaagtcaagctaatgtacttatacaatttcatataaaaggaaaaataaaatgaatatccccaaatttgttctacaaattcaactacataaaatttgaggcatactctggtataacacatattaaagaaccaatacaatttaagagcataacctactttttaaaggttaattggatgaccgatttaaagactgtaccaaatgaacactggtctaattgcctattttgttgttattgctaaaaagaaatactaatgaagactgtaaccttgttttctacagcccccccaaattctaacaaaaccaaatggtatcagtagaacaatttatggatcaggcatggtggctcatgcttgtaatcccagtgctttagga

SEQ ID NO: 256883 - DNA, 808 bp, Homo Sapiens
ctcgtgccgaattcggcacgagctgcagcctgtggcctcctgtcaccctgccacccaccatggaaatgccctggcccctagggtggattctgcttcttttgggaagccccctcatccacgctgagcctctgttcccgagagcctggtgtacctcccctcctcattcatggagaagatggtgctggtggctcttcatgctggctacatctttatccagacggagaagaccatctacacccctgagtacttggttcactaccgggtgttcactgtgaaccacaagatggaccctgtgaccaggacattcactctggacatcaaggtggtctttcccaataaggggtggggggtggtggtggatcctggacactggggtaacacggtgtgctaaagtcctgggggcatgagccaccagggccctcccagagggcagtcaccagccccaccccctatccccacagaacccaaagggaatcaccgggattagccagaatctgatggccaaggatggcttctttttcagctcctttcacctcccagagcttggcagtttggggacctggaccatcgaagcccagctaccaaagtacacccaagcagaagttcgaggctgcctttgatgtgaaggaatatgtcctcccatcttttgaggtccagctggtcccaaataagactttcttttacctcaaggatgaggctctgggcgttgacatccaggctcggtgagcccccttcctcccagctctgccagaagaccagggacacaaagattgagtacagagaaacaagcaccaggtgctatggctca

SEQ ID NO: 256884 - DNA, 777 bp, Homo Sapiens
gcccaacttcattttgctgctgaaagcattattattatctagctacggaaaactcttgctgattccagctgtcatttgggaacatgactacacatctgtgtgcctcaaactcattaaagtatttgttcttacatcaaattttcaggcaattagagtgaccctaaacatcaaccgtaagctctccttcttggccgtgttgagtggcttactgctggaaagcatcatggtctacttcttccagagtatggaatgggatgttggaagtgattatgccatctttaaatctcaggacttctgaagagtttattcttcttcactatctgtggcatgaccagctgtatctgaaagagaaaagacatgaaatataaaccaacctcctcatttctgttgagtaaaatgaagcaaagattggaaacactttctgaaaaagaaagcaatgataatagcggtggatacccacccccacaaatgcacccaagagacaagccatttacatacagatattcacagtcacacatagaaacacccacatggacacaaggaatgttgctgcagagactgaatgacatgcaacaggtgaaggtttatacgttatacacaaggccaggtaagcgctcataattcacacataataaaacatctaggtttcattcctttgacatgtttatatctttttaatttaaatgttgttactggcttaaaatattttgtgttcttacaatagaaacgcttttaataaagtctttcagaataaaccaagagagtaaaacacaagaa

SEQ ID NO: 256885 - DNA, 1158 bp, Homo Sapiens
  misc_feature (797)..(797): n is a, c, g, or t
tgtctcttgggtgcatttgtgggggtgggtatccaccgctattatcattgctttctttttcagaaagtgtttccaatctttgcttcattttactcaacagaaatgaggaggttggtttatatttcatgtcttttctctttcagatacagctggtcatgccacagatagtgaagaagaataaaacctggggcaatgtcagaagttcttgggcacgtgactgctgtaggtgttaagctgagcactcggaggtcaacggaaaaagtaagcactgcaaactggagtttttggaaagtcttcacttattccatggagaggcaaagctgaccgtatctggttaggtggagacaagggcactgcaggacctcttcagaagtcctgagatttaaagatggcataatcacttccaacatcccattccatactctggaagaagtagaccatgatgctttccagcagtaagccactcaacacggccaagaaggagagcttacggttgatgtttagggtcactctaattgcctgaaaatttgatgtaagaacaaatactttaatgagtttgaggcacacagatgtgtagtcatgttcccaaatgacagctggaatcagcaagagttttccgtagctagataataataatgctttcagcagcaaaatgaagttgggcttttttttgccgtcatgggccgttctacccacaggaaggtaaaaatgccaataaaataggcagtttgttctaaagcagcaatcgcaaacattctatagaaatccccattccttagcatatctgatccaagtcnatcaggggcagtattctggttggaatcttgaagctgccaccacctcaggtatgcttcacaaagcaaacaaaatatgcagagttttccatggatatttatttgagtattgaaaagaatatgtctgtaggcctgagctttgcacaatatagcattaatcaagatgataacaggatcatactcgatatatttgtctacaggtttctggcaggatttacagatggttatcttcagcacaccgtggttatagtctcggtacaactctttggcctcctggttgcattcgatgcacctgtactggcaggaggccgaggcagcagtaggagtcgctgccaccccatccacgttccccttcccacaagcc

SEQ ID NO: 256886 - DNA, 502 bp, Homo Sapiens
agacaggaagaggctggggataggatgcctgtcctcatccctcacccggccctcttgggaggctctcaaacagccccactaaggatcggatgagtccgcatgcgatagatgattactgcagtggctgggcacagcaacaacgaggtcatgatgacaatggtggccaggatgatgaggacaataacccagatatccaggatgtgcttgggaagcacgacttccatggggacttggctgactgcatccatgttgcttcactcccagatggcggcgagtctgcggaaagttcctgggtcagggatggctcggtgcttctcagggtccccaggactgcacgggatctggcagctggaagcgacccccaggcctggaacctcagccctaggcagctcctggaacgtgccccggctcctccgagccccgggaggcgggagagcgcaggagcggccaggacgcgctgctggctctggaatgcgcggctgctggggaccgcccccggaac

SEQ ID NO: 256887 - DNA, 817 bp, Homo Sapiens
  misc_feature (600)..(608): n is a, c, g, or t
ccaggcccctcatcccggtcttgttgcgggggagttctctctcctcaaaacattttaattcgtttttccacagccatataaatttaaagtatgaaacaacaataatacaactatagaatctaggttctctttcaaagcagcggcatataaaacatagaaaagctaaaacctcagcacaagcttcaaaagaacaaggactgagaggattttgatgaagacatgaaatgcacaaaatacagtacacaaaaatactagaatgccataaaatataaagctacacatttcaggtagaaagcattgtaaaatatataaaatatgcaagaaatcaaaaccaaagagatttttcttagagtaccatgaatacactggaactggcaattagcatttgaagatgggaacaagaaaatagcagtttcccatttaaaactttatttctaggctttaggatttcaccttcttgacatccttctttccagagctctcagtagctgactctgcttttcttttctgtgactaaaatggaaacagatttaatgttctgctccaatatgcacattttaaatggcccaacaatgttaaatctaggatgtaaatgcattnnnnnnnnnttttaacatgaatattcacttaaatgttatattcacagttaatgttctatatagcccaacaaactatataacccaatgtaaaataaccttcaaagatgtttctttttatgaaaagacataaaatacccatcaaaaatagtcatcaagtatctacttacacatggtattataaatgtactcttatcttaaagaactacttaatgttttct

SEQ ID NO: 256888 - DNA, 873 bp, Homo Sapiens
  misc_feature (613)..(613): n is a, c, g, or t
  misc_feature (824)..(824): n is a, c, g, or t
  misc_feature (836)..(836): n is a, c, g, or t
gcagtccaggctggactgggcggcatttgccgaggctcctcggccaggccccgtccgcccgagccgcgctgagacccgggcagcggccgcgtggagaggaggtggcagcggcccgggaggccggagccaagccagcgacccaccatggagacccgctacaacctgaagagtccggctgttaaacgtttaatgaaagaagcggcagaattgaaagatccaacagatcattaccatgcgcagcctttagaggataacctttttgaatggcacttcacggttagagggcccccagactccgattttgatggaggagtttatcacgggcggatagtactgccaccagagtatcccatgaaaccaccaagcattattctcctaacggctaatggtcgatttgaagtgggcaagaaaatctgtttgagcatctcaggccatcatcctgaaacttggcagtcttcgtggagtataaggacagcattattagccatcattgggtttatgccaacaaaaggagagggagccataggttctctagattacactcctgaggaaagaagagcacttgccaaaaaatcacaagaattctgttgtgaaggatgtggctcttgccatngaaggatgtcctggtgcctttaaaatctggaagcgattcaagccaagctgaccaagaagccaaagaactggctagggcaaataagctttaagggcaggaagtcaatttcatctgggaaagacttatctctggagttcaggactttaaaccactcttttttcactaactgattttacaaggatggatataccctacaacatttccgggggtncttacggggccngtacatcgtaccggacttccagaatttccttaggcag

SEQ ID NO: 256889 - DNA, 487 bp, Homo Sapiens
  misc_feature (11)..(11): n is a, c, g, or t
  misc_feature (477)..(477): n is a, c, g, or t
ggcacgaggtngccgagagggaaaggagcattcgaggtctcagtcctcgctctgagcctacttctctgcttctgggctccagcatctttgtggaaagggggctgctagtgacaccctctcaagggtctttccagctctaggtcggctgtgctggagtctaggatttgcccactgagaaatctgtttccaagttccttcaacctgatgcatcctgcagcatcacggcagctgttcagagtggtcagaaggcccctgaatgagctcagtagagggaagcctgggaacagggaggcacctgcagctctactcatgggcctgggcagagcttcagcagctcttctcttgccatcttagttggggatggcataccatcactggggaccaccctgtgcaaactggtgagcctgagtgcctgttcacagagggaaagaaaggggggggatacaggtttaggtgaaatagcaattctacctattntcaaatcatt

SEQ ID NO: 256890 - DNA, 622 bp, Homo Sapiens
  misc_feature (101)..(101): n is a, c, g, or t
agtcagagcacagaatccttcacagcgctaggcacctatgtaatgcatgtaatcctgtagaattgacttctctcacatctcctgtcttcccacctctgccncctcgggtctacatccattatgttaatgagctgtacctcagatatctgtgaaaagaccgatcaacgcagctggttgcacttcaagagctctagagtgtgtcaatcgagattagttcagaggtccttgaaaatacacttgttataaagattaaagattaagaactgttacaacctgtcctggtttaacagtggtatagagtgtaggctctggaacaacatatgctaaccacggagagcctggagccgctatcgatagaagacatagtgcaagtcattcaacgtcctcagtgcctgccattcctcatatgtgtcaagtgtctgaaagagtacctgtcccataacaagtcttcaattacctggagcaaatgcaagaaaatttaaaagctagactctctgctagctttcacggctacagaagggctctaccatgaactaagctgataggagccaaaggaattctatttcaaatcctaaaatacagttgaaaccgcacatgccaacaacactttacgaaacatccc

SEQ ID NO: 256891 - DNA, 848 bp, Homo Sapiens
  misc_feature (819)..(819): n is a, c, g, or t
gcgcttaatagggaacatacatacagctatgtaactgtgaataattgtatatatctctagttaagaatgagggaatggggaggtttgctttctaaacaagtgcattctgaaattgacttaaaaatttttagtgtgggtcctaaagtttagagatgggcaaggaggtctctaatccaccgcttcccgcttgagaagggaggggtatcaaaattgagccccaagctgtttgttccagagtaccaagcactgactctatgcctctgtcctggagatggcagaagtgaaagctggccatctgcaaaaagcagataagtgagtttgaaccttttgcattttgttagctcagtcagtcctcatcgtggtcctgaggcataggtactgttgtaccaaggtcacttatctaacaaaataacccttcatgtattttaaatttatttgacaagtctgcagacaatccttatctaaccagctattttcttaattgctacagcttgacctaccagtattccggagtaaccagcaaatgcaaagttgaccttgttcctgcatcatctttttgatggttcaaatttcagcctccctgactactacaaagccagagcagtcttagtaccaggaaacagtgttggcactttcgttggcatgtgctgtgtggaccccagggggacaggggagttcactttgggtccatctctgttcccccagttacagatcttggattccataggtggacatttccataagtggggggtggacagccaaatggacttggcagggtaggtcttcattgtaggggtttgtggcaccagagtggacccngtggaggcctttgtttaatagggttgggg

SEQ ID NO: 256892 - DNA, 694 bp, Homo Sapiens
taggaatacggcacgagaggaaggggaactcgtcatatatggacagatcctcatacttcttgctgtagtcaattacacgcacgttaacacgtgcagccgccctgctgtattttaggcggttgttggcactcctagttgggcccttccctgtgcccctcacagcagggcctgcgctcctgtggacgcttgtgtgctgccctggcaccggccactgtgttttgcataaaggagaggctccaaagatgttggccaaaggaatgaagccttgagagtccaggctttctatttctgagacactctactcaaggacttcccagatgcaaagcttcatctttgagcaaatacaaatatggagagggaacattaactttctgaagaaaagaaggagacatcttttcaaccttttatattgagttaacaccatggtcttagttttgtgaaagcactttaatacatccaactagcgggaggaatacaagatattcctacctttttattattattattaaaagagggctaaaccatgttgtaaactacttaagaactgaatgttcaagttgtacagtatattggccagattccttactgcccactaggcttgggagcatgttttcagctcagttttatgaatgttttaaatttgtattactgatctttgttatagccaattaacaattcaaaatggtaatttttt

SEQ ID NO: 256893 - DNA, 933 bp, Homo Sapiens
  misc_feature (645)..(645): n is a, c, g, or t
  misc_feature (712)..(852): n is a, c, g, or t
cttctaggatgctgaatgcaccaaatgtaaaagaactataagtgtccctgggaatgaatgactcatgtacagcagtcttgaatggtctaactacttattcatagagcaatacagaaacaggactcacttgctcaatcatttctttggctataggccaaatgcctgtacaaccatttaaaaaaatcaatttcacaggctaacgggcatggtgggagccagagctatgcacactggactcagaacagaactgggcagcatcagctttataagctgatcagttcctactatcttgaagcaagaggtagctattgttgagtcactagacagctcatttaggtcagagttaaaatccatattcataaaactgcctaaattatacagagtctacagtattttcgggtttaattatctttgggctaataaaaagtaagatataaataaaatggggacatattaaaatagttttgtttttaaataaatcatgagattctctattcactttgtctcagcaactagagactaccaatacccttgatggaaatgctatgagctaaaggaaaacccaacagtcttagattatgtatcagatgtgcatcttgtggccacagtgtgttcatgccaagtcacatggtccgcctcgctccnccatccacctctggggtgggcacctgagtaaggggaacaactctataagtaaccagaaacctacacnnnnnnnnnnnnnnnnnnnnnnnnnnnnnnnnnnnnnnnnnnnnnnnnnnnnnnnnnnnnnnnnnnnnnnnnnnnnnnnnnnnnnnnnnnnnnnnnnnnnnnnnnnnnnnnnnnnnnnnnnnnnnnnnnnnnnnnnnnnnnacagtgtgcacttgaagtaacaaggatacagacatatagcctgacaggcatgatctgagagagactcgtgccgtattccta

SEQ ID NO: 256894 - DNA, 1529 bp, Homo Sapiens
  misc_feature (95)..(95): n is a, c, g, or t
ggcacgagctgtgatacacgtgcacgccaccacacacagactagatcttctatatatagtagttcccacagagtattcacactgatgtgatattntaaaagacattctgtaagcatcttttaggaatatcagtaagtggaagactattatgctaggtatcagcagagtgccctcttataatttgtgtgaaatggaaacaaaggtaacatcgtgttttcaattcacacatatatacacagtaatgagaggtccagaagaaatgtggcttcagctctgctgctactgtgcctcccttctcctgccccactcagcccacaaaataggctggacactcaaaaaacgttgcgtttatctaccttttagagagggtgaatagcagagaactggaggtgggaatggtaaggaactcccagcagggtagtggagggaatgggctgacgcatctaaggctgatgccaggtctgctccctatctgggtggcctcagcaaatgacgtccagcacatccaggggcaggctcaagggagaacagcccccaaagctaagatcctgccaagctaaatacagtagttctaatgaaatgtgagaggctataatcccatttgggaaattcctaaaaagtcatgaggcaggggattggtttatgttattatcatgacctgagagtcatggctcagagccaaatgttcaggattgaattcaacagcatttaaatgtctttagagcaggatggaaatatgttagcaatgcctgcagagtgccaagtaaacgcaaaagccaatgagatcataaaggaagttgttagctaacctaggtggagtcgccaacttccttctactctaataattaaaattaaaaataatacttgggaggtaactggaataaaggttctaaaatcaaaaccctctgaagggtgaaaactgggagcctcctgttcccatagtaaccacagcactcagggcactgtctcccagcgctggagtactgtcttatgaccagagatcctaagcaacctctgctcatctgagttgtccaccatattgtgggcatgagtccttgacaatagtaaatagcacctctgttcccttattgggtaaatgattttccaactctgggaatgtgtagaattcattatggaaataatgcaataattcaaatccataatattgataatttccatgttaagtttaggactaatcttgtgtatgctccttaagtgatttgaatctttaaaaagcctatgattcccaatttgaaatgtgaaattgattttacgtttgtgatttgaagttgaaaggtataagaatatttaacttagctcatgaaaagtattagactagatttactataagtttaatgtattagatttacaagagatgcttaaatatatgagaatgttttgtcttaattggttataatcttgtcatatcaatgatttgaagtgctaaaatagaaaattaaatatgataaattacacaagaagtttagaatgtttaaaagattttaataaacaaagcctataactaaaaa

SEQ ID NO: 256895 - DNA, 1201 bp, Homo Sapiens
  misc_feature (884)..(884): n is a, c, g, or t
  misc_feature (1005)..(1005): n is a, c, g, or t
gtgactcttctgaccaagggtggttaagtgacacatagaacttttctaagagaagacagacaagttgacaggcatgccttgtactcagctgtcttcatgtggtggtctgtggaaagaaaagaagactcatttggaaatgaagctgtccctttccaagcagtctctggtgcttttcttctctcaaaatggatccgataaatatttgaatagagcagattgtagaatgtcgtgctgtcaccagaaagctcctgttttgggttctgcattgagccaaatatgtagaggacctaccaagcccactgagggactaggttttcatgtctctagtcatacctagaatgttctgagccgtctgagggccttcatgccggcagcagctagcaaagccagaaagcaagtctaacaggatctaagatgaccatcaggagaaggagtttgagactgtgtatgcaacccccaatagacccccttttactctgatctggagaatgtatctggcttcatattttcaagtcacatgtctctcagacccctggattcagaacccaaggccacaaatcataggcatgaagcactttcttaagactgacctaacgctggattatttcccgtccaatgcctgcatgctgcttgaattgctccacccacacctccatgaccaagggcgccagagtgctgcaactggggcgtgggccgctctctgcttttcctgtctgactctgacaagtcctccctcactgaatgtagaatcgttgccaagtttctgagaagtgtcgattccctgttaacatggatatcagttctgcctcacatttcccacttgagggttgaggcgtacttggaagacaacacctcagaccatctgaaccccatcagtggacaanaaatggggctgttaatatactctaaaagccatactaaaaatgctctgagggaactggctaaagaatagtggggcctgggtgattgtctatcacgccaagcttttggttttgtactgttcanaaaatctgtcacctttctgcctgccccttgtttcctgaatgaaatggcttctgggggttatttattgaaacgagtggatcctgggggcaggccaggaagcacggggctttctgggctcccttgaaattttttaggggatctttgaccttctcctttgggttacctttaaaacaacgattactccaactctatactt

SEQ ID NO: 256896 - DNA, 550 bp, Homo Sapiens
gtaggagtacggcacgagcgactctgaagttgcactgacctgtccagccctgtcacttaccaggttgtggtctgccctcaggggaagctgtctaaccagagcctaacccactagggttttatcagaacttaactgacctgaggagaagagatactcaactccagcaagctccagccttccaaatggaggaggagaagaaacctgagaagcaggcatgaagttcacagtccagagaccttgccatcgtatccccttatggagacacaagccaggaaggaagctcttcagtgcagctgtgaatagagaaatgctggctgaggtgatggagacactgggtgatcattcccagtgaaatatttagatccctggggacatgagctgctttgtcttttccaaggtcaggataaacagaataacttcaggcttctctacccagaaagaacatgtggcataaatatcaactgcagaataaatatgattaatctggtacatggacgaagatgttttctaggagatgcttatcctgggatgagagctttcataagcattg

SEQ ID NO: 256897 - DNA, 472 bp, Homo Sapiens
  misc_feature (390)..(398): n is a, c, g, or t
taggagtacggcacgaggcacagtaatgggcgctaggcgctggcgtcggtattcagcccagctgcacatctgaggcttggcagcttctcatagcgccttatcctctgccatacagcatccatctggagccctgtcttttaggatgagtggctttagggtcgggcattaaaccttaagcttcagtcgccatctgtgatgtaagtgggaggagagggtataggaaagagctctttctgggtcaaatagagttgggcttttcttgcaattgattatgagccagatgccacatatcttgaaaaagaaaaacggctgactttagtttgaagcgtaaataatagatattcgcacatgtcctctctagtagcagcccaaaaattgaatttcaacttnnnnnnnnntctgcgtcataataatagggatgttacttgctcttgctcatgcaccttttgcttagacctgctgtttctacgtc

SEQ ID NO: 256898 - DNA, 1301 bp, Homo Sapiens
  misc_feature (27)..(27): n is a, c, g, or t
acgggaccccaaaaaaaggtgggcaantgaagatccggcaaaaaccccaaatgaagccgggagtgtgaagctgtcgacccactgtgtttgggcctaaagtagaaccttcctgaatatcctcaaaagcatgtcttggtgctggtgggatgttgcactttggtgtggctgactgagtgggccaatatcctgtcgtgagcacccggactgtaagatcaacaccacctaaagatacaccagttgcctgtagatgttgcctgaattcatccatcgttgtgtttgagatgctcatatccctaaacattccttccagttttgacgtgaactgacatccacattcagtctttaacttagatatcatgtttttttcagagtcatcagaaacacttttatttgtgagaagtctccttgccaagtgttgtttataataacgttcaaatacatctttttcttgcataaacctaaaaaggaccattgctttatccaatattgtttctacttcttgttctgttagccctttgactccctttttcagcttatcatcaataaataatgagaggtattcaggagacctggagttgaggttgagaaaatactcaaagtcacccgcaatagtttgtttaaagagacggtcattgttgaatgattccaggaggaagcgatcgaacctactcttcagatccaataagccctggatatagtcaacaggattctttccttctccttcttcagaaacaagagctttaccttgctccctcaaataggaactcatacactcacacattgttttcaaaccatttggcacacgactaaataacttgtacatgcaaccaaggtcttctgtctttccatttttcaacatatgtactagcccagaattctccatttctactatagtcttcatgtgcttggaaatgagttccctttcaaccacctttacaattggttcttccgttgatttgtcaaggcagtgcatcactcgttctatttcttcattaattctagcttctactttctttatatatactgaagcactattttctgctaaaaatttctggctttccatctgaaaaaattctgcagacatttccaaaaaaggagcctcaaaatcttcttcatagactgatcttccttcgagacctaaaatcattaacatctggcaagcatttcttattgcgcctcgtgtctacgacttctccttcccgctctcttgcaatcatatccaatagagtttgccgtagatgatccctaatacacccataacgtacaacgtgatctcgaaaaataattaatcccaaagtgca

SEQ ID NO: 256899 - DNA, 832 bp, Homo Sapiens
agaacagtcagctgtgtgaggttctcccatgtgactcgggagacagaagcagcacgcaaggctggggacagtgggcgcacactgtcgggtgtgtgggcgaggactgttgaggctcacactctgagggagctcatccccatcctccagcacagcaagactccagactcattataagatgactctgatgacagtgcacaggtgcctttgagggaaacaagacacagccaccaggaaaatgctgaacatagcaggctagagatgcagctggaactggagccaacagctcgaaaaggacagagctgtgaaacatttcggagcaaggattagcagacctcggtgaccaactgggtgaggtggggaggaggtctgagatgcatctgcttcaggcctgggggaccttggaagatgagttggagacagggggaagagtgagtctccgagggaagaattgcattttgaacgtggtgtggaatacccagccggaggtgtctggcaggctgccattgattggagtccaggctggagggacagtgtggaggagagggggaagaatccccagacagctgggtgtcaaagccctgggggtgcttggcatcacccaggagagggaaggccatgagcagaaggagagctgaggctggaaccctgggtaacatcatggtttcaggggcagcaggaagaagccggtctgtgaagagtaagaagtcttggcctgagaggggaccaaatctcagaggtcagagggtttcaagaaagaaggagtggtcacccacatccaacgcggccgtgagtccaggaggagaaggggtggacatggggataggacagcagt

SEQ ID NO: 256900 - DNA, 1000 bp, Homo Sapiens
attgtgggagaacgaaagatggcggcgcccgtaaggcggacgctgttaggggtggcggggggttggcggcggttcgagaggctctgggccggcagtctaagctctcgcagcctggctcttgcagccgcaccctcaagcaacggatccccatggcgcttgttgggcgcgttgtgcctgcagcggccacctgtagtctccaagccgttgaccccattgcaggaagagatggcgtctctactgcagcagattgagatagagagaagcctgtattcagaccacgagcttcgtgctctggatgaaaaccagcgactggcaaagaagaaagctgaccttcatgatgaagaagatgaacaggatatattgctggcgcaagatttggaagatatgtgggagcagaaatttctacagttcaaacttggagctcgcataacagaagctgatgaaaagaatgaccgaacatccctgaacaggaagctagacaggaaccttgtcctgttagtcagagagaagtttggagaccaggatgtttggatactgccccaggcagagtggcagcctggggagacccttcgaggaacagctgaacgaaccctggccacactctcagaaaacaacatggaagccaagttcctaggaaatgcaccctgtgggcactacacattcaagttcccccaggcaatgcggacagagagtaacctcggagccaaggtgttcttcttcaaagcactgctattaactggagacttttcccaggctgggaataagggccatcatgtgtgggtcactaaggatgagctgggtgactatttgaaaccaaaatacctggcccaagttaggaggtttgtttcagacctctgatgggccgagctgcctgtggacggtgctcagacaagtctgggattagagcctcaaggacattgtgtgattgcctcacatttgcaggtaatatcaagcagcaaactaaattctgagaaataaacgagtctattactgaaaaaaa

SEQ ID NO: 256901 - DNA, 1001 bp, Homo Sapiens
tagcgaggcctgggtggcgaatcggcacgaggggacgctgttaggggtggcggggggttggcggcggttcgagaggctctgggccggcagtctaagctctcgcagcctggctcttgcagccgcaccctcaagcaacggatccccatggcgcttgttgggcgcgttgtgcctgcagcggccacctgtagtctccaagccgttgaccccattgcaggaagagatggcgtctctactgcagcagattgagatagagagaagcctgtattcagaccacgagcttcgtgctctggatgaaaaccagcgactggcaaagaagaaagctgaccttcatgatgaagaagatgaacaggatatattgctggcgcaagatttggaagatatgtgggagcagaaatttctacagttcaaacttggagctcgcataacagaagctgatgaaaagaatgaccgaacatccctgaacaggaagctagacaggaaccttgtcctgttagtcagagagaagtttggagaccaggatgtttggatactgccccaggcagagtggcagcctggggagacccttcgaggaacagctgaacgaacccctggccacactctcagaaaacaacatgggaagcccaagttcctaggaaatgcacccctgtgggcactacacatttcaagttcccccaggcaatgcggacagagagtaacctccgagccaaggtgttcttcttcaaagcactgcttattaactgggagacttttccccaggcctgggaaataaggggccattcatggtgtggggtcacttaagggatgaagctgggggtggactatttggaaacccaaaaataacctggggcccccaaatttagggaggtttttggtttccagaaccctcctggaatggggcccgaaaccctggccttggtggggaacggggggcgcttccaaaacccaaggtcctggggggaatttaagggaggcccttcccaagggggaacaattgtggtggg

SEQ ID NO: 256902 - DNA, 1043 bp, Homo Sapiens
  misc_feature (43)..(43): n is a, c, g, or t
  misc_feature (106)..(106): n is a, c, g, or t
  misc_feature (109)..(109): n is a, c, g, or t
  misc_feature (167)..(167): n is a, c, g, or t
  misc_feature (790)..(880): n is a, c, g, or t
ctgtaacctttaggttgttccagaaaagattcaggccgtttgnacagaattgctctttctgaagggtagcagtaatgaataggaacagacagaaaaccccaggagngcntttcaggaaactctccctctccatcgccatcctgcaagctccacagcctcgggctgcncagcctgtggcactgtcctcggtgtgtcctggagctgtgctgggcagcagggcctcgcgtaaggaactgctggaacccactgagcccttcccggggtttcccgcccgcactcagtgtgttccttcaggctagtgaggtttcattctgttttatttgcaagcttatcaaaagtttgtggaagatacattgttgggttccagaggctggagtcatgctgcccacatcttgtttgggaaagcaaaagctcccagtgaagctggtgtccccgtgtgtctttcatgggactgtcccctttagagatcccacctgtcagagccacagcttcggggtcctgtcatcacatcccctgggaggggaggcaggaggaagccgagggccccaggatgtctgcctggtcccttctcactgtgaggacgcccttggcacacctttctcaagtcacacaaattattgcagttacatacagaattgctgacaggagcaggagacgctgagggaaacagctggcaatgtgacaaaagtcttttctgggacaacaatcaaatcatgtatttgtatttttttaagtttaccaatgaattgtacaacaatgtaaaaataaagttcatcctaatatgctgtgnnnnnnnnnnnnnnnnnnnnnnnnnnnnnnnnnnnnnnnnnnnnnnnnnnnnnnnnnnnnnnnnnnnnnnnnnnnnnnnnnnnnnnnnnnncttgtccggcccgctctcggcccctcaaaaaatttttcataaaccattctcttttggggccgccggccccccaaaagggaaaggggaacttgggcccatacctgtgttccccaaggaaaaacccctgggccatgaccatagggctttgggaatctcccccccc

SEQ ID NO: 256903 - DNA, 682 bp, Homo Sapiens
gttcatcctaatatgctgtgacatcttgcttaaaaatgtcttcagcacccagtcagttgatctttccctcacacactgcatgcagcaggagcctcttgtttttcttaatgagctgaaaagacagcagatgttcacagctgatgctgggtgttgactcagcgccacgggaagctctgtgcccgcagtaagcacgcacagtcttacagttctccttgtaaaatatcatcacccttcctgcctgagaaacgagtacatttgtattttatgtaacaacaatagtcaaggcagcattgcaacactgagcagggtgaggtgggggtgctgagcacagggacaagagggaggaggcctgccctccattcagatgcatctgcatcgccctttcctgtgtgcagtcacatcgagactgcacacagcatgcatctcctcttggaaaatatcttttgcctccgagttgttttaagcaattagaatcaggtcctgaatccccagactgttcagagacttcaagggacacctccctcacaagaagcctggcacccccactgtgtacctttgagaggaaaggagtgcgtttgttttcatctgcattctgtttgtcagtggcaacagactctatcaatgtaaaaccatggttgtgatcatgtggggaaatcaaataaatcctttgaaactcaaaaaa

SEQ ID NO: 256904 - DNA, 583 bp, Homo Sapiens
gcatgtactgtctgtgactgggttaagttaggagaaaattgttcaattctatcccacctttcatatctcgccatcactctttccaaactcagataatgcagtcactctataggaaagcccgttttagatttccacaattaaagatacattgttgggttccggaggctggagtcatgcggcccacatcttgtttgggaagcaaaagctcccagtgagctggtgtgcccatgtgtctttcatgggactgtcccctttagatccccacctgtcacagccatagcttcggggtcctgtcatcacatcccccgggaggggaggcagaaggaggctgagggccccaggatttctgcctggtcccttctcactgtgaggacgcccttggcacatctttctcaagtcacacaaactattgcagttacatacagaattgctgacaggagcaggagatgctgaggaaacagctggcaatgtgacaaaattcttttctgggacaacagtcaaatcatgtatttgtatttttttaagtttaccaatgaattgtacaacaatgtaataataaagttcatcctaatatgaaatgcaa

SEQ ID NO: 256905 - DNA, 872 bp, Homo Sapiens
  misc_feature (638)..(638): n is a, c, g, or t
gaccagctttgcagccagaagccagaggatacccagggacagtagggctcccaggtggctggttctcagcacaccttccatgaatctgcttgctgctgcttcagtgtggtggccatcgtgctgtgtgacaaaccaggctgttcacagcttcctcagccccccagaagggaagttgtcaggaagagacatttagttcatttgcctgcaaattttcttctcctgcaaggatctcggtggactcagtcacaaaacaaaggctaaaccaggatttataagagagggcttataaatccctctgccgacgcagggagcagagacttgccggcatgttttgggggtaatgatcgtgggcagggagcagaggtccgctgaggcagtctgtccttgagactaacaaagtcatctgctgtttggggaaatctctggtgttgggaacaggcccccaaatctggccataaactggccccaaaactggccataaacaaaatctctgcagcactgtgacatgtttgtgatggccatgacccccaccctgaaggttgtgggtttactggaacgagggcgaggaacacctgggcccacccagggcgggaaaaccgctttaaaggggtttcctggaaccacaaaccattagcatnaagtgatctgtgcctttaacgacatgtttcctgcttgcagataactagccagacccatccctttatttcagcccatccctttatttcctgtaagaaatgtttttagttaatctataatctatagaaataatgcttatcactggcttgctgtcaataaatatgtgggtaaatctctgttcaaggctctcagctctgaaggccgtgagacccctgatttcccactccacaccctta

SEQ ID NO: 256906 - DNA, 454 bp, Homo Sapiens
  misc_feature (342)..(351): n is a, c, g, or t
tgcagcaggaacacgcctttaagacacagattgctcatgcttttgtttgtggcttaagaatgcctttaagcagttttccgccttgggcgggccaggtgttccttgccctcattcccgtaaatccacaaccttccagcttgggcattagggccattatggacatatcacagtgctgcagagattttgtttatggcccagttttggggccagtttatggccagattttggggggcttgctcccaacagtcaattagcacctaaaaaggtgctcaacattagggaaatacaaatcaaaaccactgtcagataccactccacacctatttaggatggctattattnnnnnnnnnngtgttggtaaggatgtgaagacattggaactcttttgcattgctggtgggaatgtaaaatggtgcagctgctatgaaaacaacatgaagcacctcaaaaaaaa

SEQ ID NO: 256907 - DNA, 307 bp, Homo Sapiens
actacacaatttggcacaaatgaatggtctctacccaagcctgtgaattgctggtgaagagaaagggggtgctgatcagatcaagggggcagcagtcagtatgggctcaaagaaatatcagcctatttttcttttagaataactgaccccaaatgaaaaccacgttaacaaacacattacctccttgggcttagccatagtagacaggcaagtttaaaccagcaggatgctggataacgaagtgtgttttaaacagatgtcaagctgagaccttgggactgcctctctcttgcactacaccttacag

SEQ ID NO: 256908 - DNA, 1893 bp, Homo Sapiens
gctgggtggcgaattcggcacgagggagcttcgacggccgccattttctttctttcttagctgttagctgagaggaagtctctgaacaggcggcagcggctcttatagtgcaaccatggcagactattcaacagtgcctcccccctcttctggctcagctggtggcggtggtggcggcggtggtggtggaggagttaacgacgctttcaaagatgcactgcagagagcccggcagattgcagcaaaaattggaggtgatgcagggacatcactgaattcaaatgactatggttatgggggacaaaaaagacctttagaagatggagatcaaccagatgctaagaaagttgctcctcaaaatgactcttttggaacacagttaccaccgatgcatcagcagcaaagcagatctgtaatgacagaagaatacaaagttccagatggaatggttggattcataattggcagaggaggtgaacagatctcacgcatacaacaggaatctggatgcaaaatacagatagctcctgacagtggtggccttccagaaaggtcctgtatgttaactggaacacctgaatctgtccagtcagcaaaacggttactggaccagattgttgaaaaaggaagaccagctcctggcttccatcatggcgatggaccgggaaatgcagttcaagaaatcatgattccagctagcaaggcaggattagtcattggaaaagggggagaaactattaaacagcttcaggaacgggctggagttaaaatggttatgattcaagacgggccgcagaacactggtgctgacaaacctcttaggattacaggagacccatataaagttcaacaagccaaggaaatggtgttagagttaattcgtgatcaaggcggtttcagagaagttcggaatgagtatgggtcaagaataggaggaaatgaagggatagatgtccccattccaagatttgctgttggcattgtaataggaagaaatggagagatgatcaaaaaaatacaaaatgatgctggtgttcgcattcagtttaagccagatgatgggacaacacccgaaaggatagcacaaataacaggacctccagaccgatgtcaacatgctgcagaaattattacagaccttcttcgaagtgttcaggctggtaatcctggtggacctggacctggtggtcgaggaagaggtagaggtcaaggcaactggaacatgggaccacctggtggactacaggaatttaattttattgtgccaactgggaaaactggattcaataataggaaaaggaggtgaaaccataaaaagcataagccagcagtctggtgcaagaatagaacttcagagaaatcctccaccaaatgcagatcctaatatgaagttatttacaattcgtggcactccacaaacagatagactatgctcggcaactcatagaagaaaagattggtggcccagtaaatcctttagggcacctgtaccccatggggccccatggtgtcccaggcccccatggaactcctgggctcagggctggaattcaatgggaacatacaagcctgaacctgataatgcgtggaccaagcagggcgggatccttcaggtgctccagcgcccatatggccccagggatgagggaacagcatatccaaactggaaagaaggcactccgatcaggcaagcagaacgggaccacaccgagccgtcggccgcaataagccacaacaatcagagaaggcaacacacaaaagactgcgggccacacaaacaacggcgggaggaaccaccccgagagcgtaacgcggggagcacaagcaccccaccgccagggcaaacggggaaagcataacgacacaccaagaggggagacacgcacacaatgc

SEQ ID NO: 256909 - DNA, 551 bp, Homo Sapiens
  misc_feature (223)..(223): n is a, c, g, or t
  misc_feature (232)..(232): n is a, c, g, or t
ggcacgagagaactccatcttcatctcggaattccagcagccatacaggtataatggtgagagagcacgagagaggcatgaacacacagtcacctccactccccattctttcaacccaagggtcaacaggagactctctgctgaggtcaaaccctcagttccaagaggctgacttcagggttgcgcacagaagagggggctttccatcccaccctggcttccntttccctcnacccaagtggagacccccccaaggcatgaggggaaagccattaagtggggtgcagagccctggcgggcttcagctgcacccctcaccgcttccgttcttactgcctcctctagaggactgccattggtagagctggcgtgctctcagtttccgtcggcacttggctatctgttcctagagcccatcccgcaccagcattttggaacctgcagagagcctttctcccagctttgccgcctgtgctgccattagagaaaaaaagaagcataatcgtgggcatctctataacatagacagatatatatatttggcttcttaa

SEQ ID NO: 256910 - DNA, 421 bp, Homo Sapiens
ccgcgctgcaggaatacggcacgagagttgatatgagagtagcacacgttaatgtgaacgacatgcatgtcataggacttcccacacaacaggtgagcagtaaatgttaataaatatcaagggttgtgcagacttccaggtcctagatgtaagatgcaagaaaggaaccagaagtgctctaaaggctgcacgtgtgtcataacttcagagcgtgctaacacacatgactatctgaaatatttggacacaggtggtggagagcctatctgtctcctgcctgtccatcctctaaccatgtctccatctaaccatatctccatcatctgcgccggctagagtctagggctgaaaggtcagagaatggctctttctgcccaaagcaatgatgagcacacctgttcaggaggagagagcatacctt

SEQ ID NO: 256911 - DNA, 455 bp, Homo Sapiens
cattaggggcctttctaagaggctgaggtattcaaagagtataaggtgaaagaggtcaacagcggtttaacactttggttcaagcaaggcactcgtcctaggagtttacaaagtttgcaacatgtttgcctagagatttacaagtagaactagcagtaataagagtagtatttcctaatgttgttgttgtcattattgtatcattattaagaatgaagacaagtttacacactgagtgaagagttaggaagggggaggggtgggggaagtacagctgcgagtcactgaccccagcttgtattctttcgattttaaaaaaagattctgaatgtgatccccccaaataatttcaccatccactaataggtagcaacctgaatgaaaaatactgttctaaactttacacaaaaccagcgattataaacatttgcttccaaggagagaggtaaaaggta

SEQ ID NO: 256912 - DNA, 639 bp, Homo Sapiens
catttcctaggtaaaagttctaagatgccagaaagaaagacatgcaaaggaaacttaccaccatattacagatatggactgtcagtctgactggtcacactaggggcatttggttaccaaggccttgaaaataataaccaacactgcatacatgagggatgccagaagaaaggtctgagagccactcttcctgggcactgaaggaaacagggcccatcagaggcaaacaagtaccttttacctctcttccttgggaagcaaatgtttattaatctctggttttgtgtaaagtttataacagtatttttcattcaggttgctacctattagtggatggtgaaattaatttggtggatcacattcagaatatttttttaaaatcaaaagaatacaagctggggtcagtgactcacagctgtaagcccaaaagtttgggaagaccaggcaggaggattgcttgagaacaggagttcagaatcagcgtgggcaacatggcgagaccctatgtctacaaaaattttaaaatataccagatctggtggcatgtgcccatagtcctagctactcgggaggctaaggcagcaggattctttgttataaggagtttgaggctgcagtcaaacttctggtcgaaatcct

SEQ ID NO: 256913 - DNA, 675 bp, Homo Sapiens
ggtgggtctgagagcccccacccactaggcttgattgcatccctgttgtgccctttaagagacatgtttccaccccacccccaaccttgtcccaagtgccctggactaaatttcctgtgccagtgactgcagttggccaagggacaatgtggaaaacccagtgtccatctttccaccctccctgatctccagaaccttcgactgacccccttgtctttatgctgatgttgagttttgggattgttactggttgaagtgggggcagatgcctgtcaccaaggtgttgactgtgtgagaaaagcagtttgggtgacaaatcctgtgtggcacaagttggatcgcttcctagaaataagcaacacctctcccaaaaagcagcccacaaggcaggggcccagcagcccagccatcactcatctttgaggaaatgagttggtagcctctgtgcactgtttggtggccacatcacaggtgatgtcctgttcacatacctgcttgtatttaaagccctcagtctgtcctgttgtgtggggcgaagtgatggactctgccaggtggacatgctgtgggtggatgttcccggcgtgtgccgggcctgaatggacaggggccacttcacagcatgtcagggaaaatcactgtcacacaattccaatggattttgtgctctttttg

SEQ ID NO: 256914 - DNA, 769 bp, Homo Sapiens
  misc_feature (713)..(713): n is a, c, g, or t
  misc_feature (727)..(727): n is a, c, g, or t
cagatagacatgctggtcccacgccagtgcttctctctcaactatgacctaaactgtgacaagctgtgtgctgacttccaggaagacattgagttccatttctctctcggatggaccatgctggtgaataggttcctgggccccaagaacagccgtcgggccttgatgggctacaatgaccaggtccagcgtcccatccctctgacgccagccaaccccagcatgcccccactgccacagggctcgctcacccaggaggagttcatggtttccatggttaccggcctggcctccttgacatccaggacctccatgggcattcttgttgttggaggagtggtgtggaaggcagtgggctggcggctcatttgccctctcctttgggctctatggcctcctctacgtctatgagcgtctgacctggaccaccaaggccaaggagagggccttcaagcgccagtttgtggagcatgccagcgagaagctgcagcttgtcatcagctacactggctccaactgcagccaccaagtccagcaggaactgtctgggaccttcactcatctttgaggaaatgagttggtagcctctgtgcactgtttggtggccacatcacaggtgatgtcctgttcacatacctgcttgtatttaaagccctcagtctgtcctgttgtgtggggcgaagtgatggactctgccaggtggacatgctgtnggtggatgttcccngcgtgtgcccccttgaatgggacaggggccacttcacagcat

SEQ ID NO: 256915 - DNA, 477 bp, Homo Sapiens
caacctggccagagtcccatcacttcgcccccaacaacaaacaggaacaaaactgagggcctttaaaatacaaaccaggtaatgtgaaacaggacatcacctgtgaatgtggcccacccaaacagtgcacagaggcctaccaactcatttccctcaaagatgaagtgaatggctgggctgctgggcccctgccttgtgggctgctttttgggagaggtgttgcttatttctaggaagcgatccaacttgtgccacacaggatttgtcacccaaactgcttttctcacacagtcaacaccttggtgacaggcatctgcccccacttcaaccagtaacaatcccaaaactcaacatcagcataaagacaagggggtcagtcgaaggttctggagatcagggagggtggaaagatggacactgggttttccacattgtcccttggccaactgcagtcactggcacaggaaatttagtacc

SEQ ID NO: 256916 - DNA, 620 bp, Homo Sapiens
ttagttgaatacaagtggtcagcatgaaccagtttatttggaataaattacattgaaaattaaacatgtagtcacactgtactggcctcattttccagaggctctttaaatatagttgtgattctccaggttgttacattgaatatacgataaacacgttagatttttcacaacacatctcagaaaagcttaaactccaaagatcttacctgtttgctcctttcaagagttatcagtttctggttgacctttgatggtttttaaggagtttatgataaacctgaatatttagtatgatagagcatgagccagattaaatgcttaacctaatttgctgtacatatttgccagtggttaaaaaatttaagggtttttggattcttgtgcgatgatggcttaaaaactagtaaaataatgcccaagtggcagagaaggaggactctcagtactgggttaggaattttattacttaggggagtttatggtaaaccagcaagttagaaaaggggggcatgctttaagcataagctcttaatgtgaaagagacagtgaaggttaatttgtgaactgtgagtacgagatactttaaacaaagtgagaaagagaaagcaaaacctgaa

SEQ ID NO: 256917 - DNA, 614 bp, Homo Sapiens
  misc_feature (17)..(17): n is a, c, g, or t
gtaggcacactgagganaatggacaaaggtggttctggcccagaggctccagccacccaggccacctttggatgtagcaaggggtgaggggatctgtatctaggcctgtctgtgatttgcagtgccagtgtgcatggctcagaaagctctaatcaaggagaggttaaatgacttaagtcacaaaatctctactaatcacaactgctctacatgctttctggctctaaaattcaatcatatatgcagacatgtatctatatttaagaataaagaggatttcctaacatgcttgaactaaagacacctaagctagcaatttacatcaaagctgaaaattaaaaacagttcttagcataaacaaatatttgactatcttctatttttcagacttgctattcttttaaatttagtttgtaagctctttgaacagtaacaatcttttgcacagtattttgtatatctctggtagtcagtaaatagagagtaacaataaattacactataaaggaaaaaactagacaaagtaaatccacattctaaataattctgaaggtgaaaaaagtgttaagtgttgattttgtagaggtagagaagattccctctttaaatgtcaa

SEQ ID NO: 256918 - DNA, 1048 bp, Homo Sapiens
  misc_feature (861)..(877): n is a, c, g, or t
  misc_feature (891)..(985): n is a, c, g, or t
aatcagaaatgctaggtaattttaaacttcagtaagttaaaaataattattgtctctttttaaaaaatgaagagtgtggaatagatggtctcacagataactaatggtgtaaaggagttaagcaacacatcccaactattcccaagttatggcacacatggaaagcgatgctgtaggcacactgaggaaaatggacaaaggtggttctggcccagaggctccagccacccaggccacctttggatgtagcaaggggtgaggggatctgtatctaggcctgtctgtgatttgcagtgccagtgtgcatggctcaggaagctctaatcaaggagaggttaaatgacttaagtcacaaaatctagttactggcagctttgggaaataaatgcaaatatcttcttgtcagtgtattttctactaatcacaactgctctacatgctttctggctctaaaattcaatcatatatgcagacatgtatctatatttaagaataaagaggatttcctaacatgcttgaactaaagacaactaagctagcaatttacatcaaagctgaaaattaaaaacaggtcttagcataaacaaatatttgactatcttctatttttcagacttgctattcttttaaatttagtttgtaagctctttgaacagtaacaatcttttgcacagtattttgtatatctctggtagtcagtaaatagagagtaacaataaattacactataaaggaaaaaactagacaaagtaaatccacattctaaataattctgaaggtgaaaaaagtgttaagtgttgattttgtagaggtagagaagattccctctttaaatgtcaaattcctgctagctaaattgannnnnnnnnnnnnnnnngagacagggtctcnnnnnnnnnnnnnnnnnnnnnnnnnnnnnnnnnnnnnnnnnnnnnnnnnnnnnnnnnnnnnnnnnnnnnnnnnnnnnnnnnnnnnnnnnnnnnnngacatcttaatatgcactatctactatattataggctcttgagaaacatttcattccacagcc

SEQ ID NO: 256919 - DNA, 600 bp, Homo Sapiens
gggctcggatgatcaatgctcagtctcagccttgctcctgctgaagtcacaagtgagttctaacaaacccccctctaaggctacctcctattgcctgctcttcaggacatgaggaacacatccaccgaaaactatgttttctttgcatcctaactgaacaagcattaaagggggaaatgggaattcagcgctgccagctacagtatctctcctatcagttcaccaataaggcctggtagggacctgccgagcctctggataaattgtattttccaagggttaattaagctgtcttgagcttctgcatgaagaggaacaaactggcacttgcagcgctttctgaaacctgctgtcgacattacagtccctgctgcttttagctgtatcgatccgatgcctgacctgtgaaatccttgatggctgctaacactagaagcttactggagctttccaagggagcttcgggacagcttgtgtagtcaggtacaattacctatccctccaggagagccaattagttcacaaagagctggagcagaacaaatgttttgtatgtgaattagaatccttaaagagaataggaataatagagaaagaagg

SEQ ID NO: 256920 - DNA, 1090 bp, Homo Sapiens
ttttctgtcacttaggatcaaaaaggtcttaaagaataaagcttgtctgggctcctgatcacacatttcctggtgtcataattcttcatgaacgcagcatatctgtttcccgtattagactgcagggtcttgacagcagaagcatgtgtgctgcagctctgtgtgcttgccactgcctggcatcaggccagagagtggcacctggaagggtctggggtcatatgatgtcaaagctgtgacaaaggatctgtgctgataattacttttaggtacttgagtatataaatgtggtcactggggcccagcaacaagaggacacttgtctaatactgcagtgtgtgggtcactggaggttggcccctctggataactatgcacccatcacctcctctcatatccattaaattcattcagcaactatattattgactgtgggtcaggtgttgctctcagggcaggggatatagcagtgattaaaacaaagcccctctcctggtgggtacagagattaaacactattactggagcaagttatttactctctcaagtctgagtattcagtggggataaattcctcaaaggggcagttatgaggatttaaagtgatacttcatacaaagtagtgagttccttctacataattaaagctcaataaatggtagatagtattattagcattattacaaagttaccagggataaatatgtaattaccaatggtggtagcctgtgtgaaggaaacaacaaggtactctgagggcccaaaacggggcagtaaatgagagacggccggaggggaaggcatggggaccgagaccagaagggagagaaggggcagcaagcgtgcaaggaacagggagggtgtctcaggcagagggaaacccccccgggagggtccaacgggggaaagaggctgctgggaaagatgctgtttggccagaatgcagcagcagacggaaaggaagggagatgatgctggagatgtaggcatgggctcaatggggcaggcctcacagaatgcagaggcccaggcagctggggcaggagcagggggacccacttgctgatatactccccggtgaggatgacgc

SEQ ID NO: 256921 - DNA, 478 bp, Homo Sapiens
tgagccaccgcacccggcccaaaattaggctttctaaaggactgatggcatcctgctgccagatgccacagtttatggggcccatgcctttagaggaaagaacattgtgcagtgcatcccatgctagtttcctagaatgatttcagtggtagatcactttctgattgatttatattttaaagcaaattatttccagaatcaaaaagctcgagacattagaggatcttatttaaaacaaattttaagactttttttcccattgagaaaaattataaccatgatctaggagccattaacaagtatttaaaggtaaactttctttgtgattcaatttttcaataccttttaaggtctgtttcaaggaatttctacatggtcaaaatcctcttagactccaacaaacctcctttctctctattggtttaacttctgtttaataaatgttcacttctcaccacctttaatcctgacctttttt

SEQ ID NO: 256922 - DNA, 575 bp, Homo Sapiens
  misc_feature (438)..(447): n is a, c, g, or t
ttcgtggtggaaggggaaccctgacttgattcacaccttttagcaatttctgtggttaaacattctcaccacggccagtttcaaactctcaggtcatttttcatcaggaagtcagactcagactctgagtcaaaagtagaacggtttggacaaggtcttgcctccactttcacagccccacttctctcacctcaagtcattggttcccaaacctggctgtgggtcagaatcaccagggagcacttactcaaaatgtgcaatctatagagtcctgcccagaatacactgaatcagaatctccaacagggcgtccggacagaaatctgcattcctttaaaaagcatcgttggtgactctgattcagccttttggcctcttggctcagcatttgaaaaccactgcttatagcagtcttgtctatagcataagctctttttnnnnnnnnnnttaattagctgagcatgatggtatgcactggtagtcccaccaactcagaaggctaagccagaaggaccacttgtgcccagaagtttaaggctccagtaacccatgatcacaccattgcattacaaaac

SEQ ID NO: 256923 - DNA, 921 bp, Homo Sapiens
  misc_feature (326)..(416): n is a, c, g, or t
aagattctataaagaagagaatgatgtaagtgacccgggggcaatggggggagcttaaatttgaaactagaaaaaattttgaacaaaataatcataattgttagctgatgaaaaactagaaaatattttctgagtaaattcttgatttcagaaattaactataatttatattgctcttaatatcttacccttgaatataaatgattaatgccctttaaaatgtccttttttctagctaacctgatgtacatatgacattaatccaatagacttaggaataagatacagggggttttcctgaatgattcgagtatatccccattcannnnnnnnnnnnnnnnnnnnnnnnnnnnnnnnnnnnnnnnnnnnnnnnnnnnnnnnnnnnnnnnnnnnnnnnnnnnnnnnnnnnnnnnnnnggactcaacgactctcttaccgtccagctctcaagtcccttctcttgtgaaaatggaaaagttgaactacagttgagatattattcccaggtgttctttggaacacaggggatttctccaaaaggcacagaacaaattgcctccaaacagccaagattccagcagaagctggagtagcagactacttggatcttcaaagtacctggccctgagtcagttaaggaagatcttttcttctcttttgtacaatcctatgatgagagctgcaaagtgaactgactaagagcttctgccttgatcattgacctcccaatcctaataatatgttcactggccaaacttcctaatcgatttgtcttttggatataacgttcctcctactgtttgcctgattgagaaatctgctacagaacatgaccggttagcattcccaccaaccccagtgctacactgactgtctttcgatggactttgctccttgctgcctctctgaggtcccagacct

SEQ ID NO: 256924 - DNA, 603 bp, Homo Sapiens
  misc_feature (46)..(46): n is a, c, g, or t
tctatgcagccggctgactagtcctttcgtttatatttggacaaanacagcatcagaccttagaggtttagcatgccttgtggctacgaaggtcttctatcacacacgtagaagtcctgtagaagtcagtctgaatgagtgcctcttaggtgttcagtactcactatgtccagcactgtgctggcagggatagaaatatatcccttgacaaccgaatcttttttgggggttagggggtgattaaaaacttcatacatgaaacaatgaaggattaaaagacagtatacaatcaagtgctaacttgtggagaaatgcatttaggagtgcgatagtgctttagggatttcaagaagggagagatgtatttggagttgttgttgccatttcagtagaactgatctcagggatgaggacagaaccatctacatttgttgcagtcctttggaactgtagactggtgcacataccctctctttcgggaagagatagaaatctttggtttgatactgattagcacagtcctagatttctacagctttggtaggctaccagtgatcatatatacaacttatcgtatatataactaccttgagcagcatgtcc

SEQ ID NO: 256925 - DNA, 536 bp, Homo Sapiens
  misc_feature (72)..(97): n is a, c, g, or t
gggataacatttagttgaaaatacctaagaaagtgtgtcttctttaaagccttggctttaatcatgggaaannnnnnnnnnnnnnnnnnnnnnnnnnatcctatgtttggtattctgtatgtctgatccataatcattttagatatttgaatgatctctgtggattggtaggtttggccatttgaccattatttattatcaagttggttgtatgctaaggtaagttgacgccatagcattatacagttatcttcattgctcttgaatgatatctgttatataagcaatgtataaataaagtaaaaaggatagaatgaaaaacccattctaatgtcaccactcagagataagtaccgtatttctgtgtatccttctataaactctttacttctgtgtcctttattttttaactttaataatgctactaaaagacaatacctaaaagtaactgtactaacaaagtgctaacaatgtgaaaatatatagtcccatagtcatgtccccatatttatactcccacagaagaaaaaatttgg

SEQ ID NO: 256926 - DNA, 1083 bp, Homo Sapiens
  misc_feature (17)..(17): n is a, c, g, or t
  misc_feature (23)..(23): n is a, c, g, or t
  misc_feature (403)..(434): n is a, c, g, or t
  misc_feature (443)..(704): n is a, c, g, or t
  misc_feature (988)..(1008): n is a, c, g, or t
tttggccctgcgcggcncagtanttcggcacgagtattaccaaatgttttaatcgttaattactttgcgttccaccaaaatatctttactaaaatgtgcttggtgtagtttgtttattgtctaaattagtaccagtcatcttatttctgcaaaatgagtatcaatgtgaaaaagacacgtgaagattaagcatgtttgaaaataaaatggtcaattacatttcaatttacataggccaacaactgttccatactttgtttgtaaacatttaatttctctactggacaaaattaatatttggctttacattgaattttgagctgtgaagaataaattatgtatcattttagcatattaaacagtagtaagtctagcacatagtctcagccacttaaaacaaaannnnnnnnnnnnnnnnnnnnnnnnnnnnnnnngagatggannnnnnnnnnnnnnnnnnnnnnnnnnnnnnnnnnnnnnnnnnnnnnnnnnnnnnnnnnnnnnnnnnnnnnnnnnnnnnnnnnnnnnnnnnnnnnnnnnnnnnnnnnnnnnnnnnnnnnnnnnnnnnnnnnnnnnnnnnnnnnnnnnnnnnnnnnnnnnnnnnnnnnnnnnnnnnnnnnnnnnnnnnnnnnnnnnnnnnnnnnnnnnnnnnnnnnnnnnnnnnnnnnnnnnnnnnnnnnnnnnnnnnnnnnnnnnnnnnnnnntgcacccggccaaaagttgatttttaattacataaaaatcgtaaaaacttctagtaaaaacctgattgggtgaatacagttatatttaaaaaccttaaggtgacaagcattttctatgccctaaatcttcattggtttgcccggaaagagtctctgttaaaagattttccatattcaaagtaaaaggaaagatttcttgctttctaattgtcttttggacacatgcctattttctttgaggtataaacctttagatgtgaaaaatgtaatttcattctgctatnnnnnnnnnnnnnnnnnnnnnaattgaaaaaactgggaaatcctgctttgttggtaataaatcaatatttttatattcttttggtgtatgttaaaa

SEQ ID NO: 256927 - DNA, 691 bp, Homo Sapiens
gaaacatgggaagtaaaagattaggatgtgaaaggttgtcctaaacagaccaaggagactgttccctaatttattctcttggctggttctctcattgaattatcagaccccaagaggagatattggaacaggctcccttcatgccaagggtctttctaagttaatactgtgagcattgagcccccattaaaactcttttttacttcagaaagaattttacaggttaaagggaaagaaatggtgggaaactctccccgtaatgcttagccaactttaaagtgtacccttcaatatccccattggcaactgcagctgagatcttagagaggaaatataaccggtgtgagatctagcaatgcattttgaatcttcactccctaccaggctcttcctatttttaatctcttcacctcagaactagacatatggagagctttaaaggcaagctggaaggcacattgtatcaattctaccttgtgctatacgtaggagagatccaaaatttggatgcttctggagactcttagacatcttttcattgttgtccatttttaaagttgatgattgctggaaacattcacacgcttaaaagcaatggtgtgagttattaatgggtaaactaagaagtgttataggcaatgacttgaaatggtttttaaattgtatggattgttaagaattgttgaaaata

SEQ ID NO: 256928 - DNA, 1090 bp, Homo Sapiens
  misc_feature (218)..(218): n is a, c, g, or t
  misc_feature (222)..(222): n is a, c, g, or t
  misc_feature (227)..(227): n is a, c, g, or t
  misc_feature (281)..(281): n is a, c, g, or t
  misc_feature (340)..(340): n is a, c, g, or t
  misc_feature (405)..(405): n is a, c, g, or t
caagtttcatccactttatgcccagatctcagggcagaaaattcagccagacccagagcaaacaaggtgaccagagtgatggctgagcaagaaagtcccagcagcacactgcaagaccagagtacattcaagaggggagagggcacgtggcaagctggagtcccgagtcagagtctagggcagcactgggtctgaaggacacagcccggcctgctggntgancagtntgggtctgatgactcacatgatgtggccccaactggttgtaatcctaatgtganaggatggtgggttcctgccctgttgtggcccctgttcctaaactgaggcccaggttccnatctcagtgctgcagtcctgaggagcaccaacgttgggcccgccagccaaggccacagttcctcnagccctctgggttccacgagaaggccccagggagtcaccgtcactgagagggaaggggccaagggaagggaggctgcattctactgggagagactcggggagggactaccatgggcttggaaggagctacagccccaaatattgcagagccaaaaggaatgggatacatgtctaaaaagtgacaacagtcttgtccctattttaaaaacagaatattgttgctgttgcctggtttcatttttttccttttaaaaccactcatatttaaaaggtgaagggctgggagatgtagtccccttcactctggtccttgataggcaccagggggcctcagtctcacgctggctcctgctctccttgcctgggctccagccacatgaagcaagggcagagagggttgcaactgctctgccttcccaacagcgattccctctccccataaaaccagggcacacgtgaggagaagtccaaagagtaaagtgcacagaactccccggagcaggtggcctgggggcgggtcactccgagaaggaaggggtctggggggcgtcagcccagagctacagctgtggagcaaacactgatccctgtgatgggactgtccgctctcagcagctctccaaggaaagtctcggtcccaaagatatcgcccatgctggaggaaacttggatgaccttcgctggc

SEQ ID NO: 256929 - DNA, 1147 bp, Homo Sapiens
  misc_feature (265)..(265): n is a, c, g, or t
tacagcaggctccctcaaacgctccagccccaggaccatctcctttcggatgaaacccaagaaagaaaactcggaaacaaccctaactcgcagtgccagcatgaagctcccagacaacacagtgaagttgggagagaagctggagagataccacacggccatacggagatcagaatctgtcaagtctcggggtctgccttgcactgagttattcgtggctcctgtgggtgtagccagcaagcgccacctctttgagaaggaactnggcgggccaaagccgagcagaaccagcctccagccggaaggagaacttgaggctctcaggggttgtgacatcaaggctcaacctgtggatcagcaggacccaggaatctggagatcaggacccccaggaggcacagaaagcatcatctgcaaccgagaggactcagtggggacagaaatctgactcctcgctggacgctgaggtgtgacaagccccgccaagacagacctgcaagtcttcgtctcaagggacctccctcatgccaggcccctgcctctcacagcagcaccctttcctctcattgtccctgttccctttttgcctgtggatctgtttggccatggtccctggggtcaggaatatatgcaagactcagacagctccttcccagaccagcctcttggggctgggactttctcaccctgcggcaggcacaacagatgctgggacccagtctctgcccaggtcacagcacatgtgcacattagcactatggggcctatggcctgtccagagacctctgctccttgctgctcacattcacagtcagggcacggcgcccctcaagaacttcagagtcacctggctcatcggctcccagcaagcgcctctttgactatgatgtcccccttctctgaggcctggacccacccatctttgtccctggggcctgatcccagccactgaggcccgctctggccaggggagaaggagctgccgtgcgtcttccctgtgccccgtctacctgcttggttctcccctcccttccctggccggctgccatggccaggagctaagtgcctttttgtgtgcaaccacttaccctttctctgaaaaacctgttctcaggaaggatctgataaactcatttactcttaaaaa

SEQ ID NO: 256930 - DNA, 509 bp, Homo Sapiens
tgaaggacaaactcttggtgacaagtctcagaaatgtgacatgtctctgtagcagccataaagctttggtttaggattaattttgattctctggaatatcagcctcccagaatggcaaatcttgaacctcatctagtccagcccaaccttccctttttacatataagaaaactccagggttgagggcaacatatcttgcctaagtcccaggtctagacccaagccctgcctctcacaatctttccccatttctgctgcctctttgttgcctctggaggatgaagagggctttttcgcttgccctcaaatgctcatttctgaggtaccccccccagaaaaaggtcaggtagcaacacagcagcaatagtatccacactaatctaaaagcatatttaaatatgaattactgtggtaggaaacgaaagacaactgtgtgatccaaccactgccccctaaccaaagttgcatttttttcttctggaaagtcaaaacaccaagtgcaggttcta

SEQ ID NO: 256931 - DNA, 486 bp, Homo Sapiens
gaatccaaattaatcctaaaccaaagctttatggctgctacagagacatgtcacatttctgagacttgtcaccaagagtttgtccctcagactttggcgctgttgaatgcaaagacaaggatggccaccttctggttcttgcctgttgtcctcagctgagagcagtctcggtaaaggtggcaaagattctgtgacctcagaccggggaccaaatgcttgggagtctgatggccgggctgggccaccattctcatagctctcattctgtttggagcaaccaaaggatttgtgtgaagttatttggaaaaggaccttaactgagcagtaatcttttttctgtatatttggaatgtttttcattctgacctgttctgtcagtgattctactgaaaaacaatttaatcaatataaaaatgttcaagctatgcaacactgttattgtctgttgacatttttattctaattgatttctgcaaatctttaaaa

SEQ ID NO: 256932 - DNA, 632 bp, Homo Sapiens
gtgaggaggaggtgcaggttagagtccagacccagctcaagataacccacctccaaacagagggcaggagtcagggcttcacggaaacagacaggaatagctcattcatcccaaggcaagcaactgtgcccagggcacaaaaggaaggggactgagccaaggctcgaaaaggccacagccggacagcgccacagggagtggttgagccaaccagactgcatgtctataggaccagacccctattccacatggctcctggctgcaaggtataggcctgctcgtcagccaccagggaggtgagggggcagccctggccagtcagcttgttatcagttgcccatttcatggagtatctaggaccttacccagcgaggccacaagtgcgaagttgtctagcatcacgcggcggtacagggccctctgggctgtgtccaggagcccccactcctcctgggagaagtacacagccacatcctcaaaggccatctggtcctaaaagagcagggaggaagagacagccatggtctaaggctgggttatccaatcttttggcttccctgggccacactggaagaagaattgtcttgggcaacacataaaatacagtaacactaataacagctgatgagctt

SEQ ID NO: 256933 - DNA, 440 bp, Homo Sapiens
gcacgaggctagatggtagagggttctaattatatctgagaagtttacactccattttatccttgggaacatgggagaattccaagcagagaagtaaaacaaggaggttttgaggaaaaatagaatggaggcatagagaccactgaggaggctactaaaatctgacctgggaaataatgagggcctggctagtgttgtgggaaagaaatagaagaaacgagacattttgaattagtaactgatggtactcagtgactaggtgggtaaaagaggaggagagggggaacgtggttgtttagtgttgccagagtctaaggcaaaggtataactaggtctgatgtcaaagtctagactccagtcttttggcttccctgagccacattagaagaagaattgtcttgggccacacataaaatacactaacactaacaatagctgat

SEQ ID NO: 256934 - DNA, 1026 bp, Homo Sapiens
  misc_feature (614)..(670): n is a, c, g, or t
gggcaaggctggtacggccggaattccgggatatcgtcgacccacgcgtcggaagactacagttttacagcttatgctaccatttcgtatttgaaaataggacctaaagctaatcttctgaacaatgaggcacatgctattactatgcaagtgacaaagtccacgcagaactctttcagggctgaatcgtctcaaacttgtcattctgaacaaggtgataaaaagatggaggaaaaaaattcaggcaacttccagaagaaggctgcaaacatgcttcagcaatctggttctaagaatacaggagctaagaaaagaaaaatcgatgatgcctgatatgaatgttactaaattttctaattaaagatggtttatgcatgtatatgccattatttttgtagttagacaatagtttttaaaagaatttcatagatattttatatgtatggatctatattttcagagcttatctctgaagatctaaacttttgagaatgtttgaaaattagagatcatgaattatataattttccaagtataaaacaagggaaaaatttttatgtaaaaccctttaaatgtaaaatatttgagaataagttcatacaatcgtcttaagnnnnnnnnnnnnnnnnnnnnnnnnnnnnnnnnnnnnnnnnnnnnnnnnnnnnnnnnngaaagcatattatactgacagaggctcatgagtgatactttaaattcaataggttgaatcagggtggcccactctttgggttcccttagccacatggaggaagaaatggctgcggggcccttaaattgcttaacctgaggatgctgggaggcttaaagaaaatgggcgcaaaccccggttttgaacgttcccaaaggtgacttgcgaaactgccaagcatagtagcaacaatatacgacattgtgagacacactagagacacaccgaggcggcggggtaaataacaacagcatgtgcctaacatgccccgaccgcggaacaatataataccgacgactagcccacgtgagtgcact

SEQ ID NO: 256935 - DNA, 373 bp, Homo Sapiens
cagcaaactacagcggtgtttgtctcctcacccaaacctgcggttgtgaaacttataaaggaatttaccagacagccaggggtatctcagagtgccaagctccagggcccaccggagaccgggccagactcaccccagagcgccaggggactggtggtgtacagatacactcgggttcaaacagtttaaacaaggggccggtgatttggtctagactctagagctgtgttcaggtttcgctgggaccgtgaatgccagtaatgctctgtacgaatgcccagaacacggatgagtgtcagccttcagcaggaatgcgcttgagcttctgtgtacctgttaattgcccagggaaatacaattgtcatggaattct

SEQ ID NO: 256936 - DNA, 1215 bp, Homo Sapiens
gcctgggtggcgcgaggccgactacctgagctcgcacctgaccgagggcccacaccgcgtcgtggcgcacctgtacgcgcggcagctgacgctggagcagctgcacgccgtggagatcagcgcggtgcactcgcgcgaccacggcctggaggtgctgggcctcgtgcgggtcccgctgtacacccagaaggacacgagtcggaggcttccccaacttcctgagcaacgccttcgtgagcacggctaagagccagctcctctttgccctcaaggtgctcaacatgatgcccgaggagaagctggttgaggccctggctgcagccaccgagaagcagaagaaggccctggagaagttgctaccggcctcctcttgagggctgcctgagctggtggcaccctcccctgggccgcaagactgggaattcctgctaagtgtggcttctagagtgtttgcgtgtaccccgcttctgactgcctaaggcgagtgggcatcctgtcatcatctccactgtcccaagcagtcactacgtggcggacgggccagctggaacccagcccatcccctcaggcagagccaggtggttcaggataccctgagcctgcctctcgcagccctcaggatgcgctcggtttattcccggcaccatacgccttcgtcttttgtagttttgctgctcggccgcaacctcgtctctcgcatgggctgaatcgctccatcagacgcgtgctccctacggcctctcacacctcgggtctgctaagtgaagctctacgccaagcacggcgcgtctggggtcttttgccccgcacctctcttcgctcgcccccctacaaggctggtcccggctcacaccacggaacactaactcttagcgctgtcctcgacataccactcacccccagatagcgacgcccgcgaccgttcgaaccagacttataaccactaccactcataagacaccaaaacctacgaccaggttaccaataccatgctctacccctccgattcttccaacccacgtaccatatccccgtccactactatccataccgtccgcctatgttgacctcatcctcgtttcatacgttcttgctgattccacatgaacacaatgtgtcggcatctctcataggcttcctcacgacgccgcgatgcatttgcgacaccgtgttagccagcgtcctatatctcgcatagtacatcctcagcttctt

SEQ ID NO: 256937 - DNA, 429 bp, Homo Sapiens
ctgagtcccaggctgagcctcagactctctctcttgtggcctatgcagaggtgcacaacacacagatttgagctcagccctgtggggcacagagggagggatggggctgtggggatagtgaggcatcgcaatgtaagactcgggattagtacacacttggtgattaatggaaatgtgttacagatccccaagactggcaagggaatttcttcaactccctgccccccagacctccttatcaaaggacaccattttggcaagctctatcaccaaggagccaaacatcctacaagacacagtgaccatactaattataccccctgcaaagcccagcttgaaaccttcactaaggaacgtaatcgtgtcccctatcctacatccccttcctaattccacagctgctcaataaagtacaagagcttaacagtg

SEQ ID NO: 256938 - DNA, 734 bp, Homo Sapiens
gaagggctcagtgacaattaaagatggctgcgcccatgtaacatcactagcgaccggtgacctctttttcccccttgcctggctcctgtggtggcaggctgggcacgaggaccatgctgggccggagcctccgagaagtttctgcggcactgaaacaaggccaaattacaccaacagagctctgtcaaaaatgtctctctcttatcaagaagaccaagtttctaaatgcctacattactgtgtcagaagaggtggccttaaaacaagctgaagaatcagaaaagagatataagaatggacagtcacttggggatttagatggaattcctattgcagtaaaagacaatttcagcacttctggcattgagacaacatgtgcatcaaatatgctgaaaggttatataccaccttataatgctacagtagttcaaaagttgttggatcagggagctctactaatgggaaaaacaaatttagatgagtttgctatgggatctgggagcacagatggtgtatttggaccagttaaaaacccctggagttattcaaaacaatatagagaaaagaggaagcagaatccccacagcgagaatgaagattcagactggctgataactgggagaagctcaggtggggagtgcagctgcctgtatcgggcgtttcacatggctacgcgggcctttagggatcaggattacggggagggatcggaccagaaaaatcctggcctgccc

SEQ ID NO: 256939 - DNA, 787 bp, Homo Sapiens
  misc_feature (759)..(759): n is a, c, g, or t
ggggttgaagggctcagtggcaattaaagatggctgcgcccatgtaacatcactagcgaccggtaacctctttttcccccttgcctggctcctgtggtggcaggctgggcacgaggaccatgctgggccggagcctccgagaactaagctaccctctgtacagaatctgccctcagccatccttcacccatgctgggcctcaactccccctggacaggatggtttacctaacttactgccgttgtttgtacagcctgactttgaaaccaaaagttggctaaggagaagaatgtcatgtcctccacctgtcctcaagctgatcagtgcatcacccttcatacactacactaagtgtagaggtttctgcggcactgaaacaaggccaaattacaccaacagagctctgtcaaaaatgtctctctcttatcaagaagaccaagtttctaaatgcctacattactgtgtcagaagagagggccttaaaacaagctgaagaatcagaaaagagatataagaatggacagtcactcggggatttagatggaattcctattgcagtaaaagacaatttcagcacttctggcattgagacaacatgtgcatccaatatgctgaaaggttatataccaccttataatgctacagtagttcagaaagttgttggatcagggaagctctactaatgggaaaaaacaaatttagatgagtttgcctatggggatcctgggaagcacaagatgggtgtaattttgggaccantttaaaaaacccctgggagtttattcca

SEQ ID NO: 256940 - DNA, 1754 bp, Homo Sapiens
gtaaacaaggccgtggactgcaggaggcggggcagacgggctgcaagagggagccggcccgacgcggaccgcttccctgcagtgccccgagtcccgggcccgcgccgccgccgcccggctccgctcgcggcccctctgtctgcaggcgtgccccggcggcggcggagagccgtcctcggccgaggaggctgggaaacgcgagcgcaggcggcagagaggcctcaacgccgtccctttcgccaccgccttttccttgcctcgcgccgctgtgcatttctctccttttcctttgtttttttggcccctcgcgggtgtgggcattgttggttagcaaaagtgcagcctcaagatggctgatggcaacgaggatctgcgggctgacgacttgcctgggccagccttcgagagctatgagtccatggagcttgcctgccccgctgagcgcagccgccacgtagccgtcagcgacgggcgccacatgttcgtctggggcggctacaagagtaatcaactcagaggattatatgacttttatctgcctagagaagaactatggatctacaacatggagactggaagatggaaaaaaatcaacactgaaggtgatgttcctccttctatgtcaggaagctgtgctgtgtgtgtagacagggtgctgtacttgtttggaggacaccattcaagaggcaataccaataagttctacatgctggattcaaggtctacagacagagtgttacagtgggaaagaattgattgccaaggaattcctccatcatcaaaggacaaacttggtgtctgggtatataaaaacaagttaatattttttggagggtatggatatttgcctgaagataaagtattgggaacttttgaattcgatgaaacatctttttggaattcaagtcatccaagaggatggaatgatcatgtacatattttagatactgaaacatttacctggagccagcctataactactggtaaagcaccttcacctcgtgctgcccatgcctgtgcaactgtcggaaatagaggcttcgtgtttggaggcagatatcgagatgctagaatgaatgatcttcactatcttaatctggatacatgggagtggaatgaattaattccacaaggcatatgcccagttggtcgatcttggcactcactaacaccagtttcttcagatcatctttttctctttggaggatttaccactgataaacagccactaagtgatgcctggacttactgcatcagtaaaaatgaatggatacaatttaatcatccatataccgaaaaaccaaggttatggcacacagcttgtgccagcgatgaaggagaagtaattgtttttggtggatgtgccaacaacttgcttgtccatcacagagctgcacacagtaatgaaatactaatattttcagttcaaccaaaatctcttgtacggctaagcttagaagcagtcatttgctttaaagaaatgttagccaactcatggaactgccttccaaaacacttacttcacagtgttaatcagaggtttggtagtaacaacacttctggatcttaaggcttcataaataatgcctatgatcaccttgcatggacagcaatcctgtaaacatcacagagtggcatcatttgtataattatatgcattgttgtagtttgcacctgttggttttaatgtgcatgtgaatggcctagagaacctatttttgtgtctaaagtttacaataaatgtatttaacacc

SEQ ID NO: 256941 - DNA, 397 bp, Homo Sapiens
  misc_feature (40)..(40): n is a, c, g, or t
ccagtgggtaaaaccccccccaaagaaaaaaaagatggancctgaaagaaaactggtgttaagtgaagtgcccaagatcgacccaacggggcataagcccttgtggaattaattcattcccactccccatgtatcccagattaagatagtgaagatcattcattctagcatctcgatatctgcctccaaacacgaagcctctatttccgacagttgcacaggcatgggcagcacgaggtgaaggtgctttaccagtagttataggctggctccaggtaaatgtttcagtatctaaaatatgtacatgatcattccatcctcttggatgacttgaattccaaaaagatgtttcatcgaattcaaaagttcccaatactttatcttcaggcaaatatcc

SEQ ID NO: 256942 - DNA, 617 bp, Homo Sapiens
  misc_feature (56)..(64): n is a, c, g, or t
  misc_feature (467)..(521): n is a, c, g, or t
gcacttatttgtagaactacctaatgttttatagtaaagttctttgaactacgctnnnnnnnnntggtactactcaccatttctcctattttccattaaaagaaaactgtccagactcgtttggtcaaagtagagattgtgtaaaaataccaaaaaacattctttacgttgcaaggtattattctcaatactagtttttcaaaaatgcataatgccttcgtgttgaaatcctaagaaaacgagccattgctcttgaaatatcgctaacaatataattgcataatcgcgcccgcctttatgtaagctgcaatggacagcgcgcgtgtgtgtaacagccccaagacgccaatgcaaaaaaaggaataaagaaaggcaggcgacagggaaagagagcgtgagctgggaaggacaggaagggacacagggaggggaggaaagggagtggggcgcaaggcaggaaagggaannnnnnnnnnnnnnnnnnnnnnnnnnnnnnnnnnnnnnnnnnnnnnnnnnnnnnngggagatcctagctggcggagaccgacggatggggccgccctaacctcaatgaggctcacgggtgagtcactgggaacattcctcgccgctcgcac

SEQ ID NO: 256943 - DNA, 2311 bp, Homo Sapiens
  misc_feature (5)..(5): n is a, c, g, or t
  misc_feature (27)..(27): n is a, c, g, or t
  misc_feature (30)..(30): n is a, c, g, or t
  misc_feature (41)..(41): n is a, c, g, or t
  misc_feature (60)..(60): n is a, c, g, or t
  misc_feature (62)..(63): n is a, c, g, or t
  misc_feature (65)..(65): n is a, c, g, or t
  misc_feature (67)..(67): n is a, c, g, or t
  misc_feature (103)..(105): n is a, c, g, or t
  misc_feature (114)..(114): n is a, c, g, or t
  misc_feature (124)..(124): n is a, c, g, or t
  misc_feature (150)..(150): n is a, c, g, or t
  misc_feature (159)..(159): n is a, c, g, or t
  misc_feature (161)..(162): n is a, c, g, or t
  misc_feature (183)..(183): n is a, c, g, or t
  misc_feature (188)..(188): n is a, c, g, or t
  misc_feature (192)..(192): n is a, c, g, or t
  misc_feature (196)..(196): n is a, c, g, or t
  misc_feature (205)..(205): n is a, c, g, or t
  misc_feature (207)..(207): n is a, c, g, or t
  misc_feature (224)..(224): n is a, c, g, or t
  misc_feature (228)..(228): n is a, c, g, or t
  misc_feature (247)..(247): n is a, c, g, or t
  misc_feature (268)..(268): n is a, c, g, or t
  misc_feature (275)..(275): n is a, c, g, or t
  misc_feature (291)..(291): n is a, c, g, or t
  misc_feature (294)..(294): n is a, c, g, or t
  misc_feature (308)..(371): n is a, c, g, or t
  misc_feature (393)..(393): n is a, c, g, or t
  misc_feature (434)..(434): n is a, c, g, or t
  misc_feature (442)..(442): n is a, c, g, or t
  misc_feature (980)..(993): n is a, c, g, or t
gagangggcatcgcgccgcccggcgcngcngcccccctgcntcgcggcgcggggtctcgnannancngctcccgccctccgctcgcctggcccggaccggaannngcgccgcanggcctgggcntggcgcggggggagggcaccggggcncggtcgganannggcaaaaaacacaaaaagcanaaatngganaaanacctctacnangagtatgtaaaaaagcncttnaagctggtcctcaaaatangagggaacgaagtcaccgaantctccangggcagctcggggcangantccagcctcttcgnnnnnnnnnnnnnnnnnnnnnnnnnnnnnnnnnnnnnnnnnnnnnnnnnnnnnnnnnnnnnnnngcaaattccaggggaagaaaangggagaaaacggagaaaagttaaggaggataaaaaaaagcnaaatcganaccgggtggagaatgaggcagaaaaaaatctccagtgtcacgcccctgtgagatatagacttgcctcctgagaagcctctcacaagctctttagccaaacaagaagaagtagaacagacaccccttcaagaagctttgaatcaactgatgagacaattgcagagaaaagatccaagtgctttcttttcatttcctgtgactgattttattgctcctggctactccatgatcattaaacacccaatggattttagtaccatgaaagaaaagatcaagaacaatgactatcagtccatagaagaactaaaggataacttcaaactaatgtgtactaatgccatgatttacaataaaccagagaccatttattataaagctgcaaagaagctgttgcactcaggaatgaaaattcttagccaggaaagaattcagagctctgaagcagagcatagacttcataggctgacttgcagaaaactcgaaagcagaaagatggaacagacacctcacagagtggggaggacggaggctgctggcnnnnnnnnnnnnnngactctggagatgccgaagcacacgccttcaagagtcccagcaaaagaaaataaaaacaaagacacaagatatgcttgaaaataagtttaaaagcaataatttagagagagagcaggagcagcttgaccgcatcgtgaaggaatctggaggaaagctgaccaggcggcttgtgaacagtcagtgcgaatttgaaagaagaaaaccagatggaacaacgacgttgggacttctccatcctgtggatcccattgtaggagagccaggctactgccctgtgagactggggaatgacaactggaagacttcagtctggagtgaatactttgcaggggttcaaagaggataaaaggaacaaagtcactccagtgttatatttgaattatgggccctacagttcttatgcaccgcattatgactccacatttgcaaatatcagcaaggatgattctgatttaatctattcaacctatggggaagactctgatcttccaagtgatttcagcatccatgagtttttggccacgtgccaagattatccgtatgtcatggcagatagtttactggatgttttaacaaaaggagggcattccaggaccctacaagagatggagatgtcattgcctgaagatgaaggccatactaggacacttgacacagcaaaagaaatggagattacagaagtagagccaccagggcgtttggactccagtactcaagacaggctcatagcgctgaaagcagtaacaaattttggcgttccagttgaagtttttgactctgaagaagctgaaatattccagaagaaacttgatgagaccaccagattgctcagggaactccaggaagcccagaatgaacgtttgagcaccagaccccctccgaacatgatctgtctcttgggtccctcatacagagaaatgcatcttgctgaacaagtgaccaataatcttaaagaacttgcacagcaagtaactccaggtgatatcgtaagcacgtatggagttcgaaaagcaatggggatttccattccttcccccgtcatggaaaacaactttgtggatttgacagaagacactgaagaacctaaaaagacggatgttgctgagtgtggacctggtggaagttgaggctgcctggtatttgattatatattatgtacatactttttcattcttaacttagaaatgcttttcagaagatattaaatatttgtaaattgtgtttttaattaaactttggaacagcgaattttggatgttcccagaggttggacttgtattagggtaataaagctggacctggggactcgtgagtcca

SEQ ID NO: 256944 - DNA, 936 bp, Homo Sapiens
  misc_feature (155)..(155): n is a, c, g, or t
  misc_feature (341)..(403): n is a, c, g, or t
gagaggggcatagcgccgcccggcgcgcgccgcccccctgcctcgcggcgcggggtctcgcgggccccgctcccgccctccgctcgcctggcccggaccggaagcggcgccgcacagcctgggcctggcgcggggggcggacaccgaagcacggncggacatggacaagaagcacaagaagcacaagtcggacaaacacctctacgaggagtatgtagagaaaaccttgaagctggtcctcaaagtaggagggaacaaagtcaccgaactctacacagacaactaagagcacgactccagcctcttcgaagacaaaaacgatcatgacaaacacaaggacnnnnnnnnnnnnnnnnnnnnnnnnnnnnnnnnnnnnnnnnnnnnnnnnnnnnnnnnnnnnnnncggagaagagttaaggaggataaaaagaagcgagatcgagaccgggtggagaatgaggcagaaaaagatctccagtgtcacgcccctgtgagattagacttgcctcctgagaagcctctcacaagctctttagccaaacaagaagaagtagaacagacaccccttcaagaagctttgaatcaactgatgagacaattgcagagaaaagatccaagtgctttcttttcatttcctgtgactgattttattgctcctggctactccatgatcattaaacacccaatggattttagtacccatgaaagaaaagatccagaaccatgactatccgtccataaaaggaactaaaggataacttcaaactaatgtgtactaatgccatgatttaccataaacccagagaccctttattataaaggctggaaaaaaagttggtggccctccggaaatggaaattttttaaccccggaaaagaatttccaaggcctggaaacccaaagccttaaactttcctgggggtgggactttggccg

SEQ ID NO: 256945 - DNA, 612 bp, Homo Sapiens
  misc_feature (442)..(442): n is a, c, g, or t
  misc_feature (547)..(547): n is a, c, g, or t
  misc_feature (554)..(554): n is a, c, g, or t
  misc_feature (575)..(575): n is a, c, g, or t
  misc_feature (582)..(582): n is a, c, g, or t
gtacgctgcagtgtccagaggatagagacaagaccacgttctaaaaaacggaagaaaatcagaagacaatttccagtttatgtactaccaaaagtagagtatcaagcttgttatggagttgaagctctgactgaaagtgaactttgtcgcttatggactgaaagtttattgcattccaacagctcattttatgttgggcatatcgatgcatttacttcaaaactttttctactggaagaaattacctcagaagaattaaaagaaaagctttcagcactcaagatttccaatttatttaacatcctccaacacattctaaagaaactaaagtagcttgcaggagggttcctacttgttatctcatgcagcagaagattcttcactcctgatttataaggcctctgatggaaaagttactaggacagcatacaatttgtataanaacacattgcggccttcctgggtgtaccttccagtctctcagttcccggggtcccattaggatcccagcctggttattaccatatgcatattccattcatggganggattanctttgttactttttccaccgnaaatcantgggattaccacaacacaatcaaaagggtt

SEQ ID NO: 256946 - DNA, 1137 bp, Homo Sapiens
  misc_feature (682)..(940): n is a, c, g, or t
  misc_feature (944)..(1007): n is a, c, g, or t
  misc_feature (1063)..(1074): n is a, c, g, or t
tttcactgagtggctggtgcctgcacactgagttttgcaggcttactctcacagagtgagcttcctgcaggccccccactgcaacccctttccttcctggagctgtgtgctgactggtgcgtgagcaccccaggccctctccccatgctgctgatggtcagctttctctgcacgctcgtggttgccacagtcaacgctgatagcccagacggtcactggaagtggttgggctgattattggcatcatctccattgtcctactcggttcttaaaggcatatggacttgcctcactcctacagcaaatgacggcatgggcaaagaggggcaacagacccaccctgaagacactcctcatctggttgacttggcagggttaagggaaaaagatgtgatgactaggagctgagagcttagtggttctgccagagctgcagagtctttgttggcctcagggtgggacctctcacatctctgtcagcttttcacagacaccaacctgttatgattcatttcacctgtcctgagcactagcaagaaaaattcgctgtagcttgtgatgtattattctggatttctcaactcattcatttgttcattcattcactataccattactgtctattataaggggggcacaatggtaggtgctgggaataaaaacgatgtttaacgtttcaaannnnnnnnnnnnnnnnnnnnnnnnnnnnnnnnnnnnnnnnnnnnnnnnnnnnnnnnnnnnnnnnnnnnnnnnnnnnnnnnnnnnnnnnnnnnnnnnnnnnnnnnnnnnnnnnnnnnnnnnnnnnnnnnnnnnnnnnnnnnnnnnnnnnnnnnnnnnnnnnnnnnnnnnnnnnnnnnnnnnnnnnnnnnnnnnnnnnnnnnnnnnnnnnnnnnnnnnnnnnnnnnnnnnnnnnnnnnnnnnnnnnnnnnnnnnnnnnnnnaatnnnnnnnnnnnnnnnnnnnnnnnnnnnnnnnnnnnnnnnnnnnnnnnnnnnnnnnnnnnnnnnncaccccctctctttcctatcaatttccatccccctttttcccgtttcctcgttttnnnnnnnnnnnnaatccaaagctttccgtcggcacacaagccgcgtgcttctcacccccagctcgggggtgcccc

SEQ ID NO: 256947 - DNA, 301 bp, Homo Sapiens
tttttttaaagagactatcctaggcttggtacaagatggcgcctgtggtaaatctgtgttaacatggtggtagacccatggagaatgggtagatggagcttctagactccaaaacaacaaaacccacagtgtgagtacactgtcccattaggttgactgaagtctgagtacattttctggcctgcgtgccgtgacttatccaacctgtgaactgattgtgatctgcttggtaacttggtttggtgtaaactgctcttaaccctttgctgatgaagaaaataatcatataagtggaactaaa

SEQ ID NO: 256948 - DNA, 570 bp, Homo Sapiens
gtcaccaaaacccttttcttcagtatcgacaaagattacattctgagtaccaaccaaaccctaaattgaaagacaaaactatggtttcagtcaacatattcatgaattagggagctaatgggttaagcttccagttcccgctatgctactggatttgtataaatactgatattctccaaacctagtggtgtagggagcaagagaatgcagctggaaggcacaaggggaggacattgtggcattcagaaactgcaggagacaagatgaatttgagaagccaaatggaatttttaatggaaaccatttatcagattaatctcttgctctcctgcattttagaggacaccaattaatttcctggtctttagtatataataacctaaaataccattgtaacctcagtcatgaaaaatacatcactctgtctttttagctcaaatgtattttcctaattgcccacttgagaacagacatttgacaagttatatcaacgactgtgcttgtccattattttacacatgccctagaatgcaaaactgaaagccactggatcctggtctagctgaatct

SEQ ID NO: 256949 - DNA, 879 bp, Homo Sapiens
  misc_feature (48)..(82): n is a, c, g, or t
aagtagctaaggaactttacatcctaacagtataatccagctcagtannnnnnnnnnnnnnnnnnnnnnnnnnnnnnnnnnnacccagaaataagataactccatctcgccccttccctttcatctgaaagaagatacctccctcccagtccacctcatttagaaaaccaaagtgtgggtagaaaccccaaatgtccaaaagcccttttctggtgggtgacccagtgcatccaacagaaacagccgctgcccgaacctctgtgtgaagctttacgcgcacacggacaaaatgcccaaactggatgccctcgcaaaaacacgggcttgtggcattggcatacttgcctttacaggtggagtatcttcgtcacacatctaaatgagaaatcagtgacaacaagtctttgaaatggtgctatggatttaccattccttattatcactaatcatctaaacaactcactggaaatccaattaacaattttacaacataagatagaatggagacctgaataattctgtgtaatataaatggtttataactgcttttgtacctagctaggctgctattattactataatgagtaaatcataaagccttcatcactcccacatttttcttacggtcggagcatcagaacaagcgtctagactccttgggaccgtgagttcctagagcttggctgggtctaggctgttctgtgcctccaaggactgtctggcaatgacttgtattggccaccaactgtagatgtatatatggtgcccttctgatgctaagactccagaccttttgtttttgctttgcattttctgattttataccaactgtgtggactaagatgcattaaaataaacatcagagtaactcaaaaaaaa

SEQ ID NO: 256950 - DNA, 467 bp, Homo Sapiens
  misc_feature (18)..(18): n is a, c, g, or t
  misc_feature (24)..(24): n is a, c, g, or t
aagaaaaaaagggggaanttgaanaaaggcctttaaggatttaccccataatagtaaaaaaatagccagccctagcctaggtaacaaaagccagttaataaacccatttaatattaacacagaattaattccaggtcccccattcctatccttatgttgtaaaaattgttaaattggatttcccagtgaagttgtttagatgattaagtgataataaggaatggtaaatccatagcaccatttcaaagacttgttgtcactgatttctcatttagatgtgtgacgaagatactccacctgtaagggcaagtatgccaatgccacaagccgtgtttttgcaagggctccagtttgggcattttgtccgtgtgcgcgtaaagcttcacacagaggttcgggcagcggctgtttctgttggatgcactgggtcacccaccagaaaagggcttttggacatttggggtttc

SEQ ID NO: 256951 - DNA, 1592 bp, Homo Sapiens
  misc_feature (254)..(254): n is a, c, g, or t
gcattttcactgaagcatttattatgcaaaataggaaggctttagcatgccagtataaattaaaacagtagaaaaaaagcagagcagagagcgttttccatccatggcctgtgccctgtaatgacgcagcagtatcctagtacattgacgggtttttcctgtcctgccactgtccgctgggcagttataggtcccatgtgttgcgtcttcctgcgaggccttcacaaagatgattttgtcattcgctgaaagtngaagtgaatcaacggcctcctcttgctccgcagcactttattcacactgtgtaaccacactgttttttatgccactttgtgcacagctcatcaaggtcagtctgttcatcttctggcccctgtagcacatggtacagttcaatggtgcggcacagaggcctgaggcagggaggctcccgctgccctcgcaggccctggctgaccctcccctgcccgcccaccttcccatgcccctgcagctccctggttgcacctggcctaggctcctttccatctgcccctctgcccggccctctcaccagggaggcacaacatggcccagtacagttaccttgaaaggaggtgaaggtgacaacagaagccaaatttacagcaggagtgaagccactcagacacagagtgatacagacattagggcatgtgctagcatctgcgctttctctggggactttacaaaacagactcaacaactcagctgtgagaggcagtgcgcccgcctcccagggagaacgaggaaccgccaggagacaggtctacctgcaccaccggcaaaccagagggcccaaggccagggccgtaagccctgggagtacactcccttaaagagtgcagggacaacagtctgtgtgtgaaggtttggagctaaatataaccaaagcatcctgtacataaaggggaatacttcagtggctgagaagagtgaaccgggttgtaaatgcttcatcctgtgtctcataatctgggcgtctgcaggtctggcctttgagtggtgaaatcccctggctgttagcgagggggcagggcctgcatgtgaagggcgtcgtaggtgtccttggtggctgtactgagaccctggtaaaggccatcgtgccccttgcccctccggcgctcgcctttcatcccaatctcactgtaggcctccgccatcttatctttctgcagttcattgtacaggccttcctgagggttcttccttctcggctttccccccatctcagggtcccggccacgtctcttgtccaaaacatcgtactcctctcttcgtcctagattgagctcgttatagagctggttctggccctgctggtacgcgggggcgtctgcgctcctgctgaacttcactctcaggaacaaggcagtgagaatgacaccatagatgaagaggattccatccagcaggtagcagagtttgggatccagcaggccaaagctctgtgcctctgtaatcggcaactgtgcctgcaggatggccgcggtgaaaagcgccttccacttcatcttgtcctttccctcagaaagaggctgggaggcagaggctgaggcagcggtggccgggac

SEQ ID NO: 256952 - DNA, 1009 bp, Homo Sapiens
gggtgccccccacccctggaagagcccagtctgttgagttagttaagttgggttaataccagcttaaaggcagtattttgtgtcctccaggagcttcttgtttccttgttagggttaacccttcatcttcctgtgtcctgaaacgctcctttgtgtgtgtgtcagctgaggctgggggagagccgtggtccctgaggatgggtcagagctaaactccttcctggcctgagagtcagctctctgccctgtgtacttcccgggccagggctgcccctaatctctgtaggaaccgtggtatgtctgccatgttgcccctttctcttttcccctttcctgtcccaccatacgagcacctccagcctgaacagaagctcttactctttcctatttcagtgttacctgtgtgcttggtctgtttgactttacgcccatctcaggacacttccgtagactgtttaggttcccctgtcaaatatcagttacccactcggtcccagttttgttgccccagaaagggatgttattatccttgggggctcccagggcaagggttaaggcctgaatcatgagcctgctggaagcccagcccctactgctgtgaaccctggggccctgactgctcagaaattgctgctgtccttgttgcggatggatggaaggttggatggatgggtggatggccgtggatggccggggatgcccattgccttgcataccccaacccaggggggagccgttttgttgagcatggacagcctggagcaaggaatatatggggggcctatttgggggggacaaaaatatttaccccttagggggttggaacctattccaagaaggaaatggcaccaaaaaccaccttaaaccaagggacctgaggcccccctctgggaattccgaaatctccaaaaatggggggcaaggggttgtggctttgaaagggccccggcctgaggcccccctggtcaagggcctttgggttccaataaaagccccggaggcacgttgg

SEQ ID NO: 256953 - DNA, 845 bp, Homo Sapiens
gtagcgaggcctgggtggcgaattcggcacgagggctgaggctgggggagagccgtggtccctgaggatgggtcagagctaaactccttcctggcctgagagtcagctctctgccctgtgtacttcccgggccagggctgcccctaatctctgtaggaaccgtggtatgtctgccatgttgcccctttctcttttcccctttcctgtcccaccatacgagcacctccagcctgaacagaagctcttactctttccgatttgcagtgttacctgtgtgcttggtctgtgttgactttacgcccatctcaggacacttcgcgtagactgtttaggttcccctgtcaaatatcagttacccactcggtcccagttttgttgccccagaaagggatgttattatccttgggggctcccagggcaagggttaaggcctgaatcatgagcctgctggaagcccagcccctactgctgtgaaccctggggcctgactgctcagaacttgctgctgtcttgttgcggatggatggaaggttggatggatgggtggatggccgtggatggccgtggatgcgcagtgccttgcatacccaaaccaggtgggagcgttttgttgagcatgacagcctgcagcaggaatatatgtgtgcctatttgtgtggacaaaaatatttacacttagggtttggagctattcaagaggaaatgtcacagaagcagctaaaccaaggactgagcaccctctggattctgaatctcaagatgggggcagggctgtgcttgaaggccctgctgagtcatctgttagggccttggttcaataaagcactgagcaagttgagaaacca

SEQ ID NO: 256954 - DNA, 479 bp, Homo Sapiens
  misc_feature (428)..(428): n is a, c, g, or t
  misc_feature (464)..(464): n is a, c, g, or t
agttagttaagttgggttaataccagcttaaaggcagtattttgtgtcctccaggagcttcttgtttccttgttagggttaacccttcatcttcctgtgtcctgaaacgctcctttgtgtgtgtgtcagctgaggctgggggagagccgtggtccctgaggatgggtcagagctaaactccttcctggcctgagagtcagctctctgccctgtgtacttcccgggccagggctgcccctaatctctgtaggaaccgtggtatgtctgccatgttgcccctttctcttttcccctttcctgtcccaccatacggagcacctccagcctgaaacagaagctcttaactcttttcctatttttcagtgttaacctgtgtggcttgggtctgtttttgaattttaaggcccatcttcaagggacaatttccnttagaattgttttaagggttcccctgttcaaaatantcagtttaacccatt

SEQ ID NO: 256955 - DNA, 785 bp, Homo Sapiens
  misc_feature (101)..(160): n is a, c, g, or t
gggaaggagggggctggagaagtagccacatggatacatttagggccagacagacacaggaatgctggaggagagagggatttagtgctgcattggccctnnnnnnnnnnnnnnnnnnnnnnnnnnnnnnnnnnnnnnnnnnnnnnnnnnnnnnnnnnnngcacgacgccgtcctttgcggtggccacgtacacagtgtgtatgaccacagccctcttcttcctcctcatcactttccgtggagctctcgccaaaggcccgaggtttctcataaatacagcagcatttggatgagcggcggcccatgtgttcattgtccacagtgtcacttgtccattctacctttttctctggcttccgtttccgaagtttgatggtaaggctccggttctcgggctcggttgtcacggtaaccgttgtctcagtgacggtctcgctcagcccagcccctgcctcggccatggctaaggctcaggacagggaggagaggaggaagggggatgagacacccttccctttttctgtcgctgaggtctaagagaagcggtatcggattcagagtggtagccaggatcctccaccttctttattccccctcctcctgggcctccgcttctccacccctggggataacctggctaaccccacttccggctcgccgcttccgggtgtgacgcatactgcagtccccctttttcccttccacggcaccaaatgcgtcaaagcgcaggcgtcgctggattagttccgccgtaacgtgacagcgcgcaggcgctgaaaaaaag

SEQ ID NO: 256956 - DNA, 1940 bp, Homo Sapiens
  misc_feature (1602)..(1627): n is a, c, g, or t
  misc_feature (1645)..(1755): n is a, c, g, or t
  misc_feature (1757)..(1757): n is a, c, g, or t
  misc_feature (1764)..(1765): n is a, c, g, or t
  misc_feature (1773)..(1776): n is a, c, g, or t
  misc_feature (1779)..(1805): n is a, c, g, or t
  misc_feature (1834)..(1849): n is a, c, g, or t
gggggggttagccaggttatccccaggggtggagaagcggaggcccaggaggagggggaataaagaaggtggaggatcctggctaccactctgaatccgataccgcttctcttagacctcagcgacagaaaaagggaagggtgtctcatcccccttcctcctctcctccctgtcctgagccttagccatggccgaggcaggggctgggctgagcgagaccgtcactgagacaacggttaccgtgacaaccgagcccgagaaccggagccttaccatcaaacttcggaaacggaagccagagaaaaaggtagaatggacaagtgacactgtggacaatgaacacatgggccgccgctcatccaaatgctgctgtatttatgagaaacctcgggcctttggcgagagctccacggaaagtgatgaggaggaagaagagggctgtggtcatacacactgtgtacgtggccaccgcaaaggacggcgtcgtgcaaccctaggaccgacccccaccacccctccccagcctcctgacccttcccagccccctccagggccaatgcagcactaaatccctctctcctccagcattcctgtgtctgtctggccctaaatgtatccatgtggctacttctccagccccctccttccctctcttctgcctgatagagggaagaggaagaggaggacgaacagagatcctgaaattctgacttgctgctattccagaacccagcctcctgggtttccccagtcctcatttttcctcccaatacccacccttctctctcgagggatctaggcaccttggtcccagtgtcttccttttgttctcactgccaaactgcctgtcctgggatctagttatcttggccctgcactctcaacatgagtagcgaacacttaaattgggttttcaacagtcccagctttcactgccagggtcccagtcagattccaggaatttgcgccctaactttgcttgctaatcctggtttagagctatcccactaaaatatttaatcctaattcttagtccttgcctgtgagatatgaggtcttacaggagacctcagagctcccagcccttctcctcctgctaacccttctcacaccctcaagaggagttagaaaagaggcccttgtcattctcacctcttatggaaaatggaataagaaataatcatatcctttcttcccacccttctcctgttatttaggatttctgacaaagctggcttgagattggtcacttagagccgactgtctcctctgccttttgtttttcagcttcagagacagatccaatatagtcccagggacctgggtctctgggagaggaaggaagagggagggagcaaagagattggggtatgtcccctgtagtacactcttacctcttacttcctagactttgatttctccggcagcccagatgttcagttctcttggcccctctctaccccttactgggatctggttttcattttccggtccttttgccatacacagttacagagatcagtcaaatccataccaccactgagatctcatttattgccacagatgcacaaaataaataacccaaaatcacaaaatgtgttnnnnnnnnnnnnnnnnnnnnnnnnnncacacaacacacaaaaannnnnnnnnnnnnnnnnnnnnnnnnnnnnnnnnnnnnnnnnnnnnnnnnnnnnnnnnnnnnnnnnnnnnnnnnnnnnnnnnnnnnnnnnnnnnnnnnnnnnnnnnnnnnnncncacaaannccaaaaannnnccnnnnnnnnnnnnnnnnnnnnnnnnnnnataaaaaaactttctaaaaacccctcgcnnnnnnnnnnnnnnnncccacaagattaagggaaaagacagtgctcatcttgttcccgcagaggagaactatgtggtggaccacaccacttgttttttgttcacaac

SEQ ID NO: 256957 - DNA, 413 bp, Homo Sapiens
  misc_feature (196)..(261): n is a, c, g, or t
gtttctagagtctgggaactccaaatggtaccatatcacggcctccttttacggcgcactctgtgtaaagcatggcggtaagcaccttccatggatagtctcccttaattccacttctgggagtagaagatgatcattttaccttacagcagtaggtctcatcagggggttctgattttgttggtctgggcaagcnnnnnnnnnnnnnnnnnnnnnnnnnnnnnnnnnnnnnnnnnnnnnnnnnnnnnnnnnnnnnnnnnntttacagtcaagggaattgaggcttcaaaggtcaaagtcactggcccggggtcaccaagctgtgtggggaggcacagttaaagcacaggcctgtgtgactgcattgtttgaccctggggccctcctgctgctgccaatcagaaaatggtcag

SEQ ID NO: 256958 - DNA, 1065 bp, Homo Sapiens
  misc_feature (423)..(447): n is a, c, g, or t
tggcagccagagaaagtagggggtcttagacttgaagcaggagggtcccagcttctttttggcggggctaccctcaagacccctgctgagcttcacccattcctggggggacaggctaggctgaaggtggtggctggggctgttccacctgcccagcctttcccggggtcagtatgcagggctgtggcagaacaatgctccacgacgcttaggtgtgcctgggggctccccagaccactggggccagacaaggagggaaagaggcaactcactggccccaacgccagccacactgaagggctgcccagcggggcagggacggcaggcgtgcagggagtgggtaaacctcctctctaccaggggaggctggcagagtcaggcttgcagatagagcaactcaggtggctgaggaggggccgaggnnnnnnnnnnnnnnnnnnnnnnnnntcagtggctcaagtattctgtgtcatgaggggtgggctggggtacctgggcccagcccaggagatgtcctctccatctggaggggccagctcaaagaggctggaatttggcagatggcttcggtttgggggctagggaaggttggcaaccaggtagcaggctcggagaagttatttgatcttctgggcccatttcatgtcattctgcccgaggcttctcgcccgtcagcccctggataaggtcctccaggcgttcgccagaagccttatcttctccagagggtagtggagccagccctgtggtgatgcagaagtaggtcttcgtggggtgagacgtggtggatgcgatggtgtttacgtggcaggatgacatgccagtcctgcaggagggtgacccagcgtggcagcccaaagtacgtgtgcgaccacttgtggatctggttggtgaaggtgccgaagatgatcaggcagaagacgaagcactcccaggggtatagctgctccagggcttcagggctgtgggtgcggaacttgtaggccatgtttagcagcggcagcagtgtcaccaggcagttgtccccgttggtctcgatgaagtcgtgccgtgtgatagctgtcg

SEQ ID NO: 256959 - DNA, 749 bp, Homo Sapiens
taatgaaacaaagggtttgcggagaagtactcagaatgggaaacgttggtgtccttggggttgttagcagagccagcagtgatcctgtgaggtcagtcccagccctggaaacacaggtgtctccctgggctgagggtagtccccggctctgacggtccgatgtctttcctcaggtggagcagctcctgtacgaaagccctgaccggtactcccgctcagtgcttctcatcacccagcacctcagcctggtggagcaggctgaccacatcctctttctggaaggaggcgctatccgggaggggggaacccaccagcagctcatggagaaaaaggggtgctactgggccatggtgcaggctcctgcagatgctccagaatgaaagccttctcagacctgcgcactccatctccctcccttttcttctctctgtggtggagaaccacagctgcagagtaggcagctgcctccaggatgagttacttgaaatttgccttgagtgtgttacctcctttccaagctcctcgtgataatgcagacttcctggagtacaaacacaggatttgtaattccttactgtaacggagtttagagccagggctgatgctttggtgtggccagcactctgaaactgagaaatgttcagaatgtacggaaagatgatcagctattttcaacataactgaaggcatatgctggcccataaacaccctgtaggttcttgatatttataataaaattggtgttttgt

SEQ ID NO: 256960 - DNA, 525 bp, Homo Sapiens
cagtgatactcgctcactgttgtgtatgtgcaaatgatacacttgtagactcgctcattatccccagctctggtgtggtgtttcaggtgtgctgtatagtgatcatatcgattagtattgtagccgcagcggtcacagcgaatggggcccttggagaaatctccctcttctgcagtggaagagccagattccctggcttttgcctgcttctctgcactctcttccacaaaaaatttcttagcactgtgaactctgatgtgatgcacaaactgttcttcagattctgcttcatattggcatggcttacagcgaaagggtttggtcttcgagctcttgcctttgtcctccgctccaggtgtttcagggggaagatctttatttgaactgtaaatatctggagcacctgatgcctcaaatacaggctgaggttctacgacgctgagttccaaacttctcagttccatgttttccagtccatgaggttcaccttttatatcagcagactcttcaagtccttctccttct

SEQ ID NO: 256961 - DNA, 350 bp, Homo Sapiens
ccgcgcgcgggtccctccgcatatatagagcactatatctaccatactcggagagagggatgtggcaggactataggggaataggtggggagagggtcagcaggccttgaggtgcacataggccacgaattaaggttgactttacacaaacatctcagtgcattaaagagcaggattggcgccagcaagtgtcaccttcagacataaggcgggtttctcctatcgcgaggaaatagaacatacgaacggggtttacaccgagacattccatttccagggatgagcacgagacacaagccttcctcttatactcaactgcaaagaggccttactctttcacataaactccc

SEQ ID NO: 256962 - DNA, 426 bp, Homo Sapiens
gcacgagctggcacctgaggccaatagggtcgggaactgcagctctaactttgcccaatagtgaactatggcaatttccattgagcagctgcagccaagtgacgaggtgagctattcattccaatccctctctgcctctcaagaaggcagaagtcttgaacccccaagaatttctagatctttgttttcttggtcaaataggcactgatgttgcaaatataaaaccagaaagagatagaaaagtgtatacaaatatcaactttatattttaatcactctgcactctgaatttttttacttttcttgtctctctcacaagtatgatgacatattcataaatgcagagaaacaacaaaaatcaatttcttatataaaacaaattcattccaggatggaaatttcaggaaggaactggtaaatttaaaa

SEQ ID NO: 256963 - DNA, 353 bp, Homo Sapiens
tgcacgttcccccatatacagaactgcgtcactgtgggggagtgccttttttcagaaactctgtagaactgtagggcccagacagggactgtgacattcgagaatcctatggccagacagaaacggtacctggtcccagaggaaccatgggctgggtgcactttttgggcttcaaaattctctttgacaataaaaattgtgtagccaccatgtatcattcatctattcgagaagtatttattgagcctctatgaagggacaggtactgagtattgagaaattccgcacagaacaaaaaaggcaaaggtcctgggttctgggagattacattccagtgagaattggggagagag

SEQ ID NO: 256964 - DNA, 980 bp, Homo Sapiens
  misc_feature (795)..(795): n is a, c, g, or t
  misc_feature (798)..(817): n is a, c, g, or t
aggagaacatatagtgggattagcacggtgaagggaaagcatctgttggcatgtcagcatgtggaggctcacacacagaagttgcacgtggacatctgtgttaatcagcacaagtgaattaaccatgcttcttcatttttttactttaggtaaaaaagaggacatttaatattctacatgctgtaactatcaggacatggttagcaatctcaatttcatttttgatattcaaattaattcttacagcttgagcatatcagccttattaccagagcaaatccttccttcagatgggataggttactgactagttggagcatttgtaagcacatggtgaaatcagcccctgcccaccaaaataatctttatgttaccaagtgattcccatttgtctaaggatttgaagggggtctaaattggatgtatcttagtctaaagaaccaaagccatccctgaaatgccttgctaatacaactaatccttccatatatgtgccatacttatttttttcctcagtgtatactttatgttaacagggttattacaaagcacattttctgaatctgcaatcattcctttgacaattactggacccaaaggaaaattcattttctttgcattattccagtaatatataaaaactgtgtcttgttatagtagtacattatgaatcacatataaaatcttacaatacagaacaactgttaagatggaaaacagtgccaaacctccaccgctcatttctttgtaatataatcagaatgaaaaataattttaagaagacagaagactggnacnnnnnnnnnnnnnnnnnnnncctctagctttatcccctgcacaatttattaagagttgaaatgaaaaaaccacttttccctggctttcccaattggtttataaaaattcctaaagcttaaaagaatataaaagtggggtttctttttaacttgaacctggaaattccaattttaccaaattta

SEQ ID NO: 256965 - DNA, 584 bp, Homo Sapiens
aagcctcacttcctcaacaggaattaacagcatcacaaaagaatgacaggcctccaggttcctgggtgtagcctgaccggcaccagcctagtgtggtgtcgggaaacctgcctctccccgcctgtatgtgtgcctgattaaggcagcataccactgaagggtgagagtcctggctccgatgtgagactccttgggttcaacttccagcttgccgcctcccagctgtgtgaccttgagtacgtcatcctcccctcaagcctcagtttcctcatctgccaaatcgggataataacaatagctcattcataagggcgttgtgaggattaaacctgacaacttcataaatcacttagaaaaggcctgaagatagtaagtgctcagtgaacatccagtattaccatgatcgggtacatgtcactagacctctaagttttctttcaacatgtgaattctgggattaagtctaatattgaaaagaaaaactcaggacacaggggagctagcatcaggcagaaccaaagctccggtctatcatgtacagactgtgtagtaactgaggctacagcacagtgcatgacaaagcg

SEQ ID NO: 256966 - DNA, 576 bp, Homo Sapiens
tggagcattagactcccaggttcttgattgcaaaagactgcgatccaggctgccttttgagatacgtttttaatgtgtctctttatgcattggtgagagttcccattattggccttaggaggacagggttgtctgaccttccctcttttagctagaggcagtgacacttcagacctctcatgctggcctagaggacaagatgcttgggttttgagcccagttttttggaggatttgcatcatgacctttttatccatccatgaaaatccctgttggtaatagcattcctacctcctgattcctgccgagctgtgagggtaagaggagcaccaggtcagaaagagcaattctttgaaaggtgacctcgacagtgctgcctgttgaggagcagtggttggagttcccagagtcatgacgtggagtggctgggcctgggcagatgtgcacatcgtctgtactctggatccctggcccagaaggactcagatccttacttctagggaatttcatttaatgaacattatgagaattggggggaaggagaattcctttacagaatcaacccaagttttttgg

SEQ ID NO: 256967 - DNA, 360 bp, Homo Sapiens
  misc_feature (83)..(156): n is a, c, g, or t
ccgcggttcacgtgatacttctgtctcagactcttgagtagctgtgattacacatgtgtgccaccatgcctgtctaattcttnnnnnnnnnnnnnnnnnnnnnnnnnnnnnnnnnnnnnnnnnnnnnnnnnnnnnnnnnnnnnnnnnnnnnnnnnnaccacacttggtgaggacacagagccaaaccgtatcgaatatcattaaaaagaaactgtggcatgggatagtttaggaattttttaaaaatcaggtgaagaatattttgttgacttgtcatcataatttttatttacaaagatatggaaaagggcttggttatcacatggagccagggcttcggagaagagaggatgtctgtat

SEQ ID NO: 256968 - DNA, 504 bp, Homo Sapiens
cggcacgaggtttactgtgagggattcaagaatagtttatttcaaaatagagtttacaagacagggtatcttttattaaattttcacataaaaagaaaaagtacacagggcactaattacgagtaacaccacaattaattgggcctcattcctctgtaaagaataggcaagcaacgagtcattttagtaacattttttcctggtcttttactttctgtatcctcttttcttgatttctgatcattgaagacattgctgaaaatgttgataaaacagttagaataacaaaatctacttaggctttaattctactatgtgctacttaaaagatcagcttgatagtatagaatagacatgttctgagctcaagacattcttaaaaattgtgatgtagcatatttttgaaaaggttggtgttatggaagagagctaagggtaaatctttagtgtttcaggtgttttatttacttatttattttgtagagacagggtctctctatgttg

SEQ ID NO: 256969 - DNA, 1096 bp, Homo Sapiens
  misc_feature (37)..(37): n is a, c, g, or t
  misc_feature (78)..(89): n is a, c, g, or t
  misc_feature (122)..(184): n is a, c, g, or t
  misc_feature (213)..(213): n is a, c, g, or t
gggggggtgtggcaacctctcgtgaagagcattcgtncgttatgtgggaagactgcgggcagtgggtgggcatggtannnnnnnnnnnnaaagatgtttaaggggtggttatggtttagtgnnnnnnnnnnnnnnnnnnnnnnnnnnnnnnnnnnnnnnnnnnnnnnnnnnnnnnnnnnnnnnngtttgtatgtagttattttaatggtgtanggttgggggccaataaaatcaaactttaaattggggagccagataaatattgccttttctttccaaaattttaatttatactttttagtaaaaaacataacacatttctcattcatttaaccaattaatccaaaggaaaaaagtgaagtactataatcacaggtacactaacaaacacttttacaaagacattcagaaatatttgcagcaggttttataagactctgatataaaacaaagtaaaataaaacgttttgaaatggcaaaatcggtttacctagcctgaattgcttcaaagaggcatttgcacttcttgtcctggcttaataaaacaaagtaaaataaaacattttgaaatttcaaaatcagtttagcctaaattgcttcaaagaggcatttgcacttcttgtcctggcttaaaaacaaaccctgaaattactttcttttatccaaatcaattgaccatattaatctgcataaagtctatgaggatacgttttgataaatgctataaacacaaaattaaggcaaatctgatagttatgtgtcaaataaatagcacatttagaagggcctttgttaataaaatgcctctaatgtatccagaggtatagatttcaaagggcaagtctgtacctgttgcacatctgattctcacagcattcatgaaagaggagccaatgatattcccatttcattgaaaactaaggtgacttgtttaaggtcatacagtccgatcagtggcaccaacacatttaccaatggccttggaatacagagtacagggcttcctgttggtagatttaccttcctaacctcacggaatatgtgatccaagtatcaacacgagtgtgagtcccctcaggtctggaatatactacag

SEQ ID NO: 256970 - DNA, 1139 bp, Homo Sapiens
tgggtggcgaattcggcacgagggaagccctggctccgttccgagggaaagagctccagccaggaagccacattcagtcaataaagagatagatgcctttgtgcgggcaaaagccgacagcgcctaccacccctcgtgcacctgtaagatgggccagccctccgatcccactgccgtggtggatccgcagacaagggtcctcggggtggaaaacctcagggtcgtcgatgcctccatcatgcctagcatggtcagcggcaacctgaacgcccccacaatcatgatcgcagagaaggcagctgacattatcaaggggcagcctgcactctgggacaaagatgtccctgtctacaagcccaggacgctggccacccagcgctaagacagttgctgctggaggatgaccagggaagccccctgataagccaagagggccagcacagcccttgctcccaggctcctgcctgaaactatctagcacactaggacccaggtggtaccctactcagtggctgagaattggataaagtcttgggaaatgagacaagtactgggcagtgaatccagctccttttccccagcctttccctgtgggccatttggggaaggccagcattcagcctgagatgttcctccctgcctcctggagggacagaaggggaggatggttaactcctgccgcatcctttttcttgtgttcacgtggcattctctaacccagggcagtggttccttcccaggccatgcacagaggctgggtgcctgccagacccacggagggttcgcgaaggaaggggcatcctccttcttgagctgcaagctttagctgaggcagtaagtcacacagtagttagttcagcctgggctggcacataagtccccagtgtccctgttgagaggggaaagttgcctgctggttgaaaaactggcttttcctttctcgctgcctaatttcactctcagagtgaggcaggtaactggggctccactgggtcactctgagagggttgtggctctggttcttattaaaccagggccaggtgcagggctcacacctgtaatcccagcactttgggaaggtcacttgagctcaggagttcaagaccatccctgggcaacatagtgagaccttgtctctg

SEQ ID NO: 256971 - DNA, 991 bp, Homo Sapiens
  misc_feature (873)..(908): n is a, c, g, or t
taaaaatgaggaatttggcttactgtcccaaacagtagaggtttggcaaaactgcagaaatggtatagtaagtaagaaaatgaaagtgaatacactgaacacataaaacagaagcaggaatttgacaatatgcctgctctgacaccctgagaatcgtttactgcaggcaaaataaatccaccaccttttatctctaaaagcaaaacccagcatgatttcttcatagggcatacatttctattcagaaaagaccacagaataaagaggtaagttaatatgagaaaggtaaagacactaagatcactctttttgcccctttccacaccccaataaaaaaatactcattaaggggccactatttcccgcgctttcaaattatcatagaaaatatttagaattacacaacagcagcatttacaagtgaatttatatagaactgttgtcaaggctcaaaatatcatgagagctcttgaaaaaaacagttgaggtatttcacataaaaaactgaacaatcaggttagccacgcccaaaatgatgatgaaaacgtggaagattaatattaggccatgtcagacgctcttcttggtggagggaaattatatagatgagagatgggtataggaatacgaaggccagtcgcacatgtctgcatcctgaatatacttatgatccctcctatgtttgggtagaaacagggccatgatcactccagctcccacaataagttagattaagaatcagacaacataggaaaatagtcatgcattgcaacagtcatttgcttgacttggcaaaatcctgctggtcaagagaagagccctccccggccgtaatggctgaattcccgggcaaatgtccggtacagtcgactnnnnnnnnnnnnnnnnnnnnnnnnnnnnnnnnnnnnagtcgtcagcttcctcgctcatctgactgattgacgctcgttctttcgcataacgagtggcaccataatgtgtaagtttttgt

SEQ ID NO: 256972 - DNA, 364 bp, Homo Sapiens
cgaaagaaggaacacagaaaatggattaagagcaggggaagcatctgactgagagcacaaactgcagattcatgggttcaaatccagactcaacctgtgtgatcttggtcaccgttctgtgccttggctttctcatctataaaatgaagccaataatagacacatgcctcatagaattgttgtaagaatgtatataaaatacttaaagcctggcacatagtaagcactcaagaaatctttgctgtaatcgtcattctaaaagccaagtgttcaagtctccacttgacacattcagaggcaaagcagagcctgaaagctcacaacagactatagtttctggcctgtcatagaacagaaactgccg

SEQ ID NO: 256973 - DNA, 384 bp, Homo Sapiens
ggcacgagaggtgacagagatttatatagtcagagaaccttataggacactagtaaatagaatattagaaagggaaactgtggtgcctatataatcttcaaatttgagcatttaagttagaaagcacaagctatttgagtagggtgcatggttattacatggttttgtcctacagcttttttctaacaggtaaagaagcattagggagagagcaagaatgggtgtaggtaattagggctaactggaattttattttaaaaatgctctacaatacaatgtgtgtgggtccttttagattttaatttgagggtggctcttacttccctcaattaactgtgcgtcttttcacaaggatgcccgggtaggtaaagacatggcaactgg

SEQ ID NO: 256974 - DNA, 1444 bp, Homo Sapiens
  misc_feature (1034)..(1089): n is a, c, g, or t
attttggcgcctgcgcgctgagtgcgtgccgctccgccgaccgaagaggctggacatgacaccagtggcatatcacggccatggggtctcagcattccgctgctgctcgcccctcctcctgcaggcgaaagcaagaagatgacagggacggtttgctggctgaacgagagcaggaagaagccattgctcagttcccatatgtggaattcaccgggagagatagcatcacctgtctcacgtgccaggggacaggctacattccaacagagcaagtaaatgagttggtggctttgatcccacacagtgatcagagattgcgccctcagcgaactaagcaatatgtcctcctgtccatcctgctttgtctcctggcatctggtttggtggttttcttcctgtttccgcattcagtccttgtggatgatgacggcatcaaagtggtgaaagtcacatttaataagcaagactcccttgtaattctcaccatcatggccaccctgaaaatcaggaactccaacttctacacggtggcagtgaccagcctgtccagccagattcagtacatgaacacagtggtcagtacatatgtgactactaacgtctcccttattccacctcggagtgagcaactggtgaattttaccgggaaggccgagatgggaggaccgttttcctatgtgtacttcttctgcacggtacctgagatcctggtgcacaacatagtgatcttcatgcgaacttcagtgaagatttcatacattggcctcatgacccagagctccttggagacacatcactatgtggattgtggaggaaattccacagctatttaacaactgctattggttcttccacacagcgcctgtagaagagagcacagcatatgttcccaaggcctgagttctggacctacccccacgtggtgtaagcagaggaggaattggttcacttaactcccagcaaacatcctcctgccacttaggaggaaacacctccctatggtaccatttatgtttctcagaaccagcagaatnnnnnnnnnnnnnnnnnnnnnnnnnnnnnnnnnnnnnnnnnnnnnnnnnnnnnnnnttaatacagatcttttcagctgttcttagggcattataaatggaaatcataacgtggttctaggttatcaaaccatggagtgatgtggagctaggattgtgagtgacctgcagggcattatcagtgcctcatctgggcagaagtggcagcagagagggacatccaaatactaagagaaacagacctagtcaggaagaactggttcggctgtccaagggcggagcttgacaaaccaaagggggcgtcaataccgggggcaagtacggacacgtttgaccaggcccaagagacgaaaaagagcagcgcggcaacggggaaggacggttggagccccggggggagggaccacaagccg

SEQ ID NO: 256975 - DNA, 1144 bp, Homo Sapiens
  misc_feature (1029)..(1029): n is a, c, g, or t
aggctggtaagtcctcaagctggcaggtggtcgggggagcggccggagaggagctgccgggagttcgcgccctgcaggacatgacaccaggggcatatcacggccatggggtctcagcattccgctgctgctcccccctcctcctgcaggcaaaagcaaaaaaatgacagggacggtttgctggctgaacgagagcaggaagaagccattgctcagttcccatatgtggaattcaccgggagagatagcatcacctgtctcacgtgccaggggacaggctacattccaacagagcaagtaaatgagttggtggctttgatcccacacagtgatcagagattgcgccctcagcgaactaagcaatatgtcctcctgtccatcctgctttgtctcctggcatctggtttggtggttttcttcctgtttccgcattcagtccttgtggatgatgacggcatcaaagtggtgaaagtcacatttaataagcaagactcccttgtaattctcaccatcatggccaccctgaaaatcaggaactccaacttctacacggtggcagtgaccagcctgtccagccagattcagtacatgaacacagtgggtgaattttaccgggaaggccgagatgggaggaccgttttcctatgtgtacttcttctgcacggtacctgagatcctggtgcacaacatagtgatcttcatgcgaactttcagtgaagatttcataacattggcctcatgacccagagctccttggagacacatcactatgtggattgtggaggaaattccacagctatttaacaactgctattggttcttccacacagcgcctgtagaagagagcacagcatatgttcccaaggcctgagttctggacctacccccacgtggtgtaagcagaggaggaattggttcacttaactcccagcaaacatcctcctgccacttaggaggaaacacctccctatggtaccatttatgtttctcagaaccagcagaatcagtgcctagcctgtcccagcaaantagttggcactcaataaagatttgcagaatttaatacagatcttttcagctgtcttagggcattataaatggcaatcataacggggttctaggtatcaaacctggagtgattggg

SEQ ID NO: 256976 - DNA, 874 bp, Homo Sapiens
  misc_feature (542)..(596): n is a, c, g, or t
  misc_feature (667)..(667): n is a, c, g, or t
  misc_feature (763)..(763): n is a, c, g, or t
  misc_feature (822)..(822): n is a, c, g, or t
gtgaaagtcacatttaataagcaagactcccttgtaattctcaccatcatggccaccctgaaaatcaggaactccaacttctacacggtggcagtgaccagcctgtccagccagattcagtacatgaacacagtggtgaattttaccgggaaggccgagatgggaggaccgttttcctatgtgtacttcttctgcacggtacctgagatcctggtgcacaacatagtgatcttcatgcgaacttcagtgaagatttcatacattggcctcatgacccagagctccttggagacacatcactatgtggattgtggaggaaattccacagctatttaacaactgctattggttcttccacacagcgcctgtagaagagagcacagcatatgttcccaaggcctgagttctggacctacccccacgtggtgtaaggcagaggaggaattggttcactttaactcccagcaaacatcctcctgccacttagggagggaaacacctccctatgggtaccatttatgtttctcagaaccagcagaatnnnnnnnnnnnnnnnnnnnnnnnnnnnnnnnnnnnnnnnnnnnnnnnnnnnnnnnttaatacagatcttttcagctgttcttagggcattataaatggaaatcataatgtggttctaggttatcanaccatggagtgatgtggagctaggattgtgagtgacctgcaggccattatcagtgcctcatctgtgcagaagtcgcagcagagagggaccatccanatacctaagagaaaacagacctagtcaggaatatgaattttgtttcagctgttccccanaggcctggggagcttttttgaaaagaaagaaaaaatggtgttggcctttttt

SEQ ID NO: 256977 - DNA, 584 bp, Homo Sapiens
  misc_feature (14)..(14): n is a, c, g, or t
  misc_feature (21)..(21): n is a, c, g, or t
  misc_feature (45)..(45): n is a, c, g, or t
  misc_feature (51)..(51): n is a, c, g, or t
  misc_feature (56)..(56): n is a, c, g, or t
  misc_feature (448)..(460): n is a, c, g, or t
gaggaattgggtcnacctaanctcccccagcaaaacatccctccntgcccnacttngggagggaaacaccctccccctatgggtcccccatttatggtttccctcaggaacccagcagaatccagtgccctagcctgtgccccagcaaatagttgggcactcaataaagatttgcagaatttaatacagatcttttcagctgttccttagggcattataaatggaaatcataacgtggttctaggttatcaaaccatggagtgatgtggagctaggattgtgagtgacctgcaggccattatcagtgcctcatctgtgcagaagtcgcagcagagagggaccatccaaatacctaagagaaaacagacctagtcaggatatgaatttgtttcagctgttcccaaacgcctgggagctttttgaaaagaaagaaaaaagtgtgttggcnnnnnnnnnnnnnagaaagttagaattgtttttaccaagagtctatgtggggcttgattcacccttcatccattggctggaacatggtattggggatttgatagaaaaataaaccctgcttttgattcgaaacacac

SEQ ID NO: 256978 - DNA, 712 bp, Homo Sapiens
  misc_feature (29)..(29): n is a, c, g, or t
  misc_feature (64)..(64): n is a, c, g, or t
  misc_feature (83)..(83): n is a, c, g, or t
  misc_feature (147)..(147): n is a, c, g, or t
  misc_feature (213)..(213): n is a, c, g, or t
  misc_feature (277)..(277): n is a, c, g, or t
  misc_feature (319)..(319): n is a, c, g, or t
  misc_feature (412)..(412): n is a, c, g, or t
ctttgtctcttacaaattattctgctccncaaatgcttaaatgatagctgttttttctcacaantatttataattacagggcncaacaggtcttcctcatcaccagttcctacaagtagaaatgaggagacaaaaaggaaagtgacncagctatggcattcctacagccccctactcttctcttaggcctgtggggcaagattcctaaaagancagcataccagttgctcactccgaggtggaataagggagacgttagtagtcacatatgtactgnccactgtgttcatgtactgaatctggctggacaggctggtcnctgccaccgtgtagaagttggagttcctgattttcagggtggccatgatggtgagaattacaagggagtcttgcttattaaatgtgactttcnccactttgatgccgtcatcatcccacaaggactgaatgcggtaaacaggaagaaaaccaccaaacccagatgcccaggagacaaagcaggatggacaggaggacatattgccttactgcaaatgacacagcacatgaccgaccccaggcagtcagatatcaaggttcaatgtgtcaagattaaacacaaaaccaggaaagagaagggagctgaaagggaagttccaagagccaggaaccataaaccagttaagaagcagtgaagcaggagaaaccttttaaaactcctttaaacactgtt

SEQ ID NO: 256979 - DNA, 683 bp, Homo Sapiens
  misc_feature (217)..(217): n is a, c, g, or t
ctgactatttccatatttgctgtttggtagcttcttctgcacggtacctgagatcctggtgcacaacatagtgatcttcatgcggtgcgtctctcttccctatcccgatggcctgtccggccatgtgagcctaccacctttgctcaggaggcccctgtgtgaccacagggcagaggcacctagcccgaggggacaccctgtgcctcacaggcacagnattacagtagacccttggtgttctctaaacacagtgtccacatgcccttcacaaatcaccagtcaccctgaggcagtcaaacattttctccattaaaatggggtctagtttaactaaacacttgatcccctcagaatcctaatgagacagtcatgaacagaaaagctttctcaagatgttaagtactgggcatttgaccagacttcctctctagccacacaaattaccacatgtcatggacctttagggttgttttctggaagcatggctgttaaatttgcaagtgacaagactctgctgcagacatgaaatatgaggggttagagcagagtttctcagccttggcactacaaacattttgggccagacctttgttgtagggggctgttctgtgcattataggatgtttaacagtattcctggcatctgcccactagatcccagtagtaaaccctccatcccttag

SEQ ID NO: 256980 - DNA, 2237 bp, Homo Sapiens
  misc_feature (2130)..(2130): n is a, c, g, or t
ccacatcggatcgcaggggctcccaaaatggcgagtgaggctgcggggactcgctgagcagcggagggggagcgtgcagagccgctgcggccctcacagtccggagcccggccgtgccgtgccgtagggaacatgcacttttccattcccgaaaccgagtcccgcagcggggacagcggcggctccgcctacgtggcctataacattcacgtgaatggagtcctgcactgtcgggtgcgctacagccagctcctggggctgcacgagcagcttcggaaggagtatggggccaatgtgcttcctgcattccccccaaagaagcttttctctctgactcctgctgaggtagaacagaggagagagcagttagagaagtacatgcaagctgttcggcaagacccattgcttgggagcagcgagactttcaacagtttcctgcgtcgggcacaacaggagacacagcaggtccccacagaggaagtgtccttggaagtgctgctcagcaacgggcagaaagttctggtcaacgtgctaacttcagatcagactgaggatgtcctggaggctgtagctgcaaagctggatcttccagatgacttgattggatactttagtctattcttagttcgagaaaaagaggatggagccttttcttttgtacggaagttgcaagagtttgagctgccttatgtgtctgtcaccagccttcggagtcaagagtataagattgtgctaaggaagagttattgggactctgcctatgatgacgatgtcatggagaaccgggttggcctgaacctgctttatgctcagacggtatcagatattgagcgtgggtggatcttggtcaccaaggaacagcaccggcaactcaaatctctgcaagagaaagtctccaagaaggagttcctgagactggcccagacgctgcggcactatggctacttgcgctttgatgcctgtgtggctgacttcccagaaaaggactgtcctgtggtggtgagcgcgggcaacagtgagctcagcctgcagctccgcctgcctggccagcaactccgagaaggctccttccgggtcacccgcatgcgatgctggcgggtcacctcctctgtaccattgcccagtggaagcacgagcagcccaggccggggccggggtgaggtgcgcctggaactggcttttgaatacctcatgagcaaggaccggctacagtgggtcaccatcactagcccccaggctatcatgatgagcatctgcttgcagtccatggttgatgaactgatggtgaagaaatctggcggcagtatcaggaagatgctgcgccggcgggtggggggtactctgagacgctcagacagccagcaagcagtgaagtccccaccactgcttgagtcacctgatgccacccgggagtctatggtcaaactctcaagtaagctgagtgccgtgagcttgcggggaattggcagtcccagcacagatgccagtgccagtgatgtccacggcaatttcgccttcgagggcattggagatgaggatctgtaatctccactgcttggatgtctgccctctaccccagaggaatttacagaaacttgccctgtgcctgtgtcccccatgctaggggcggaggggtcttttccttcttctttcctacctaccccttttctcttggccaggggcctcgtatcctacctttccttgtcccctgggctggctgcacagaggattgccccttctcttttcagagctggccctcgatgccaaattagcatttagtattttgcacaaagtctaagggaccatggctgcctgccttggggaggaaccatatctccctctgggccgcttctggcctcttggagccatgggccaaaggccaaggggatgggcagaggtctgtgtttggtctggcccagttccccatcattaaactcagcctgactgctgcctacctctggttccctctcactggccctgctttccccatcacaggatggactactatgctaagggtaagggccaaattgcctgccattgccatttcacaatagacatgggtttgttagcgtttccttttattataaggcactgaataagttaaataaacaggggggaggcttgggcctnttaatcataagaaaacaaaaaatgaaccttgtggggcgccctcgggccctcgaaaaagtttttctaaaaccattccgctcgggccgcgggggctcacaaaaggaaac

SEQ ID NO: 256981 - DNA, 238 bp, Homo Sapiens
gggtgagccaccatgcctggcagaaattctttcctttattgactgtagaggctactgcaactaggtgacagaggtgatttggccctgttagtttcaaatcccaatttaaagaatgatagtacagagatgcctgaactccctgccaggtaattttatgtagcttattccccattccatttctttgatcatgacacaggccattcaggaagtcctatggagagtaaatagatggaccgat

SEQ ID NO: 256982 - DNA, 1665 bp, Homo Sapiens; identical to SEQ ID NO: 15407
  misc_feature (577)..(587): n is a, c, g, or t
  misc_feature (645)..(665): n is a, c, g, or t
  misc_feature (1341)..(1341): n is a, c, g, or t

SEQ ID NO: 256983 - DNA, 914 bp, Homo Sapiens; identical to SEQ ID NO: 15408
  misc_feature (38)..(38): n is a, c, g, or t

SEQ ID NO: 256984 - DNA, 1262 bp, Homo Sapiens
  misc_feature (1091)..(1137): n is a, c, g, or t
cctgggtggcgattcggacgagggcactggagagcctcacactctcctacaatggcctgggctctaacatcttccgcctgctagacagcctgcgggccctgtcaggccaggctggatgtcgcctccgtgccctgcatctcagtgacctgttctcaccactgcccatcctggagctgacacgtgctatcgtgcgagcactgcccctgctacgggtcctctctattcgtgttgaccacccaagccagcgggacaaccctggtgtgccagggaatgcagggccccctagccacataataggcgatgaggagataccagaaaactgcctggagcagttggagatgggatttccacggggagcccagccagccccactgctgtgctccgttctgaaggcctcgggttctctgcagcagctgtccctggatagtgccacctttgcctctccccaggattttgggcttgttttgcaaacactcaaagagtacaacctagccctgaaaagactgagcttccatgacatgaatctcgctgactgtcagagcgaggtgctctttttgctacagaatctgactctgcaagagattaccttctccttctgccgtctgtttgagaagcgcccagcccaatttctgcctgagatggttgctgctatgaagggcaactccacactgaagggcctccggtggccagggaaccgcctggggaatgctggcctgctggctttggcagatgttttctcagaggattcatcctcctctctctgtcagctggacatcagttccaactgcatcaagccagatgggcttctggagttcgccaagcggctgggagcgctggggccgtggagcctttggtcacctgcggcctcttccaaaactggctggaccaggaatgcagtcacagccaagggaagccatccggcggctccgggctaactgccaatgttggttaagcgactcatgggactcatcccaggccttcgcagattaatgttagcaccatgtgatggggcccgtacctcacagtctcatgctcggtaccatcagcttgcaggggctgaagcatgggctgcccagaaccccaaccaccannnnnnnnnnnnnnnnnnnnnnnnnnnnnnnnnnnnnnnnnnnnnnnccttgcactgaggtcctggaggccttgatgaggcccagcaaacaggcattctcacagctgggtttatagtctttgggccccttactcagtatcctgggaaccctgggccaggaggttacagtggt

SEQ ID NO: 256985 - DNA, 1594 bp, Homo Sapiens
tctggtgccaaaagaggctggtaccggtccgaattcgggatgcagtaaccattgaaattcccgcactttgtggactcacaccaccagaagcctgttaatgctatcatcgagcatgtgcgggacggcagtgtggtcagggccctgctcctcccagattactacctggttacagtcatgctgtcaggcatcaagtgcccaacttttcgacgggaagcagatggcagtgaaactccagagccttttgctgcagaagccaaatttttcactgagtcgcgactgcttcagagagatgttcagatcattctggagagctgccacaaccagaacattctgggtaccatccttcatccaaatggcaacatcacagagctcctcctgaaggaaggtttcgcacgctgtgtggactggtcgattgcagtttacacccggggcgcagaaaagctgagggcggcagagaggtttgccaaagagcgcaggctgagaatatggagagactatgtggctcccacagctaatttggaccaaaaggacaagcagttgttgccaaggtgatgcaggttctgaatgctgatgccattgttgtgaagctgaactcaggcgattacaagacgattcacctgtccagcatccgaccaccgaggctggagggggagaacacccaggataagaacaagaaactgcgtcccctgtatgacattccttacatgtttgaggcccgggaatttcttcgaaaaaagcttattgggaagaaggtcaatgtgacggtggactacattagaccagccagcccagccacagagacagtgcctgccttttcagagcgtacctgtgccactgtcaccattggaggaataaacattgctgaggctcttggtcagcaaaggtctagccacagtgatcagaataccgggcaggatgatgaccagagatcatcacactaacgatgaactgcttgctgcagaggccagagctattaagaatggcaaaggattgcatagcaagaaggaagtgcctatccaccgtgttgcagatatatctggggatacccaaaaagcaaagcagttcctgccttttcttcagcgggcaggtcgttctgaagctgtggtggaatacgtcttcagtggttctcgtctcaaactctatttgccaaaggaaacttgccttatcaccttcttgcttgcaggcattgaatgccccagaggagcccgaaacctcccaggcttggtgcaggaaggagagcccttcagcgaggaagctacacttttcaccaaggaactggtgctgcagcgagaggtggaggtggaggtggagagcatggacaaggccggcaactttatcggctggctgcacatcgacggtgccaacctgtccgtcctgctggtggagcacgcgctctccaaggtccacttcaccgccgaacgcagctcctactaccagtccctgctgtctgccgaggaggccgcaaaacagaagaaagagaaagcctgggccccactatgagggagcaacccccgtggaggaggtgaatgcccagtggctgggagggaaaaaggaccgaatctggctaaactacaaagccccggggttttggtga

SEQ ID NO: 256986 - DNA, 1104 bp, Homo Sapiens
  misc_feature (782)..(782): n is a, c, g, or t
  misc_feature (820)..(820): n is a, c, g, or t
  misc_feature (928)..(928): n is a, c, g, or t
  misc_feature (1009)..(1047): n is a, c, g, or t
gagcgaggcctgggtggcgaattcggcacgaggatttcttcgaaaaaagcttattgggaagaaggcaatgtgacggtggactacattagaccagccagcccagccacagagacagtgcctgccttttcagagcgtacctgtgccactgtcaccattggaggaataaacattgctgaggctcttgtcagcaaaggtctagccacagtgatcagataccggcaggatgatgaccagagatcatcacactacgatgaactgcttgctgcagaggccagagctattaagaatggcaaaggattgcatagcaagaaggaagtgcctatccaccgtgttgcagatatatctggggatacccaaaaagcaaagcagttcctgccttttcttcagcgggcaggtcgttctgaagctgtggtggaatacgtcttcagtggttctcgtctcaaactctatttgccaaaggaaacttgccttatcaccttcttgcttgcaggcattgaatgccccagaggagcccgaaacctcccaggcttggtgcaggaaggagagcccttcagcgaggaagctacacttttcaccaaggaactggtgctgcagcgagaggtggaggtggaggtggagagcatggacaaggccggcaactttatcggctggctgcacatcgacggtgccaacctgtccgtccctgctggtggagcacgcgctctccaaggtccacttcaccgccgaacgcagctcctactacaagtccctgctgtcctgccgaggaggccgcaaagcaaaanaaaagaaaaggtctgggcccactatgaggacaagcccncgggaaagaaggtgattgccagtgcctggaaggaaaaaggaaccgatctgctaactacaagcccccgggttggggaccgaaaatccctgatggactgcacttctaccnggccaaggatggggaaaaccggcacccccttttggagaaaacttgatggaaaaaacatgccccatggaactttggccagcnnnnnnnnnnnnnnnnnnnnnnnnnnnnnnnnnnnnnnngagggggagaaaacttggccttggccccaatttgtaaaaagggaaaaatgggtcccc

SEQ ID NO: 256987 - DNA, 1803 bp, Homo Sapiens
  misc_feature (1584)..(1650): n is a, c, g, or t
aaggtagcgaggcctgggtggcgaattcggacgagggccactgtcaccattggaggaataaacattgctgaggctcttgtcagcaaaggtctagccacagtgatcagataccggcaggatgatgaccagagatcatcacactacgatgaactgcttgctgcagaggccagagctattaagaatggcaaaggattgcatagcaagaaggaagtgcctatccaccgtgttgcagatatatctggggatacccaaaaagcaaagcagttcctgccttttcttcagcgggcaggtcgttctgaagctgtggtggaatacgtcttcagtggttctcgtctcaaactctatttgccaaaggaaacttgccttatcaccttcttgcttgcaggcattgaatgccccagaggagcccgaaacctcccaggcttggtgcaggaaggagagcccttcagcgaggaagctacacttttcaccaaggaactggtgctgcagcgagaggtggaggtggaggtggagagcatggacaaggccggcaactttatcggctggctgcacatcgacggtgccaacctgtccgtcctgctggtggagcacgcgctctccaaggtccacttcaccgccgaacgcagctcctactacaagtccctgctgtctgccgaggaggccgcaaagcagaagaaagagaaggtctgggcccactatgaggagcagcccgtggaggaggtgatgccagtgctggaggagaaggagcgatctgctagctacaagcccgtgtttgtgaccgagatcactgatgacctgcacttctacgtgcaggatgtggagaccggcacccagttggagaagctgatggagaacatgcgcaatgacattgccagtcacccccctgtagagggctcctatgccccccgcaggggagagttctgcattgccaaatttgtagatggagaatggtaccgtgcccgagtagagaaagtcgagtctcctgccaaaatacatgtcttctacattgactacggcaacagagaggtcctgccatccacccgcctgggtaccctatcacctgccttcagcactcgggtgctgccagctcaagccacggagtatgccttcgccttcatccaggtgccccaagatgatgatgcccgcacggacgccgtggacagcgtagttcgggatatccagaacactcagtgcctgctcaacgtggaacacctgagtgccggctgcccccatgtcaccctgcagtttgcagattccaagggcgatgtggggctgggcttggtgaaggaagggctggtcatggtggaggtgcgcaaggagaaacagttccagaaagtgatcacagaatacctgaatgcccaagagtcagccaagagcgccaggctgaacctgtggcgctatggagactttcgagctgatgatgcagacgaatttggctacagccgctaaggaggggatcggggtttggcccccagccccgctcacgccagtccctcttcctctgccggggagggtggttttcaactcccaaacccccgaaaagggggttcgtacaattggggtccacccatttgcctttcagcnnnnnnnnnnnnnnnnnnnnnnnnnnnnnnnnnnnnnnnnnnnnnnnnnnnnnnnnnnnnnnnnnnnacaccccaaaagggttttttcttggggggccaaataacccttgcgccctcctggggatggatgggggaccctggcttatctccccagacacttctgggccaaacttggaattttatttttggaacggccttggtgggcaccttttctttaaag

SEQ ID NO: 256988 - DNA, 713 bp, Homo Sapiens
gtggaggtgcgcaaggagaaacagttccagaaagtgatcacagaatacctgaatgcccaagagtcagccaagagcgccaggctgaacctgtggcgctatggagactttcgagctgatgatgcagacgaatttggctacagccgctaaggaggggatcgggtttggcccccagccccgctcacgccagtccctcttcctctgccgggagggtgttttcaactccaaaccccagagaggggttgtagattgggtccagctttgcttcagtgtgtggaaatgtctcgtggggtggcatcggggctgcggggtggggaccccaaggctttctggggcagacccttgtcctctgggatgatgggcactgctatccacagtctctgccagttggttttatttggaggtttgtgggctttttttacaaaacaaacgtcctcaaatcaggaagaaacatcaaagactatgtcctagtggagggagtaatcctaacacccagctggccgccagctggcacctgcctctatcccagactgccctcgtcccagctctctgtccaactgttgattatgtgatttttctgatacgtccattctcaaatgccagtgtgttcacatcttcgctctggccagcccattctgtatttaaagcttttgaggcccaataaaatagtacgtgctgtctgcccaggagatcctggacatgaatagagcttgtgt

SEQ ID NO: 256989 - DNA, 456 bp, Homo Sapiens
  misc_feature (265)..(276): n is a, c, g, or t
  misc_feature (438)..(438): n is a, c, g, or t
caataagggctgcagacagcacgtactattttattgggcctcaaaagctttaaatacagaatgggctggccagagcgaagatgtgaacacactggcatttgagaatggacgtatcagaaaaatcacataatcaacagttggacagagagctgggacgagggcagtctgggatagaggcaggtgccagctggcggccagctggggttttaggattactccctccactaggacatagtctttgatgtttcttcctgatttgaggacnnnnnnnnnnnnaaaaaaagcccacaaacctccaaataaaaccaactgggcagagactgtgggatagcagtgcccatcatccccaggggacaaggggtctgcccccaggaaagccttgggggtccccaccccgcagcccccgatggccaccccacggggactttttccacacantgaaggcaagttgggccc

SEQ ID NO: 256990 - DNA, 1168 bp, Homo Sapiens
  misc_feature (782)..(805): n is a, c, g, or t
ggtgttcagtcggcatttgcgtcatctttagtagatcctgaggttgaccagcagcccatggggcctgaagggaaatgaggcagctgctgtgtccccacggaaacaaccatctggggactgctgggaaatgctgtgaatgcggagggaagtgatgtttgggttctgtagctgagagatttttattcatttttaactgccccccaaccccactccaactccttctccaccacccattctcccaatggtctttagaaatagattttcatctgatattctgcagaaatatcaatgagacttggtatgggacaggggcagaaaacactacataggcctccaaggcaaaaccagtcccagtttctttaatgggaagaagctggaattcctggtgctcaattcttagtgaccccaatcctatacccaaatctatgatattctgggacctcagtgattttggtcccctcccactttctctagttcgtcatcctcccttcccatatccttcaaaagaaccacactagggtctccacctacttatacaatgcggatgcccaactgtttttaaggaagccagaagcatcccatggaccatggggtgagtgtcctccaagagccccctgagctcagccctctgcctggagggctccagacctttctgagccctgcttggaggcgagcattttcactgctaggacaagctcagctgttgaggacacccccaccccaaatttcagttcttacgtgattttaaccattcaacatgctgttgggttttaattctctannnnnnnnnnnnnnnnnnnnnnnnttttaggaccagttgtagtgaattgctactgaaagctatcccaggtgatacagagctctttgtaaaccgcagtcacacattagggttagtattaaactttgtttagatgtaccataattaacttggctagttgattgtttgaagtctatggaagaaatagttttatgcaaaattttaaaaaatgccagtctggtcagggaagtagggggtttcaatgctgttgggaaccaggaaggtgggacagccggcaggtagggacattgtgtacctcagttgtgtcacatgtgagcaagcccaggttgaccttgtgatgtgaattgatctgatcagactgtattaaaaatgttagtacattaaaaaaaa

SEQ ID NO: 256991 - DNA, 616 bp, Homo Sapiens
ttaagctgcaccccttgaagggaaaagtatctaagtttcatagatatattttaaaagcaacacaggtattgtagattgtggtgtacagaagaggatgtgaaagatcaagagacaagggggctgatacttaatttaccttatgacaaatattgatgaaacgtaagggaacttaatattcacttaatagtgaattaaattcctgaattatgtgattattaatcctaaagggaaaaaatatcatagcctgtcatctgaagaacaatttcaaaaattctaatatgaatatactttccagaggagaataatagcaatgcttagagaactaagaaattgttgcatattactaattcttttttataatgttaaaaactgaaaatgcagataggaaatcagataacaaaaatgcacacaattattcttgacaaagactattcatctcttggttacagaacaccattgtcagacatagtaacttatgtgcatgttagcagttactatttaaataacaagttttgtatttgtgtaacacatataaagacattctatataaatacacaactataaattgtcagtttaattcactcttttattataatttgcttttgggaaatagttg

SEQ ID NO: 256992 - DNA, 652 bp, Homo Sapiens
gtgtgagccaccgtgcctggcctaaataaataatttcgtaagcatatacaatccacttcccactaagaattagggtcaaagacattctatttgaacacttgcaattacctagatctagttggcctttggttgatagatcctctgcctcggaatttcattgagtttttttcttccttgcctttgggtgtctgcttgccacttcctaagaattcttgtagaaggcagtttcctctacttgcccaagagcactgagtacttctctactatcctattattagcttctatctcttagtgtaacttcaaaacttttaagagcagtgaagttggtcagggacatgtggccacttattattacctaaagaaaacatttgttccctgttcattttattttaggggccagatctaacattgtagtgtctttcaccagatagacttctactgtttcatcaaactcccttcttaactagacctagactttctactccaatcaggctaatctacttactgaatgtgacatatttattcctagttccatacctttgcacatgccctactctccactaattatacttaaaagtccaaaaattttttctttagtaacagacttaggtactgctaagcagttattaacacaatattccttagttttcat

SEQ ID NO: 256993 - DNA, 1088 bp, Homo Sapiens
  misc_feature (687)..(687): n is a, c, g, or t
  misc_feature (867)..(875): n is a, c, g, or t
tataaatttaaggttattgcttacaactcagaaggtaaaagtaatccaagtgaagtagtagaatttactacttgccctgataaaccaggcatacctgtaaagccttcagtgaaaggaaagatacattcacacagttttaaaataacctgggatccaccttctaacggaaacaaatgggaaatgatatacagtggtgctaccagggaacatctttgtgatcgactgaatccaggctgtttctatcgtttacgagtttactgcatcagtgatggaggacagagtgcggtctctgaatctttacttgtgcagactccagctgtgcctcctggcccatgcctccctcccagattacagggtagacccaaagcaaaagaaatacagttacgatggggaccccctctggttgatggtggatcacccatttcctgttacagtgtggaaatgtctcctatagaaaaagatgaacctagagaagtttaccaaggttctgaagtagaatgtacagtgagcagccttcttcctggaagacatacagcttcagactacgtgcagctaacaaaatggggtttggaccattttcagaaaaatgtgatattactacagccccctgggccaccagatcagtgcaagccccctcaagtgacatgtagatctgcaacttgtgcacaagtgaattgggaggttccntttgagtaatgggaacagatgtcactggatatcgactggagtgggggaggagttgaaaggaagtatgcaaaatatgttacctgggggccctggtctccgtttatgaaataaaaagggacttttccccaagcaacctaccctatttaatggcaagggtcccaaggcttcctgagttggttnnnnnnnnncgaaggccccttttcagtggaaagtataaaagccctgggtgtggacctcccaccattccagtttccctgggcaatttgggggaccctggttctttccaagaaaaaataaggcggatgggatggtggataatgaaaaaatcccccccactttaatttccaccccttttcataacatgtgcctttgggccaaaatagaaccttgtggggaaaaat

SEQ ID NO: 256994 - DNA, 2276 bp, Homo Sapiens
  misc_feature (1467)..(1519): n is a, c, g, or t
  misc_feature (1674)..(1685): n is a, c, g, or t
  misc_feature (2070)..(2070): n is a, c, g, or t
  misc_feature (2110)..(2110): n is a, c, g, or t
ggtccggccggagtagggatatcgtcgacccacgcgtcgggcaactgggattcattctggtgattctgaacctgcctcatagcttaaagtataaaaaagattcaagagcagtgaggttgttctttccagtgaatggtggactgagtggtgcgaggtggagggctaacaagaggaaagaactacattcttcagaatacagtgatgaaaattcattttgaaactcaaatattttcattttggatattctcctgtttttattaaaccagtgattacacctggccatccctctaaatgttctaggaaggcatgtctattgtgattttgatgaagacagaattatttttctctgtagaaacacagataccactttatcagggaagttagtcaaatgaaatggaaattggtaaatggacaaaagctagctagtaaaaaggacgacccagcaacatgctttaaccccattgtatgtttgtggaaagagcatagtttaacatcttgagaaatttgggacataaagttttcatggtagacagttcatgcagtatatgaattgacataatggaaataatctgattttatttttacaactaacatccattccccttcatttaaacaccttttgtgttttacttcagtgaggagattggagtctgaatggatctgttttccaagagattctgagaaatttttgtattcagcagttggaaagctctctattctagttgataaaacttcccttttttgatgtagatgcagatattctatacagttctgttgtcttttactaggactgtaaacttttgtgataaaattcaaataagattttatttcttggtaattttggctttcacaatttatctttaaatccttgagcaatctgtatacaattaagagatttctgacatttattcttacactaaatggatcaactctaggatttaggcatgttaacttctgttgtgttttgaatctctccagagttgcatgtagatagcatttatttctgtgcccttaaacccatttagaaaataactacaaagtaaaaatgtagaggaaatagaaatgtattttttcatgaacattttgatacaaatttcatcatttaatgattcacccaatttcttgcattaatttgaatttaagcatttaattcaaagagaggggagcatccattattgatacatgtgggcttttaaaaactccatcctttataaatagtcaaggtttgggccacacaaagtatatttttatcatggaaaaatttcaactcctcaagccgtaatgttgaacagaattggagtattttctttataatttcttgaacaggcaaatgaaagcttattatagaatgcatgtattttcttttatctttggaacatcagcaccagtatattgctggcagctattgtattaaaaaataaagtatattttcactatcataaaggattcttttttcccccctcatgnnnnnnnnnnnnnnnnnnnnnnnnnnnnnnnnnnnnnnnnnnnnnnnnnnnnncctgaacgccaaagcgacaatgccacacaaataccgccagaaaaccccaaaaacaacaaaacacccgcgcgcaaccgaggggctgtgaacgcctccaccatgatcttccccccgccccttacttgcccccaagcgagacggtgtgccgcgccctnnnnnnnnnnnnaacacattttcccccaaaaccgctccttgggcggcgcggcgccggccccggaaaacccctataaaccacgggcgcgtcccccggcgggtaaaccaaaagggacaagtgcagcggactcgaaaacgacacggggccgggcggctatttatcgtgaacacccaacaacacccccccggccgcgcgtgggtgaataccagcacgccgccgccgccgaaaagaccaaaacttaaaaaaacgagggggaggcgtccgcggtcgaccatgcgtggccgtgacccgccccgccaaaaccggaaggcgcgccccaacaccgcgctttgttaaaattaattatgcaccctgaacaccccagcgcgtcaatggctcacttcatgaaacgcgcccntatatccacctcattcattatccacctaacacaacccggncctccgcacttgattattctttcgcacctgagggcgccggtgagtttcgacgcgcctcctcgaccccacagccacccactacgccactctactccgccctttcccccgcatagccatcccctgtgcgccgacggaagaccaaccgacgccgaccgcacaacctccc

SEQ ID NO: 256995 - DNA, 1327 bp, Homo Sapiens
ttttcgcactcacacaacctgaagttagacagttcccgacacttgagctcctcctcccttgggaagagccatccggaagcggctcttgttcaggacgtggacgcaaccagggccggctgggagcggcgttgtcaacacacacccttggccctcggcaggtatcagatacacaatgggatgaaggaggttttttcacatttggttcacaactaggcagtatgtgtgcaagtgacagctgaaagcaaacctgtttctaaatgtggcttatgaatgttctaatcaggtgtggaaggagctgacacacggagagtcacaggctatacagctgcttcgagcagcgggaatgtttgtcttgggattagatgctgacgtgtggtgaaatgttacagagagcccagaggaaggaggagttcagaggttcccagggaagaggccgggggcttgcactgcacccccagacagtgtccctgtgaacgctctcatcaaaggttctgttccgtttgccaaacaccaattttctttttaaacatagcttgtgatggaaccccgatttcggtgagcccctctggcagctccgagactcaccccacctgcgggtgacaggtctgccggctcctggcatctgaacaaggcaaggctgacatatagaggtatcctgctttatttaaaaagaaatggtgttgggaggcaaaatcaatttaggcgcctaaatgattcaactgtgcaatttaatagtagcaccaatttttcattttaaaagaattaaataaaaacctgagaagtctaacgtgaagctaggactcctgcctgcttcccttcaggcacctgctgtgcctccttctccgcagatgctctggttggaagcctcctgcactgccttctgtaacagcaccagctggacgttgtcatgaaatgtcacgagttctgggtgtttcctggtctgcagtccgcagctccctgccatcggccacccgatctcacgatggcacagcagacaaactctgaggagcctcccaggagcctagggcttttcctccgccctcttctgtaagcagactggacagcaggcccctgggatgttcacggggacagcacaggtggcaggggggcaagcttccacgaagcaggtgacctgcccgtctttgcattcacaaatggtgcatgcatcttttttccacttggtgttgttggcgtgagattcgcccccggcatccacgcactctgtggtactgagccgtgattcaagtttcttatctgtgttctgaggtctgtgatggtcttctgccgacgcgtgggtcgacgatatcccgtaattgcggaccgtacc

SEQ ID NO: 256996 - DNA, 1646 bp, Homo Sapiens
  misc_feature (357)..(415): n is a, c, g, or t
  misc_feature (428)..(452): n is a, c, g, or t
cctgggtggcaattcggacgagggtgaacctctgtggaagcgaggacacgcctttgcccagtgtcccaaagcagtgcacaattccgtggcagctcagctaaccggcgtggccgggcactaaacacccgcctgcctgccagggtgaacacacagccagcttacccctcttaagtgccaaaactttcttttaaaccatgctgtatcgactttgaaggagatctttttaaaacctacaagagacatctctctatgccttcttaaaccgagtttactccatttcagcctgttctgaattggtgactctgtcaccaataacgactgcggagaactgtagcgtgcagatgtgttgcccctccnnnnnnnnnnnnnnnnnnnnnnnnnnnnnnnnnnnnnnnnnnnnnnnnnnnnnnnnnnnctctctctccttnnnnnnnnnnnnnnnnnnnnnnnnnataccttttcttcccctggattttcaccctttgggctgccttgctcatctttatgccccagcactaggtacggggcccaacacgtggtaggcactccatcagtgtttgctgaattgaaaacattgttgactgtggcttctatcagagtgtctaccttttgcagctcttcccctcccctcatttaatttgctgcttttaatctacgtggtctgagaatttgtgaaaccagtgttgttagaagtgtatataatctgaatcaataagctctgaatggtggccaagggcctcgtcttatggcacaaagatgcatggacttcatgacagctcttttggtggctcagaagccattttttatagaatcatggaatctagaatattcctgctggaaagaacctgagagttggtttggaccaattccctggttttccagcagatgaaacaggcccaaagaggttaaatgactgggtgaaaatcacatagctgtctggtgccagagccagcctatagtagagtcccctgaccccaagcccggtgctcattccactacctctcacacttcacaacaatttcctcaacacttgagggcccagaaagtctgatctctccagaatgatcagcccagaggaatgctgagaaatcacctggaggagggagcagaaagagaaggtttttaaggaggggcttctgaatacttgggagatacggaacggaccaaggaccacactccagggtgcattcgttgctccctggggcaccacttctggattacagtgtgccaggtcctttggaggccctaccccttccccattcattgccaccagtgagaaatgggggtgcccctgtgtaaagaaacctaccaaaggtttacatttgcaccttagcctcaatagctacgaaccctagagaagcagctagctggagctcatgtgcaactcctgattctcaggagaaagatggattttaacccaaaattatgagtgagctgttaactctaaaatgtacttgggagataggccaagcgagaggtcatgggccaactaagtgttatccagtagaaaagacagtacactgcttttcttttagtgtttgcttttcctttgctatatgttttgctatttccttgtggcttagaatgtaaaattgattgttaaaagttttgttctgaataaatatttatcttttgtattgctaaaa

SEQ ID NO: 256997 - DNA, 499 bp, Homo Sapiens
  misc_feature (382)..(382): n is a, c, g, or t
cggaaaaattatacgccttcagctggcagtcagggcctcaggatgcccttgaggctgaagttggtccagttcacagcaactttctgacgagtctgctttgcagaatccaaacagaacctcttaaagtactccacctctcggtcagtctcatccatctccaccccgtccatgtccttgggcaggaacacatcgtccaaaggaggaggctggcttctcctgcttgttgcggctccggcggctgcggccccttgccctggggcaagctctgtggccttgctgggcctgggggctgcacagactcctgctcctgaggccgtgccttggcctcgcctggccagtttcgccaggagctgcccttctccttctcagttttgggactgcnagcccaacctggtccttgcgggctcccccggctcccctctccagcctcagcacagctgcctactttgggaagctctaggaccctgcctggctgctctggccagcgacctgcccttgc

SEQ ID NO: 256998 - DNA, 483 bp, Homo Sapiens
ggtgatatggatgacatcttctcctctggtatccaggctaagacaaccaaaccaaaaagccgatctgcacaggccgcacctgaaccaagatttgaacacaaggtgtccaacatctttgatgatcccctgaatgcctttggaggccagtagagcacacagggtatccacaggttaccctgcagctacattgctgagttagtgatgatgtcgtatatgctgatggtcttaactggattacaaaaagcaaatactagaacagctagctcatagatcacccaatgtacttggtatttttctgcactggtttaatcatgcttaatactacaaaacaaaaataaatatttcacagtggttggattgttttgcttttaaaccacagtttgatttagaatatgctttagggtgtgtatgccacctgaccagaagtatttgttatatggatgggaaccctaacttagggcctgggcaggggaaagagaaagt

SEQ ID NO: 256999 - DNA, 462 bp, Homo Sapiens
aatactagaacagctagctcatcgttcacccaatgtacttagtatttttctgcactggtttaatcatgcttaatactacaaaacaaaaataaatatttcacagtggttggtttgttttgtttttaaaccacagtttgatttagttagccttgctggggccataatatgcttcagggtgtgtaaaagaagaaatctctttgtggctttcatgggcagggaatctcagagatagcaaatgccacctgaccagaagtctttgttatatggatgggaaccctaacttagggcttgggcaggggaaagagaaagaagatgagagattatacttcatgagtcttagcaatatgggagcaggttttcactgaattctgagggtgcctctgcatgtcctccaaggcaaagtttggcaaactgtggcccccccactgtcatattttgttaataaaattttattggaacaca

SEQ ID NO: 257000 - DNA, 390 bp, Homo Sapiens
  misc_feature (325)..(338): n is a, c, g, or t
caacccatccctttctaaaccttacagtagcatttacccaagaccctgttccccttaactaaatgactcatttacccagtttcatgtacactttgcaacgcaattcacaagtgtcatagacacatgaaatctacatttaccttttaaagtttaatcaggtaaacccaatattttctgggtaataaccgtgtgtgatatatagtaagcccaaggccagtatagagaaaaagctatagcgcaaaatcactgtgttttttaaagaacactttcctactcaggaatatatttagcattttgtacactcggtgatatgttatatgtgtcnnnnnnnnnnnnnnctctagagtcgagctctcttcgcgtgaaatattcgtacagcccgggggatcc

SEQ ID NO: 257001 - DNA, 967 bp, Homo Sapiens
  misc_feature (490)..(521): n is a, c, g, or t
ggccttaggcacacatcgcactctggatatagttggtgttttcccattactgtattattaagcaaaatttagaatgaaatttttagggtactggctggtgattcaggatgcttgggatctagactttcattagcccctacctgcaagtttgctgatgggaggaaccttgtcttgttggtcatggtgtccctagtgctagcatggagtctgcacataatacttgttcacagagtaagtcagagctgaccaagttctctgttttctggagtagaggacttctatgtttcctgcaagctcagcacttccacctcctgtggctgcactaatacgaaatcagagaccactcgctgtacttcactttgaatcactcagtcaccaaaaagatagtgcttgccatgtgtcaggaacttggctaggcagggagaaattcatatgatttatataaatccataaatccatatgatttacataaatccataaattcatgtgnnnnnnnnnnnnnnnnnnnnnnnnnnnnnnnntagagaatgtttgacatatacacaagtacatgttaccgacaccagcctatagaatagttttcgtgcatctccatatatctatcactggttccaacagccatcaatccatgttagctgccccatccaaatgccaccatcaccctcctcctgactatcatgttattttgaagcaatagcctgtaaatatttcagaatgctctccaaaatataaagactcctgtaaaaacatatgacaacaatgccattattactttctttgaatcaacattttttccttaatataatcaaatatttagaaatcaaatttgaataaaacatgggtcaatcttcaaagaatttatagcttaatggaacagatcaaggaaagcagggatgacactacagtagggtagcatcatatgcccatgtaacttatgtgacttaaactatcctgtaagggtgtgggg

SEQ ID NO: 257002 - DNA, 741 bp, Homo Sapiens
actgcatttgcgtccaccaaaaaagtattacaagtggataaataatgtgcactgctctgagcccaaaggtacgcagtgggcctggcctctctgatatgcatcagtatagccaatggctagccagcagacatgaagctaatttgctaccaatgaaagaagatctggccttgtggttaaccaatctattagggaaggagattacagcagaaacttttatggagaagttggacaatggtgccttgctctgtcaacttgcagaaactatgcaggagaaattcaaggagagcatggatgctaacaagcccacaaaggtcaaaatcccaaattattctcatttccttgtttccagtgagtcataggaaggaattgtctctccacacttttgatatataactcttgaggtgggtggcagaagaagccagtgtctaagatattgtgctgagattctttaggaataatacctaaccagaggatgaagtttgttgaactgtcctgtagatggaattgcaaattgaacaaaattactttatggccttatgtatttaaaaatctttggacaagagtataggccctagcaaaatggaaaatgaccatatgcaaagcatggaaaacctttgtaaaaagcactcatgtttgagatagcttactttttatgccctaataagcaaatggcaaaagtaaaaattattttagaattccccttaaattataagagggtaaaataaaatctatcattttcaa

SEQ ID NO: 257003 - DNA, 410 bp, Homo Sapiens
  misc_feature (35)..(35): n is a, c, g, or t
  misc_feature (46)..(46): n is a, c, g, or t
gaggggattatctgaggcatcctggagatgtatanccctgtggttnccccctgcccctctgtttccgatgaggtgtacggatgagtgacctgcactaagaagtgagttgccacagtgaaaatgggttggtttttgtcttcgacgctcagggtctgggcgcctcgcatttgcagtctgttgtgacagacacggggactccgcgtggcacctgtggctgccctgctgtgggggtcccggggccgcgaggccccttcagtcttgttctggggggacggcccactccggggagggggtgtgctgtgctgagcgctgtatacctgaatatagtttattttttctacatttgaattctgttgtagatttatgtaaaaatacattctttttgaaaataaaaattttcatgtcttcta

SEQ ID NO: 257004 - DNA, 605 bp, Homo Sapiens
  misc_feature (156)..(156): n is a, c, g, or t
  misc_feature (204)..(204): n is a, c, g, or t
atcactcccggcgcttcgtagcgaataatcggccacgacagcgacgatgctgcagatgagtgacatcgtgagaagagtgatgcgtcttctcgtgccctctgaaaggggctctcccgcgtctcgtgtagagacacgagcgcagcgtatatcacaggngagacacgaaagggccccctataggctctctacacgctgtgtgatatntcacactctgtgtctacaaagagagcgcacaggcgcgcgtgatcacagaggctctgtgctcgcacgtgtggtgtctcgtggtgtgtgagaaaagcgacacagcgtctggtgtgcgcacgagcgacactagtgcgacacgatatctacagcgccctgtagcacacacacacactctctcgtgggcaagagccccgtgtgcacagacgcagcatctctctctgcgggcgcgctgtagagagatatagacacgaggcgccgctgtggtgctctcgtgcgacgtgtgtgggcgcctcgtgcgagacgatatccgctgctgtcgatactcgcgagatagtgggagatgtgcgtcgtgtcccgcgtcgtgtattacacatcgtcgtgcgtcgtgtggtgtatgagag

SEQ ID NO: 257005 - DNA, 901 bp, Homo Sapiens
  misc_feature (116)..(164): n is a, c, g, or t
  misc_feature (345)..(355): n is a, c, g, or t
  misc_feature (748)..(748): n is a, c, g, or t
acttgtagtccatcattcggggtagagtttaatgatcactgtaaagtcttcctacacatgctctggtctggtcacatattctgcatggataagtatttcacagtctcttgtgtcannnnnnnnnnnnnnnnnnnnnnnnnnnnnnnnnnnnnnnnnnnnnnnnntttgttgttttgtaccaaatctctccattatttacctttgtagcaactatgaaagcacaatttttgtcttctaatttaatttggtacaaaatatacctaaagacttatctttggatttttaataaaattgatttgtgtaaccaacaaatcaagagcatcataagaatggctacaaaatttnnnnnnnnnnngggtaaatggtgatggaataaaaataagcagatcaagggaagtgtgctatcataaaataactgtagcttcaacatcttgagtaccagtttcctggcagatagtaaacatccaatcacaagggatttttcctgaagggtgtaaagctggtttgaaaattcttcagtcacagagcagcctacacatgccaattagaaactgacagacactagatgtgcttggaagattaaacactacgtacagaaacagcagttactaagctcctcagtagtttcttgtcttttttaagtttcgctgaatcgacagtttgcacaacgtgctatattctgtgggtcaaaaccaagtaaatactgtgtaaagttggcagatttttccagctaagatcaagaaaaaancaaattttctgataaaacaggtttagagtcagaaacactctctaaagtgcaaaactgatggtccacgatctcaaatagctaaaactcctgcagaatggaagggagagacgtgaaacagggaaataaattacagtcagtgctagttaatttagg

SEQ ID NO: 257006 - DNA, 528 bp, Homo Sapiens
atttacaggctggagcagcagctgcatcctgcatttccccgaagtattacatgattttcactccttgcaaactttgccatctttgttgcagagaatcggaaatcaatatgcatagcaaagtcacaatcatatgcatcagatttctcttttggtttcttttgctctgcatgcttattgggaagtcacatactgaagatgacatcataattgcaacaaagaatggaaaagtcagagggatgaacttgacagtttttggtggcacggtaacagcctttcttggaattccctatgcacagacacctcttggtagacttcgattcaaaaagccacagtctctgaccaagtggtctgatatttggaatgccacaaaatatgcaaattcttgctgtcagaacatagatcaaagttttccaggcttccatggatcagagatgtggaacccaaacactgacctcagtgaagactgtttatatctaaatgtatggattccagcacctaaaccaaaaaatgccactgtattgatatgga

SEQ ID NO: 257007 - DNA, 356 bp, Homo Sapiens
acaacatagaatcaagatacaactgtagatcattataattctaaacttaatattagaacttcaaacatgaaaattccagatatttgtgagataatactccattgcttcattgctttatactgccatgggtccttctgtttgatgttctacattagctcagatatcctagtaaactcagttttgttttctttttcatctagttagcctttgggttatcacttctcgatacataatagagatgtagataagcaataaaaagatgacaaagaaatcatctagaaagcctagaattccaaacaaggcttcaggtacaaaatctagaggtgatataagatagaaaaaagctcccattaaac

SEQ ID NO: 257008 - DNA, 568 bp, Homo Sapiens
ttttttttactttataaacaagaagtttaattgactcagttccacatggccggggaggcctcgggaaacttacaatcatggcagagggagaaacaagcaccttcttcacaaggcagcaggagagagacagtgacagcaggggaaactgctgtctttaaaaccagcagatcttgtgagaactccctctctattatgataacaacataggggaaaccacccccatgatcccatcacctcccatcaggtccctcccttgacacatggggattacaatttgagatgcaatttgggtggggacacaaagccaaaccatatcagatggtgaaaatgttatactaaaaatgcacagtctctacaaactccctggtttcttttctgtcagtgaagtcaaatatctacacaacggccctggacaatgctacagggaggacacattaccttaatcatctttctgtcccacttctcagccacaaaggcccgagaggggcatgaacttggctggtgagctctgcacctcaacattctcttcccaggcttgtctaatcaaagataactgttccaattacat

SEQ ID NO: 257009 - DNA, 524 bp, Homo Sapiens
atctcgctcctttgagaggtcccataaaagcaagcaccatggtggcagtcgctcaggacatggcaggcacaggcgctgactttctcttcctttgagcctgcatcagttcttggttttgcctatctacagtgtgatgtatggactcaatcaaaaacattaaacgcaaactgattaggatttgatttcttgaaaccctctaggtctctagaacactgaggacagtttcttttgaaaagaactatgttaatttttttgcacattaaaatgccctagcagtatctaattaaaaaccatggtcaggttcaattgtactttattatagttgtgtattgtttattgctataagaactggagcgtgaattctgtaaaaatgtatcttatttttatacagataaaattgcagacactgttctatttaagtggttatttgtttaaatgatggtgaatactttcttaacactggtttgtctgcatgtgtaaagatttttacaaggaaataaaatacaaatcttgttttttctaaa

SEQ ID NO: 257010 - DNA, 433 bp, Homo Sapiens
  misc_feature (103)..(175): n is a, c, g, or t
actcaatcaaaaacattaaacgcaaactgattaggatttgatttcttgaaaccctctaggtctctagaacactgaggacagtttcttttaaaaagaactatgnnnnnnnnnnnnnnnnnnnnnnnnnnnnnnnnnnnnnnnnnnnnnnnnnnnnnnnnnnnnnnnnnnnnnnnnntagttgtgtattgtttattgctataagaactggagcgtgaactctgtaaaaatgtatcttatttttatacagataaaattgcagacactgttctatttaagtggttatttgtttaaatgatggtgaatactttcttaacactggtttgtctgcatgtgtaaagatttttacaaggaaataaaatacaaatcttgttttttctaaactgcttcaaataccttatttaaataaattattaaaaaggaaaattttaatagc

SEQ ID NO: 257011 - DNA, 392 bp, Homo Sapiens
tagccaaggcaatcctaaacataaagaccaaaaggggaggcatcaagttaccaaacctcaaaccatactacagagctacagtaaccaaaacagcatggtattagtagaaaaacagacacacagataaatggaacataacagagagtccagaaataatgctgtacacctacaatcatctgatcttggacaaagctgacaaaaccaagcaatggggaaagaagtccccatttaataaatggtgctgggattactggctagccatatgcagaagattgaaactgggcccccagcttactctgcatacaaaaatcaacttaagaaggattaaagacttaaatataaaacattaaactataaaaactctgaaaaataacctaagaaataccattctg

SEQ ID NO: 257012 - DNA, 446 bp, Homo Sapiens
  misc_feature (25)..(25): n is a, c, g, or t
  misc_feature (32)..(32): n is a, c, g, or t
  misc_feature (42)..(42): n is a, c, g, or t
  misc_feature (378)..(378): n is a, c, g, or t
aacactcatcccagagcccttgccnaatcccnactcccgaanacaaactgaactcttacatcaaaagagttggggggaaaaaatttaaaacgagaggaacaaatgagaagattgggaccaaggactcaggaagcaaggtgggatatgtgcacccatagaccacttagctcccggcatacactccggctgcgtggatcacttttacatgctgggagtcaacttcctattaaaatataaatgctaagactagctcttcctgcctctgcttgagaaacagacaagctgtaggccagcagagagcagagaggttctctatgattgtgtgcggaagtgctggcgggggtaaagcaaaaacctcccttccaggagaactgtttncgaagcttgcagccagcccacagcactgatgggagatggaggaggcttggcaaaaacccagatgccct

SEQ ID NO: 257013 - DNA, 581 bp, Homo Sapiens
  misc_feature (142)..(142): n is a, c, g, or t
  misc_feature (202)..(202): n is a, c, g, or t
cctgaacacacgcattgtttatgacacaggaatgcccctcctgggaaccaacaacaacgcatatatgtgttgcatatgttcaccaaaagacatttacaagaatgttcatagcagcactatttgaaatcacccccaagtaganaatgcacaaatatttaacagtagttggataaagtgtggtacgtttatgcaatataatccnatatagaaatgagagtgagggatctgcaaactaatatgcaactgtacaaacgaatcccacaaatataatgacattaaaaaagctagtcacacaaagttatgctgttagaagagagtgatttggtcgggcgcaggggtagttacaggaagggagtacacggagatttctggttgttagttatgttcagtgtcaatctaggtgctaaacaggtacaataaagattttagaattcatcaatttgcacacttatgatagatgcactttcctgtatgtatatttcaataaaatcttttaaaaagtaaaatgacaaaaagacactattaacaaaaatgacatattatattaactgttatactaaggaaaatataaaaatgagttc

SEQ ID NO: 257014 - DNA, 613 bp, Homo Sapiens
gtgtttcaccgtgcccggcctattggggctctcttgggtcttttttgggtacttgttaaatcaagtttagcctaaagctacctccttacatattttaagttcagcctaaaggtttctctgtacatcatgaactataacaagtggaggtataaaaacactgtagactgcacttgtgccaatcaaatgtagccaactgttcgaatcttgttcaaataaggccaaaggagctgtaaccaatcccagctgtttctgtacctcaacttctattttctgaaagtaggtagaaattaatttacttcgaaaaaaataatttcccctgaaaggtagctgctgtatcccaaggctttgccaggttaacaagtggacagcatggaatatttggaggaggtttggaatcgtgcgcacgtgggtttcaattctgctcagccacttgttaagctgtgaagtctctgagcctcgagtaagatggacttaactccgatctacttgcggagttgattaaagataaaataatgtatacaaagccctaggcatattgttctggcaaatagtttgtaataataaatgtagttactttgagaacttgaaacttggtatgggtgaggaggagatg

SEQ ID NO: 257015 - DNA, 457 bp, Homo Sapiens
  misc_feature (385)..(385): n is a, c, g, or t
ctcggaatgggtgggatactccccgccccaattccctcccctgtccctgccccgggaggtatctttggccatcaccgaggacacaggaaggcactctgggagatgcctgtctcatgatgggcttccttattaactgtgcctgtgtctccttcgcgaggctcataccttctttggttttcatgagaaaccagggctctcaagctgactccctgagcatgggcatggcagcacctggcagcatacctgtggtacgagcccagactgtggtgctggggatgaaggagaaactgagaactctgtgttgtctttctcagacaagccttcatgtattgtattttctttaaagcctgttctttagggtccaggtcaaaatatgtaccaattncctggcaataggtccctctttaaaacagtgaattttttttggtattttattatgaaaaatttcaaacgttaa

SEQ ID NO: 257016 - DNA, 1071 bp, Homo Sapiens
  misc_feature (948)..(957): n is a, c, g, or t
agcgacgcgcggagtgcggcggcggagcctcctcctgctgctgctgcgccccatccccccgcggccggccagttccagcccgcaccccgcgtcggtgcccgcgcccctccccgggccccgccatgggcctcaccgtgtccgcgctcttttcgcggatcttcgggaagaagcagatgcggattctcatggttggcttggatgcggctggcaagaccacaatcctgtacaaactgaagttgggggagattgtcaccaccatcccaaccataggcttcaatgtagaaacagtggaatataagaacatctgtttcacagtctgggacgtgggaggccaggacaagattcggcctctgtggcggcactacttccagaacactcagggcctcatctttgtggtggacagtaatgaccgggagcgggtccaagaatctgctgatgaactccagaagatgctgcaggaggacgagctgcgggatgcagtgctgctggtatttgccaacaagcaggacatgcccaacgccatgcccgtgagcgagctgactgacaagctggggctacagcacttacgcagccgcacgtggtatgtccaggccacctgtgccacccaaggcacaggtctgtacgatggtctggactggctgtcccacgagctgtcaaagcgctaaccagccaggggcaggcccctgatgcccggaagctcctgcgtgcatccccgggatgaccagactcccggactcctcaggcagtgccctttcctcccacttttcctcccccatagccacaggcctctgctcctgctcctgcctgcatgttctctctgttgttggagcctggagccttgctctctgggcacagaggggtccactctcctgcctgctgggacctatggaaggggcttcctggccaaggccccctcttccagaggaggagcagggatctgggtttccnnnnnnnnnnctgttttgggtgtactctaggggccaggttgggagggggaaggtgagggcttcgggtggtgctataatgtggcactggatcttgagtaataaatttgctgtggtttgtaaaaaa

SEQ ID NO: 257017 - DNA, 705 bp, Homo Sapiens
  misc_feature (673)..(673): n is a, c, g, or t
ctgctgctgctgcgccccatccccccgcggccggccagttccagcccgcaccccgcgtcggtgcccgcgcccctccccgggccccgccatgggcctcaccgtgtccgcgctcttttcgcggatcttcgggaagaagcagatgcggattctcatggttggcttggatgcggctggcaagaccacaatcctgtacaaactgaagttgggggagattgtcaccaccatcccaaccataggcttcaatgtagaaacagtggaatataagaacatctgtttcacagtctgggacgtgggaggccaggacaagattcggcctctgtggcggcactacttccagaacactcaggtggagtgttgggaggggactttctaaccccacgggaaaaggtgttagggctgggagaacagaattgttggcctaggctgggcccccaggcaaaggaaaaaacccttccccacttctaccccttctgtttggctatcccctactcactcttcagaactcaccttagtcttccccagcttggacttctcctttcttccttccttcctgcccagggcctcatctttgtggtggacagtaatgaccgggagcgggtccaagaatctgctgatgaactccagaagatgctgcaggaggacgagctgcgggatgcagtgctgctggtatttnccaacaagtaggacatgcccaacgccaggccc

SEQ ID NO: 257018 - DNA, 794 bp, Homo Sapiens
  misc_feature (239)..(529): n is a, c, g, or t
  misc_feature (741)..(741): n is a, c, g, or t
  misc_feature (753)..(753): n is a, c, g, or t
cgcggccccagcctgtgcaccctgatttttaagccatagacctggggtcagggcaggaaggaacttcactctgctgcttccgagaacctcggccgtgacattcggggccgggcgggacccgccccacagactccaacttcccctccaaaccccgaagtgaaacccgccaccgggttacccccacaagggggccgctgcgagaagttcacccacccccgaaaaaataattaaactcgcannnnnnnnnnnnnnnnnnnnnnnnnnnnnnnnnnnnnnnnnnnnnnnnnnnnnnnnnnnnnnnnnnnnnnnnnnnnnnnnnnnnnnnnnnnnnnnnnnnnnnnnnnnnnnnnnnnnnnnnnnnnnnnnnnnnnnnnnnnnnnnnnnnnnnnnnnnnnnnnnnnnnnnnnnnnnnnnnnnnnnnnnnnnnnnnnnnnnnnnnnnnnnnnnnnnnnnnnnnnnnnnnnnnnnnnnnnnnnnnnnnnnnnnnnnnnnnnnnnnnnnnnnnnnnnnnnnnnnnnnnnnnnnnnnntaaataaataaacttgtgagctggccccaacccctcctaggaatcacagctccccgtactggtgccgccgcagtggccaagttgcgacactgcccacggcccctccctctgatgcagattcagggcttctcttcgatcatgttgggttttgattgtttttccttgactgcaaaaccctctttcctctcctcttttgggacaagagccctggntttctacgctgnccttggccaccacactgcctgccccacgagctgggaggcag

SEQ ID NO: 257019 - DNA, 620 bp, Homo Sapiens
ggcacgaggttgcgtcatttgtcctggcaactactggcagattctttccaacctcgaattctgctcagctcgctttggcagcttggtgggcggtgggcgcgggtggcggaggcgattgaagctgctggcccagcatgtggtgcgcgagcccagttgctgtggtggccttttgcgccgggcttttggtctctcacccggtgctgacgcagggccaggaggccggggggcggccaggggccgactgtgaagtatgtaaagaattcttgaaccgattctacaagtcactgatagacagaggagttaacttttcgctggacactatagagaaagaattgatcagtttttgcttggacaccaaaggaaaagaaaaccgcctgtgctattatctaggagccacaaaagacgcagccacaaagatcctaagtgaagtcactcgcccaatgagtgtgcatatgcctgcaatgaagatttgtgagaagctgaagaagttggatagccagatctgtgagctgaaatatgaaaaaacactggacttggcatcagttgacctgcggaagatgagagtggcagagctgaagcagatcctgcatagctggggggaggagtgcagggcctgtaaa

SEQ ID NO: 257020 - DNA, 572 bp, Homo Sapiens
ggctgcttctggggagaaacagcaggcagaaggtcagagtcaccttcctgcttctgccaatttcctcaaatgccttcagcttaaaatattcaatatgtcaaagtgctgtattttgtgtagggtgtcctgaaaccccgtcactaacctctaactgaaagttaggattttcttcaattctgaacatagttcataaaccacggtaatattagcaatacttcatcatcaaaagaaaaacccagatattttcatatcacattagttttttgcatctattttcattatgcttatcactatttcaaatttaggatagctattaactcttatttaatgcatttataaagaagcatgcatattaatatataacaaacttatcttttaacattttaataactgtatttcgatataattagattcctttgtaatccctatatattttatgcatttaaaaacatgattttaagaaggcattcataggctttaacagatagctaaagactaagaacccatgtttatattccactctcaatacttgaaaagttgtggataaaacaaaaattatgttaaaaactgaa

SEQ ID NO: 257021 - DNA, 355 bp, Homo Sapiens
tgtgatacatatgactaaggcaaaaataacaatgtgcatagatatgatatatatgacaacaaagattttacatgaagtatcataattttaactctaaggctgtgataagttaagaatgtatatcataattctcagaaacactgtaaagcaataatgcaaaaagatacagttaaagccaacagaggaattaagatgaaatacaaaaacattaattaacccaaaagaaagcaggaagtaaagaccaaaggaacacaaaactgaatgggacaaatcgaaaacaaatagcaaaatgatagacaaactcaactatctggtgtctataagagaagcacattaaattaaaaaacacaggttg

SEQ ID NO: 257022 - DNA, 387 bp, Homo Sapiens
tctccaatgaaatcgtgttcttacaaatgcccggctcatgcctaatatgggccctataagaacaggcacaggtacattaactacaggtggtgtctcaggcttatctgagtctctgacaggggacacaatctgtaaaatttcctggaagcttttcagagcagccagagatacttcattgtttttgctgagtgctgctgactgtatatggtcaagaagaacatcccaagctcttgaaaaatctcctaaaggctgcagcaaatatcttctagtgttgaagatccttgctactccagccaatgttaatacccacgtctcagcccattgcttctcggcggtgtcccgtgaatgatgaatgagaatattgccacctacagactcaatcttttc

SEQ ID NO: 257023 - DNA, 345 bp, Homo Sapiens
ggacagcagcacctttgagcgatggcggcgtctgtggaaccccagaggcaagtggcaagaggaggtggcggcggtggtagtggtgggctcctgcatgaccgacctggtcagtcttacttctcgtttgccaaaaactggagaaaccatccatggacataagttttttattggctttggagggaaaggtgccaaccagtgtgtccaagctgctcggcttggagcaatgacgtccatggtgtgtaaggttggcaaagattcttttggcaatgattatatagaaaacttaggaactgcttctataattgtcaataatgaaggccagaatatcattgtcatagtggctgg

SEQ ID NO: 257024 - DNA, 288 bp, Homo Sapiens
  misc_feature (95)..(137): n is a, c, g, or t
ccaaggatgggtttatttcaaaattgtaaagatttatatattatttttattacatataataagcaatttttagcttaagtttcacatttaaagtnnnnnnnnnnnnnnnnnnnnnnnnnnnnnnnnnnnnnnnnnnngtttaattatcttgcagcacaggtctacctttaaatattcacatttcaaagctgctttgaaaagatttaaaaattggctaaaaataatttacaactggcagtgattaaaaatcttatctttggaaaagtatattaatgacacataatgaat

SEQ ID NO: 257025 - DNA, 359 bp, Homo Sapiens
atagcttacatgctagctaagtaattaaaaataaggctaaagcaattgtctctcaaatatgatactcagaaagattcactaaatctcacaaaaaatgggttcagaaaaaaagacatcttaatattaaagactgatagacatatggtttgattatgttccccaaaaaagcatgtattgaacttaatcaccattctaatagtattgagaggttagatctttaggagactattgggccttgaggactctgccctcatgaatggattaatgtcatcatcagggaagagggttccttatttaaaaaaatgagttctggcccccctttgcctctctctcgtctctttgcccatccaccacaaaag

SEQ ID NO: 257026 - DNA, 774 bp, Homo Sapiens
  misc_feature (191)..(221): n is a, c, g, or t
tgtttgtactgtatgccttcagcattgcctaggaacacgaagcacgatcagtccatcccagagggaccggagttatgacaagctttccaaatattttgctttatcagccgatatcaacacttgtatctggcctctgtgccccagcagtgccttgtgcaatgtgaatgtgcgcgtctctgctaaaccaccannnnnnnnnnnnnnnnnnnnnnnnnnnnnnngctcggatacttgccaaaatgagactctccgtcggcagctgggggaagggtctgagactccctttccttttggttttgggattacttttgatcctgggggaccaatgaggtgaggggggttctcctttgccctcagctttccccagcccctccggcctgggctgcccacaaggcttgtcccccagaggccctggctcctggtcgggaagggaggtgcctcccgccaacgcatcactggggctgggagcagggaaggacggcttggttctcttcttttggggagaacgtagagtctcactctagatgttttatgtattatatctataatataaacatatcaaagtctctggaaaagagtagctggaaatggacaactggaaaggctgagtgcaatcaaatctcctcacctgaagacttaactcttgtcggcccgctgcggccccagaaaagttttcaacactattgtttgggctcccggacccacaagaaaggggaactgggcctgatgtgtttccaagaagacccggtgactgaccatggctggtgttccacc

SEQ ID NO: 257027 - DNA, 633 bp, Homo Sapiens
gacgtaataagctgcacatagggtgaaagttaaattatccttcccaatgttacttttagataaatacctgtgagttcactggaatgagtaactttgctagaagaaaatggtttctatagcatgcccaaacattttctggcacatgttgagtatcccttattcaaaatgcttgggaccaaagtgttgtggactttggagtacctgcacatacatatttgaagtatcttggagatggcactgaagtctaaacacaaaattcacttatgtttcctatacaccttcttaaacccatagcctaaaggtgattttatacagtattttaattaattttgcacacctgtcacgagatcaggtgtggattttccacttgtagtgtcatgttggcactcaaaaagttttggatttcagattaggaatgtccagcctgtattttgcattgaacagattaagtcttaagaattccaaacttacaaaaataagacggattaatttttaatgtaattcaaagcttcagtcctcacttaggatatatattaaaaacacctataacttctttaagtatgaacataaagacagaaagcaagttctagaaaacctgttttagaaattaagatatccaaaagtaaagggcta

SEQ ID NO: 257028 - DNA, 627 bp, Homo Sapiens
  misc_feature (197)..(222): n is a, c, g, or t
gctgcaggattcggcacgagagaaaattggtggtattttcacattcatagtgtttctatccaatttcagtacccacatttaatgaggaaaaaatgttttaccaatgaaggaggaattcttaaattagctgtaatgttaggttggagaaaatttggtatttagggtattttcaaggtaccatcaaatcagatttctgnnnnnnnnnnnnnnnnnnnnnnnnnnaatcagtattggttttacaagtaatatactttgaaactcttgaactaatagtctcaaaaactctagaggacagtctgagaacacgtatttctattggtctaaataaatacatgtttttgaatagttcaatcatgaattattgactatgtcttcatctttctcccaggaaattggaaggtagaattgtaaattcatagaacttcttttataatggtgtacctcagcagctgcctttcaatttatgccaagtccttacagagtttatacttgaatagtaaatatgtcttctgagttttacagtgtcttaaactcaatgcacatctttttttcttctttttccaccccttcttgtttgtagttcattatacctgtgctattacagaactgagttcctttcttgctgtg

SEQ ID NO: 257029 - DNA, 431 bp, Homo Sapiens
atggatgatgctgctggttgtaaatttcatcgtgtgtgtctaatgtttgttcctgttgaatgggtaaaaacaaaacaaaactttttttagaagatgaatttgctgtcatgttttgtggaatgagggaccgttgagctcactaccacctggagtttgagttgaagcatgaaaatggtgcccatgcctgacgctccagcgcctggatctgcacgtgcccttgtagaggatccttaccgtcctagagagcagacgctttctgaaaactacttgctccaaaagaccctctgagttaacgtttcagctgtatcattagacttgtatttagagcgtgtcacttcctctgaactgttactgcctgaatggagtcctggacgacattgggtttttcctctaggagaatacaagccttaataaacaatactatttagcaa

SEQ ID NO: 257030 - DNA, 357 bp, Homo Sapiens
gctagacaaagtgaatgattctctcaaactgtgaggccctatttttgttctttagattcaaggaaaaatacaaccgaaggaatagcgtttggcttggagttcttcatacgtggctagcatagaaagaatctcaggactttttggtggtttatcattgcatcgccttatggaccattgatctttttattttctctattatttataactctatgtaattcctttgaattgtatattttatgcacaacaattttaagatacctttcttttcatggaagccacatgtgatccttttgatccttacactagtaaacagagtcatatattttagagaggaatgttgagagctaggtgtgtaga

SEQ ID NO: 257031 - DNA, 403 bp, Homo Sapiens
ggtctctaggtagctgattagagcagtgcctctcaagtcgcctgggggcttcctagaatcacaggcaagcagtcccacacctgggcactctgatgcgacaaataagtaaggcatggtccacagccacaaggagcttatagtccaggatataaataactcatgagaaatgaaaaatgcaatcaaaaagaggcataaagtgcatgaaaattaagagaggggcaaaattaattctgatgcagagtggggctggagcaggggagagagggaattagggaaagtgtcagtgaaggaggtggtatatgaaataagtctcatggtatgggtaggatttggatgtgcaatggtgggtagggtgtgcaggacagttgggaggaagtgcaacactcatctgctctctggccac

SEQ ID NO: 257032 - DNA, 203 bp, Homo Sapiens
gagactccattttgccttccaaaagttaagctataattttgccctgtaacttctggctagtgatggaacgactttcctgggctggtttccttactacgattgaagctcaggtccatgtaataaatgtgatacctcaatggtgctgttaaaataaatatcagttcatcctcctaaacagagtaatttcattatacaccccccac

SEQ ID NO: 257033 - DNA, 744 bp, Homo Sapiens
cataaacgacccggagaaccaaatatgcaagggatccctaaaagacgtcggtgtatgtctccactactaagaggcagacagcagaatcctgttgtaaacaatcatattgggggaaaaggaccacctgcacctacaactcaagcacagccagatcttattaaacctcttcctcttcataaaatttcagaaaccactaatgattcgataatacatgatgtggttgaaaatcatgttgcagaccaactttcatcagacattacaccaaatgctatggatacggaattttcagcatcttctccagccagtttactggaacggccaaccaatcatatggaggctcttggtcatgaccatttaggaaccaatgacctcactgttggtggatttttagaaaatcatgaggagccaagagataaagaacaatgtgctgaagagaacataccagcatcttcactcaacaaaggaaagaaattgatgcattgcagaagccatgaagaggtcaatactgaactaaaagcacaaataatgaaagagatccgaaagccaggaagaaaatatgaaagaatcttcactttactgaagcatgtgcaaggcagtttacaaacaagactaatatttttacaaaatgtcattaaagaagcatcaaggtttaaaaaacgaatgctaatagaacaactggagaacttcttggatgaaattcatcgaagagccaatcagatcaaccatattaatagcaattaaaag

SEQ ID NO: 257034 - DNA, 483 bp, Homo Sapiens
ctaaaaatatgtacacttatactaaatggaatcctaaaaattactgcattcaccaaagggaacacaggaagaaagacacaggtgaacaacaatcagatggcacagatagaactcatatcccaagatggtagatttaaattcaaccctgtaatattagtaattacattaaatgtaaatggactaccatatccagttagaggcagaaattgtcagtctggattaaaaagagaacacataatctgaacacagaagggtagaaaaagatatgtagatatatcatgtatattagttatatgtaactgcagtatattctggttcaactgggggaaatttggttccaagctcactccccaggacaagagagtgagatagagacagaatacccaataaaaagctgtcattttttaaaaattgattttgttttttacagcaatattaggttcaccgcaaaatcaagcagaaggcctacattggcataccatt

SEQ ID NO: 257035 - DNA, 769 bp, Homo Sapiens
agaaacaacaatgcttccataccacattccacacttggcttgttcagtctatcatatgacattaaaagacttgcctgccatggttaggttgtggtggaatagcagtgagaagcgtgttttcaatattgtggatagatttacaagcaagtatgtcagcagtgttctttcttttcaagaaatatcttctgtacaaacaagtacacaactatttaatggcatgacggttaaagctcgagctactactcgagaggtaatggctacttatactattgaggacatagttattgaacttataatacaactgccttcaaattatccactgggttcaataatagtagaaagtgggaaaagagtaggagtagctgttcagcagtggcggaactggatgctgcagttaagcacttacctcacccatcagaatggaagtatctatggaaggcttagctttatggaaaaataacgtagacaaacgttttgagggtgttgaagattgcatgatctgtttctcagtcattcacggtttcaactattccctttcccaaaaaagcctgtagaacatgcaagaaaaatccattcagcctgcttgtacaaatggtttacatctagcaaacaattccaacttgttcactgtgtcgtgaaacggttttctgagattttttcactgggaggggatcccctgaagtacattcaaacaagggcctgggcattggatccgtctgaaagtgtggaatgtgggaacgccagtgagactttacttttaaatacggac

SEQ ID NO: 257036 - DNA, 319 bp, Homo Sapiens
gtatgatgcaatggtttgaatgtttttctctccagatctcatgttgaaaactaatcctcaatgcagcagtattgaaaggtgaggcctttaagaggtgattgggttatgaggactctgcttaaataaattgaagcatcatttatggattaatgaattagtggattatcacaggaatgggactggtggacctttaagaggaatatatatacacacacatatatatttgttccattgatctaagttgaaagggaaggtttagtaagaaatacgtagtataataactaactggtggagccctctgatgactgatgattctggc

SEQ ID NO: 257037 - DNA, 367 bp, Homo Sapiens
gaaatatgaattcatgaaagtgtagtggaggttagaaacacaagctcttagctaactttacacatgttatctcatacaagtctcgatgtacagtttttaggaggtatgtgtctctatcccatattttatgaaagaaatgatgactcagaatgtttaagtaaattctccttactccatattggagccaggttttgagttcagaaatctctcagtccaaggacaatattctttccttcaatatatcccactgtcatgggagccaaaggaagaaggaagagagaatttaagagagaaacagaattaagtcctcatttgatgttgggtaggtaggagtggaagctaggctataaggtgcaaacacatagtg

SEQ ID NO: 257038 - DNA, 388 bp, Homo Sapiens
tgccagatcaagtccaacatgccacagaatggatgtttctttcacctcagccaagtgaatggtacccactgaggttcagtatcaagtttgttaattaacctaagcaattcctgataggctttatcaagatcggaattcacaattgccgtatcaaagtagtggccattgttctgctccatctctcttgtcttctcaatgatttctctcaactcttcaggctttggattcttgccttctttggccaataatgcccgaagtctttcttgtgaagggggtgcaatgaagataatatatggtttcaaatctgaattccggagagtcttcaatgactgtgtacgaagacttaaaagacatattttgccagagttgatcacttgccgtacagaat

SEQ ID NO: 257039 - DNA, 387 bp, Homo Sapiens
ggtttcgtcagcacaaagggaacagggagacccatgcccgttgtcagagggctctgagaaaacgcacaggccctggtctaagatgggttctacatactcgaatgtttacccggcttcaaggaagccaagagtctgggattgattcacattcatttcaggctcaaggttaaagactcacaacctcttttaatttcactctctcttgctgaactctgtgtccagggttctctagccctctagggaaacaaacacatggaatattcagacagtggagaggtctagggttccccccacaaagcaagccattttctcgccaacccaaggttgcactaaattagttaccaaaacgctaatgagaagtccagctttcttccctttgtggtgtct

SEQ ID NO: 257040 - DNA, 406 bp, Homo Sapiens
ccactgcccagtcacaggcattaagcctaggatgattcatttcagacttgtccctgaccttcctcataccctttccagaagggccccttgagctgctatgatactcctaaatcactatcccattacccaaatgatggagagccaatcaaaagcttagaccaggacgctttcccaaattatgtcccaataccttcacaatgatcactttatatacaatctcactgaatgctcagcaacacacgagagcaatgtttaactgagggcaacactgaggctcaaggagggcaagtgacttgattgctgaggtcacctgctaggtgcaagagctgagaattaatcccaaggctacctggctcaaaaagcctaagctcatctactatacttgaggcgaaatcatgaaagtgtg

SEQ ID NO: 257041 - DNA, 419 bp, Homo Sapiens
aaggcactcaaggggctggtagtgatgtcctctcagatggagctgatggctgccagactgtacaacaatactgtgcctgagctctggagtgccaaggcctacccatcgctcaagcctctgtcatcatgggtcatggacctgctgcaacgcctggactttctgcaagcctggatccaagatggcatcccagctgtcttctggatcagtggattcttcttcccccaagctttcttaacaagcactctgcagaattttgcccgcaaatttgtcatctccattgacaccatctcctttgatttcaaggtctgggcacagacagggccaagtcaggtgacaggctatggtacagcccaaggaggagaggctctgaggccacggttggttggcagttgggggacccctaaaccagagcatggaat

SEQ ID NO: 257042 - DNA, 362 bp, Homo Sapiens
agaccgtgcagacacacttgctgtgcattctttacatcctgggggtgaatccctgaggggcctctccttgctgaaaagtaacctggagctggaccgagactgacccgccacgtttacagccgccgcgagtctgctcacaaactctgggctctttgcttcgcgaaatgtgaaaaatgcaaaaaggcaaacacaaaaactcccataaacctaaggtatttctatttttctttctaagttgccaccgtttacacaggccagagataagaacaccaaccaaattgtcgccattaagaaaatcaaacttggacatagatcacaagctaaagatgggataaatagaaccgccttaagagagattggaa

SEQ ID NO: 257043 - DNA, 747 bp, Homo Sapiens
ggaagtgggtgttggaggctttaaggtagctttaaattcgtgttgtcctgggagctcgcccttttcggctggagtcgggctttacggcgccggatggctctggacgtgaagtctcgggcaaagcgttatgagaagctggacttccttggggagggacagtttgccaccgtttacaaggccagagataagaataccaaccaaattgtcgccattaagaaaatcaaacttggacatagatcagaagctaaagatggtataaatagaaccgccttaagagagataaaattattacaggagctaagtcatccaaatataattggtctccttgatgcttttggacataaatctaatattagccttgtctttgattttatggaaactgatctagaggttataataaaggataatagtcttgtgctgacaccatcacacatcaaagcctacatgttgatgactcttcaaggattagaatatttacatcaacattggatcctacatagggatctgaaaccaaacaacttgttgctagatgaaaatggagttctaaaactggcagattttggcctggccaaatcttttgggagccccaatagagcttatacacatcaggttgtaaccaggtgggtatcgggccccccgagttactatttggagctaggatgtatgggtgtaggtggtggacatgtggggctggtggctgtatattagcagagttactttctaagggttcctttttttggccaggaa

SEQ ID NO: 257044 - DNA, 367 bp, Homo Sapiens
ctcactcatacacacgcctgtcgacctctgtcaagtttgactccttgcaagggaggaaaggaaagccgagagacaaaaagactctgctttcatgatgagtgcaaccacagatgagtccaccacgggcaggttgcggtggaatggccccaactcagacaccttcaaggatctcccactggctgaacccaactgggaatgaagtgacatggaaatctgagatgcagcctacagaaatcagtcctcctagcatccatggcagaagatgggtgaaactggcaaacagtttcctaagctaagactgagccccaaacagatggaagcgcccacagacgtgctcctcctcctccttggcatcatcatcattgga

SEQ ID NO: 257045 - DNA, 1618 bp, Homo Sapiens
  misc_feature (1381)..(1381): n is a, c, g, or t
ggggggctggcgtgcggcgccgttgcgggcgggagcggctgcaacgccggtgcctgaggagcgatgccgagggaaatcatcaccctacagttgggccagtgcggcaatcagattgggttcgagttctggaaacagctgtgcgccgagcatggtatcagccccgagggcatcgtggaggagttcgccaccgagggcactgaccgcaaggacgtctttttctaccaggcagacgatgagcactacatcccccgggccgtgctgctggacttggaaccccgggtgatccactccatcctcaactccccctatgccaagctctacaacccagagaacatctacctgtcggaacatggaggaggagctggcaacaactgggccagcggattctcccagggagaaaagatccatgaggacatttttgacatcatagaccgggaggcagatggtagtgacagtctagagggctttgtgctgtgtcactccattgctggggggacaggctctggactgggttcctacctcttagaacggctgaatgacaggtatcctaagaagctggtgcagacatactcagtgtttcccaaccaggacgagatgagcgatgtggtggtccagccttacaattcactcctcacactcaagaggctgacgcagaatgcagactgtgtggtggtgctggacaacacagccctgaaccggattgccacagaccgcctgcacatccagaacccatccttctcccagatcaaccagctggtgtctaccatcatgtcagccagcaccaccaccctgcgctaccctggctacatgaacaatgacctcatcggcctcatcgcctcgctcattcccaccccacggctccacttcctcatgaccggctacacccctctcactacggaccagtcagtggccagcgtgaggaagaccacggtcctggatgtcatgaggcggctgctgcagcccaagaacgtgatggtgtccacaggccgagaccgccagaccaaccactgctacatcgccatcctcaacatcatccagggagaggtggaccccacccaggtccacaagagcttgcagaggatccgggaacgcaagttggccaacttcatcccgtggggccccgccagcatccaggtggccctgtcgaggaagtctccctacctgccctcggcccaccgggtcagcgggctcatgatggccaaccacaccagcatctcctcgctcttcgagagaacctgtcgccagtatgacaagctgcgtaagcgggaggccttcctggagcagttccgcaaggaggacatgttcaaggacaactttgatgagatggacacatcccagggagattgtgcagcagctcatcgatgagtaccaatgcggccanacggccagactaaaatctcctggggcacccaggagcagtgagtcccccaggacagggaccctcatctgccttactggttgcccaagccctgcctgactgaccaccccctcagagcacagatcagggacctcacgcatctctttctcatatacatggactctctgttggcctgcaaaaacatttacttctcctcttatgagactatttatctttaataaagcacctggatctaaatca

SEQ ID NO: 257046 - DNA, 419 bp, Homo Sapiens
  misc_feature (55)..(55): n is a, c, g, or t
catctcctcgctctttgaaaagttcctgcccagcagtttgacaagctgcggaaancgggatgccttccctcgaagcagttccgtaaggaggacatgttcaaggacaactttgatgagatggacaggtctagggaggttgttcaggagctcattgatgagtaccatgcggccacccagccagactacatttcctggggcacccaggagcagtgatttccctccccactactccttctccttctagatggtaaccacagcctcgaccatgcctgctccctctgacccagcttcacctcatggacaacccttcttggttcatcctccagcccgtgagctggtcctgcttcctcccttccatgccctaacttttaatatgcttgttcagctctaataaagtaataaagcttggttgtcagtaa

SEQ ID NO: 257047 - DNA, 514 bp, Homo Sapiens
  misc_feature (94)..(94): n is a, c, g, or t
  misc_feature (440)..(440): n is a, c, g, or t
  misc_feature (449)..(449): n is a, c, g, or t
  misc_feature (461)..(461): n is a, c, g, or t
  misc_feature (472)..(472): n is a, c, g, or t
acatactcagtgtttcccaaccaggacgagatgagcgatgtggtggtccagccttacaattcactcctcacactcaagaggctgacgcagaatnagactgtgtggtggtgctggacaacacagccctgaaccggattgccacagaccgcctgcacatccagaacccatccttctcccagatcaaccagctggtgtctaccatcatgtcagccagcaccaccaccctgcgctaccctggctacatgaacaatgacctcatcggcctcatcgcctcgctcattcccaccccacggctccacttcctcatgaccggctacacccctctcactacggaccagtcagtgggccagcgtgagggaaggaccacggtcctgggatgttcatggagggcgggttgttgcagcccaaggaacgtggatgggtgttccacagggccgagnaccgccagnaccaaccattgnttacattcggncattccttcaaacattcattccgggggaggaggtgggaaccc

SEQ ID NO: 257048 - DNA, 412 bp, Homo Sapiens
acaagcatctccctcggctcttcgaagagaacctgtcgcccagtatgacaagctgcgtaaagcgggaggccttccctggagcagttccgcaaggaggacatgttcaaggacaactttgatgagatggacacatcccagggagattgtgcagcagctcatcgatgagtaccatgcgccacacggccagactacattctcctggggcacccaggagcagtgagtcccccaggacagggaccctcatctgccttactggttggcccaagccctgcctgactgaccaccccctcagagcacagatcagggacctcacgcatctctttctcatatacatggactctctgttggcctgcaaacacatttacttctcctcttatgagactatttatctttaataaagcactggatatac

SEQ ID NO: 257049 - DNA, 262 bp, Homo Sapiens
tgatggaaaaaaagaggagccacagagtattgtttaaaactgccctatgtagtttcataatttggtaacatgtaccttcatgttgtaaagttaatagagataaatatttttatcaaaaattttataaacacagcctttctttagcattgatttaatttcagaacatcttcatattgattattagccataaagtttctaacatgaaacatttatctataaattttgtgattatagtagtggaatacatagaaaaatctttgaa

SEQ ID NO: 257050 - DNA, 1048 bp, Homo Sapiens
  misc_feature (259)..(259): n is a, c, g, or t
  misc_feature (262)..(263): n is a, c, g, or t
  misc_feature (268)..(268): n is a, c, g, or t
ggtctgtgtgcccatcagcaggttcccatggctgtcactgcccactcatttccacagttagatacggatgtgttgatgtatttcgtctagtttatttggctcagtccacagctgcgttggagtggtgactttggtagcccttgagctctaattaagagagatccaaaccactcagtacccactgggcagtgggaaggcctaccgacttactttatcattgagggcttactgatacaatgaaatgagtttcatgactttnttnnttttnaaacactttttgaaatagagtgtgctgtgtttaaaaccaaaaatatgcatgttgtctctgaaaagtaggcattgaaacagacttttttgtagtcagtgttaataaaacggatcctgtttgggccttcattgttaaggtggacttcatggccactcggaaggtctgttttggtgttacctgagtgtgacacaggccctggggtgtgcgtgtttctctaactgtctacacatgcacataggcagactttctcatagaatgttcttgaaagggtgattggcaaagtcatgcaggcccgccttaaagcgctgattagaacagtccaacacagtccgacctcactcaatacccacaaccatcgaaaatggattcttagtaccagacaatcccagtaatgaaggtttagtttccttgaaggaaactacagaaaaggaaagaagcagaatgagaaaggaatggtacttaggtgtttggtatgcttgctcacgtgaagtcagccccacacccagcccaaacccctcgtggaagatctgctgcaacccattatcctttgttccttgagttcatcatgcatttaaaatgagatgcaagagcatttagcataccatgtaaatatggaccttttaaaattaaaatactattggaagtgctttcaactcagccacatcttagctattagttctttgtgttgtcttatcaaagtttaatggatacagttccacagttgttgatgtgtttgtgtgtatattcgatttttataaagatggtagtaagtcaataaaa

SEQ ID NO: 257051 - DNA, 431 bp, Homo Sapiens
cccctcaagggaaaaccaaaccctccataactgggaatgtccgggtacctaaaaaaccccatttccgaatggttgtggggtattgaagtgaaggtcggactgtgttggactgttcctaatccagcgctttaaaggcgggcctgcatgactttgcccaatcacctttcaagaacattcctatgagaaagtctgcctatgtgcacgtgtagacagttagagaaacacgcacaccccagggcctgtgtcacactcaggtaacaccaaaacagaccttccagtggccatgaagtccaccttaacaatgaaggcccaaacaggatccgttttattaacactgactacaaaaaagtctgtttcaatgcctacttttcagagacaacatgcatatttttggttttaaacacagcacactctatttcaaaaagtgttta

SEQ ID NO: 257052 - DNA, 611 bp, Homo Sapiens
atgagccactgtgcctggcccagagcagatattttaaacatcaagaatcagatctgcatgattcagaatattgctaacctatcggttctaacataagaaacaaggagtaaaaagtaaaacaaccaccaaagattttcaataactttaagacataactttaagataccagtaaaagaaatgcctcaaggtagttcataattgctaaaagaagtgccatgacaattaagttgtaaaaacagatttaaaacttctacttccaacctaacagaataattggtataggatttaccctagcaactagaaaatggggcagaatttatgaaactactcttttcagatattagacagcaggcaatgcaggactgtgatccctaaaatatagctttcagctaaatatactttagctttcggctaaatatactttcccctataatgtaaggggaaaacctcagtaaacacaacgaactcaattagttgaagggacaaatttgagttaaggaagggctgagaaagctggaattctcaggtcagaataacagaaaaaaggtaagctaagcagagacacagtaccagaaaattctatatagggactcgtgaatcttcaaagaact

SEQ ID NO: 257053 - DNA, 661 bp, Homo Sapiens
ggatcccccgggctgtaggtggcagcgcctgcgcgacgcctttcccgaggaccggtccgaactggcgcacgggccgctgcggcaaggactggttgccataaaggaagcccacgacatagagaccaggcttaatgaggtggagaagctgctgaagacgatcataagcatgccctgtaaatattctagatcggaagttgtgctcaccttcttcgaaagatctcctctggatcaggtgttaaaaaatgataatgtgcataaaattcaacccagctttcaaagtccagtcatagttattgaccacagtataccaaatggaagagaccagcacctgggcgtggacccaacagagcatttatttgagaatggcagtgagtttccctcagagctggaggacggggacgacccagcagcctacgtcaccaacctgtcatattaccacctggtccccttcgagacagacatttgggactgaacctctctatcaggcctcccccgcctcagctgttcactgccagctctgatgctgtccactgtgctggcccccatggtcacagctgctgccccagctctggaactcccagacgtcccaggccccactgacgccaggaggcctggggtgtcctgcaagtggagcagcaggggctcctagtgggccaggctt

SEQ ID NO: 257054 - DNA, 574 bp, Homo Sapiens
ctgagagcacagggccattagcatgtgaattatgtgatccgtttctcctcttccaaagctataatatctggaatttcatcagtctcagatgtcaagtctatggtggtgaaatcaaacacctgtaaaagaagaatcttggatattgaaacaaacaccgatgaagtgagttgtcaggtccatctgagctctgaaaagatgtttgtggtcttattcctgcaattccctcatactataaaagcactaaggaaaccttttaaaaaggaaactaactagtggtggaacctagtcaatgaagcttttttaaaaaataccagatataaagcattttttgttattcaactattaatctattactttcttaaaaccaataataccccacttttccataagcaagtgtctaggcaaatgtttagcaactgaggaaacaaaaggtctttttatggttgaaacagccatcacaaaaccctacctcttccctgcacaggaaagcctttagggacaagaaactctatcaaattttattttatatacaatttcgataagctaggtaatgtttcttagcaaacaacagatt

SEQ ID NO: 257055 - DNA, 773 bp, Homo Sapiens
gggagagcttcaaaacagcccggcggcctcgcctcgcacccccagccagtccgtcgatccagctgccagcgcagccgccagcgccggcacatcccgctctgggctttaaacgtgacccctcgcctcgactcgccctgccctgtgaaaatgttggtgcttcttgctttcatcatcgccttccacatcacctctgcagccttgctgttcattgccaccgtcgacaatgcctggtgggtaggagatgagttttttgcagatgtctggagaatatgtaccaacaacacgaattgcacagtcatcaatgacagctttcaagagtactccacgctgcaggcggtccaggccaccatgatcctctccaccattctctgctgcatcgccttcttcatcttcgtgctccagctcttccgcctgaagcagggagagaggtttgtcctaacctccatcatccagctaatgtcatgtctgtgtgtcatgattgcggcctccatttatacagacaggcgtgaagacattcacgacaaaaacgcgaaattctatcccgtgaccagagaaggcagctacggctactcctacatcctggcgtgggtggccttcgcctgcaccttcatcagcggcatgatgtacctgatactgaggaagcgcaaatagagttccggagctgggttgcttctgctgcagtacagaatccacattcagataaccattttgtatataatcattattttttgaggtttttctagcaaacgtattgtttcctttaaaagccaaaa

SEQ ID NO: 257056 - DNA, 644 bp, Homo Sapiens
attaaggctctggtggcggcggcggcggacccttggggtctggacgcaacggcggcgggagcatgaacgcccctccagccttcgagtcgttcttgctcttcgagggcgagaagaagatcaccattaacaaggacaccaaggtacccaatgcctgtttattcaccatcaacaaagaagaccacacactgggaaacatcattaaatcacaactcctaaaagacccgcaagtgctatttgctggctacaaagtcccccaccccttggagcacaagatcatcatccgagtgcagaccacgccggactacagcccccaggaagcctttaccaacgccatcaccgacctcatcagtgagctgtccctgctggaggagcgctttcgggtggccataaaagacaagcaggaaggaattgagtaggggccagagggggctctgctcggcctgtgagccccgttcctacctgtgcctgaccctccgctccaggtaccacaccgaggagagcggccggtcccagccatggccccgccttgtggccacccctcaccctgacaccgacgtgttggccacccctcaccctgacaccgacgtgtcctgtacatagattaggtgttatattcctaataaagtatagcggaagagacctgg

SEQ ID NO: 257057 - DNA, 1403 bp, Homo Sapiens
  misc_feature (185)..(279): n is a, c, g, or t
  misc_feature (1073)..(1341): n is a, c, g, or t
  misc_feature (1346)..(1346): n is a, c, g, or t
  misc_feature (1353)..(1353): n is a, c, g, or t
  misc_feature (1355)..(1355): n is a, c, g, or t
  misc_feature (1358)..(1358): n is a, c, g, or t
  misc_feature (1361)..(1361): n is a, c, g, or t
  misc_feature (1367)..(1367): n is a, c, g, or t
  misc_feature (1382)..(1382): n is a, c, g, or t
  misc_feature (1398)..(1398): n is a, c, g, or t
gcggtggcggacccttggggtctggacgcaacggcggcgggagcatgaacgcccctccagccttcgagtcgttcttgctcttcgagggcgagaagatcaccattaacaaggacaccaaggtacccaatgcctgcttattcaccatcaacaaagaagaccacacactgggaaacatcattaaatcnnnnnnnnnnnnnnnnnnnnnnnnnnnnnnnnnnnnnnnnnnnnnnnnnnnnnnnnnnnnnnnnnnnnnnnnnnnnnnnnnnnnnnnnnnnnnnngagcacatcagctatgtgccccagctctcaaacgacaccttggcggggaggctcaccctgtccaccttcacgctggagcagcctctaggccagttcagcagccacaacatctctgacttggataccatctggctggtggtggccctcagcaacgccacccagagcttcacggccccacggacaaaccaggacatccctgctcctgccaacttctcccagaggggctactatctcacactgagggccaaccgggtgctgtaccagaccagaggccagctccatgtcctccgcgtcggcaatgatacccactgccaaccaacaaaaattggctgcaaccatcccctaccaggacccggcccctacagggtgaagttcctggtgatgaatgacaaaggacccgtggctgaaaccaagtggtccagcgacactcgcctgcagcaagcccaggcacttcgggctgtccccggcccccagagcccgggcaccgtggtcatcatcgccatcctgtctatcctcctggccgtcctcctcacggtcctcctggctgtgctcatatacacctgcttcaaacagctgcaggagcacttccctatcaggcccagaggaggcagggagtgtgagaagatacaccacgcacctcgcgttcagcactcctgccgagggggcttcctgaggggttccagaggggcccacgtgtccctccacctcctccctggcccaggctgcagagcctgagctgggacacgccctgaagcttctggaccctgagagagattgtttcttttctttactannnnnnnnnnnnnnnnnnnnnnnnnnnnnnnnnnnnnnnnnnnnnnnnnnnnnnnnnnnnnnnnnnnnnnnnnnnnnnnnnnnnnnnnnnnnnnnnnnnnnnnnnnnnnnnnnnnnnnnnnnnnnnnnnnnnnnnnnnnnnnnnnnnnnnnnnnnnnnnnnnnnnnnnnnnnnnnnnnnnnnnnnnnnnnnnnnnnnnnnnnnnnnnnnnnnnnnnnnnnnnnnnnnnnnnnnnnnnnnnnnnnnnnnnnnnnnnnnnnnnnnnnnnnnaactntggcganancgnctntttctngacgagggtgggggnggtgcccctagcccanagatt

SEQ ID NO: 257058 - DNA, 652 bp, Homo Sapiens
  misc_feature (116)..(116): n is a, c, g, or t
  misc_feature (184)..(270): n is a, c, g, or t
atggtcatagcgtatttcagccgagccggcttcccctcctggcaataccaacgccttcatttcttcctggctctgtgagtggtttgctgcctcctatccgtcaatatccaatgccntgggacagcgggggaagtgggattccagcctttcatttgttctttcacctatttgtcctctttactannnnnnnnnnnnnnnnnnnnnnnnnnnnnnnnnnnnnnnnnnnnnnnnnnnnnnnnnnnnnnnnnnnnnnnnnnnnnnnnnnnnnnncggaagcgctcctccagcagggacagctcactgatgaggtcggtgatggcgttggtaaaggcttcctgggggctgtagtccggcgtggtctgcactcggatgatgatcttgtgctccaaggggtgggggactttgtagccagcaaacagcacttgcgggtcctttaggtcacactgtgatttaatgatgtttcccagtgtgtggtcttctttgttgatggtgaataaacaggcattgggtaccttggtgtccttgttaatggtgatcttcttctcgccctcgaagagcaagaacgactcgaaggctggaggggcgttcacgctcccgcctccgttgcgtccagaccccaagtgtctgccgccgccgccaccagagccctccc

SEQ ID NO: 257059 - DNA, 431 bp, Homo Sapiens
tatgccactgtgcccagcctgagtttctgtttagaaacaacagtctatgatagtataatcctctcttttttgtacacagagtaaagaggacaaataggtgaaagaataaatgaaaggctggaatcccacttcccccgctgtcccagggcattggatattgacggataggaggcagcaaaccactcacagagccaggaagaaatgaatgcgttggtattgccaggaggggaagccggcccggctgaaatacgctatgaccatagccaggagatactgatggagagaaaggaacacagagagggagaggtcacatcttggaagaggaagattgtggagagggggaatgagggtctggggaggggctgcccatcaaagaagggacctcagtgttggggtgactactcatttggaaattgcgggatggaggggta

SEQ ID NO: 257060 - DNA, 860 bp, Homo Sapiens
  misc_feature (581)..(668): n is a, c, g, or t
  misc_feature (838)..(838): n is a, c, g, or t
gtctccatcctgaaggagtgggagatgcccttgatcaggtctctgtccagcagagccctcctgaggaaggcgtggctctctgcagggtgggtgccagtcctgagctagggacggtcccttaccttcctctctgggaagctgacctcagccggaggcctctcctggtggtgcccctgagcagcaacctgatttctatcctcagctacctggccaatgacatggaggaggacgacgaggaccccaaacaaaacatcttccacttcctgtatgggaagacccactctcacatacccttgcgccctaagcattggttccagttaggccgtcccatgaacccgagggccaggaagaaccgctctcacatacccttgctccagaagcgtcggttccagttaggccgttccatgaacccgagggccaggaagtaccgctctcgcatacccttggtccgtaagcgtcggttccagttacgccgttgcatgaacccgagggccaggaagaaccgctctcagatagtcctgttccagaaacttcggttccagttcttctgttccatgagcggcagggcttgggtttccccnnnnnnnnnnnnnnnnnnnnnnnnnnnnnnnnnnnnnnnnnnnnnnnnnnnnnnnnnnnnnnnnnnnnnnnnnnnnnnnnnnnnnnnnggggtatcctggcgagtccccgtcttctcaaagggcgtttgtttttccagatccaggcttatgacccagagcactgggtgtgggcacgagatcgcgctcacctttcctagagctccagggaccgtggaggcctgaggtcatcggcctgagagaaggtacatctgcatccnccggggtaaaggcagaatatgg

SEQ ID NO: 257061 - DNA, 522 bp, Homo Sapiens
aagcgacggcgagtgtcgctcgtgctccctgagcaccacgaggccttccttaggctgcttgaggatcctgtcattaaaagattcctggcctgggacaaagatctgagggtgtcggacaagtatctcctggctatggtcatagcgtatttcagccgggccggcctcccctcctggcaataccaacgcattcatttcttcctggctctctacctggccaatgacatggaggaggacgacgaggaccccaaacaaaacatcttctacttcctgtatgggaagacccgctctcgcatacccttgctccgtaagcgtcggttccagttatgccgttccatgaacccgagggccaggaagaaccgctctcacatacccctgttccagaaacttcggttccagttcttctgttccatgagccgcagggcttgggttaccccggagcagatggaggagatccaggcttatgacccacagcactgggaggggcgcgagatcgcgctcgcctttcctagagctccagggacc

SEQ ID NO: 257062 - DNA, 719 bp, Homo Sapiens
cgagtgtcacccatcctccctgagcaccacaaggacttcaacagtcagcttgcccctggggtagatcccagccccccgcataggtccttttgctggaaaaggaagatggagtggtgggacgaatctgaggagtcgttggaggaggagccacggaaggtgctcgcccctgagcctgaggagatctgggtggcggagatgctgtgtggcctcaagatgaagctgaagcgacggcgagtgtcgctcgtgctccctgagcaccacgaggccttcaacaggctgcttgaggatcctgtcattaaaagattcttggcctgggacaaagatctgagggtgtcggacaagtatctcctggctatggtcatagcgtatttcagccgggccggcttcccctcctggcaataccaacgcattcatttcttcctggctctctacctggccaatgacatggaggaggacgacgaggactccaaacaaaacatcttccacttcctgtataggaagaaccgctctcgcatacccttgctccgtaagcgttggttccagataggccattccatgaacccgagggccaggaagaaccgctctcgcatacccttgctccgtaagcgtcggttccagttataccgttccacgaacccgaggccccaggaagaaccgctctcgcatacccttgctccgtaagcgtcggttccagttataccgttccacgaacccgaggg

SEQ ID NO: 257063 - DNA, 832 bp, Homo Sapiens
  misc_feature (15)..(15): n is a, c, g, or t
  misc_feature (41)..(41): n is a, c, g, or t
ttaaccaggacaccngggtacccattcctgtttattcaccnatcaaccaaagaagaccacacactgggaaacatcattaaatcacaactccttaaaagacccgcaagtgctatttgctggctacaaagtcccccaccccttggagcacaagatcatcatccgagtgcagaccacgccggactacagcccccaggaagcctttaccaacgccatcaccgacctcatcagtgagctgtccctgctggaggagcgctttcgggtggccataaaagacaagcaggaaggaattgagtaggggccagagggggctctgctcggcctgtgagccccgttcctacctgtgcctgaccctccgctccaggtaccacaccgaggagagcggccggtcccagccatggcccgccttgtggccacccctcaccctgacaccgacgtgtcctgtacatagattaggttttatattcctaataaagtatagcggaagagacccggatgtggaccttgagcagcggtgacttcgcaagcaaatggattgtcaggcttgatgcaggcagatgacctgtttcaggggcgtccggctggcagggatgaattcattctggaccaaagatccggggtcccaggggctgctgcgggggctgtgctgagccggagagaagtgtgcaaacccatgagctcccaagagtctctgctctagaagcctcaactcctgggcctgcctgtcagtcaaagcaggaacacttcttcctgcataactcgaaacacctttccacaggcttcttgtccacagtagagtttaataaaaatattcactgaaagaccccccccaaaa

SEQ ID NO: 257064 - DNA, 764 bp, Homo Sapiens
  misc_feature (197)..(197): n is a, c, g, or t
  misc_feature (462)..(626): n is a, c, g, or t
tttcaccatgccggcccaggtggtcttggaaccccctggacctctaccgatccacctgaattggtttccccaaaatgttggggattacaggcacaagccactggcgcccagccccttcccatacctcttttggccaaggcagcacaattcagaagaatcttgccagggaagactggtaaatggacgtcaacgtgatnctatggctcctggtggatttagatacctcctggtgcttattgatatctttaccagttgcacaggggcttttccatgccagactgaaaacgcagaagatcaatgatcaaccttcaactatttactagcagaacactgaggggactgtgcggtcaccaaaacctccctattgcacttggataaacacctcccaggaaatagagatgaatagaaaggacatagtcaaacaagcagaatggctgcattccttcaaccagaagggtcccnnnnnnnnnnnnnnnnnnnnnnnnnnnnnnnnnnnnnnnnnnnnnnnnnnnnnnnnnnnnnnnnnnnnnnnnnnnnnnnnnnnnnnnnnnnnnnnnnnnnnnnnnnnnnnnnnnnnnnnnnnnnnnnnnnnnnnnnnnnnnnnnnnnnnnnnnnnnnnnnnnnnngatttaatgatgtttcccagtgtgtggtcttctttgttgatggtgaataaacaggcattgggtaccttggtgtccttgttaatggtgatcttctcgccctcgaagagcaagaacgactcgaaggctggaggggcgttc

SEQ ID NO: 257065 - DNA, 920 bp, Homo Sapiens
  misc_feature (10)..(10): n is a, c, g, or t
  misc_feature (14)..(14): n is a, c, g, or t
  misc_feature (20)..(20): n is a, c, g, or t
  misc_feature (34)..(34): n is a, c, g, or t
  misc_feature (36)..(36): n is a, c, g, or t
  misc_feature (41)..(41): n is a, c, g, or t
  misc_feature (48)..(48): n is a, c, g, or t
  misc_feature (55)..(55): n is a, c, g, or t
  misc_feature (61)..(61): n is a, c, g, or t
  misc_feature (68)..(68): n is a, c, g, or t
  misc_feature (78)..(78): n is a, c, g, or t
  misc_feature (94)..(94): n is a, c, g, or t
  misc_feature (103)..(103): n is a, c, g, or t
  misc_feature (108)..(108): n is a, c, g, or t
  misc_feature (112)..(112): n is a, c, g, or t
  misc_feature (116)..(117): n is a, c, g, or t
  misc_feature (125)..(125): n is a, c, g, or t
  misc_feature (133)..(133): n is a, c, g, or t
  misc_feature (142)..(142): n is a, c, g, or t
  misc_feature (156)..(156): n is a, c, g, or t
  misc_feature (164)..(164): n is a, c, g, or t
  misc_feature (168)..(168): n is a, c, g, or t
  misc_feature (171)..(171): n is a, c, g, or t
  misc_feature (178)..(178): n is a, c, g, or t
  misc_feature (183)..(183): n is a, c, g, or t
  misc_feature (185)..(185): n is a, c, g, or t
  misc_feature (190)..(190): n is a, c, g, or t
  misc_feature (206)..(208): n is a, c, g, or t
  misc_feature (212)..(213): n is a, c, g, or t
  misc_feature (607)..(628): n is a, c, g, or t
  misc_feature (650)..(746): n is a, c, g, or t
  misc_feature (782)..(795): n is a, c, g, or t
  misc_feature (868)..(870): n is a, c, g, or t
  misc_feature (878)..(878): n is a, c, g, or t
acttcttcancttnccccanccctttttatattnantaatncattttntattttnccatcnatttatntatttccccntatttattctaaattnacatatttntcttncctnactnntctcccantcctaatnacattcaangtcaccaggtacanttgtacangttntanactgcangagantncctgncaaaaagatcaaatgnnncttnnacttctcattggccaacctgcctttccccaagaaggagtgatttttctatcggcacaaaagcactatatggactggtaatggttacaggttcagagattacccagtgaggccttattcctcccttccccccaaaactgacacctttgttagccacctccccacccacaaacatttctgccaagtgttaacaatgacactcagcggtcatgtctggacatgagtgcccagggaatatgcccaagctatgccttgtcctcttgtcctgtttgcatttcactgggagcttgcactatgcagctccagtttcctgcagtgatcagggtcctgcaagcagtggggaagggggccaaggtattggaggactccctcccagctttggaagcctcatccgcnnnnnnnnnnnnnnnnnnnnnnagacaagctctcgctctgtcannnnnnnnnnnnnnnnnnnnnnnnnnnnnnnnnnnnnnnnnnnnnnnnnnnnnnnnnnnnnnnnnnnnnnnnnnnnnnnnnnnnnnnnnnnnnnnnnccataggctcacaacaccacacctggcaaatttgannnnnnnnnnnnnnccagagacggggtctcgcaacattgcccagacttcctttgtgttagttaataaagctttctcaactgcaaaannnaaaaaaanaacggaaaaacagaccaacaacaagacaagaaaaccctgtcg

SEQ ID NO: 257066 - DNA, 352 bp, Homo Sapiens
tacgacctctgcatggtgtctggtctcctcaaggaacatatctgtaaaacacatttcgtagacaaatgtcacaagcacctgaaaaggcagctcaaatcctctaagaaatggccacacacaaatgttaggaagggatcaccggcaacaaaaggctcgctctttcggacaggccccgcccctctggggtaaccccgaggacaggctccctgtatccttttagaaccacagggaacaatggctcatcattcaataatcaaagcaggaactctcattgttctgcaaaagagccctcacttgggtacttctcagtgctgaaagggtgcccatccaagaaggctgggcttgtggtgtc

SEQ ID NO: 257067 - DNA, 1279 bp, Homo Sapiens
tcacgggagggccaggacgaaggtgacaaaggctaggtgtcccccacggagacgcgccaaggtagccccgcgcgtgtccgtaggcgcgctctctggaagacgcggtggggggtgcgcagggctgcaccctcacaccaattgccccggcgaaggccgagcccagaaagtgagtgcgcgtgagtgtgcgcgcgcccgcatgcgggggcgtggcagtcaacagcaacaacccacacgccggcagggccagaaactcccatctccctcaccagccggaaagtacgagtcggctcagcctggagggacccaaccagagcctggcctgggagccagaatggcaatccacaaagccttggtgatgtgcctgggactgcctctcttcctgttcccaggggcctgggcccagggcaatgtcccacccggctgcagccaaggcctcaaccccctgtactacaacctgtgtgaccgctctggggcgtggggcatcgtcctggaggccgtggctggggcgggcattgtcaccacgtttgtgctcaccatcatcctggtggccagcctcccctttgtgcaggacaccaagaaacggagcctgctggggacccagctaagaggccggtgtcaccatacagcgggtacaatgggcagctgctgaccagtgtgtaccagcccactgagatggccctgatgcacaaagttccgtccgaagagcttacgacatcatcctcccacgggccaccgccaacagccaggtgatgggcagtgccaactcgaccctgcgggctgaagacatgtactcggcccagagccaccaggcggccacaccgccgaaagacggcaagaactctcaggtctttagaaacccctacgtgtgggactgagtcagcggtggcgaggagaggcgggcggatttggggagggccctgaggacctggccccgggcaagggactctccaggctcctcctcccccctggcaggcccagcaacatgtgccccagatctggaagggcctccctctctgccagtgtttgggtgggtgtcaagggtgtccccacccactcctcagtgtttgtggagtcgaggagccaaccccagcctcctgccaggatcacctcggcggtcacactccagccaaatagtgttctcggggtggtggctgggcagcgcctatgtttctctggagattcctgcaacctcaagagacttcccaggcgctcaggcctggatcttgctcctctgtgaggaacaagggtgcctaataaatacatttctgctttattaaaa

SEQ ID NO: 257068 - DNA, 420 bp, Homo Sapiens
ggacagtcatggagcgccgcctgggagtgagggcctgggtgaaagagaaaccggtgctccttccagaccccggtctgcaacaagctcatgcaccaagagcagctcaaagtcatgttcgtcggaggccccaacaccaggaaggactatcacatcgaagagggtgaagaggtatttcaccagctggagggagacatgggtctccgagtcctgcagcaagggaaacaccgggatgaggtcattcggcaaggagagatattcctcctgcgctgccagggtgccccactcaccacagagggttgccaacacccgggggctcgcggatgagcgaaagcggctggagaccgagctagatgggctcaggtactatgtgggcgacaccatggacgttctgtatgacaagaggttctactgcaaggacct

SEQ ID NO: 257069 - DNA, 488 bp, Homo Sapiens
tcaagtcatgttgtgtttggacttggggttggaacagggagagcagcagccatgtcagctacacgctcaaatgtgcagatgattatggaaaataacctcaaaatcttacaaagctgaacatccaaggagttattgaaaactatcttaaatgttcttggtaggggagttggcattgttgataaagccagtcccttcatttaactgtctttcaggatgttccttcactgtttccatgagtattgcaggtaataatacagtgtattcatatagaatctcaatcttggggctaaatgccttgtttctttgcacctcttttcaagtccttacatttaattactaattgataagcagcagcttcctacatatagtaggaaactgccacatttttgctatcatgaatcgcatgggccccctgctgttcctagtaagatattatgaattccattttatcaataaagcttgagttaacaaacaagaaactcttcctg

SEQ ID NO: 257070 - DNA, 380 bp, Homo Sapiens
ctctagtaaaattgtgctgtaactaaggaatttagatctgtggcgtacttctatgataccatgcattttgtgtgaatatattttaacaaaaagaaaccttaacaattcaacttaaaaagcaggtattgaatattattttctagatatttacacccttttaaaaaaactgcgtaacaataatagtgcgcttaataatattttatgaagcactgtcttgcttgcacttgttattagtcatacattttaagcgccttatgaataaataccttacttgagatagcattcatcatataagaactttaaaattttgaaaagcatgcgcatattagagtaagaataacaagttgtttacagtactttctgtagagtaattagcttat

SEQ ID NO: 257071 - DNA, 1169 bp, Homo Sapiens
tccagtgtttttagttgcacatttaatagtcacaaatctttttacagatttttcacagatttattatttatagaaaaaaatcaagattaaaatggagtattgaaaaggaccaagaaattactagcagtgatggcaaagtacaaaggctctgaaagaacagagtaaacaagagcagcgcagtgcagcgtgtggccacttcccaccaggcagaacacttgacttcattaaggcaaagcttttactctgttactttttcctcccacatagtttaacccaaatagaaaggcattctattctcacactactgctctctaaggtcctaggaatataactggtactataagcaaacagatgcatcccttgactattaatacctgaatagacaagttaaattgtgatgcattaacccatccctctgggagaattaaaaagaaagaggcagaaattgtttgatgcttaagactgagaaaaaggggtatatatgtgtggtggtggtggaagcgggagagaaaagaggttcaaggagggatgagggcaacaaacctctttccaatgtccaactgttcttatgttctcagatgctgctgatacagtgttccattactctgaaaacaaatgttatctacatccagtcagttctagggtacaaaggctaacaatagggaaaataccttgggggaagggtgtattcatttcaggtacataacacaatagggaaaatacctatatttgtacctagggtacaaaggctaacaatagggaaaataccttgggggaggggtgtattcatttcaggtacataaaaatggaattcaaaattgtgtcctactgtgttctcatctaatgtgttattactgttgtaaatcaaattactgtgtgaccgtgggcaatttacttaacctctcagtgcctcaattttccacataaaatgagaattgtagcactggtattacagaagatgcatgagaagcacagaagaatagtgtctggccaaatcaatagtgacagaaagcagattagtggttgccagaggctgggatgaagggggaatggaactgactgctgacagacctggggtttcttggtgaagttacaaaatgatctaaaattagatgttagtgatagttgtgcaattttgtgtgtgaatatactaaaaaccactgaattgt

SEQ ID NO: 257072 - DNA, 398 bp, Homo Sapiens
  misc_feature (66)..(83): n is a, c, g, or t
  misc_feature (373)..(373): n is a, c, g, or t
gatacgcctgtcttgtcctctcaaagagctgtgattacagatgtgaggccaccatgcccggcgtgnnnnnnnnnnnnnnnnnnaaacacagaaaatggtttcatttggttctacttagagagtatataattatgcacgcattgaaacacatttccttattattcagacctaataattgcggggtaaattagaggcaagctaatctacacattacacgctctttgcagctttgtagtctgagtatgagacagcctttctggcttttgtctgaagaatggtatctaggaagaagggtctaattttatcagaagggctttattaaaaataagtcatttaatgcattgaagggttttttctttatgtataatgaatntatccattagatggaaaactagtgt

SEQ ID NO: 257073 - DNA, 980 bp, Homo Sapiens
  misc_feature (423)..(423): n is a, c, g, or t
  misc_feature (448)..(448): n is a, c, g, or t
  misc_feature (592)..(592): n is a, c, g, or t
  misc_feature (758)..(758): n is a, c, g, or t
gttaggcaacactggcaccccttgtttgcagaagatgattacgtggtggtttaaacactggttgtaaaggaatgtgcctcaaaaacacaggaagaatctcaatcaattagtatgatgccctatagttttgttttcagtagtaaaggtatacagtttacgatttacccttaaaaaaatataaaagacttatgctcaagtcatttgcgccaaaagatcaacaggctgctctttgagggccaccagtttaagctaataaggaaagctagagtctgtaaacatgttttccatctctttgcttcctcctgtaccaatagtgcttcataggctcctcataaatcttctagaagaggaataaagccacttatacaactttgcagttataaacaccctgacttttgatataccagaaagaaccaataccancacagtccacacagaaggtagtgcnatagttacatggcattttccacacagaaaaaaatatttgaaattgaagcacatgcctagggagaaaaaaatactgaaactcaaattgtttggatccctttttgtaatgtttgcccaaataatatttacatagtgaaaaaaacanaataggaaggtgtgtttgatcagttcttgttcaattcttactgtctggaggtaaaaatcatattctgaaaaacaagcagagcctgaacagagcgggcacgaggccaaaaacagtgctctggaaggtcattctgtagttattttcaacaggctatataacatgccantcattatgcttatcataaacaggcttaaattgaaattataactgaatttctaatgagttcttcttggctaagggtgaaacaaatgacctgaatgctgatgaacattttgagtttttgagtcacttatttacaattgagggcaggcttaataagaagattcatcttcccacgaatgaactacctatatatttaatatattttggtaacatattttctttgaat

SEQ ID NO: 257074 - DNA, 372 bp, Homo Sapiens
  misc_feature (152)..(160): n is a, c, g, or t
gtgtgtttctcacaacaaagattccaatgacagacctgaatgctcagaatgtaaaaatatttgtgcaaaactgcattaattgttcttaccatctaataggggtaaaacttaagatatcaaccaacatggattattctatttctaaccattgnnnnnnnnncgcgtgccaccatgagaccaccaggaccaccaaatgctttgccaattccagctaaagaaagctcacactggaatatcccaaagttactctccacagtaggcatccatctaaaaagactggaaacatctgtagggcttcaaacacaccacagtgtctatactcttgaatgcgcggctcataaatgaaatatttaaaaaagtcttttcctcgtg

SEQ ID NO: 257075 - DNA, 426 bp, Homo Sapiens
  misc_feature (109)..(109): n is a, c, g, or t
cacgagagccatagtatctggagagagtgtattcctcttggcagtcttaggcccagccacttctgctacctttgcgctgctgtgagcctcaccctgggcccctggctgnctttctctgctcccctgggtgatgggtgggcccagaaggtggcagtcccacaccttgtcctcccacctccctgaactgtccattgcttttatagggtgaggtaagtgacagcctcccaagcccaggctttggcactcagaatgggcccagtgggggctggggcaggcccatttgagggcaaccgccgaggtttctcctagggctgttcctggggcctggctcttacaggcttgtgcccaaggctggcctttttcactgtccccttctgtgtgtgtgtccacacaccctttaagaagggggagcactgagaagcacag

SEQ ID NO: 257076 - DNA, 2445 bp, Homo Sapiens
  misc_feature (1013)..(1049): n is a, c, g, or t
  misc_feature (1427)..(1427): n is a, c, g, or t
  misc_feature (1808)..(1834): n is a, c, g, or t
  misc_feature (1847)..(1847): n is a, c, g, or t
  misc_feature (1903)..(1903): n is a, c, g, or t
  misc_feature (2180)..(2180): n is a, c, g, or t
ttcgctgctttcctctgctgtctctgcaagattggggtgctccgggtggatgaccaaatagctattgtcttcaaggtgttcaatcggtaccttgaggttatgcggaaactccagaaaacatacaggatggagccagccggcagccatggagtgtggggtctggatgacttccagtttctgcccttcatctggggcagttcgcagctgatagaccacccatacctggagcccagacactttgtggatgagaaggccgtgaatgagaaccacaaggactacatgttcctggagtgtatcctgtttattaccgagatgaagactggcccatttgcagagcactccaaccagctgtggaacatcagcgccgtcccttcctggtccaaagtgaaccagggtctcatccgcatgtataaggccgagtgcctggagaagttccctgtgatccagcacttcaagttcgggagcctgctgcccatccatcctgtcacgtcgggctaggaggggccaagccgaagagccacccaggccacagttcctgtgcctgccttccccaccccagcagtggcccctccccatcccctccctctgttcgtcccgtttgatgagaggctgtttactggggtggggtggcgagatgggcttgagggggctcagagcataaggcttcagggcccaagttgggagaagtgaccaaagtgtagccagttttctgagttcccgtgtgctaaactggccagaagagagggtctggggcctggtcactcggccactctctcctgtttctggcctcttctcccttcactcccgtccagtctggttttgagagcaggggctgttctgcagcacctcagggaagggaggagagatacctgctgcttccattgcttttcccttcctggagtcgatgcctttctaagggttggagctgctccttgcaggggcgggtcagtttcccaggccatgccggggtggccatctatgctagggctggaagctgaggctggccgccagcnnnnnnnnnnnnnnnnnnnnnnnnnnnnnnnnnnnnnagaggccttagctgtcctggctggtgcccctcccaggctccttttcaccctgccccctgggcttgaggcccttgttgtctaagcctccccctggctcttcagttctctagcccttggctttgctgggtttcctgactgtagccacatctctcccgctccctaagggtaacctagccaatggaagctgccctttgggtaggtgctgggctcctgggagggcccagatgatggggtgaggcatgtctttccagaactttccctgggcagggaggggatgggcagaaactcagggaagggcttggggcccattgcttttatagggtaaggtaagtgaaagcctcccaaaccccaggctttggcactcagaatgggcccaantggggggctgggcaagcccattgagggccaccgccgaggtttctcctagggctgttcctgggcctggctcttacaggctcgtcccccaggcctgccctttctccactgccccctcctgtgtctgggtccacacacccttcaggaagggggagcactgagaagcacagcacaggggctcagcctgggatccggtgatggtctgggcagaggctgggtcaggagtcccaaaggtcagtgacagtttctcagaagaggcccagcgtccacctctctcccagggccagacaccccttcctggctcccccatccccctatgggctcccagccccttgcaccctcattgctgttcagattaaagcctctgttttgcacctgtcaaannnnnnnnnnnnnnnnnnnnnnnnnnncatgtcgggccgncctcggcccctcgaggaagctttctaaaccatttcgtttgggcgcgcggggcccangtagggtaaggtgaacatgggtccataggctggtttccctagggagatccgtggtccatgacctagtggctttggaattcctccaccaaataaaaaaaccgccccggggggccacaccgaggcggttcctggaaccaaattcccagaatgggagtttcctggaggttccatttacctgggaatccttatccaaaccagggaaggtccaaaggcggaagcctccgtataatccaaaattttacgccccccccggccccttggcccatctccatttcgngcagagaaacctgggtgtgggtaaattctccattttgaaaggccaatttctcttgggcccggcaacaattgggggaaaagccccccatttcacaccaaaaaacccggcgccatatgtgaaatgaatcaccccccttgagataatcccgggccccaagagcggggggaatatctcacagtccaaccccctcttgtgtgtctcgcgccccctttgtcggggggaaaattaaaaaatatttatgttgccccgcaccattgagggttag

SEQ ID NO: 257077 - DNA, 724 bp, Homo Sapiens
ggggctgcggcaggaacatgggggatcggctcacgcagcttcaggacgctgtgaattcgcttgcacatcagttttgtaatgccattggagtattgcagcaatgtggtcctcctgcctctttcaataatattcagacagcaattaacaaagaccagccagctaaccctacagaagagtatgcccagctttttgcagcactgattgcacgaacagcaaaagacattgatgttttgatagattccttacccagtgaagaatctacagctgctttacaggctgctagcttgtataagctagaagaagaaaaccatgaagctgctacatgtctggaggatgttgtttatcgaggagacatgcttctggagaagatacaaagcgcacttgctgatattgcacagtcacagctgaagacaagaagtggtacccatagccagtctcttccagactcatagcatcagtggataccatgtggctgagaaaagaactgtttgagtgccattaagaattctgcatcagacttagatacaagccttaccaacaattacagaaacattaaacactatgacacatgacctttttagctatttttaatagtcttctattttcactcttgataagcttataaaatcatgattgaatcagctttaaagcatcataccatcattttttaactgagtgaaattattaaggcatgtaatacattaatgaacataatataaggaaa

SEQ ID NO: 257078 - DNA, 560 bp, Homo Sapiens
ctcactcactgtcttaacccagcggtatatgctcccatctcccttgcagattgttctgttatatgcccctgcttgaaactggcctctcttctgccttatattaggccatttctgactcagtccatagggattatggcacctataaattgcactagcacttgctatctacataccttacttggcacctatttactacataattttcacaagcatatgcaaaacatgcaaaaacccatatattgtgtcttgtgtaattgctgaaaagctgctaaagagcggagatcaactgcagtttcctttagtgtcgtgcatgttggtgagttttcaccaggactcccagatgtgtggacagtgattcattaagggaaatggctagcatttattgaatgcccgctatgcacaccaggtacaatagctaccattatatccatttcataggtccttggagaagtaatttgctccaggcccacagagtaagtgacagaaatcagactctgaagtcagtctctgatctgaaatccagattctttaaaccatttcagcactgtcccttagttttg

SEQ ID NO: 257079 - DNA, 854 bp, Homo Sapiens
agctctttgaaggtgtgccttgtcagccatggatatggaacacaaagactatgactcgcgcacagatctgcatgtgtgctgcagctgaaggacacatcgaagttgttaaattcctgatcgaggcttgcaaagtgaatccttttgccaaggacaggtggggcaacattcccctggatgatgctgtgcagttcaaccatctggaggtggtcaaactgcttcaagattaccaggactcctacacactctctgaaactcaggctgaggcagcagctgaggccctgtccaaagagaacttagaaagcatggtatgagcacaggtcatggacagcccctgctcaagaaaaagcatgagctggccacacatgtaatccataaccaccaaaaatactatggagagctacactgcttcagtggggaccaagcagtcatttggtgacttaggctagtgctttctatgggagtcaaaataccccattccctcagcagacagagtacagagaagggcctcagaggacacctgcagtacagctatccagagagactgggcttcaaggtacagcctaatggcttgccccactcaaaaccatcccagctcttcacccaggtctcctcttcctctccctgaagaaaccatcatgagagagatactctggtggagggactctagctaccatgcacatgtacatatccacagaatatgggaagtgggaatggctatatacatggctttagtagtctggagaaatctactccccttggccaggacatgctgctgctactgctaacagccaattttatagacagagaaagtattttgtgttcaaataaactttaattaccaaatcatttttgct

SEQ ID NO: 257080 - DNA, 596 bp, Homo Sapiens
ttaaaaagaaaagttcattcctcgtgcccttgtgctttctgtcatgagagcacacagcatctctcttctccagagtatacagtgtcaccatatggaatacagccctcgccagaaatctgaatctgtccgctccttgatctcaggcttcacagcccccaggtgaaaccagcacaaaatggactaaggcatctagtatgcaggaacaaagtatatgtacacataacccatatttgaaataaccaaaaataaaattcttgccaattaaatcatagccaaataagcaccaaatcaaaaagctatcaaaactattttgaaaattacagtttaaaatacagttatatatgtataacacatacatagaatgtagatacatatgcacgtatatatgtgtatatacatataaaacttctcaatattgtcaataattgttatttttactttacagtaatattttaggaagtaatagcttaatattcttggactcacatagtaaaagttcagaaattacttcacctgattttcctttcatagattcaaattcacatttaaaaatattatgcttcctcatgtgtcaatatagtcacgtgcttcttgac

SEQ ID NO: 257081 - DNA, 2086 bp, Homo Sapiens
  misc_feature (1659)..(1659): n is a, c, g, or t
  misc_feature (2030)..(2030): n is a, c, g, or t
gggggcggaggcccgggcaactcttttgaatggaatcgggctgattcatcgccggtttgcagactgagccgcgtcgggtgtgcgccgctgctgctgttgcctctgtcttcgcgtcaccacagaggcaagacaagggtccatatcgcggcatccggctcccgcccgtcttcaggagagaaagaaaaaataaaatatacttggggaagttgtacctgccagaattagcaagagctttctttaagaagacatttgtcaaactcaacaaattgaaggttaacaccttaagagttgtagttactgaccagaaatatggacagacttcttagacttggaggaggtatgcctggactgggccaggggccacctacagatgctcctgcagtggacacagcagaacaagtctatatctcttccctggcactgttaaaaatgttaaaacatggccgtgctggagttccaatggaagttatgggtttgatgcttggagaatttgttgatgattataccgtcagagtgattgatgtgtttgctatgccacagtcaggaacaggtgtcagtgtggaggcagttgatccagtgttccaagctaaaatgttggatatgttgaagcagacaggaaggccggagatggttgttggttggtatcacagtcaccctggctttggttgttggctttctggtgtggatatcaacactcagcagagctttgaagccttgtcggagagagctgtggcagtggttgtggatcccattcagagtgtaaaaggaaaggttgttattgatgccttcagattgatcaatgctaatatgatggtcttaggacatgaaccaagacaaacaacttcgaatctgggtcacttaaacaagccatctatccaggcattaattcatggactaaacagacattattactccattactattaactatcggaaaaatgaactggcacagaagatgttgctaaatttgcataagaagagttggatggaaggtttgacacttcaggactacagtgaacattgtaaacacaatgaatcagtggtaaaagagatgttggaattagccaagaattacaataaggctgtagaagaagaagataagatgacacctgaacagctggcaataaagaatgttggcaagcaggaccccaaacgtcatttggaggaacatgtggatgtacttatgacctcaaatattgtccagtgtttagcagctatgttggatactgtcgtatttaaataaagcaacgaaaaacgctattaatgatgccttcagtgtatattcctctgttgttcctaatgctcaaaatcaagggacctctgaaggtgtacttggctaaatgtaagacatctggcatcatttgcagcactgtaacaccttcagtctcagttgtgcaattacttctgtttctttagtcagggtctttgcagattctaaagttatacatgaatacatcaaagtggacaaattttgttaagatcccatttaatatttgaaaaaatcagtagcacaaatatattttgattgtcacttacaaaataaaatacatttaccagtccccacaaacaccaccctaaccacacgccacttgcccggcccccctccggccctcgaacaactttctctaaacccatctcgttgggcgtgcccgggcccagntacgccaagcgccaccatgccccatcaccctggttttccctaaggaaaatctttggcccatgcactaccggccttggcattcctccccaattaacaaaaaccccccggcgcccaaccccaccggttctgaacaaactgcccaatgggaccttctaaaggcctttacctggcatttttccccccgtattcccaaaccgaccctcgatttcaaattcacctgcctcccccccgtaaacccccttcgaacccctggtggccccttcctttaatacctttcctcctcaactatggcaatccctccccaaaccgttttctgatgacaccctcacactcgctagccccgcctctacggcccctgtttacccccccgnatttataacttgcgcccctatggccgaaaaacacgggcgcaaatacaaacttgtat

SEQ ID NO: 257082 - DNA, 405 bp, Homo Sapiens
  misc_feature (385)..(385): n is a, c, g, or t
gaatcgggctgattcatcgccggtttgcagacagagccgcgtcgggtgtgcgccgctgctgctgttgcctctgtcttcgcgtcaccacagaggcaagacaagggtccatatcgcggcatccggctcccgcccgtcttcaggagagaaagaaaaaataaaatatacttggggaagttgtacctgccagaattaggcaagagctttctttaaggaaggacatttgtcaaacttcaacaaattgaaggttaacacctttaagagttgtagttacttgaccaggaaatatgggacagacttcttaagacttgggaggaggtatgccggggactttgggccagatgggagttctttgctcttgttcaacccagggctaggagttgcagtnggccatgatatttgggctcc

SEQ ID NO: 257083 - DNA, 861 bp, Homo Sapiens
  misc_feature (188)..(188): n is a, c, g, or t
gggacaggctcttcggtaaactcggggtcagagtcccgtaggtcgttgggcacactctgtcacggaaagggaaacacactcttgtcaagaactcactctagacacagcacagggaaatcttgaccaggctttaaataccagagtttaagtcttatatcaacttccataatcacccacttcaagcacanaatggtgcttcgaattgataaatgtgtctaaaaattatgggagccttgttgggacacaaaaatgtgctttttatgtaggtaaaataacaggtttatggagaaaacatctgccaatgtattccttccaaccctcccccagacaattctgaattaaaataaatgccctttgggcttctctatacttagaagagagacagatactcaccacatttgggttaaaaggggaagtaatcttcttattaatgagatcatcccagttaattaaggagaagaagacatgactcttaatctccatctgttgataagaaacccaagattaatttagacaggtgcattcaataagggcagggaggtctagtgcacgtcccggccggcccaggaggacaggaaaacatcactcacgaagtcatccttggccccgagccgctttgtcctgtccttctgcaggaggccctccagggaggtgtcttgcggaatttgtaatatttggtttcagctgggagaggcttgttcagaatgttgtcgtacatttcagctgtgtttcggctataaaaagggcggctgaaaggaaggggaaaattactttaggacttaattgggaagtttcatatgggcacacatttacccgtaggaggaaaaaggttttaaacgggcattaaatttttagggctcc

SEQ ID NO: 257084 - DNA, 1269 bp, Homo Sapiens
  misc_feature (142)..(142): n is a, c, g, or t
  misc_feature (169)..(180): n is a, c, g, or t
tgggtaacgtaattattaaccccaatgttaatttaccaggtaccattaaaaaatggttggttttaacattaccaaaataagccctggtaagttttaaatataactagtgttattaacccaattgtacagaccgttctttatnccaatacatccaattatcaggaatgcnnnnnnnnnnnnccataaataatgcccatttaacaggtgacattttaaacaatgaaaaacaccaacggctctgactgacaactggggcattggtccataaaaaccctttctaaaaatagaaatatttgtagcagcaatgctttctttaagcatctgaatacgagtcattgcaagaccatttcaataaattttagttattaaccgtatcttacaaaaaagtctacacataaatttatcttccaaatatggaagaaacaaacaatgtcccacgttgtagtgtcctgcaagtgtcacattgatgcttataacaaaatccatctgtgatcaggcataccacactcacacgacggttcacacagcatatccacaagggaaaataaagaactgaaacactgcgataggaaaagctttggagctaacacaatctcttcagaaaaggcacatttcataatattcgtcatcacagcccagacagatctgcaggagaccttttttagaacagcgtccgctttctaacgaaactcctgcctccgtctaaggcggcactctaacgctcgtttcagagatagcaccacgttggaaggaagaataaaaatgaaaacctcatgagctcactgaggagaatgtgctcttcaaaaagcttccagcgaacagtgtgcaataagattgctaagcttccagagatgtgcaaattctcttgtaagatgtcctgtcagctggcggctccaccaaaaggctaactaaaacattcggaaacacacataaaatcctttaaaaccaagccctaacagggttcagaggaaagagtccgtgggaggcgcataggaaaagcctaggaaagcctcggcagcttccttgacgctggctgtgacgaggacgctgtcaggggacttgccaatggagttggggacaggctcttcggtaaactcggggtcaaagtgccgtaggtcgttgggcccactcacatttgggttaaaagggggagtaatcttcttattaatgagatcatcccagttaattaaggagaagaagacatgactcttaatctccatgaagtccgacgcgtggtcgacgatatcccggaaattccggaccggtaca

SEQ ID NO: 257085 - DNA, 677 bp, Homo Sapiens
  misc_feature (440)..(450): n is a, c, g, or t
attatgaaatgtgccttttctgaagagattgtgttagctccaaagcttttcctatcgcagtgtttcagttctttattttcccttgtggatatgctgtgtgaaccgtcgtgtgagtgtggtatgcctgatcacagatggattttgttataagcatcaatgtgacacttgcaggacactacaacgtgggacattgtttgtttcttccatatttggaagataaatttatgtgtagacttttttgtaagatacggttaataactaaaatttattgaaatggtcttgcaatgactcgtattcagatgcttaaagaaagcattgctgctacaaatatttctatttttagaaagggtttttatggaccaatgccccagttgtcagtcagagccgttggtgtttttcattgtttaaaatgtcacctgtaaaatgggcattatttatgnnnnnnnnnnngcattcctgataattgtatgtattgtataaagaacgtctgtacattgggttataacactagtatatttaaacttacaggcttatttgtaatgtaaaccaccattttaatgtactgtaattaacatggttataatacgtacaatccttccctcatcccatcacacaactttttttgtgtgtgataaactgattttggtttgcaataaaaccttgaaaaatatttaaaa

SEQ ID NO: 257086 - DNA, 400 bp, Homo Sapiens
  misc_feature (55)..(55): n is a, c, g, or t
  misc_feature (64)..(64): n is a, c, g, or t
  misc_feature (241)..(243): n is a, c, g, or t
  misc_feature (245)..(245): n is a, c, g, or t
  misc_feature (335)..(335): n is a, c, g, or t
  misc_feature (376)..(376): n is a, c, g, or t
  misc_feature (386)..(386): n is a, c, g, or t
cttggccccgagccgctttgtcctgtccttctgcaggaggccccttccagggagngtgtcttgncggaatttgtaatatttggtttcagctggagaggcttgttcagaatgttgtcgtacatttcagctgtgtttcggatataaaaaggcggcaggccatacagcatctcatacaagacagctcccaggcaccaccagtccacagtcctgtcataaggctgcttatgaagcacctcaggcnnngnatactccggcgtgccacagaaggtggatgttgtgctgttgtgttcaatgttctccttgcagagtccgaagtcagtaagggacaatgtgtnccctgtggaatctaggcaaaattattctctggggttttaangtctcctatnaaccggtggttcag

SEQ ID NO: 257087 - DNA, 635 bp, Homo Sapiens
  misc_feature (57)..(57): n is a, c, g, or t
  misc_feature (548)..(548): n is a, c, g, or t
taaatcctttaaacccaacccctaacaggttcaaaggaaaagagtccgtgggaggcnccatcaggaaaaccctaggaaaagcctcggcagcttccttgacgctggctgtgacgaggacgctgtcaggggacttgccaatggagttggggacaggctcttcggtaaactcggggtcaaagtgccgtaggtcgttgggcccactctgtgacgggaagggaaaaacactcttgtcaagaactcacactagacacaggacagggaaatcttgaccaggctttaaataccaaggtttaagtcttatatcaacttccataatcacccacttcaagcacaaaatctcaaaaggctacacacagttaaacataagaataatgttcacttgttgccttttggtgcttcgaattgataaatgtgtctaaaaattatgggagccttgttgggacacaaaaatgtgctttttatgtaggtaaaataacaggtttatggagaaaacatctgccaatgtattccttccaaccctcccccagacaattctgaattaaaataanatcctttgggcttctctatacttagaagagagacagatactcaccacatttgggttaaaagggggagtaatcttcttattaatgaga

SEQ ID NO: 257088 - DNA, 803 bp, Homo Sapiens
  misc_feature (669)..(701): n is a, c, g, or t
  misc_feature (720)..(720): n is a, c, g, or t
gcaatatgtgaattctgtaagtgtatgaatgcattctctagatttatcaaatattaacatttcgaagtctagggttgggtatgacctgtggctatacatagagtctatatatcatcaccattttggttccacagcatcaaaagagtgtctatgcaggtaagcacagtaatgatgcaaatggaaatgtgtctgtgagcaagcatctggctctacaaagcacacaggcctggactcagcctgtgaagcggcgggtactcagaaagtgacactagtattttaaataaacacccaagagcttttgcatctgattgttcccttcaaagtagcctgctggaagcctagatcatcagagaatgttcatcagagggggacacagatcatcctagatcacagagaagttcagtgctaagaatgtgtcaaaaccttctgtctggaccttcagagtggtgacaggagttactcattcgtggcaaatatttatccgcagaggcagaatctgaattttggaaacggtcaaatatcttttggccacaagtttggttaaagagatgaaaaatcaagttaggcaattactcttatagtaacaaccaagccatagaatcagagcaggctgcggctctggtgtcccttaaaaactggctctgagagtgaagccccaaaaggatgctnnnnnnnnnnnnnnnnnnnnnnnnnnnnnnnnngtgcgccttggcagcatcntcaggatgaggctgagctccccaggggaccccttttaaagggcaacgctcctcgtgccgaatttctgggcccgagggcccaat

SEQ ID NO: 257089 - DNA, 1637 bp, Homo Sapiens
actctgctgaagggccgagaggcgcacccgggcggccagctgggctcggagcggaacggggtcaggatggacgaggacgtgctaaccaccctgaagatcctcatcatcggcgagagtggggtgggcaagtccagcctgctcttgaggttcacagatgatacgtttgatccagaacttgcagcaacaataggtgttgactttaaggtgaaaacaatttcagtggatggaaataaggctaaacttgcaatatgggatactgctggtcaagagaggtttagaacattaactcccagctattatagaggtgcacagggtgttatattagtttatgatgtcacaagaagagatacatttgttaaactggataattggttaaatgaattggaaacatactgtacaagaaatgacatagtaaacatgctagttggaaataaaatcgataaggaaaatcgtgaagtcgatagaaatgaaggcctgaaatttgcacgaaagcattccatgttatttatagaggcaagtgcaaaaacctgtgatggtgtacaatgtgcctttgaagaacttgttgaaaagatcattcagacccctggactgtgggaaagtgagaaccagaataaaggagtcaaactgtcacacagggaagaaggccaaggaggaggagcctgtggtggttattgctctgtgttataaactctgggaaattccatctcttgcatatttgatcagatagtgacatctttctgtatataaactctttaactgctattttagggaccttgcagtttgcacataattgttttatatcatagcagtaaatatttgcaagaaatcccactcatcgaccccgggtaaaatgttatggtaagcatgcacagtttgcagtctacagtttttttatgtagcacaaaataggtgtacctttataagtacattcaattttatgatttacatttatcatgtaatttttaaaaaaatccatctatctaggatatgttgatacaaagtctgcttttgctattctttttgcttaaatactcctatcattttctgaattacttggtatttagaactcctagcaccacggggaagaatagaggtatcatcaaacgtggcaaattttctttcaggaataataaagagcatgattccacagcttttctgggatgtttgagattcttttttagtactaagcaaaattctcatcacagaatgtagcccaggccaatttataactaaatctctatttgttcggatgatgcttctaaaacagcattgataggttaaagaagcttggtatttttaatttacttcaatgattagctcagttgcttaactggagttttaatcctgtgatatgtacatttggattcatgactgtgccagcatttttagttatgtggtgtttggcagaatgacaataaggttttcccccattttggtttcaggaggacatgaatagtgtgtttattgtaactcctcatacacttttaaaaccaacatcttttttcataaatgttggtagtgtttgtccaggtaccttaactgtagcttgtgtaatgttgatgaatatctgtatcttacggcttccataatggctagttgatattcaaaaacctatttctgtgttttgaggggtgggg

SEQ ID NO: 257090 - DNA, 415 bp, Homo Sapiens
gcaggagtccttgctctgaacacagatgctcgtattgcctttgtcaagaaaccatttatggtctctagaatagacaagatggtggtgagtgccattgtggacaccttgaagacagcgtttcctcgctctgaaccccagagccccacagaggagctgagtgaggccgagaccgaaagcaagccccagacagaaggcaagaaggctagcaagtccaggctgaggttctcatccagtaaaatttctccagcactaagtgtgactgaagcacaagacaagattctttattggctccaggaaggcaatgtggagtctgagactctatccatgtctgcgatggaatcttttattgaaaaacagacaaagttactggaaatgcagccaacaaaaagccccagaaaaagatcctgaacaacct

SEQ ID NO: 257091 - DNA, 1089 bp, Homo Sapiens
tttgcagtgtgtagttttatttgtttttatttccataacacaagagaggaagcgaagggccagggccaaggcatcccctgcacggttcgaaggctttcaaccgtcccgggtttgttttgaaggcaattttggggccgcgcccaagggaaaccctgcaggctgtcagtcccagcatgaacagcttaaaataaaaatctcccgtctggttgctgctcggagaggctccaagaaatgcaaaacaaacccgcctggaaaatgctgccctgagaaccagagcgagggcttgaaagatgccttcaacacagactcttctaggaatccagccagctttgggacggccgtttcacaaaaccaaaaaacaccaagtaacatttctaaccggagaattgccggttttagcaagaaaaaggggcttcacctaaaagggagggtcacaaaacacgaagggggttccccctggcgcctgcctcttcctttctgagcagatccgtccgagactgtggagcggaatcgccaccctggcaggagggggcgcagcagccggtctgggtgggcgctcactgtttgcccgcctgtctgccaggcttcttctctggctggcctctgcctgtgcccgggatcccacctcggccccggccaccaaacacacctcggccagcgccgcccatgccgcggcctttctgctgcttctgctgctgcaggcctccgcggccgcggcccttggccaccacctcctccttgaccatgtcgatgatctcgtcggggatgcgcaggtacttgatggtgctgccgcggatgtagcactcgggcatccgccagaacttgtccccgtccctggacgtgcagatgacttctcgcaggttaatgttcatccagttgtcgcagctcaccaggtgtccattgtacgtctccccatttttcagctccaccaacatggggtgattctgagccgtcttcagcagtgacaagggaagcatggtgccggcggggaccgggctcgccggccacttccgccgccgccgctgcacacgctcccggcggtcgtcgccgcgccctcgtgccgaattcgccacccaggcctcgctactt

SEQ ID NO: 257092 - DNA, 966 bp, Homo Sapiens
  misc_feature (907)..(907): n is a, c, g, or t
  misc_feature (924)..(924): n is a, c, g, or t
gggagaaacggtcatttaaggtgcctctgggaaagggaagacgctgtgtcgttttagcagatggattctatgagtggcagcgatgtcagggaacaaaccagaggcagccatacttcatctattttcctcaaatcaagacagagaagtcaggtagcattggtgctgcagatagtcctgagaactgggagaaagtctgggacaactggaggctgctgacaatggccgggatctttgactgctgggagcccccagagggaggagatgtcctgtattcctataccatcatcacagtggattcctgcaaaggcttgagtgacatccaccacaggatgcctgccatattagatggagaggaggcagtttctaaatggcttgactttggtgaagtctcaactcaggaagctctgaaattaatccacccaacagagaacatcaccttccatgcagtctcttctgtggtgaacaactcgcgaaacaacactcctgagtgtctggctcctgtcgacttggtggtcaaaaaggagctcaaggcaagtggcagtagccagaggatgttgcagtggttggccacaaagtcacccaaaaaggaagactcaaaaacacctcaaaaggaagagtcagatgttccccagtggtccagtcagttcctgcagaagagtccactccccaccaagagaggcactgcaggactcctagagcaatggctgaagcgggagaaggaggaggaacctgtggccaagcgtccttacagccagtgacacaggactttcagagaccaaggccagggtctgctgcactgctgttctgataataggttcttaacattgtatgtatatgtgtttgctttgggaggaggtggcactgtgttagttgacagttgtggggctcatgtagtcttttttgccantgagtagagccccctanttggggctggtggacagcttttggaaagaaggtgtcctgctg

SEQ ID NO: 257093 - DNA, 576 bp, Homo Sapiens
  misc_feature (451)..(459): n is a, c, g, or t
cttgttattgttgaatattcaccaatatctgggcctgttaaattacattttattggcataaggttgcactgcattctgccagtatcacataatgataatccaactgaattaatttcttaagtaccacaaacagcattcatgttcaaatgttccaacacaattttaaatatatgcaagagttcatgtttacattctgatttgatataacaatcaataaaatctttgaagaagtttgtaagttctgggttgttgctatagatacagatagggaaaaaagtactttaactttcctcaaaaggtaacttcccttgacaagtaagttaggtttctgcttttataatttaggttatgtactcagtttaccatggctttcttctacttaacagtgacttgataaaccaatgtttaaaaaacccaattacacatttttacacaatttgggttctatttnnnnnnnnnccgtggctctactctttaaatatggagcctaaccttgattcataaataccgtccctcttgaaaatggtcctcagctcaggcttctcatacctctgtgaacctagaattagcacgagt

SEQ ID NO: 257094 - DNA, 1058 bp, Homo Sapiens
  misc_feature (303)..(320): n is a, c, g, or t
  misc_feature (323)..(351): n is a, c, g, or t
  misc_feature (370)..(381): n is a, c, g, or t
gggggagaaaaaagagttctacgttcagccaagaagctgtggcctgtacccatgggaagagcaagacattcactgccctccctggtacctggccatgggcttccctctccaaagttgggaaaggatgggaagagtaggtgggaatggggaagttacacagctacagcagtcaggcctgtttagtaagaagaatcacatttaatgagtttctttcttgcagtttcagatgctcaagtacagctgaaaaaaatctgaaacagctatagacccatgacagactgatacaaagagtactgcattttnnnnnnnnnnnnnnnnnntcnnnnnnnnnnnnnnnnnnnnnnnnnnnnntctcgctctcaaattagannnnnnnnnnnnacaaatgtacactttgtggaaactaaactggttttgaaaccccttcttccaaaaagaagggcagaagagaaagatgaagagaggaaagaggatcgcaggtgcccaatccccgctccccccacaaggtcacgtgccgaatgttcaatgggtgggccaaggcagtctgtagaggagaccgcctggtgctgctgctattgccccaggggctccagcaagattcccagctccatggtaatactgaatgcgtgcagagtggccaatgaactgcgcggttaaaaaaacaaaggcaacacaatctaaagacatggataaagcccaagagagcccaggcccacactgggtggggcctgggggaggggaggctggtgggagatggtgtgcagacaaggaggtctatacagcaaatggtttatattacagatgactggcagtttagagtctcttcccagttcacagctgctccagcccaagaggctaaatcaaggaaaggaggaaaggtgggacgctgcgatggggcatgcagggtcagaagcagcaggctgggtgtgctcaataagccctcgtcgttttttgtagtcttccaagttcagagatctccttggagccccatccttgctggcggagccttggaggtgcgacgcgtgggtcgacgatatcccgtaattccggcccgtacc

SEQ ID NO: 257095 - DNA, 674 bp, Homo Sapiens
  misc_feature (92)..(92): n is a, c, g, or t
  misc_feature (395)..(395): n is a, c, g, or t
accgccagcgaccaagaacatatccgctatcagttacatcaaccagcggaaccgggagtggaacattgtagagtctgagaaggcccttgtgntgaaagtcacaacatgaaaaaccaacagatggatccctttactcggcggcagtgcaagcctaccatcgtttctaattccagagacccagctgttcaagctgccatcttggcccagctgaatgcaaaatacggttctggagtgttaccagatgctccaaaggaaatgagcaagggtcaaggcaaagataaagatttgaattctaagtcagccagtgacctctcagaagatctgttcaaagtacacgattttgatgtgaagattgacttacaagttcccagctcagagtcaaaggctttagcatncacctccaaggctccgcagccaaggatggggctccaaggagatctctgaacttggaagactacaaaaaacgacgagggcttatttgagcacacccagcctgctgcttctgaccctgcatgccccatcgcagcgtcccacctttcctcctttcctttggatttagccttctttgggctgggagcagctgttgaactggggaagagactctaaactgcaagaaagaaactcattaaatgtgattcttcttactaaacaggcctgactgctgtagctgtgta

SEQ ID NO: 257096 - DNA, 366 bp, Homo Sapiens
  misc_feature (122)..(139): n is a, c, g, or t
  misc_feature (142)..(170): n is a, c, g, or t
  misc_feature (189)..(200): n is a, c, g, or t
agtaagaagaatcacatttaatgagtttctttcttgcagtttcagatgctcaagtacagctgaaaaaaatctgaaacagctatagacccatgacagactgatacaaagagtactgcattttnnnnnnnnnnnnnnnnnntcnnnnnnnnnnnnnnnnnnnnnnnnnnnnntctcgctctcaaattagannnnnnnnnnnnacaaatgtacactttttggaaactaaactggttttgaaaccccttcttccaaaaagaagggcagaagagaaagatgaagagaggaaagaggatcgcaggtgcccaatccccgctccccccacaaggtcacgtgccgaatgttcaatgggtgggccaaggcagtctg

SEQ ID NO: 257097 - DNA, 531 bp, Homo Sapiens
  misc_feature (17)..(17): n is a, c, g, or t
  misc_feature (57)..(57): n is a, c, g, or t
cccaattccaaaaggancattatattgcctaatttcagaatccggaagttccatttnctgcttttagcccacagcctcctttctattagtctatgtgatgaacaagatgtggctactagttcagcccctccatattactctgctaattctaaatgaatggcacagatattaatacgaaggacactgttattttaagtctgttagttgtggaagagatgtgcgttaatgcaattggtgctaaattaagggcagtccaatttttcccaataaggtttcactttctcagtctggggactaaccttggggaggagccagcctctcctgaaatcccatccttctgtttccttatgtagccaacatgatctgattaattctcaatcagatgagcaaaagccacttgaacaaagatgagaatcttggccacatccgtgtggtcacagtaatacactgcacgagtgcacatgatcagtaatttaggcactgcgccctggaatgaggcctgttcttgagtctcatataaaaacagaccac

SEQ ID NO: 257098 - DNA, 631 bp, Homo Sapiens
ccccaaggagagagtgttcagatatggcacatctatataaaacgcagcgatgctggctcattattgttataatgtgacatctcctcaatgtgataactgtattgtggttaagagattgtccttgtgtataggaaatacgctcctttggcatgaataagggggcacaaacgtctgcatctatctaaatatttgtggaaaaaaacaatgagggggtgagagtgggtaagcaagagagagggagaccgggaaaagtgaaggaaagggtatttgcaagtctcgtgtactgttctcgccatcttccctaactttaaaattaattccaaagaaaaagttggacacaaggactcttgcctgtacatatgaatcacaggcatcttagtaaaaactctgactcagtaggtcgggtgtgaaccctcagagcctgtatctgaatgagcccctaagtggatctgctgctcgaaagagtgtcagtgtgaaaaagcctgtcttcccagcctgttccacagaatccaaaacaggcctcggcaagccactggatttcattacaaggacctgtgggacacacacttgatgttggtttcttaaatggggaaaaaaatggtaattgccacagtcacaaaaaacacaaaag

SEQ ID NO: 257099 - DNA, 484 bp, Homo Sapiens
  misc_feature (143)..(155): n is a, c, g, or t
cccccacttcatattgattctcttctcacatgtcaatataaggtggtacccatggccaacaacattctctctcacctatcatactaatgccatataagtagtagtgtttgtgttttccagagtggggaaatatatacagctcnnnnnnnnnnnnntatatctagcacctaactccttgccagttcccttgactctctgacctttaagtcccaaggttctaagtatacaatgaataagaaacctccctgttcaaacccaacagaatatgtttttttctggtttgattaaggcttcgaatttggacacataaatactctcagtaatacttagtaattcatgaagttactgcttgtgtaaccttgcagaatatttacctttaggagattataaatcctaacatgcccataggggccttctgcttttattcctacatacaacacatacaacatgtgtgtttttaaacacaatgcacataggacaggtg

SEQ ID NO: 257100 - DNA, 627 bp, Homo Sapiens
aaggtgaaccctcttcactgatagccctttcgaaagggtgcatgttgccagactacagtctccgtgcccacttcccagagaaataggcaatgcacatatggcccagcttgtaatgagttcataagttgcgcgcgcatcacaaaggaggactcagagtctctcctccctgaatgtgaatcgcaagtgcacatggccctcaggaatggatctgaacctggaaagccaccacacagaatgcatctggagcgaatgcactgtctgcaagctttgatacaatcatgcaatcaactaacttaatcccttgattttctaagttttcttaaaataatctaaaattccttgctgaaattctaatccagctctatggagcaagacttctttggtgcttaagaacagtctgatgggctggaagcaggttatttgaggtaccctcaatgtagataccaccattaaacccttagttctccctagaattttgacctcttaaaatgatccctactacaactgttcagttaagtatgaaatttatgtgttgagagatatctaataaaagtatgtcttttcttcataatgatagtcacttatactatcacattaaatatgcattctgaaaacacaaaataaaac

SEQ ID NO: 257101 - DNA, 341 bp, Homo Sapiens
  misc_feature (341)..(341): n is a, c, g, or t
tcccaaggaattctgccgggccatttgtgccaagccatggcttaggaagtttcggttgccatatgccgtttctaagagtaccaaaccctgttctggaatgtcacatccgtgacagttgccagacacttaaatgcacaaagagtgggcacattactcagtttgaaaaataggttgcagaaccctatttctaaatgagtatttatttaataaatgcctatacacatggcaaaattggctctcactctgataacagtgttgtaggggagcagctaacgattcctcaaagttcttcatggaggtttctgccataaagaacgtaagagccgggtgcggtggctcan

SEQ ID NO: 257102 - DNA, 543 bp, Homo Sapiens
ctgtggtcacagaaatcacgtgtaccccttcataggtagatgtaatgcacatgctcaggccttccccaggttcaatgtttggtaagtgagcttcttccagacatgcacactgtctagtcacagtatctgtggtagatcgaattgttctctcacatacgccatttacctccttgaccacagttaaaactttatcctccattcccgccacaaaccaatccttctgcactgtagtgctcagtgtccaaacaaagctgcataattttgttcttcgtgactgagaaatcagtgatcccgtgtaaacgaagcccggtccagccacgccagcaggcccttgacggcgccgatgagcaccaccaccgaggtcagaaactcattggggcccttgcggaaggtgttgccatcgtaagcgggacttttccgtcggctacttatgtaattctgtaaattgtggcaagatgctctcagttccagaaccaagttcttcatattatcagtttcgaggccataattcagtgcacagagaaggtccacagcctccaacac

SEQ ID NO: 257103 - DNA, 662 bp, Homo Sapiens
  misc_feature (478)..(478): n is a, c, g, or t
  misc_feature (603)..(603): n is a, c, g, or t
atactctgacaagagactgaaggtgctactcaatgcgcgaggacacagggtgtaatgagattcggaacgagcactcctccaatgtctttggcttcttgagccacataggcccggaacttgcaggcccagtatgatcgccggagaggcatggacattaagcagatgaagaatttcgtgtcccaagagactcaagggcctgaaacaggagcaccgcctgctgagtctccatattggggcccgtgaatccatcatgaagaagaaaaccaagcaggatttccaggagctaatcaagaatgagcatgcactgctagagggggtcaacatacgcgagagcaccaactacattgaggaacacatagaccggcaggtgtcgcctatagaaaacctgcgcctcaagtgccctttgtgcatcactgagaatgggttgatccccaaagattaacgatctctgaaaacacagtatctgcagagctatggncctgagcacctgctaaccttctccaatctgcgaagagactggctcctaacggagcacgcgcccccgggacaccctcacagacgtggagagtgaagtgagcaagctggtgaccgacaaggctgtangaaagagtactgatgccctcagatctctgggcaagaggagcaattttctgccatcagca

SEQ ID NO: 257104 - DNA, 778 bp, Homo Sapiens
  misc_feature (727)..(727): n is a, c, g, or t
  misc_feature (742)..(742): n is a, c, g, or t
  misc_feature (761)..(761): n is a, c, g, or t
taactatctcacaatataggtccccaaccactgaccaaactccagtccaggcagccaccagctggcctggtcttgctgcttcctttagcggcttccaaggtccagggacagggggtctgggccaccaagaggctctgctaggctgtccctgcagccacagccaccccactggacccctgcctcccatctgagaggacagccctcttcctgggagctgggatctgacacttgctgataccaacggcagataccagggtcaaggattcggtgacttgaagacaggcctcctctgttgctttgagtcaatttctagtacctggggcctaaatcttgactgcacaccggtcatattattgaggtaacgagatgtgagcagaaacaacctgtgtcacacctgggcagaagctttaaaggccagtgctgcccttgttggggaagcaagtatagatatgaatcgttccacaacgcggagcgccccctgccgacccatgctgggcgtgtactatagatgaggagactgaggatcagagagataaagtcacctgtccaaggtcatactgtggatgtagctctaacccaagccctcccgactgcagcacaaattctcagccactaccctattagccccttcatttgaaggtgtcttcatcattgccaagattccttttcctcccggccccctaagtcttcaggattccctcatcttcatctccccagagaagccatngacaccatctttctncaaaatcaaagttcagcgnttttcactgttagatgg

SEQ ID NO: 257105 - DNA, 1135 bp, Homo Sapiens
  misc_feature (549)..(582): n is a, c, g, or t
  misc_feature (1060)..(1074): n is a, c, g, or t
cccatctggacagcaacatttagaatcaagagattgtcaccaatccgccagacatttgccaagttgtagaggtgaccactgagagcgacgagcagccggtcagcatgagcgagctctaccctctgcagatctcccccgtgtcttcctatgcagaaagcgaaacgactgatagtgtgcccagcgatgaagagagtgccgagggacggccacactggcggaagaggaatattgaaggcaaacagtacctcagcaacatggggactcgaggctcctacctgctgcccggcatggcgtccttcgtcacttccaacaaaccggacctccaggtcaccatcaaagaggagagcaatccggtgccttacaacagctcctggcccccttttcaagacctccccctttcttcctccatgaccccagcatccagcagcagtcggccagaccgggagacccgggccagcgtcatcaagaaaacatcggatatcacccaggcccgcgtcaagagctgttaagcctctgactctccgcggtggttgttggggcttcttggcnnnnnnnnnnnnnnnnnnnnnnnnnnnnnnnnnnctctctgacacctattttagacaaatctaagggaaaaagccttgacaatagaacattgattgctgtgtccaactccagtactggagcttctctttaactcaggactccagcccattggtagacgtgtgtttctagagcctgctggatctcccagggctactcactcaagttcaaggaccaacaaagggcagtggaggtgctgcatttgcctgcggtccaaggcccaccaaggggggagtgggatgcctccaaaacgggacgagaaaaatgtggaacctagcctgggaattttttttattcctcgtgaaataatggaccattaggccagccacctaactagaccattggccaattctggccttcctggcaccctttatttcttaaaaagccacctttacaggaataaggggcccttcctttgggggaaaactttggcctctcttatttctctcaacggggcgaacaactcttctcgggnnnnnnnnnnnnnnntttttccttcctgtggaccccccactttttttcccccgaccaggaaagcccctttttcttc

SEQ ID NO: 257106 - DNA, 862 bp, Homo Sapiens
  misc_feature (743)..(743): n is a, c, g, or t
  misc_feature (752)..(752): n is a, c, g, or t
  misc_feature (783)..(783): n is a, c, g, or t
  misc_feature (789)..(789): n is a, c, g, or t
  misc_feature (800)..(800): n is a, c, g, or t
  misc_feature (822)..(822): n is a, c, g, or t
  misc_feature (829)..(829): n is a, c, g, or t
tttgaaggcaaacagtacctcagcaacatggggactcgaggctcctacctgctgcccggcatggcgtccttcgtcacttccaacaaaccggacctccaggtcaccatcaaagaggagagcaatccggtgccttacaacagctcctggcccccttttcaagacactccccctttcttcctctcatgaccccagcatccagcagcagtcggccagacacgggagacaccgggccagcgtcatcaagaaaacatcggatatcacccaagcccgcgtcaagagctgttaagcctctgactctccgcggtgggtggtggggcttcttggctttggtttggtggttggttggtatttaatttttttctctctgacacctattttagacaaatctaagggatctctttaactcaagacttcagcccattggtagacgtgtgtttctagagcctgctggatctcccagggctactcactcaagttcaaggaccaacaagggcagtgggaggtgctgcattgcctgcggtcaaggccagcaaggtggagcggatgcctcacaacggacgagataatgtgaactagctggaatattttatacttgtgaatatgtacataggcagcactagcgacattgcagtctgcttctgcaccttatcttaaagcacttacagataggccttcttgtgatcttgctctatctcacaacacacttcagcacccccttctctggcccatttccccagcctctntttcctatncccattcccattcccattcccgctctttttncctaantttttcccttncccttcaaaggttttccatttnccacatnccggaggggggaagggagggggaaatggaattt

SEQ ID NO: 257107 - DNA, 2099 bp, Homo Sapiens
ctgccaaaatgtctacaggtccaactgctgccactggcagtaatcgaagacttcagcagacacaaaatcaagtagatgaggtggtggacataatgcgagttaacgtggacaaggttctggaaagagaccagaagctctctgagttagacgaccgtgcagacgcactgcaggcaggcgcttctcaatttgaaacgagcgcagccaagttgaagaggaaatattggtggaagaattgcaagatgtgggcaatcgggattactgttctggttatcttcatcatcatcatcatcgtgtgggttgtctcttcatgaagaaccagcggaactcaaaactgctgttcaagaaacctcttcaagacttttgacttagaacctgctatattatcaagcttacctactgttatctctaaaattttttttgtgttaatgtaaagttgaatttctaggaaacgtgcctttgttttttaatatgcactccaaattagaaggccggccccgtccacattttgcacagtgcctttacagatttacgtatgggctgatgaagaggccttcttaagttccagagtgctataatctagatgtaatgttgtcactaattaattgccattactcccagttagttacccttgtcatttggcattattttcagaaccacattttaaacctttgggtaatcagatttccaacttatgccttccagaaaaaaacactactgcctaacacaaatctgtgataacaacaggctgtgccttattttgataattttctgattccctagaagagaaccctctactttttgtaagcactactgactctcgctgtatttaagatgctggtgaagagcttttgctcttgcattagatttgaagatgtttacattgttgttattgttatgtatcacttgctaaaaatattgttttaatcagagataacctctttaaaaaaatttttaaagaactatggctatgaccaaagcttctattttgccaaaaagttaaataccgataaaatggccttaagtgtattcctgacagttaaattcagaaacgtgccaaatggaactcaaggtgccccttcagaattaaaatcattaccttgtgtgtgaaccttctacatcttcataggcctttcttccttttgaaaggctgtagacagtgtggctccccttctgattcagtattttgcatgggggttagagaaggtttgaggtagactctgaccgtctcataaaagagttctacccagcagttggcagattatcagctgtggactccagcatgtttctgataattatgcaagcaacaattctgtagcctcaagtaagaccacctgtgaacttgatcattatctggcccaaatatgaagataaactataactttggagtttgtttcctatttgtattcacattctgcttcctaaatcagttttctaaattatgcctgcaattaggcattggtcaggggtgaatggctcttttcacagagagtagccaaccagagacctttgctttgatatcatcaactgcagacaatgctgttgatgggaatgctggaagcagaaactttgtcatcggaaaaacttttcttgtatgcatgagactcaacatcaggatccacagcttaaagatgggaattcaggtatgaaagaaaacaggcaaggaggcactgagggagaaagacacagactttatcgctctgtggctcattgttactggaatattctaaaactcttgttcacatgctattatgacttataaagcagcaacagctgaggcgcaccaggacacagcttccatttctttaacgtctgttcccttaacatcgctgaaatgatttactgttgaagagatgccttgcggtgtggccagctgtgaggagaaagcagctggcagtgttaggacattagtccaccttcagcgcagggtctctggccgggtctgactcagaaaccttggtactcgccccttggccacagtgcccagacccatgtaacccactggctcctgcattaacccagaaatacctcgcttctatctgtgcacttagctgggaacttacccactgtaatcacctaaataaagtgtttataaacatgaa

SEQ ID NO: 257108 - DNA, 785 bp, Homo Sapiens
ggggcgccgagacagggcgtgttcgctgttcagtgcgggtgttgcagggagtgagggcagctggagtgcgttctgccgaagcttgtggttgcacgcccatcgtcttaggggctaccttccgtgaccatgtccaagtctctgaagaagttggtggaggagagccgggagaagaaccagcccgaggtggacatgagtgaccggggcatctccaacatgctggatgtcaacggcctctttaccttatcccatatcacacaactggtcctcagccataacaagctaacaatggtgccaccgaacatcgcagaactgaagaatttggaggtgctcaacttttttaataaccaaatcgaggagctgcccacacagatcagtagccttcagaaactcaaacacctgaaccttggcatgaacaggctgaacactttgccacgaggcttcggctccctgccagctcttgaggttctggacttgacgtacaacaacttgagcgaaaattctcttcctggaaacttcttctacctgaccaccctgcgtgcactctatctaagtgacaacgattttgaaatcctgccgccagatattgggaagctcacaaagttgcagatactcagccttagggataacgacctgagctcgctgcctaaggaaatcggggagcttacccagcttaaagagctccacattcaggggaaccggctcacgttctgcccccagaactaggaaacttggattaactggcagaagcaggtattcaaagcgagacattcctgggtggccccatg

SEQ ID NO: 257109 - DNA, 942 bp, Homo Sapiens
ggggagacagggcgtgttcgctgttcagtgccggtgttgcagggagtgagggcagctggagtgcgttctgccgaagcttgtggttgcacgcccatcctcttaggggctaccttccgtgttaccttatcccatatcacacaactggtcctcagccataacaagctaacaatggtgccaccgaacatcgcagaactgaagaatttggaggtgctcaacttttttaataaccaaatcgaggagctgcccacacagatcagtagccttcagaaactcaaacacctgaaccttggcatgaacaggctgaacactttgccacgaggcttcggctccctgccagctcttgaggttctggacttgacgtacaacaacttgagcgaaaattctcttcctgggaacttcttctacctgaccaccctgcgtgcactctatctaagtgacaacgattttgaaatcctgccgccagatattgggaagctcacaaagttgcagatactcagccttagggataacgacctgatctcgctgcctaaggaaatcggggagcttacccagcttaaagagctccacattcaggggaaccgcctcaccgttctgccccccagaactaggaaacttggatttaactggccagaaagcaggtattcaaagcagagaacaatcccctggtgacccccattgcagaccagttccagcttggcgtgtcccatgtttttgagtatatccgttctgagacatacaaatacctctacggcagacacatgcaggccaacccagaaccaccgaagaagaataatgacaaatcgaaaaagatcagccggaaacccctggcagccaagaacagataaggaagggattggcatcggctggccttccagcaccttctctctccaacacttcattctctcttgccctgtctctcaaataaacccaatgctgcgtgtg

SEQ ID NO: 257110 - DNA, 762 bp, Homo Sapiens
ttttacaattataaaaactttatttcattcttactttaattaaatctttataagcaccatgtcatgagctggcaatctagaaagaggacactggaatgctttagtcaattacaaactgcaagctgatgatgtgaagttacagctacgtggagcatgtgaacaagaccacatttagaaaggttcacttaagaatcccatgacaatgcgcaaaacaggaatctggcattgatttgttcacactttttatagtcagaacgcaaagcttgtgcatgtaaacatcaagagaaacattttatcaccctgacagtttacagtttgctcaaatttgaccctgaaagcatatatgttgccatcttgttttcttgaccagtgctgggccacaggctgaaaaactccattcctttaaaatttaaatgatgcttaaaggctatgttcaacattgtgcaagttgtcagcaaggccttttaatgtgtacatttctcatgtatgatcaccaaaccattatttacctaatgaaattgtgaaaaactatacatattcagcaaaatgttttaatttggtcctatattaaaagacccaattgccaagggattttacacaaatttaattcacaagcatgtacacaagagaatcactataaagaacattgcttcctggtttatgaataaaaagtttatcttctacttacactaaaacatacaaaaaataatctacaaaaatcgtttacaattgattttagctaaagaaaaagctttcttcagg

SEQ ID NO: 257111 - DNA, 1154 bp, Homo Sapiens
ccccatcgaggtgagaagccctaccatgggctcatcattgtgtaagcccacagattgtgatgaaatgaaggttgtaaatagctgataaacttatgggcctcttaatgtgcaaacccaagtaattcctaaaagttgtaatcctgattatgtttctcttataaataatctatagattttcctctaaatacaaaaaaattaaagaaattattaaagcccgtacttaatacaagacacagtaaaaggagaggaatctcttgttttgagccctatctgagccgatttcgggacacttctggtgagatttcattacactcatgaagcctgtgctttctcagtcccctaaatagtggcctgaaccttactgttccccagaaagcagctccatgtggccagacgctcacggcagctgctctgtgcagtccaaatggtctgggatagggagcccagtgataatcgtcagacacttgttccacacggtgaaggtggggcaaacaggctgcgcaaatgcgacgtcgaaggtgtagaggtggatggagttcaaagcatcataaaaggcgatagagccgttatcatagtccagcaggatgcccacgcgccggaggtggggggcaggctcaatggggatttccttgctattgtgtctcaccacccagttattgttgcagcggcagagcgcccaggaagcagagttcttcccaatccattcatgcttcggggctgatttgtaagcaagaccaatggcataccatgtgcttccacttatgaccacttcccaataatgccggccactatcaataaacacatttccagctactccatagctccctggctggtgaagcgttcaggtgtgtgactcttcttggatgatgactcatcacgttctactgtcaagttatcatgggacaccttcagttttcgatgagcagatttgggatccagtttaaatggttggctgtttgtcttcaacttcccaggctcactgctgcggctgcccgcctggttgatggccttgaccatgaagatgtacttggtgccgctctgcagaccgtgcaccgtgtagtggttctgcttgatgttgggtactatcatccagctatcagccgaattacacagcgcacgcgtgggtcgacgatatcacacgacgccggaccgga

SEQ ID NO: 257112 - DNA, 633 bp, Homo Sapiens
gggcacatctccgaaaggacaagcccacctatagcaagcttcatttaggagtatagtagtgtgtgggcacaaagggcatcttggttgactacagctatgtgttgctcccgccgcacctataccagcagcattgtcctggacgccggtcctcgaagggcaaataacccatcgccacattcttcttcagagaggggaagggacacccacatagtcacagtaccattctgggtcccctccatgtccagaatggctctgtgtgcccgcatgggggccccctcacacataaaccccacacgcctccgctgcaccctgcccttaagctgggaaacaatgacctgggctccaggaaagtcaataacagctcggcggcgcttccccagtgtccaactgaggctgccctccacaggtgtagtgtgttcatcaatgtcattcccatacagacagaggcctgcctctcagaatagctgttgccaggtgaactgcccccgctaccggcaccgagatctccacaccatcctctcctgtgtagccacagcgggtcacgcgacagccagacacgccaaacacctccatcacagcactggtcataaagcgcagtttcctcaggtcatctgccacgccggcctgtagtac

SEQ ID NO: 257113 - DNA, 588 bp, Homo Sapiens
gagtaatgaggcttggggctggagaggacaagatgggtaaaccctcacatcagagtgacatccaggaggaataagctcccagggcctgtctcaagctcttccttactcccaggcactgtcttaaggcatctgacatgcatcatctcatttaatcctcccttcctccctattaacctagagattgtttttgttttttattctcctcctccctccccgccctcacccgccccactccctcctaacctagagattgttacagaagctgaaattgcgttctaagaggtgaagtgattttttttctgaaactcacacaactaggaagtggctgagtcaggacttgaacccaggtctccctggatcagaacaggagctcttaactacagtggctgaatagcttctccaaaggctccctgtgttctcaccgtgatcaagttgaggggcttccggctcccttctacagcctcagaaaccagactcgttcttctgggaaccctgcccactcccaggaccaagattggcctgaggctgcactaaaattcacttagggtcgagcatcctgtttgctgataaatattaaggagaatttcc

SEQ ID NO: 257114 - DNA, 629 bp, Homo Sapiens
agtcagtattgtattatgagcaatattatcaccatttattgtgtggctccagatcttacacctgtggccacatccttcagttggattcttgtgccccataaacattctccattctgtgctttttgtgttgagcacttcctttctttctagcaccaccaggctcttgtattatccctgtccctgccctggaatcgactcctctctccagagagccctgtgttcttttggtagaggatggtatatatgaatccaacatgcagaccctctggggacactattggtactcggggtttgttatactaaggtttcagagggcagcgctagtatatatgtatgttaacccacgctgtgcgttggattcacgctatttcaaattttagataatatgggacatatattattaataccactagatactacactggtactcttcagcacaatatatctaagtgggatcaaatgagactgtgtaatagctctacactcaattcaaggcagatatgttgctaaattacctttggcattaagtttaaggagaagacctgtgataagtccaagaacagcagtttcagtgtaacaggactgttaaaggaatcgcgtcatatagaaacacacaagactttgctgtt

SEQ ID NO: 257115 - DNA, 611 bp, Homo Sapiens
gaaccaagcaggtcctgtaccgcaaggagagagatgtggaaggaaaacagcagcactgtgcatgtgtgccgcgaggctgggtaccggcttcatccaagctagtcctctgcataggcctacagagagtgaaggagtgagctaagtcttgaaagaagagtgtcagttctccagaagagaggtgtccagggattctaatcgtaaggaagagcccacaggcccaggggtataaagaacgtgtcaaggaaatacagggtgcatctagatcgcgtgtgtgactttctaaggaaacgggactgtgtctcgggctgtggagtgtccctcttttacctcagagggcatgtggaccaatttaaagcagaacgaagcccgaagtgtggcaaccatacttcccatgggtcccatggcactctgctctcacctagagcatgtatccctgtccctcatgctcctgaccctgcaactacttgaagagcagtctctcttgcctctctcgcacggagctctgtgcagcagattggctcaaggttcctgtgaacatcagtcaacaagacgaggcttggcactgtcagagtgcatgccgggactctgcaaaggggcgggattccacaagg

SEQ ID NO: 257116 - DNA, 1601 bp, Homo Sapiens
ggcgcgggaacgacggcggccatggcggcctcggggcccgggtgtcgcagctggtgcttgtgtcccgaggtgccatccgccaccttcttcactgcgctgctctcgctgctggtttccgggcctcgcctgttcctgctgcagcagcccctggcgccctcgggcctcacgctgaagtccgaggcccttcgcaactggcaagtttacaggctggtaacctacatctttgtctacgagaatcccatctccctgctctgcggcgctatcatcatctggcgctttgctggcaatttcgagagaaccgtgggcaccgtccgccactgcttcttcaccgtgatcttcgccatcttctccgctatcatcttcctgtcattcgaggctgtgtcatcactgtcaaagctgggggaagtggaggatgccagaggtttcaccccagtggcctttgccatgctgggagtcaccaccgtccgttctcggatgaggcgggccctggtgtttggcatggttgtgccctcagtcctggttccgtggctcctgctgggtgcctcgtggctcattccccagacctctttcctcagtaatgtctgcgggctgtccatcgggctggcctatggcctcacctactgctattccatcgacctctcagagcgagtggcgctgaagctcgatcagaccttccccttcagcctgatgaggaggatatccgtgttcaagtacgtctcagggtcttcagccgagaggagggcagcccagagccggaaactgaacccggtgcctggctcctaccccacacagagctgccaccctcacctgtccccaagccaccctgtgtcccagacgcagcacgccagtggtcagaagctggcctcctggccctcctgcacccccgggcacatgcccaccttgcctccgtaccagcctgcctccggcctgtgctatgtgcagaaccactttggtccaaaccccacctcctccagtgtctacccagcttctgcgggcacctccctgggcaatccagccccccacgcctgtgaacagccctggcacggtgtattctggggccttgggacaccaggggctgcaggctccaaggagtcctccagggtccccatgccctgagagaatttctagggaagtcatctcacttggccttctgaaggtcctccctaagagtctcctgacaaaagttacttattgaacacctctatgtgccaggctctgtgttgggtactttgatcaatgcccctgtttcagtctcatctgtactacggcagccctcgtgagtaacgtgtactggcccagttacagatgagaagcgagacgttctgcatagataagtacgtgctcttagtacatgacaggctctcgcaaggactcgtgacaaagcacattgcatactccgagttgtccagcacatttcctgtgtgtcgtgcgtgtaaccgggcaatgttcgttggatcacgttgttggctaatgggaatagcgcttgtgctgcgccgagcactcagggcgacagagggtttttcttaactaaaaaatttgggccttgtttcggtatagattaagccatgtaaggccttaggtggggaagcctctcgccgcct

SEQ ID NO: 257117 - DNA, 1103 bp, Homo Sapiens
cgaggtcaaggtcatggaagacgcccacttggatgccatcctcatcctgggggaggccttcgcctccgatgagccttttgattttggcactcagagcaccaccgagaagatccacaacctgattcccgtcatgctgaggcaccgtctcgtccccccacccgaggaaacctactccctgcacaggaagatggggggctccttcctcatctgctccaagctgaaggcccgcttcccctgcaaggccatgttcgaggaggcctacagcaactactgcaagaggcaggcccagcagtagggctgcgggccacgcccaggccggctccgcgggaactctctccctcagacaggccaaaaaccagtagcgaggtcgtggtgatgctctttttaactcctttgcccaataaggggggtggctgcctggagccccgtagccagcgctttccacggtttctgttgctaaatggttgtagggtgagaagtgcaagaatgaagatgaagccccactgctcggtcagtctgcctccgtgtgtcctctgaaataagcagatgaagatgaaagggcaactttgttttcttctttttcctgatgtgaatgttaagcagaagggagagagtccttactcccttccaatctctgttcagtgcaaaacccagaaacatgaacagatacgattgtgggatttttatcatctgtgtagaaggtgtgtgtatgtgttctagagtgagatttgtgttttctgcccttttcctctccagccgatgggctggagctgggagaggtgctgagctaacagtgccaacaagtgctccttaagcctgcgaggcccaggcctgtggggctggttctcacctttgacagctgaatgttcctaaagaactgctgccccacagtgagggtgggagcagcggaacagggaatgccagacacaggctcgctgctgctggaaggcggtgtgggacttccttcctctgtccggagaggcacaggtgtcaccagttccagccaaaggctcctcacaggcgctgtgaatttttgtacaagtcttggaattatcgaatcaacaacttgtttcaatttaataaaaatgctcatgggaagtgct

SEQ ID NO: 257118 - DNA, 622 bp, Homo Sapiens
taaaaatacagtctctcttaaagtaagtgtaatctggtgttaatctttaaggcttcaactgaaaaatataaatggtgtgttatgatcaaaaatagagtgtgtatgtttctactgaaacttcagaaacataaacttagtatgacatctgcacttcagataaaggtattttaaatcacgtttgagaatatatattaatacagtaattctgtgtcattttaaatgctaggcaatatagcgttggatttgaggttgtaacaggttctactctaggagatactggtccccatggctttctgaggaaatctagtggtgactataggtgtgggttttgctacctggaattagaaaatataccttctgggatcttcaatatcattcctagaacctttttgcctaaacaagaaggaccttttttcttggactttaatagtattatccccatcaagatcacacaacttcagtgatggagagatctcaagttactcggtcttatacttaccacacatcagatctttacataaggacgcacatctttaggacacgtagcagaacactcagaatggaaataaatctctttatagtcagaaatacctaaatcacctataggtaccggttacatggg

SEQ ID NO: 257119 - DNA, 2248 bp, Homo Sapiens
  misc_feature (1835)..(1835): n is a, c, g, or t
  misc_feature (1840)..(1840): n is a, c, g, or t
  misc_feature (1845)..(1845): n is a, c, g, or t
  misc_feature (1849)..(1850): n is a, c, g, or t
  misc_feature (1916)..(1916): n is a, c, g, or t
  misc_feature (1937)..(1970): n is a, c, g, or t
  misc_feature (1972)..(1972): n is a, c, g, or t
  misc_feature (1992)..(1992): n is a, c, g, or t
  misc_feature (1996)..(1996): n is a, c, g, or t
  misc_feature (1998)..(1998): n is a, c, g, or t
  misc_feature (2009)..(2009): n is a, c, g, or t
  misc_feature (2029)..(2029): n is a, c, g, or t
  misc_feature (2057)..(2057): n is a, c, g, or t
  misc_feature (2131)..(2131): n is a, c, g, or t
  misc_feature (2135)..(2135): n is a, c, g, or t
  misc_feature (2232)..(2232): n is a, c, g, or t
  misc_feature (2245)..(2245): n is a, c, g, or t
  misc_feature (2247)..(2247): n is a, c, g, or t
agcggggacgggatgaggcggcggttgatcccaggtggcgagtggcggccactcgccgcgcgcccagccatgaacctggcgagccagagcggggaggccggcgccggccagctgctcttcgccaacttcaaccaggacaacacagaagtgaaaggggcatcaagagcagctggtcttggccgtcgcgctgttgtctggttagttccaaccctggtttctgaaagtatcaccttggaaggcttatgttagaggacttttttggctttttgaaattgaagtgaaccagttaataagtgggagaggatcacttgaatctgaaatggaaatatcaaggactacatttttccagtggataccacagcttgtgggaagtccctagctgttggtagtaagtccggttataaatttttctccctttcttctgtggataagctggaacagatctatgaatgcaccgatacggaagatgtgtgcatcgtagagagatcgttctccagcagcctagtggccatcgtgagccttaaagcaccaaggaagctaaaggtttgccactttaagaagggaactgagatctgcaactacagctactccaacacgattctggctgtgaagctcaacaggcagaggctgatagtatgcctggaggagtccctgtacatccacaacattcgggacatgaaggtgctgcatacgatcagggagacgcctccaaaccctgcaggttccgcagattgagacagattttaaaagtattggatcccaaaccaagctgccttcctactgatgctggtcatgtgaccacataagctcattggtttgatcaactttcaagtttgaggcctgtgtgcgctgtcaatcaacaacgacaactgctacttggcgtacccagggagcgcgaccatcggagaggtgcaggtcttcgataccattaatttgagagctgcaaacatgattccggctcacgacagtcctttagcggcactggcctttgacgcaagtggaactaaacttgccacggcttcggagaaggggaccgtgattagggtattttccattccagaaggacaaaaactctttgagtttcggagaggagtaaagaggtgcgtgagcatctgctccctggccttcagcatggacggcatgttcctctccgcctccagcaacactgagaccgtgcacatcttcaaactcgagactgtgaaagaaaaacccccagaggagcccaccacctggaccgggtacttcgggaaagtgctcatggcctccaccagctacctgccttcccaagtgacagaaatgttcaaccagggcagagccttcgccacggtccgcctgccattctgcggccacaaaaacatctgctcgctagccacaattcagaagatcccgcggttgttggtgggtgccgccgacgggtacctgtacatgtacaacctggacccccaggagggcggcgagtgtgccctgatgaagcagcaccggctggacggcagtctggaaacgacccatgagatcttggactctgcctctcacgactgccccttagtcactcagacatacggcgcagctgcaggaaaaggtacttacgtgccttcatccccaacgagacttgcctacacagacgacctgggtgctgtgggtggcgcctgcctggaggacgaggccagcgccctgcgcctggatgaggacagcgagcacccgcccatgattcttcggactgactgaacttgacctgtgacctctgacccggggagcagagaacactggcttcacagaggactttgtgcattgctgctatgaactttgacctgagtcgggggagaggatggcagagnttttnttaanaaannaaaaagattgtagtggtagtctaactccataacgctgaggaaatacatcattttcacttcagtggnttttaaatcctgcttatgaannnnnnnnnnnnnnnnnnnnnnnnnnnnnnnnnncnaaaattaattgtttggtgangccngnaaaacctcctngctttgcatgcatgaacgtnctaagccagcataggggagctagaagcnattttccagccacctgccgttgggttttttcatatctgtacataatgccgagtgcgtaaggaaaccgtggcgtngcgnacagtgggtctgcttgtcaaggccagttctgcagtgacaggcccaggggctgcccaccaggagtgctgggcagacttcagctgggacagaagtctgntctccgtagggcncng

SEQ ID NO: 257120 - DNA, 916 bp, Homo Sapiens
  misc_feature (102)..(102): n is a, c, g, or t
aaaaacagagcggggacgggatgaggcggcggttgatcccagggtggcgagtggcggccactcgccgcgcgcccagccatgaacctggcgagccagagcggnggaggccggcgccggccagctgctcttcgccaacttcaaccaggacaacacagaagtgaaaggggcatcaagagcagctggtcttggccgtcgcgctgttgtctggtccctagctgttggtagtaagtccggttataaatttttctccctttcttctgtggataagctggaacagatctatgaatgcaccgatacggaagatgtgtgcattgtagagagattgttctccagcagcctagtggccatcgtgagccttaaagcaccaaggaagctaaaggtttgccactttaagaagggaactgagatctgcaactacagctactccaacacgattctggctgtgaagctcaacaggcagaggctgatagtatgcctggaggagtccctgtacatccacaacattcgggacatgaaggtgctgcatacgatcagggagacgcctccaaaccctgcaggcctgtgtgcgctgtcaatcaacaacgacaactgctacttggcgtacccagggagcgcgaccatcggagaggtgcaggtcttcgataccattaatttgagagctgcaaacatgattccggctcacgacagtcctttagcggcactggcctttgacgcaagtggaactaaacttgccacggcttcggagaaggggaccgtgattagggtattttccattccagaaggacaaaaactctttgagtttcggagaggagtaaagaggtgcgtgagcatcctgctccctggccttcagcatggacggcatgttcctctccgcctccagcaacactgagaccgtgcacatcttcaaactcgagac

SEQ ID NO: 257121 - DNA, 486 bp, Homo Sapiens
  misc_feature (11)..(11): n is a, c, g, or t
  misc_feature (299)..(332): n is a, c, g, or t
  misc_feature (416)..(428): n is a, c, g, or t
cggagggaaantaattccaggtggggccctagggagatcggacttctgtcccagctgaagtctgcccagcacacctggtgggcagcccctgggcctgtcactgcagaactggccttgacaagcagacccactgtgcgcgacgcacggtttccttacgcactcggcattatgtacagatatgaaaaaacccaacggcaggtggctggaaagtggcttctagctcccctatgctggcttggcacgttcatgcatgcaaagcgaggaggttttgcgggcttcaccaaacagttaattttggnnnnnnnnnnnnnnnnnnnnnnnnnnnnnnnnnnttcataagcaggatttaaaagccactgaagtggaaaatgatgtatttcctcagcgttatgggagttagactaccactacaatcnnnnnnnnnnnnnaataaagtctctgccatcctctcccccgactcaggtcaaagttcataggcagcaatgc

SEQ ID NO: 257122 - DNA, 639 bp, Homo Sapiens
cagataccgtcctcacaatacctgcccagaaagacgagaaagaggaggaagaaatactccttccaccacgaattctgtgggaagcacataagatttcatgctactagctcattcccaagagaagctaccaaagcctggtaactctaccaactctaactgttgagcctgtaagttctcttctcctgagactacaactaattgaaacaggaattcaaaggagtctcggaggaccgtaagaagaatgcttcgaggccgatccctctctgtaacatccctgcgcgggcttccccagtgggaagtcgaagaacttcctgtggaggagatactgctctttgaagttgctcgggaagtgaccaagaaagatgcaggcatctatactgtgagtcacacaaaggccaacacaacagccgatgaatgctgagagaactatttactgatcggaccatattgcgagcatagtatgaagactcaagtggaacagtgtgaacctgtaaatgatgctgtcagatgagcagtggacgcgatgtataaccatggctgacacgtgcaacttcggagacggctgatagaaagaagctcttatgtgggactctacgacatatgctattcatcttgcagtctggacaggtcgcagggtgt

SEQ ID NO: 257123 - DNA, 615 bp, Homo Sapiens
  misc_feature (371)..(371): n is a, c, g, or t
  misc_feature (479)..(479): n is a, c, g, or t
ggaagttgagaaagaaagccacaaggattcagcaatttaagcagtttgtgttgcagtacccccattcacccacaaaatgcagcccaccacccagtcccccaattccagagagaaacacatcactagattgacgagggcttttagagactgctcctataactgaggaatcagcagcataggctttatctccctacttcctcccccaccctaccgcgttcaatttgtgtatctcagatatttgatttcttgagcatgtattggtcagaaagaaaaagaaagaaaaccattctctatttttccatgggtatgatctggcttaaaacaatatggaatattttcctgacagacttgtattctagtgtggaacacanaacagtgaacacaagtgcttacttgtggatactatcttaccaacggatcacaaagttctctctttggtgtactgttgttgacagggattgtgtactgtgtcgacccangtactggtgtatcctgtgtagtactagatctggatctcttgtctgaaattaacatttttagatgctgtgtaaatgttatgaagcacagtagcttttgaatttctcttgtagagaaataaagataaataatggtttt

SEQ ID NO: 257124 - DNA, 673 bp, Homo Sapiens
  misc_feature (28)..(28): n is a, c, g, or t
tgcagaatccctggggctcccagggttngttaagaatggatcattcttccagctaagggtccaatcagtgcctaggactttcttccaccagctcaaagggccttcgtatgtatgtccctggcttcagctttggtcatgccaaagaggcagagttcaggattccctcagaatgccctgcacacagtaggtttccaaaccatttgactcggtttgcctccctgcccgttgtttaaaccttacaaaccctggataaccccatcttctagcagctggctgtcccctctgggagctctgcctatcagaaccctaccttaaggtgggtttccttccgagaagagttcttgagcaagctctcccaggagggcccacctgactgctaatacacagccctccccaaggcccgtgtgtgcatgtgtctgtcttttgtgagggttagacagcctcagggcaccatttttaatcccagaacacatttcaaagagcacgtatctagacctgctggactctgcagggggtgagggggaacagcgagagcttgggtaatgattaacacccatgctggggatgcatggaggtgaagggggccaggaaccagtggagatttccatccttgccagcacgtctgtacttctgttcattaaagtgctccctttctagtcctttttctgcccag

SEQ ID NO: 257125 - DNA, 614 bp, Homo Sapiens
  misc_feature (19)..(19): n is a, c, g, or t
  misc_feature (33)..(33): n is a, c, g, or t
  misc_feature (39)..(39): n is a, c, g, or t
  misc_feature (51)..(51): n is a, c, g, or t
  misc_feature (112)..(148): n is a, c, g, or t
  misc_feature (155)..(226): n is a, c, g, or t
ggtggcaagagaaaatgangaagaagcaaaagngggaanccccctgataancccctcaggtcctcatggagacctacctatccatgaggaatagcacagggaaagactgggnnnnnnnnnnnnnnnnnnnnnnnnnnnnnnnnnnnnnctcccannnnnnnnnnnnnnnnnnnnnnnnnnnnnnnnnnnnnnnnnnnnnnnnnnnnnnnnnnnnnnnnnnnnnnnnctggtgatgcccacttcttcagtattagggattctcagtcagaagagaccccctgtgtggcctgagtcccctcaggaggaaggtggacaacagagaaatgagagttttgatattttctgaaagaggaacatgtgttagagatgaagaatcttccaaggctcatgcagttgcttagaataatcattactgttatatgagaaacattttagtaatttaataaaaggataatgtttatttaaaaaacctgacttttccagagtaattttgtttttgcacattcatgtttattgaagtggactaatttctataatgcaaatcagagttaaatattaaaaattggtgtaaaatacaattgacataggaattacatttaaaatatttgggggga

SEQ ID NO: 257126 - DNA, 927 bp, Homo Sapiens
  misc_feature (863)..(871): n is a, c, g, or t
aaaaggtgaattacacagcctaaaaaatgtagtataactcagctctaccctaggaaatgtgccttggaacacaacacagtgagccaaaaaaatgtatgcgctcacatacaattatgggttttaaaggcaagttaatctaaatgagtaacttcgacatatgtccaaagggagacatcttatggattatcattgcaaactctctcccaaatattaataaatcttcaacagaatttaaagtaaggtctacaaagtgagcattccattcccgtctctttctagtcatttgatcttgatggtaaagctgatgaccagtacaagggcccaactgccggccatgacaaaaagcagaaaaagaaagtggagaacctagttcctgaacaccttggatgtcacaactcacaaaggtcaatctggtcttctttattcacatgccttccttctatacagacacttgtttaacgcttccaatggggccccttcctgcccgtagccagctgtgtgtgtctggcagcccctgagcccaggctccatctggtccccgcctccccgctcataggctctaacctctctttcatggacgtgccatagtttgctttactttacagctataaatttttaaaaattacttaattattgcctgtcactccctagactgtgggtatcatgaggtggggaacacctctgttgtgttcacccagtaagcacatttcctaacacacacaccttcactcagggagtgttcagtaagtcttttggttgaatgaattagtttactatttggttaataaatttaagaccttttttcattctaaaattttaaaactctctatgagaccttcctttaaataaagctttcaccttcnnnnnnnnntatcagtagctacatgtttataaaaacagacaatttatttccttgtgccctcgttg

SEQ ID NO: 257127 - DNA, 679 bp, Homo Sapiens
  misc_feature (66)..(119): n is a, c, g, or t
gccgcagcgggcgtgatggcgcggctcctctgggtgctccggggcctgaccctcggaactgcgccnnnnnnnnnnnnnnnnnnnnnnnnnnnnnnnnnnnnnnnnnnnnnnnnnnnnnnacatgtgggaggcagggtctcttgcaacgtgtgagctgcctcttgccaagagtgagtggcaaaagaaactaaccccggagcagttctacgtcacaagagaaaagggaacggaaccgcctttcagagggatctacctgaataacaaggaagcaggaatgtatcattgcgtgtgctgcgacagtccactcttcagttctgagaaaaagtactgcctctggcactgggtggccttcggtttccgaggctcatggtacgtctggctctgatgaaagccacacagggatcctgagacgtctggatacctcgttaggatcagctcgcacagaggttgtctgcaagcagtgtgaagctcatctaggtcacgtgtttcctgatggacctgggcccaatggtcagaggttttgcatcaacagtgtggctttgaagttcaaaccaaggaaacactgaccatcttcaagagtcccgttcccttgccaccccttcacgtgcaccctcaatttccacaattcacttgaatgacttgttttatttgcaataaaactggggcttgattttggcaa

SEQ ID NO: 257128 - DNA, 983 bp, Homo Sapiens
  misc_feature (283)..(283): n is a, c, g, or t
  misc_feature (831)..(938): n is a, c, g, or t
ctgaatttgactactttaggtgcctcatataagtggaatcacatgacatttgtccttttgtgatacgatattttctttaaaaagaaaatgaacagaaacagtacatgagagaagtcaggtctgcagccagtgtgcctcttagttccatattcatacaaggccctcttggaagctcagctttggagttggatattatctcagaagatatggcagcttaggaatctggtactctaaaaacagatttacaagcattagactcttttgtatatgtgtgtggtcattntagtcttcctgaaagtggttaagaccaatatttctaggcagactatagttcacatcatccagttctgtaagtcttggattatcgatctcattgtcatggcaagtgtgtgtgtgtggctcaagagcctttcccatagtggcccacatcccccacagggccctgcatgaagttcctgcaagtctaccccctgcacgtgcagagcaaaaagagcttcctatgggagctgttctccagaaaagacagaaacccgggccctagagacccagaagatttaaattccggtttcagctctgccattgactaattaggcaactgtaggcagttcactttgctcctttggaccagagatttctcatctacaaaatgaaaaacttggatttaattatctctgaagtcacttcaagcagaaatgtaacaattctttgatttattaaaaaaaataacatcaatgataatgaccaacagctaacacttattacaaggctccaggcactttcgaagtccttaatatttaatgttcactactaccttaggatataagtactgtnnnnnnnnnnnnnnnnnnnnnnnnnnnnnnnnnnnnnnnnnnnnnnnnnnnnnnnnnnnnnnnnnnnnnnnnnnnnnnnnnnnnnnnnnnnnnnnnnnnnnnnnnnnnagctactattaattgaaagggcattgaagagacatgatgtcccaa

SEQ ID NO: 257129 - DNA, 611 bp, Homo Sapiens
  misc_feature (492)..(492): n is a, c, g, or t
ttcaagtgttgctgcacggagaaaaacatggagtcttctgtctgctgtgtcaaaaatgaagacaatgagactctgtcatgggagggtgtcatgaaggaaaactaccttgtcaagatcaacacaaaagccaacgacacctcagaggaaatgaggcatcgatttagacaactggatacacaagcttaatgatctcaagggtcttctgaaagagattgctaataaaatcaaataaaactgtatgaactctaatggagaatcgactactaaatgagagattttcagacccctgggtacatggtggatgattttaaatcaccctagtgtgctgagaccttgagaataaagtgtgtgaatggtttcatacttgaagaccgatataaaggaagaatatttcctttatgtgtgtctccagaatggtgcctgtgtctctctgtgtctcaatgcctgtgactggaggttgatagagtaagtgtgtgcttaccgcctcctttntcctctaatcttatatttgatgaacacatatataggagaacatctatcctatgaataagaacctggcatgctctactcctggattgtgatattggtcattttcaatgagtctctacttt

SEQ ID NO: 257130 - DNA, 587 bp, Homo Sapiens
gtaaatgaggagtatggagtgaggtaccagaaaagtcttgggttagcccagatgagtggtatatttttaatagggagaggattcatgagctgattcagacgtgtggccccttccagtgtctgtgagaggccatttcataagcaggtctgtgtttttttccaccaagttttgcttaagatttggaaagaacactctacctccttagataattatgtgcataaatatttgcttctccaggaaggacgttttcccacgttattttaaaggactcacatagatttaaagggtttcttttctcccacccctaaggaattcagtgttggtaaatggtgcccatctcaggaacagagaagcttctgattagttaggagtccagctgtggatataggagcagagatgggaggaagaacagtcctgtacttcagcagggttccgggagcctaccatacctcagagataccatgggttcagttccagaccaccacactatagtgagtcacatgaactcttttggttcctaggatatataaaagtgatcaggaggcttaagcacgagaatggcatgaacccaggaggcacagctttga

SEQ ID NO: 257131 - DNA, 641 bp, Homo Sapiens
  misc_feature (167)..(401): n is a, c, g, or t
  misc_feature (406)..(481): n is a, c, g, or t
gggaaagggttccggaagggggctttcgccctataagacgtgtttggcgcccttcccgttgggaggcccaggttcctttatatagggactctttggtcccagtttggacaaacagtaatcccgatcccggttggagtcctttgcctttaaagggcaatgtcccgtgnnnnnnnnnnnnnnnnnnnnnnnnnnnnnnnnnnnnnnnnnnnnnnnnnnnnnnnnnnnnnnnnnnnnnnnnnnnnnnnnnnnnnnnnnnnnnnnnnnnnnnnnnnnnnnnnnnnnnnnnnnnnnnnnnnnnnnnnnnnnnnnnnnnnnnnnnnnnnnnnnnnnnnnnnnnnnnnnnnnnnnnnnnnnnnnnnnnnnnnnnnnnnnnnnnnnnnnnnnnnnnnnnnnnnnnnnnnagagnnnnnnnnnnnnnnnnnnnnnnnnnnnnnnnnnnnnnnnnnnnnnnnnnnnnnnnnnnnnnnnnnnnnnnnnnnnnatttgtgcgcagaggaagattgagttcctggaaatgcttacaaaatgattcctgacactgggaggagatagttagaaaaaagaagaagaaaaattatacacatatatagataaaggaagaaggtggaaagaaagggtatagacaaaagaatataaagatc

SEQ ID NO: 257132 - DNA, 602 bp, Homo Sapiens
cccgtgtagatgccctggaccgagctggtccacacgcctgcacctggccaagtcaaagctgaatatcctgcaggagggccatgcccagtgcctagaggctgtgcgtctggaggtgaagcagatcatccatatgctgagggagtatctggagcgcctagggcaacatgagcagcgagaacgcctggatgacctctgcacccgcctgcagatgaccagtaccaaagagcaggtggatgaagtgactgacctcctggccagcttcacctccctcagtctgcagatgcagagcatggagaagaggtagcaagagaggctccctgccttcctgccactgccccaccctgccccactgctgtctcagtaccaagaaaaagcccaacatctgggacttggagctgcacttgtctggtgaggaccttgccctcacccgcagatgccgtggggcagagatgctctctcttcacggcctcagagccactcccagccacaagttccagcatctctgtggacagggaccacagctcccaacttcttccaggtctcgcagcaccacctcacttgcccatggcctttcggcgcgcttcaggcttagaccctctttg

SEQ ID NO: 257133 - DNA, 814 bp, Homo Sapiens
ttttttgttcactggtttatttttccaaatgagcatcaggctatttacaaatacgcagccctccaatgacgtgtattaaaatggcaagtctatcactgtttgaaatctaaatgaaaacaaatttattaaggcacatttgatctgagaatttaactttctggtataatgacagattcatttcacttttgtccccaaaacacatgagcaccaaaattgtcaaagaacacttaatatttagtaaaacagtaaggaatataaaaattaaggaggggaaaaagcgtttccaaaaggaaatctttggagatcggtttactgcaaataaaacagactaaacacactcccgatacacataaataatactaactaacaggtactcaagaaatggcagagctctgaacaccagatattaaataaattaaaggtatttcagatacaaaggataaaacaaaacagtaatgaaagaatgaaacccatctccacccacataacacagacaggatgaaaggaacaaaaccaaatacatttttccccaacgttttgattagggtgtatgtgtgtgtgttctcagtctgtgtacatcagatttatgtgtaataattcatctttgtcattctaaacattaatattttaccctttaaagagaagggtcaagaagagaaaatgccaaatccttcttgaaatttaatgccaggtctatttaggccgaatgaactaccacgagaacagccacatacctcactgtgccttcttcacgccccttgctttaaaacctacgtggacagctgggcttgcatggtgaaaccccgtctctact

SEQ ID NO: 257134 - DNA, 829 bp, Homo Sapiens
  misc_feature (578)..(578): n is a, c, g, or t
  misc_feature (758)..(758): n is a, c, g, or t
gggggatgactgggggatcccggcaagtaacatgactaaaaagaagcgggagaatctgggcgtcgctctagagatcgatgggctagaggagaagctgtcccagtgtcggagagacctggaggccgtgaactccagactccacagccgggagctgagcccagaggccaggaggtccctggagaaggagaaaaacagcctaatgaacaaagcctccaactacgagaaggaactgaagtttcttcggcaagagaaccggaagaacatgctgctctctgtggccatctttatcctcctgacgctcgtctatgcctactggaccatgtgagcctggcacttccccacaaccagcacaggcttccacttggccccttgatcaggatcaagcaggcacttcaagcctcaataggaccaaggtgctggggtgttcccctcccaacctagtgttcaagcatggcttcctggcggcccaggccttgcctccctggcctgctggggggttccgggtctccagaaggacatggtgctggtccctcccttagcccaagggagaggcaataaagaacacaaagccaaattantttataaaaaacccctaaattaaaaaatgtcggccggcctcggcccctcgagaaacttttctagaaccattcgttttgggcggcgggcccccgtagggaaaggggaacctgggccatagctggtttcctaggaaaatcccgggccatgaacaagggcttgggattcctccccaaataaanaaaccccccggggggcaaaccgaggggttttgaaaaaaattccaaatgggagttctggagggcccttaacg

SEQ ID NO: 257135 - DNA, 2025 bp, Homo Sapiens
  misc_feature (286)..(310): n is a, c, g, or t
accggctgatgcaagttttattgagacaatatacaaacaggccatggaaacaagggttttgatgctgggaccagtaacgtaaaacggaatacaaaaataaaaaggcactaatctgttaagaaaagacactcgatgtattctaagaatataagtcatttaatactgttaattttatagcacaaaataaaacaagctatgatccccaaaaataattttaaaagcttacacagaaaatattattgcctgaagtttatgatctttaagttacaggtcaaaagagttttannnnnnnnnnnnnnnnnnnnnnnnnttaaaacacacagtgaagaccgtctaagaagcaaggccactgttcctcctgtagggacaacgatcctgtctcagagacctgtccttctgctcctttagaaaacagaaccagcacagcgtccacaccgacagcagttactaggggcatagtcctccggtcgcagagggtggagttgaaggcagagctccagtggtgtcccacagaaagcattagtcttaggtactgtgttaaaacaatcaagaattcattcatgtttaagaggttaataaccataatattaaaggattaattataaacacctggcaaaaaaccacatcatcccttttcaaaaataaaatgttcatattcctctgagcaaacatcacaagagcagtggccatctgcctcaggcctgccttgtctgtaaacagctgtaaaggaaagctagcacagcgccagggacacatgagctcccaggagggcacagctgtccttccctttcagctttcccaaacatgaagcacagaaggtgtcctagtcctgggtgacccaaagtccctcaaacggcagcccggtcaacacatcgtcttcctcgttaaccatgtcatcaggtggttccacacagcacagacatggctgactcctgtaccgcaggtccttcccgggatacacaagtttttaaccaatcaatgccctctagtacgtaatttgtttccttcccaggtgaaaaaccatagtgagttaatttaacatccaaatatttctttaaacatggtagagcagagcaagtagcagttatgaacacccaacctctgggtcagatgtgcactgctctatggagcacaacagtcttcccagaccagtggggaacccaggcacgaagctgagctgaagcagcagtgccgcattcatatgtttagtgtgaaaaacagagtatccctgcctcattaaaaaaactgacaaggttgtaagtccgttaagttttactagttttggcacacatctggagtgcagaactcaagctcgccttgttttgagctctgaatctcctggcagccctggatgccattttcatgggctgaagtaacgagctgattaattataaaaccaaaccacaggtatactctaggtatatctgattctgaagtgcgccacacaaggtgagtcggggtattggtcagtagacagggctgaaaggaaaccttgctttccaaaatggccagacttcttgcactctgagtcaactgctgtaattcaaaggtgtcaagcccttcagctaaatctggttgaaaaaggcctaagggtcgtgccctccttgaacaaggcacacattcctccctctgctggaaactccactcatggctcaacatgggccgggatgaaccacgtcactggccaaagggcaaacactgtttctaggcagagtctggggactcttgtgatatgtctgccacttgtgggtgctacgccaggcctgaacccaaaataagccaacctgacacacctaaccagaagcggcaactgccgcagaccgtgcagagcaggaggcggtcaccgttctcactggcaaggaagggctaatctccaaggcttttagaggaaaaccacagatgggaagccatggcgatagttttcccaaatgaccattaattctgtctcaggaacactctcaagattcatgaatacagcagttatctgcctgatggaatactgatttaaagaaaaattgaaaaatg

SEQ ID NO: 257136 - DNA, 426 bp, Homo Sapiens
  misc_feature (147)..(171): n is a, c, g, or t
  misc_feature (382)..(382): n is a, c, g, or t
ctaagaatataagtcatttaatactgttaattttatagcacaaaataaaacaagctatgatccccaaaaataattttaaaagcttacacagaaaatattattgcctgaagtttatgatctttaagttacaggtcaaaagagttttannnnnnnnnnnnnnnnnnnnnnnnnttaaaacacacagtgaagaccgtctaagaagcaaggccactgttcctcctgtagggacaacgatcctgtctcagagacctgtccttctgctcctttaggaaaacaggaaccagcacagcgtcccacaccgacagcagttactagggggccataggtcctccgggtcgcagaggggtgggagttgagggcaggagctcaggggggtgtcccncaggaaaggcattagtcttagggggacttgtggtttaaaaccat

SEQ ID NO: 257137 - DNA, 615 bp, Homo Sapiens
ccttaaaatccaaaaattaccttgagcatggtggtgcatgcctgtaatgctagctacttgggggacttgagccaggagaatctcttgaatgggaccctgggatatggaggtcacagtgagccagatgtgtcccagtgcactacagcctgagctacagagtaagactctgtctcaacagtgtctcacagctaatgtacagcagaccaaaatttgaaactccgcttattcaaacactgatgcttgagaaatttatcagcactttcgagtctaccttaagaccaatacccagcttcaagaactaacaatttcctggtttaatagccttttatgattagcatgcatcatagcatttatactaaaaatatctctctatggactccacctaggactcccaaaagcccacatagaggccgcaattgccaggtcaatagtcctcacagcagtactcctaaaattagatggctataggattatacaaatcaccttaattcttaaccccctaacagagtttatagcttattcctccttcttactatccttttgagaaatactcataacaagctccttgtgtctgtgccaaactgatctaaaatcactcattacttttccataagc

SEQ ID NO: 257138 - DNA, 638 bp, Homo Sapiens
  misc_feature (17)..(17): n is a, c, g, or t
  misc_feature (252)..(252): n is a, c, g, or t
tagcaccccagaagagnaaagatgtttggcctgagagggcctacactccagttctgtgtaacctaaaagcaacttaagccctgatttcgtcattttaagggtgcttgatggtaagcagaagtcagaaagaatggtctaacaaaaaaggctggcacagctgtggttcccaagtctagttctgggagatcctgggcacggaactactgcgtggccactgctttcttcaagacacagaatttgcagggctcttcnccgcccttggacagccatctaagtgttgtaaccttggggcaaagtaatttctcgtaagtcttcactttgtcatctataatatagtgacaattatcaaagaacatttggaagactacatgagaaaaaaggaaagcccttagccaggtatctggtgtacaatagatgatcaaataaagacatgttaccttaatttgacctacagggaaaacactctgggacttcgtttacccttagttgaaaacagaacggaacacttcttttctttcttcttaccccaagcttccagatgtattttatgtccagtagcaatttgatattttaaattagcatataaatatttgctttatcagatattctgatgtcctggtatccattgttataacctg

SEQ ID NO: 257139 - DNA, 658 bp, Homo Sapiens
  misc_feature (586)..(586): n is a, c, g, or t
tgcttatgcaataaaggggaagcccctggaagacctaagtgtccagcaggtcattgactgttcgtataataattatggctgcaatggaggctctactctcaatgctttgaactggttaaacaagatgcaagtaaaactggtgaaagattcagaatatccttttaaagcacaaaatggtctgtgccattacttttctggttcacattctggattttcaatcaaaggttattctgcatatgacttcagtgaccaagaagatgaaatggcaaaagcacttcttacctttggccctttggtagtcatagtagatgcagtgagctggcaagattatctgggaggcattatacagcatcactgctctagtggagaagcaaatcatgcagttctcataactgggtttgataaaacaggaagcactccatattggattgtgcggaattcctggggaagttcttggggagtagatggttatgcccatgtcaaaatgggaagtaatggttgtggtaatgcagattcccgttcttctataattgggtgacatggtgggcagatcaagagacagctacaaaaatggaaggttttcatnaatgcaatgtaaacatagtacttccaaagtattatttcaacttcaagttttcagccaactacctaccaaaag

SEQ ID NO: 257140 - DNA, 641 bp, Homo Sapiens
tctgtattggattttaccagcttgacttttactgctcagatgctttctttcccccccttagacgctgtaattctcttgggaagagtaactattcttaaggtttttacagatacccaccttagttgtaaattggatagtttatatttctgggactttttaaatgaaaatgtggaatgttaagttacaaaagacttttcatcagaaaatttcaaacaaagtaaacatggcgttttatagtcctctaaaatctaggtgctcccacccaccaaaggcatatcctgcaaagggctgtgaactatcttggtgaactgtcttgggtcccctttccatgtatgttttcttgtcactgaaaacaaacaacgctgagtttatcaagaaaatttaaattgggggatcataataattccaaccaagtgacaactctgacatcaaggttattaggagctgtacatccaattcaagttttatttgctgctattctgggagaataaacttgtatatggagaataaactaataaacttgtatcgaggaaatccataaagttataaattagcctgaaaaatatttcaggtaatggggtggattggcctgctttgactctcagccaccaacagaaatctttgcaaccttggtcctagct

SEQ ID NO: 257141 - DNA, 491 bp, Homo Sapiens
  misc_feature (192)..(201): n is a, c, g, or t
  misc_feature (219)..(219): n is a, c, g, or t
  misc_feature (440)..(440): n is a, c, g, or t
  misc_feature (446)..(446): n is a, c, g, or t
  misc_feature (459)..(459): n is a, c, g, or t
cacgatacctgcaaacaattgtccagcaccacttagaaccaacaacatttgaagattttgcagcacaggttttttctccagctccctaccaccatttaccatctgatgccgatcattaaatatcagttctgtttatctgaaggctcctacccagagattctacccagtgaaactcccacagcaacgcaaaannnnnnnnnnggtaaaaaaaattggggnctgacctggcctctccaatgtctcctcgaactagcaaaagccgcatgtccatgaagctgcgtcgttcctctggctcagccaataaatcctaaggagacaagcagcccagcagtgattcagcagtagccaccttaggcacggaacataggggttaacccttttcagggcctttcatgtcttgcccttaacatgggcatggttttctttcctgtaacatttanttttgnaggaaaaacattngggattttaaataatttttaaattaatttggt

SEQ ID NO: 257142 - DNA, 835 bp, Homo Sapiens
gttattttgtagctctaaaatacatttgttaattaaccatattggcttttcatgcagttcaatggcttatagcatttcaatttgcatagaaaatgaatctctgtaatgatacttttgctaaataaataacaatcgacataatgggttcatttgcttttaacattttatacatacaatttagaagtaggatatatttcatattgaaattttgaaaagcttgaaattcaacatacaaggtcaccatcttgctgatgcctaatgcagtacagcaaattcattcttcatcccatgttaactcctttttggaacaagtcaaaatacaaataatttacaatgattgtgttggagctattgcttgattaaatacaattcaaaggttctttttataaaacaggtgtgagcaggacacattgcacttacgggcttttcctatttttttggttctatttcattttactgcctaggaaagaaacatttttttgtaaaacctatgctatggaactgaaatgtactttattgaatatttctattctgttttatgaatatcaattatgtgaaatatataaatataaaattgccttagaatgcctaactctttgtataaaacagatatctgaaagtagatgttggttttttgttcaaattgtgtaaatgctgatttttccatgagtacttatgaagatctatatgtaaaaattttaagtctgcttactgtgtttgtaccaccttgttcttagctgtgtatactctatgctaattgacttctgtcattgtcacatatattgcatatgtctctcaaaaattaaaaggtatattgctattctaaaaataaaaa

SEQ ID NO: 257143 - DNA, 491 bp, Homo Sapiens
gtcccaaaatgcctgacaaattatagtaataaaggcagcacgcattcatgaaagggcagagcatctggcttacccaaaagcagaaccacacacaacacaggtcacaatcaatggcactaggtcaactgggcatccatttggacaaaaatgttatctggatgcccgcctcacccacacaaatcaattccatattcagcaatcccacttgtgaatctatatcttaagaacttgaaatcagtatgtcaaagagacatgtgcactcccatgttcactgcagcactattcacaatagccaagttatggaataaagccatgtccatcaacagatgaatggacaaaggaaatgtgacacatatatatataaacaatgtaataataatcagtctgaaaaaagaaattctgtcatttgcaacaacaccgatgaacttggaggaccttatgctaagtgaaatacgccaggctcagacagacaaatactgcatgatctcact

SEQ ID NO: 257144 - DNA, 812 bp, Homo Sapiens
  misc_feature (177)..(177): n is a, c, g, or t
aactacatgatcacaagtagtaaacacaatacaaataatgaacccaagaactaaatgagaaaatgttcatgcataagtatctacagaacttatgaatatatgatccagttcaaggaattacagaatgtcatatacacaactgcattgtgttacaataaatttattacttctacacangaaagaacttagtgacttctaattctattttatacaattttacataaatttagtaagtttatgcacaatattcacatctgcaacaataacaaattgatcattaaaattcaggctaagggcaattaagacacaataatgtgtggcacgttataattacagaataccattcatcaagctcatgtctaggaatactataatggtggcacatttaaatcttatggatcaaatcatccatggttttatagccaaagtgcatttttttaaaaaaactcctatagtcaaacaggtcatgaatatcaaaatatatgatcataatttgctctctacttaaaagctaaacatttttatgcaaatgtaaggttaaaaaaaagtggctttaaagttctcaaaactatataaaataatcataaagacttttttaagagagatgggaaaataacaaatttggcagttactatttaacattactgtcaggaaactattaaagtagataattccacattaagaggtagttgaacaaaatgttatttatacactgcattgaggtttttgtgtttgtttccctcattttttcttcaaaggaacaaatcctataccagcagctttgtcttctttctattaaaaaaaagtctgta

SEQ ID NO: 257145 - DNA, 741 bp, Homo Sapiens
  misc_feature (679)..(679): n is a, c, g, or t
gagagagaggagagaaaaaggagaaaagcgcccctctaactaagaaatattactgctgtgtgaaacacaaatgtctataaaccaagtgaatttttggactgtggtttaaaatgatatgtttctaacattatctttctactttatgtgtaatcacctgtcaaaacacaggaaaagaataactaattaaacattaatgaatagggggagtgtgtgtgggagggagcacatatttaacctgttagatttattttttaaattatatgatcaaaaattaaaacattatgttactggtccaagaatcaagagacaggataaatactgctaaaattttcaccatatttgaagggatgttcaggatgatgaacttaaaatgttgtcttttatgatttatgcaaagttcagtctatcctaagggaacaccttataaggagatcagtaatccactcaaaatcctaaagctgaggtcgacagagggtaagatttcagttgtgggttataaggagctcccttttccacagccaaatctagagattagaatccaggattgcttgattgggtccattaactcagcaggtgagctagtgctctctaggttccttgtgtgcttagtttatgccattttcacatcatagtgaagctgacattattgttatccatgctttacacttagaaatgtggncatacagagatcatttgttcaaggtgatgcactagttagttgtaaagccagttataattcca

SEQ ID NO: 257146 - DNA, 611 bp, Homo Sapiens
  misc_feature (433)..(474): n is a, c, g, or t
cccccttaaaggaagatcagtaatccactcaaaatcctaaagctgaggtcgacagagggtaagaaaagacccgatatgagcctccccaaattgaaagccacagggcagagatgctgaatttcagttgtgggttataaggagctcccttttcccacagccaaatctagagattagaatccaggattgcttgattgggtccattaactcagcaggtgagctagtgctctctaggttccttgtgtgcttagtttatgccattttcacatcatagtgaagctgacattattgttatccatgctttacacttagaaaatgtgggcatacagagatcatttgttcaaggtgatgcactagtaagtggtaaagccagttataaatccaatgtgacttcagaacttgcataaaagctactgtgctatactgataattcctnnnnnnnnnnnnnnnnnnnnnnnnnnnnnnnnnnnnnnnnnntttctctctctcaaagaaacattacaaaactgcagagaacatttctatccccagtagagaaacttggaaaatcatctatttggaaaaaagtgaagtttgatcatcattttttttccccttcacctcatttgaccaaa

SEQ ID NO: 257147 - DNA, 1108 bp, Homo Sapiens
  misc_feature (158)..(189): n is a, c, g, or t
atgaaatggagcatggggtgcctgctagcctcaatcccccgaagtgggagcctcatgatagagtatagcttgggggtgggaggtgaggcccagggcccgccagctatcacagggactcagaaacacccatttcctaatgacatggtgagtttcttgannnnnnnnnnnnnnnnnnnnnnnnnnnnnnnncaacttggctgaccccgggtctatgatctattcacatcgaacccctgactggtctgcctggtgccagggtgagcgtgaccgtgagtgttgctttcgacagctggctcagcacacgctgtgtgaagggatctgagcttgttcatctccagtcgtgacttcatttcccttccttctgtcctcctcctgttcttgccttggacctgcaggtgtgcagaccgctctctctgccttccttgcatgtggccaccagccatccctgatcttgtccccagaggcccaggcagcctgtgatggctgtgaggggctgtcccactgtgtggtaatcccttacccagcacttaaacttggcaggagaggcagggcaaccctcacagggagatgggagggcacccaactcccacaagcaatgcaacagcaagtaggaattgggggtctgccccaaggtgggtgagaccaaatgagtggatttggggccacaggctaggcaggagagacaaggggtaggtgggagggtcccccagtccctgctgaccccagtgtgtctccccggagatggctcctagctgagtgggacccggcaggagttgggacagtgctgtcccccacccctgcacacagccaggccctcaggctctgcggtcactcgcctccctgctggtcactggtcttggtctggagttatattttgatgccatgaagacactgtttatatctaatgtttatatattttaaagatttgtgccaagagagtatatttaataaaaacttaaatgacttcttctcctgctcctggctcttctttggctctgaccgcccccccatcttcccccatgaacccccaaacagggttgaagtgcttttgacacatttgtgataaaagttctgaataaaagtcttgaataaagaagtttttaaatgc

SEQ ID NO: 257148 - DNA, 590 bp, Homo Sapiens
  misc_feature (166)..(166): n is a, c, g, or t
  misc_feature (393)..(424): n is a, c, g, or t
tctgctgaaatgtgagcacacaaaccacctcctttggcccagaagccccccaggcctagcatctcagtgccccaaccctctgcccagctgtggtatccagcaggtccttgggtccccacttgagcaggcacttggctgggatatggagcaatttaaagcccacagnggttgttcagtttctatgaaatggagcatggggtgcctgctagcctcaatcccccgaagtggacgcctcatgatagagtatagcttgggggtgggaggtgaggaaaatctgaggtacccaggggaacccccagctaactggtctctcagaggagtcccccagggcccgccagctatcacagggactcagaaacacccatttcctaatgacatggtgagtttcttgannnnnnnnnnnnnnnnnnnnnnnnnnnnnnnncaacttggctgaccccgggtctatgatctattcacatcgaacccctgactggtctgcctgggtgccaggggtgagcgtgaccgtgagtgttgctttcgacagctggctcagcacacgctgtgtgaagggatctgagcttgttcatctccagtcgtggactttcatt

SEQ ID NO: 257149 - DNA, 951 bp, Homo Sapiens
  misc_feature (12)..(12): n is a, c, g, or t
attcggcacagnttacaaaaaacagtgaagtaagagtactcctgaagactaaaatagagaggctggggtttgagccattttactgagtagcttagctggaacctgatatcagaagtagcctttaacaaaaagcctcttggcaattgtatggtactaacaactagagtactgaagtgtaagttgaaaccaagttgcagtgggaaatcaaaggtgaggtagcttatttgaaaccagcaaatgagacaggttggacagttttaaaatctcttctaacaaagaaactgcacggtagcaaggactagcggttctcaaagcccttctttttcagtgttctcattcaccttggcacccaagtatgtttaacaggccatgcattaaaaataaatacaaaaatataaaagccgcttaaagggaacttacaaactgacaatctctcctctgtatttgtgttcatagtggctgggagtttaattatatgcacaaaagttaggagccacttgtttctgcacagactgtaggagcaagatgaggagatgggcaggttttggtaagagcccccagttctggtggacaggcatacttgtggcattgggtgcggcattgctgggaggaccacgtcttgggaggcgattgacttttggtttgtaatttccctttaaacaagaagagatggctcacattttccatatatatctcaatgaatgtactgtattactgttttaaaaatttgatgaaataataatgaattggtctccttttgttatctggtccttgtttaatttgtttaagggtttttgtatacaaaagtttacatttttatgtatatttttcttgtgtaaaaactgatgtaatatgtgtatgaaacactgtatgtattatctgtatatagtgtgacaaaatcatttttctttctttcttttggatgtattaataaatcttgctgtgaagtat

SEQ ID NO: 257150 - DNA, 365 bp, Homo Sapiens
cgttagagcagagtatacatggccctgaaattaactgccctagatatagttactcaaggtataagaagccttgtgttctgtatttttcttgtagtgttagttaaaacatatgtttcaaaaatataagaaaagttcaaaaactaattaatttgaccttgagttttagtagtagaatgttttcaagaaatgtacactgtggtaaatgatttaaaacactagtatagtgttgtgtagcttaatccttctgaagtctttttgtcatgtagctattaatctgtggctatgaaatgatcagaaatgctaagtgagatcaatatttgtttggaaaatttttgtttacttagtcctttagctagtggatttaa

SEQ ID NO: 257151 - DNA, 772 bp, Homo Sapiens
  misc_feature (370)..(370): n is a, c, g, or t
  misc_feature (422)..(422): n is a, c, g, or t
  misc_feature (690)..(690): n is a, c, g, or t
cgttagagcagagtatacatggccctgaaattaactgccctagatatagttactcaaggtataagaagccttgtgttctgtatttttcttgtagtgttagttaaaacatatgtttcaaaaatataagaaaagttcaaaaactaattaatttgaccttgagttttagtagtagaatgttttcaagaaatgtacactgtggtaaatgatttaaaacactagtatagtgttgtgtagcttaatccttctgaagtctttttgtcatgtagctattaatctgtggctatgaaatgatcagaaatgctaagtgagatcaatatttgtttggaaaaaaaatcttgggaaacaacccaagggttttcgctgttgttgnttttctttttctattattgtttacttagtcctttagctagtggatttaattntgttgtgcctgcttcattttgcaataacaatgcagtagaatttaaaacttggatgcttaagaggcctgcatatagataagaatttcaggcagaactacatttattggtaataacagcttgttcataggctcttggattttatgtaactgtgataaataatgaaacttagttatattgaaggtattggttggcggtggaagtgttaggcacagtattttcaaaagtttgcacatattgttctgcgtaattgtgtaagccataatacagngtttaaatctcttttcctattacatcattcattggaagtgatcactttaccattttgaaagaattttcgggtcctttactgg

SEQ ID NO: 257152 - DNA, 730 bp, Homo Sapiens
  misc_feature (518)..(518): n is a, c, g, or t
  misc_feature (608)..(608): n is a, c, g, or t
  misc_feature (664)..(664): n is a, c, g, or t
attttatacacacacatatcccatcacttgtaaaggtaaaatcattcttctaaagaactgttgaactaataaggaaatgtttaaaaattaccagtgtagaagttcatgataatgatagtgccaattaccaaaaccctgaaagacagagataaaaggccactcagaagaaaagaaattattagaaaacaagaaagactgtaaaatatctaaacatacaactcaggaagatagaaagtgaacatcagaatacaactaaagtaagtaaaggtatgaataaagataaaagaaaagatgaacagcacataataaaacagattacatgagtgaaaccaaaaggtagttctttaaaaacagtgaagtaatccaacattcagtaagtccgatcaagaataaatgagagaaaaatactaacacattcaaaataagaattatgaaagaactgaagatacagaagaaggataagttgctgtaagagactactgtatacaactttataagttgaaaatgtagagaagttntctcttgctgacttaaaaattatcacaaacttagtgatgtaaacaatacaaatttatttaacatttctctaggtcggaagaaatctgttncttggttatttgctatgttggcagaattcagtttcttttaccataggacccaaggnctcaatccctactgtttggtactgaggccattcccactctggaaatgactttccttggttatggcc

SEQ ID NO: 257153 - DNA, 372 bp, Homo Sapiens
tgagaaccatctctgggcatgaacctgagtatctaaactattaacaatcttgccagcttagtctgatggacagttgagaaccactggtgtatgcatgaagcaatgctaatcaatttaaataaaaatcccgtaaatatgtgtctcctaacacacacctacctaccgcagatatcatgagaataattaaaatggcttgtggaagtacattcaggggatttctttaaaattacaaaatagagcttggctataatcatcaagattatgactaaaaaggagaaaagaaatgcaaattatgttttggtcctataattggctgtgtaataacaatggattgactctgcatgtacacagcataaagggacagaaaatgag

SEQ ID NO: 257154 - DNA, 754 bp, Homo Sapiens
  misc_feature (105)..(105): n is a, c, g, or t
  misc_feature (126)..(126): n is a, c, g, or t
  misc_feature (307)..(307): n is a, c, g, or t
taaatcagattgtaaagtatgtatcatgactccttggatgattgagtcagatatttatcctattcccatctaaagcaccaagcacagtactgaaaagtcacatgnattatcaaatttcaataaatntaaattagaacatgtctttatcctttaaaaattgaaataatactgagaaatacctcccttgagagcctggtatgctaaaatcttgctactaaaagccagacttagcttaggtcactgaaaactagaaactcatgcagataatacaaattgtactttttgcttattttgatctattttttanagtatgtatctaatgagcttcaaagcttaagttttgtttctttttgccctaatggaatgatgagtggcagagcagagaagttaaaaaggatgtttgaaagctataaaacaacaatttggatgagatagatgttgtatagccttgcaatattaactttgaattggtctgattagaacaaacctaggaacaaacatattccttttctcacctcttaaatttgcagctaaatctacaatattatgaccactgactaaagttgtctatggagaacctggttagcaaacattaaaaaaattacactattttttctcatcattattcagcagtaaacacagaaggcagtcttttaattatatttagctagactgacaatcttgagattaaagaccccctaaggagttctcatcattttccacctgaaagtagaattaaaagtaaatacttaca

SEQ ID NO: 257155 - DNA, 534 bp, Homo Sapiens
  misc_feature (429)..(429): n is a, c, g, or t
  misc_feature (478)..(478): n is a, c, g, or t
  misc_feature (486)..(486): n is a, c, g, or t
  misc_feature (504)..(504): n is a, c, g, or t
  misc_feature (517)..(517): n is a, c, g, or t
aaatctgaccctcggagggaacttgactgtggcggttgggcccttgggaagattttattgtcaagatatccgagcttatgacattttatttggagatacaccgcggcctgctcaagccgaagatctttatgaaattcttgattcctttactgaaaagtatgaaaatgaaggacaacgaatcaatgcaagaaaagcagcaagggagcagaggaagtcttctgctaaagaattacctccaaagccattgtcaagaccacagcagtcatctgcaccagtccagctgaactctggctctcaaagcaatttgaatcaacccatagaagtgacagcgctgtattcatttgaaggacagcagccgggggatttgaattttcaagctgggagacagaatcacagttatatccaaaaacagattcacatttttgattnggtgggagaggaaaacttcgaggtcaaactggcatttttccagccactncggtaccntggatttaagcgttactnttttcttctttgngggtttccaaaaaattt

SEQ ID NO: 257156 - DNA, 1476 bp, Homo Sapiens
  misc_feature (876)..(1028): n is a, c, g, or t
  misc_feature (1129)..(1188): n is a, c, g, or t
  misc_feature (1225)..(1283): n is a, c, g, or t
  misc_feature (1302)..(1314): n is a, c, g, or t
tggtggggcttctggactgagccgctgagggtgcgggctgaccctgtaagtggctgcggcgggaagatggcggagctgcgcgtgctcgtagctgtcaagagggtcatcgactacgccgtgaagatccgagtgaagcctgacaggaccggtgtggtcacggatggtgtgaagcactccatgaaccccttctgtgagatcgcggtggaggaggctgtgcggctcaaggagaagaagctggtgaaggaggtcatcgccgtcagctgtgggcctgcacagtgccaggagacgattcgtaccgccctggccatgggtgcagaccgaggtatccacgtggaggtgcccccagcagaagcagaacgcttgggtcccctgcaggtggctcgggtcctggccaagctggcagagaaggagaaggtggacctggtgctgctgggcaaacaggccatcgatgatgactgtaaccagacagggcagatgacagctggatttcttgactggccacagggcacattcgcctcccaggtgatgctggagggggacaagttgaaagtggagcgggagatcgatgggggcctggagaccctgcgcctgaagctgccagctgtggtgacagctgacctgaggctcaacgagccccgctacgccacgctgcccaacatcatgaaagccaagaagaagaagatcgaggtgatcaagcctggggacctgggtgtggacctgacctccaagctctctgtgatcagtgtggaggacccgccccagcgcacggccggcgtcaaggtggagaccactgaggacctggtggccaagctgaaggagattgggcggatttgagcccctcccagagatggcaataaaactgactctcaacatctnnnnnnnnnnnnnnnnnnnnnnnnnnnnnnnnnnnnnnnnnnnnnnnnnnnnnnnnnnnnnnnnnnnnnnnnnnnnnnnnnnnnnnnnnnnnnnnnnnnnnnnnnnnnnnnnnnnnnnnnnnnnnnnnnnnnnnnnnnnnnnnnnnnnnnnnntttttgggggccccccgcgccccccaaaaaatttttctaaaaactttgttttggggcggggggccccaaagggaaagggaaacgggggccatatggttttnnnnnnnnnnnnnnnnnnnnnnnnnnnnnnnnnnnnnnnnnnnnnnnnnnnnnnnnnnnngggggaaacccaaggggtttctaaaaaaattcccaannnnnnnnnnnnnnnnnnnnnnnnnnnnnnnnnnnnnnnnnnnnnnnnnnnnnnnnnnnccctctaaataaaaatttnnnnnnnnnnnnnttgtacatctttttgggggaaaacgggggggcgacattcctcatataaacccttccccccccaccatcggagaaccccctctccacaaaggggggtggggaatagacctttttaaattccccccggggggtaattccaaacctttttggggggcccttgtgg

SEQ ID NO: 257157 - DNA, 384 bp, Homo Sapiens
cttcaggttccccttggatgctaccctctgcacaccacccttggcagctcctggcctccccacctaacagtgtcatatggggtggcccaaaagagagactagctgcctatcagagaattgtatcaggattacagtataactaccttgtagaagaaggtgtagggcctgcaagaggaaaactagaccattgagttggttagaacaaaagcagcaacaggacttagagtagattaaaagtataaagataccaggataaagtgaagaaagcttggaaactggggacagaaaggcaatgtaacaaaaggacagattgagtgcaagactttctgcaggggcttatagaccataaaggaaggaagaacatttgtgaagcagatatttatc

SEQ ID NO: 257158 - DNA, 1114 bp, Homo Sapiens
  misc_feature (446)..(446): n is a, c, g, or t
acaatcaggttttcatagagctgaatcacattaaaaagtgcaatacagttcgaggcgtctttgtcctggaggaatttgttcctgaaattaaagaagtggtgagccacaagtacaagacaccaatggcccacgaaatctgctactccgtattatgtctcttctcgtacgtggctgcagttcatagcagtgaggaagatctcagaaccccgccccggcctgtctctagctgatggagaggggctacgcagctgccccagcccagggcacgcccctggccccttgctgttcccaagtgcacgatgctgctgtgactgaggagtggatgatgctcgtgtgtcctctgcaagccccctgctgtggcttggttggttaccggttatgtgtccctctgagtgtgtcttgagcgtgtccaccttctccctctccactcccagaagaccaaactngccttcccctcagggcttcaagaatgtgtacagtctgtggggccggtgtgaacccactattttgtgtccttgagacatttgtgttgtggttccttgtccttgtccctggcgttataactgtccactgcaagagtctggctctcccttctctgtgacccggcatgactgggcgcctggagcagtttcactctgtgaggagtgagggaaccctggggctcaccctctcagaggaagggcacagagaggaagggaagaattggggggcagccggagtgagtggcagcctccctgcttccttctgcattcccaagccggcagctactgcccagggcccgcagtgttggctgctgcctgccacagcctctgtgactgcagtggagcggcgaattccctgtggcctgccacgccttcggcatcagaggatggagtggtcgaggctagtggagtcccagggaccgctggctgctctgcctgagcatcagggagggggcaggaaagaccaagctgggtttgcacatctgtctgcaggctgtctctccaggcacggggtgtcaggagggagagacagcctgggtatgggcaagaaatgactgtaaatatttcagccccacattatttatagaaaatgtacagttgtgtgaatgtgaaataaatgtcctcaactcccg

SEQ ID NO: 257159 - DNA, 732 bp, Homo Sapiens
gtgcaaacgtgggtacccagccacttcaaaaacgcactctggggaagaaattctttgtctccaaataagtccttaatgagatgatctggtaatcgtcctaatttggccataatccttttagccagctcagggatctgtgaaaatgctataaaacctatagtggtgccttgagaatgacccacataatacacttgttcttggccagttttattcagaatgaagttaatggaagctggtaggtcatattttgccatctcatcataactgaaagcccagaattcatcctgagaaactgagagtgtcttatgtttccgagaccaggtatttcctctgctgttgcccatccacacgtcaaaaccagcatcagcaagaatgaagcccaggctgctgttggcaaggtttgtgacccagttactagaatctgccagcaagccatgttgcaggaagacaactggtttgggacctttgtcagaatggttcttcctcccatgaggaattcggttaaggcacagaatatatccatcttctgtctcaactaggtattcctcactagggaatccccagtaagagataatttcactcacattcatgtttgtttcaggatccacagctgtcagtttccctccagacccctcagaatgcagggtccagagaaccaaacagaccaccaaccccaagaaccgcattttcattctggagctgtcctgccgggccgctgtctcgagtcgcagt

SEQ ID NO: 257160 - DNA, 378 bp, Homo Sapiens
ctgagtagggcagtaagcaaaattgggctttggctcactgcagaaaaaaagttatcctaaatatctacagtaaaaggaagtggggaggttctgttctcatcaagtaagtgaagttcgctaaaatgtatcatttgctaagcctctcacaatgaaaatagcaactataaatgtgaggatactgaagacattccccgaaagaaacctgtattacttttaatctgctgtagaacttggctttgcatcagtcatcccaacaaattctaagaacttcaaaatgcattaatccttagtgaactggatctgtgtaacatactcattctgagtgttttggcaaagtagccctatgtcactcgcttaattggtggcaggttattttcc

SEQ ID NO: 257161 - DNA, 412 bp, Homo Sapiens
tgtctatactctccatccacatcaattcctgccaggtattattttaatagtctcccctctaatgccaggctccttcttcacctactctcttacccgcagttctaatatgagattcaccattccaacaggattagaccagatgaatagatgatctctaagggccctttcagctctaagactgttgagatttgcacgcacattaggtaaagatgcccccttcttctgaacagtgacgcccaccatcaatgtttaattaatactgaggatgccacaaatctaactcactctgcttttaatggcaggttgactgtgggcttagtttatcaagcctgtccaaatgactaactggatggatattatgcccctaagagctccatacgggaagtctgcatctagactgaatacttctctt

SEQ ID NO: 257162 - DNA, 462 bp, Homo Sapiens
  misc_feature (340)..(379): n is a, c, g, or t
  misc_feature (415)..(415): n is a, c, g, or t
gccaggaaaaaaatcaaggaatggataatataagagcctttcaagaatgtagatttacactagagatttattaaatttgagggcctataacaaaattaatttatttaaacaaatatttgttaaaaattcttttataaagtacctgccactgtgttaggtgttctggggaatctgagagaaatagaaagacactagaataatatggttggtctaaagcactcaagatttagaatcaatggaggcttgtgttcaagttgagattttaccaccacttatcagctgtatcctctggttttacttaattgtaggtctactgatcactgccttccctgctctgccnnnnnnnnnnnnnnnnnnnnnnnnnnnnnnnnnnnnnnnncaaaacaccaaccacgggtcacagattatgacattntcaagaaggacacgtttgcttcccctgccaccattgtaagtttccca

SEQ ID NO: 257163 - DNA, 432 bp, Homo Sapiens
taccttgcagaaaagcactgtatacagagttacaggaacaaatttgatatcatataatttaagaagctctcataatcaggtatggacactggcttatacaacatacactgtgaatcaggcacagcaacctgcaaaccacatcatcccaacagttttccattcttcctattgacaaacacttaaacacagcattttcatcatatgaaagtaaacaaaaacaacaacagaataagctttccccacactaatttctaatccaaagagctttactgcaattaatgtaaattgctatcaatcactgaattgactgggcaaagatggacttggcactgtccccccaaaataacctagaaagaatgctttaaacagatataatccatagagaaagagatttacatcataaatgctgagggtaaaaagtacgtagaatga

SEQ ID NO: 257164 - DNA, 1235 bp, Homo Sapiens
ctaccgggaaatcctgtatcggctgtggtcacctacaatctctttgttgtgcctgcactgaggaaaatgcagggcatcttggatcctcggccaaccatcatcaaagcaaggttatcatgtgatgtaaaacttgatcctcgtccagaataccatcggtgtatactaacttggcatcaccaagaaccactaccttgggcacagagtacaggtaatcaaatgagcagccgtctgatgagcatgcgcagtgccaatggattgtggatgctacctccaaagacagaacagtaccgtggagctcccacaaaggcgaggtggtggatgtcatggtcattggacggctatgatggtcacccagcaggagaaagctttgatgcatgtccacatatcattgactgtatcctgtaatatgcaacggcacagctagttttcccgatttggataaaagttgatctgtatagtcaacatcttgaactatatttcaaatgaatttaaatatcttttaaagaaaaaaacacctaaaaataaatcttaacagaaaattctgttctgattatatcaaggcaaatttttcctttcttgcaaattgctttgtgtgttcaatgctaggtctgatagcgatagcttttagtagacagcggtaggtgcctgcagaacttgtgtttttctcatctttaaaatacaactacttatgctcttaaatcaaggctgtctgcttatttatactagcgtaggcaacacttggatttcccttcttagtatgcttcataactgctttacagagagcttttgcttgttctttctcatgtatctcgtgtttatgtgcacagtgccaaaagaagactgactgggtggaggctctgccttgcctcaagaaccatcccctgcagagcatccagggaggtttctcgccccaatagcctcacggcacagtactcttgggcagtaactggacaccttttatttgaagaaacaaactgaagaaaaaatgcttccttaagtgctgacagcctttttaaccaatacatttaaaattgtacagaacaaaaaaataaaatcaaagactgatcttgtacagatattagtgttaccagcattcatgtggaaatcaagagcaaagacaaaataatgttaaacaattctgtaccataacattttctgtaatgatactgaaacttaatgaataaaaaaattccttgatcattatttagaataaagaaattaaaaggaataataga

SEQ ID NO: 257165 - DNA, 587 bp, Homo Sapiens
  misc_feature (47)..(47): n is a, c, g, or t
atagtgcagcagtcaaagaaagaggcagatttctaccttgaaagccncactgaaaagaaggtcctgcagccagatcgtgcatgtaagcaccctggggagatggttaaattctgctcctttgacctgcaggcctaaccgtgaaggctactactgggcagggagctacttaagacaactgctcggctgacatctcggagtgcctaaaatgaacttctggctctttcatcagtattcctcattctcaaaatgttccctttccccaacatcacccatcatcagaaaaacccaaaagacaggtaataacaaaggctggcaaggatgtggagaaaaagaaaacctcatacactgttggtaggaatgtaaattagtacaaccacaatagaaaaccatttggaggttccttaaaaactaaaaatagagctatcacatgatccagcaatcacactgctgggtatataacctaaagaaaggaaatcagtacatcaaagaggtatctgcactcctatgttcattgcagcactattcacaatagccaagatttggaagcaaactaagtttccatcaacagatgaatgaataaagaaaat

SEQ ID NO: 257166 - DNA, 612 bp, Homo Sapiens
accatctggaactcactgagcatagctaccatctaagaggggggttaggtgtaggatattctgaactcactgagggaatatagttagaatggcaggaaacctgggaattattgaaggtgactgtggcagaaaatatttccccaagatagccacatcaatgtatttcccatctcacaggtttgttttacaataagaaattgacacatcaccttaagggtggcgatggaggattgtttctgttcccttcccttgaaatggggcaagtctctgtagctgccttgaccaatagaatgtggtagaagtgatgccacgtggattcccaggttagactgtagaaggcaatacagcttctgtctggctcttagagcccaggtgtcatgtgtaaggaagaccaggcacatgtgcgggggtttgacttgatggtccgtgctaggcccccagccaagagcaagcatcaacagccagacatatgaatgaatgagcctgtaagtgagtgcagccttcagcctttgaattttcttactgagatgcctgaacattgtggatcatggaaacaacttatctggaccctaccctgtctgaatgctgatccccagaaacaatgagaggtaa

SEQ ID NO: 257167 - DNA, 1159 bp, Homo Sapiens
gaacagaacctcccaaatttgagttgcacccttccctgtggccttatgagctcagcctcgctttgaggtacccaccgtcctgtcagctccttgacctatgagccggggcctgactaggaaaagttgggagttaaggaggaaattagcattccttaatgttttgttttggtgctctgaatttcttctttattatagtcctatagttttactcctcagttcctcaccatcatcatcttgtctaagacccccattataatattcatgcgctgctttttcatcaaaacctaccctgtcctagagatctatgggcatttggtggatgataatgagcagcccctcccagatagaatgtcaatatttgagcagtaggatattggcatttgttagttaaaggcttaaatcaaaagaatgtccaatggtaggaatttcaaggtgtaggtcagatatttgagaataggggatttttttgatgtgccttaaattataccaaagattactaattattcctctttgcccaaaatacttgcatccaaggttctagtctctgttgctgtgctggtctttagccccactgcttgcactgatgtccctccttttcacggagacctatctgaggtacaggatggggctggcaccagatgatgtcccaccacagtccctcacctccggcctccacatgacagaaccaatttacactcaaccatgacctcacccctccttggtttctccctcgatctgtggccctttttggatgtattcttatctaacaacacaatccggaaagactgaattgaatatttatactaatggttcatatcctttattgctcaatgatctaattaaagggatcattgccacatttcatgtttatatttctacaatttgtttagaaaacatctcctgaccatatcagtagctcgtgttatctttttatcaactgcttcccagagtcctaaaacaatagaaattttggattgaaaagttcagcataaggagtttgagtcagtaaaggatgggataaaggaatcgagatgattcaatgaaaagtatcacaaaaaagagattgatcaacaagagaaataaaaaagcccaagaggaagtggtaggggaaggaatttaagaacagcaataagtaaaactcttaagtaactccaaaaag

SEQ ID NO: 257168 - DNA, 718 bp, Homo Sapiens
cattagtataaatattcaattcagtctttccggattgtgttgttagataagaatacatccaaaaagggccacagatcgagggagaaaccaaggaggggtgaggtcatcctgcgcaaggccgtgcagaagatctgccacagcaagagtggagagatcaaccccgtgaaggtggccaacctggtgaaggcgtacgtggacaagtacaggcacatgcgcaggcacaagaaaccagaggccggggaggagccgcccacgcagggggccgagggctgaggccaggcaatcacgggctatgcccggggagctgtcgggagtggcgggaatcggggccatgcccggggagctgtcgggagtggcgggaatcggggccatgcccggggagctgtcgggagtggcgggaaatggggggcatcagcatgcctgccgtcgggttcctgcgctgaaaacctggtctgtgcacctgtgttgctcacagttgaaaactggacacttttgtatgtatattatagagacactgtttccattctaatttatcaaaaatggattatctttagaaacctcttgattgacttactacttggaagataaagcacttggtgatcaagaggggctcctggtggggtggcgcgtccttgataaatctccaggtggcctcaccgccaacagctgctgtgtacctctggctctgaattaggaatatctttactttctcttttcc

SEQ ID NO: 257169 - DNA, 1795 bp, Homo Sapiens
  misc_feature (181)..(181): n is a, c, g, or t
cttccttaacttgagaaaaaacctgtgccttctggctttgccccccagttttcggtttattcacccattattcccaaaaaatatttttgaaggctctgtcatttgctaaaaccaaattttcttctctatgtacacaacttcaagttaattgaatatttgtgcaatctcagagttcaaaacntaatacatccaattttagaaatttccttcacagatccctatttttaccatggctttaagaataagacacataatttcgcaacagcacaaataattaatacccccattatgtgaagaaaactctgagctctaaatgagtctcttcttataccaattcctatgactactgatcgagccaattttaatagtttcctgtatgtttaaggtctgttgcttgcaaaccaaggcctggatggttataaaatgtactggtcagtgaattatactgggagttctctgcaacacaattcatttaggagttgcaccttggactcactcagataaatatagttttcagaagtaatggaagctcttcatcacaaaaatctaatacaatcttggagtatgtgcccaagaatggtatcaaagcaagggtccaataaacttgactgacttaaacctgtcattgtgttgcaacattcaccatcctaaggtggggggaaaaatgatcctcacctataagaattttagaagtttaatgagaaattaaaataaaaaaagtccattttctttaatgttgtacaaaaaagtatgagcagaaccgaaagtaaataaacattatcacatttgtttacaccactatctagttcttcatattaattttactattcaaacaatagaaaagtggcaatttagggatcgcaaaaagagataaaaccaaaaaaactttttctaccacatttattctacactgtatatagctgtgctcacagagacaagcggcttcttttacttctccactgcgcaggaattcagttgtaaataaaattgaacctgctcaacagctgagggagactagaaatgatgggtccatatcctggtgcattgtcatacaattcaaacaatggtgcagctaccagcttgtaatttttagggactgcaaacaaggctttttcttgaagctgaaccagaaacaacttcttatgttccttaggctttgtaatatgtgcaggaatatatgggatactgagggagggtcaaaatttgggtctccaccagttaccaatgcaatcgtcaatgacccagtcttgccaaaactccatcctgacgacccagtatctctgtcattaagcgttgtagtccttcaacttcatcttctcctgggttaagttcaccaccaggtagtttgaagaaagttgttcccagctgcagcagtaacacatggggtagccggtgctcatgtacaatcagaaccccttctacagtcctcctcattccaattttatcaaattcttccctcatgcgctgaaatctggctgcaacagagctgtccttctcgtagaggggctcttttgtaccaaaagtataattggtaagagggtacaggttgatggtgcgctccagggtgaggggcttcgtctgctggatgtacttgttgccgaactgagtgaccccccggggccagccggtctgcgagcgattgggcggtaccacagacatgctggcgagctccggcgctgacggcgagcagaaagtggcaggcagggtagactttccccgtgcgggaagcggttatctgcaatcccctcagcggctactgcccgccattaacaggacagcgcaagaggaggagccc

SEQ ID NO: 257170 - DNA, 694 bp, Homo Sapiens
  misc_feature (202)..(355): n is a, c, g, or t
  misc_feature (514)..(514): n is a, c, g, or t
  misc_feature (522)..(522): n is a, c, g, or t
  misc_feature (528)..(528): n is a, c, g, or t
  misc_feature (639)..(639): n is a, c, g, or t
attaaagaagccctacataatgaaaaggcatcccactattcatcttaaaatacttaatattgttaagatggcagtattactcaaagcactttatagagtcaatggaatctctgtaaaaatctcagcagctttttttaatggaaaatctgatattgaaattattattgaattgcaggacaactgaagagccgtaactatctcnnnnnnnnnnnnnnnnnnnnnnnnnnnnnnnnnnnnnnnnnnnnnnnnnnnnnnnnnnnnnnnnnnnnnnnnnnnnnnnnnnnnnnnnnnnnnnnnnnnnnnnnnnnnnnnnnnnnnnnnnnnnnnnnnnnnnnnnnnnnnnnnnnnnnnnnnntgtcctattaatatttgaaagggtgctaaaaccattcaatgagaaaagaagagtctcttaagcacatggtgcaaggatatctggatatccgtatccaaaagagtgaaactagacctctacctcagaccatatataaaaattaactataacatggttcanagacctanatgtangagttaaaactatgaaacatgtagaagaaaacatgggagaaatcttcatgaccttgaattcagtaatggattcttagatatgacaccataaagcatgagcaacagaagaanaaaaagggtaaatggtactttatcacaattaaaaatttcaaaggatactctcaag

SEQ ID NO: 257171 - DNA, 1073 bp, Homo Sapiens
  misc_feature (979)..(979): n is a, c, g, or t
tgccgcgcggcgcggcccggccccccccaaattaggctctgagagcgagcctgggtggcgaattcggcacgagggtggcacgtggagccacggcgtgggagtagggggctgaaggcaggcagcagcggccagggccgccctctgctagccgcttgggtctcgggataccccgtttcttcctgtaggtgtgggacgtgcgtgcggcgagatggacactcccccgctctcggattcggagtcggaatccgatgaatcccttgtcacagacagagagttgcaggatgcgttttcccgagggcttctgaagccaggcctcaatgtcgtgctagaggggccgaagaaggccgtgaacgacgtgaatggcctgaagcaatgtttggcagaattcaagcgggatctggaatgggttgaaaggctcgatgtgacactgggtccggtaccggagatcggtggatctgaggcgccagcacctcagaacaaggaccagaaagctgttgatccagaagacgacttccagcgagagatgagtttctatcgccaagcccaggccgcagtgcttgcagtcttaccccgcctccatcagctcaaagtccctacgaagcgacccactgattattttgcggaaatggccaaatctgatctgcagatgcagaagattcgacagaagctgcagactaaacaggctgccatggagaggtctgaaaaagctaagcaactgcgagcacttaggaaatacgggaagaaggtgcaaacggaggttcttcagaagaggcagcaggagaaagcccatatgatgaatgctattaagaaatatcagaaaggcttctctgataaactggatttcccttgagggagatcagaaacctctggcacagcgcaagaaggcaggagcccaaaggccaacaaaatgagggaaggggcccagtgctaaacgacggtattaaaaccccgaaggttttggggtttggggggaaaaggngaaaaggcctcaaagtgggaaccctcggggaaaagctataatggaggattcctagctttccggggccaagaacgggttcatgggcaaaaaggcc

SEQ ID NO: 257172 - DNA, 1366 bp, Homo Sapiens
gggaatcaaaagttgagcagtagctgtgagttgctggcgctggagcgattcggtggcacgtggagccacggcgtgggagtagggggctgaaggcaggcagcagcggccagggccgccctctgctagccgcttgggtctcgggataccccgtttcttcctgtaggtgtgggacgtgcgtgcggcgagatggacactcccccgctctcggattcggagtcggaatccgatgaatcccttgtcacagacagagagttgcaggatgcgttttcccgagggcttctgaagccaggcctcaatgtcgtgctagaggggccgaagaaggccgtgaacgacgtgaatggcctgaagcaatgtttggcagaattcaagcgggatctggaatgggttgaaaggctcgatgtgacactgggtccggtaccggagatcggtggatctgaggcgccagcacctcagaacaaggaccagaaagctgttgatccagaagacgacttccagcgagagatgagtttctatcgccaagcccaggccgcagtgcttgcagtcttaccccgcctccatcagctcaaagtccctacgaagcgacccactgattattttgcggaaatggccaaatctgatctgcagatgcagaagattcgacagaagctgcagactaaacaggctgccatggagaggtctgaaaaagctaagcaactgcgagcacttaggaaatacgggaagaaggtgcaaacggaggttcttcagaagaggcagcaggagaaagcccatatgatgaatgctattaagaaatatcagaaaggcttctctgataaactggatttccttgagggagatcagaaacctctggcacagcgcaagaaggcaggagccaaaggccagcagatgaggaaggggcccagtgctaaacgacggtataaaaaccagaagtttggttttggtggaaagaagaaaggctcaaagtggaacactcgggagagctatgatgatgtatctagcttccgggccaagacagctcatggcagaggcctcaagaggcctggcaagaaagggtcaaataagagacctggaaaacgaacaagagagaagatgaagaacagaacacactaaatagcatctttgaatacaaagaaccaagaaaaaggaatgaagactcgcaatttcacgacacactttgatcccttctgttggtgtcatgttgtaaacatttctttcaataaactaaagaaaaattattaaaggaacacatacctttggttaaatagtctagactaaaagattgagaagttactttccattgctatctattgataatttagacattgagttcaaattgccttcattttatgataaataatgatttaactga

SEQ ID NO: 257173 - DNA, 772 bp, Homo Sapiens
  misc_feature (41)..(72): n is a, c, g, or t
tgcactgcagcctgagagagagagagccagaccttgtctcnnnnnnnnnnnnnnnnnnnnnnnnnnnnnnnntaaggaatccttttaaagcatgttgagaaagtattttttggtatgaatgggtgacgggccttttaatctttcaggaatacatataagcaggaatacttagcctgtattgggaaggtgcgtgaaactcaaaggtgctaacatcatcttccttattttcagccagtgctgttactgcatttagcatggctctgacgaggcagtggagagttcctgacagcatagcatactgccttctgacagactgggttaagctaccaaaaatgacaaccagggattcaaaaaaaatttttggtcattaaatcgaatgtatattattactttttaattttctaagtatttatcacaggactttaacaccatatatttccctcccagtttttctccccttttggtttaatagttaaaacatttttcataattagtgctgtacatttgattgcaaacaaattggtgatacttctaaactataactataaatctctagaattctgtgaatttcaacattatttgaagtagttcttcagttatatttacatgtgttgtaaatatgtaaatatacttttagcttaggaagtcttccagaatacaaactactcccagttagatatcagtgagtttgaataactgaagaaatgttgacaatgttaagtgtttgattttatataacaagcttattaaatatatttttgtggaaactaaa

SEQ ID NO: 257174 - DNA, 1516 bp, Homo Sapiens
  misc_feature (696)..(705): n is a, c, g, or t
  misc_feature (1178)..(1178): n is a, c, g, or t
ggcctgataaaccctgaaattgaaagaagtatgcagatttgactcagcactcctggaagtgtctggatacagctcactgagagtgtggaggtgaaagtgcctgcaaaatattaacagttctctctcaatctattgatctcctcagttacatccagaaccttaaagccgcacagttgtcatcctccgcccgcagtctcaggcagggcgcatcaggggctgcactggtagctcccaggaggacttacccatgggtcaccgtcatagccaggtgtgtctactcaggggggacgcaatcctgcagcagtccccgtcaatgagaggccaccagcagacagtgcctgttggacccatgaagtccaccactaattatatactctgctttaggtagaatatttttattagctgtcaaactgtttttgtatttaagtttccaaaagtccaggtactttatgtaggccaatgtataaatatttcaagtctaacagtagcacagttatatgttaatacaactgactacacgaaaaatatgtaatagcatatgctatgtaatttttcaaatcactaggtattgatatgtgccttttttatattaccaagagattctctaaatatggaattagattaggattctctgctccacttaacacacatttttaaattagtactgatgattgagggatggacaatagcacaccnnnnnnnnnngagtttagtatgaaaaatttaaacctgttggttaagtcattcccattaatgtcattttgctgagggtgacttggtccttttgaattgctttggtgtacgggtatgttctgatttttcatgcaagctcctctgccattccaccgctctgaggagtaattgtagcacttcacatgtgctgtggttgtgatcacatggtgacatacatagcatgtgtgttcccagctgttgtgtgtttatgtgacatttgatgccaatacatatgtcttcaaggtatgcttgttccctcccagctcgtggaatatcaaaaaaattcattgctggaaaaattatttcatagacaaaaatgttaatgctctcttggggacttagagttgaaaatatttgtatagatttggttctcaagtccacagaatcgtatctgctgtggtctccctttggtgctcatctgggagccatgtgtatggaagattccngtcacaggcggctgggatgtgggcagatgctgttagactccctcctccacgtggtggcccatgcctgacgtgtcccctagttcaaggaagcgccatctttagcatgaaaacaattgcgttcccctaggaaatgaagaaaaaatgagctgaaatttccttatacatttgaatttggtcattgtttaaagagacatctttgttgtctgctctgtggcacttataaaatttgttttccattgaaattgccatttataaatttgcagatatgtactaatttagatttttttaagtgttcaataacatacagatttatttactgtgagggcccgtacccaatt

SEQ ID NO: 257175 - DNA, 804 bp, Homo Sapiens
  misc_feature (475)..(475): n is a, c, g, or t
  misc_feature (534)..(534): n is a, c, g, or t
gattagtggggaaggctatgaatggaattaattaacatactcatttatcttttggggtatcttatgggaatcaagtgtagggctggctggagcccaccaaggttgatatgttagaagcaggatattggcaggattttcttataagcattcatcggcatttcaaggctttaggtgagcagttcctcaccatttaaattaattgagaactcaataactactccggcaaaattaagtttctctgcttttcaaggctttccaaagctccccagatggctttgggcaaattgcttgatcttatgtatctattttcttatcccaaaacaagcctccaaacctagcattcagtggctctctaacctgaacctaacctacccctccagctttttccatcgtgagtttccagctctctgcttctgaaaatctagttcccatctccctctctgctatgatcacactaactcccaccaagacattntagctgatgtggttttctacaacttagacaactattcctccacatgtgccatcttttanatacgattcataatctctgtaatatacacagagttctagtgaattgacattaaataagtgggccccctgtataagatggcagatgtgggtggacacgcagtccacatgagaggttcaaacggcgaataccatgagaaaatatgttcaggattgcaaggcaaaaagagaagttgagctaaatattaaaagtaatttttgactttcagaatggcaaagatttcaatgaatataaacctaggacaaaatttggaagaagcccgcaggaggttt

SEQ ID NO: 257176 - DNA, 1653 bp, Homo Sapiens
gtgaataacaggtaagtagaaaacaaattgcaaagattcatttatggtcatttttaaatttgattacccatttaaatccagcaccaaagtggtttcaacagactttctacttgaggtgaaaataataacactacaaacatatggcagagcttcgtacaagccatttcactcacagaggagtttatgttttcgaggatgtaggaaaagattttccaagtgtgaaaactaaatatatacaaaagcaatacattttgttattagttaaataaaatgtgtctttaaatatggaattctttgaaaaactcacttcatcgtccaaaattatggagactatttcacttttttaatcaaagatggaatattcatcacagttccccaagggattttctaactggcctgggcaaggagttcacttgtagagtgtagttagtgaaaacatccagtggccaagcctcatcaataactgtatccaaaaggagacgctgcttggggtgtacccagagaaaacaccaagctttcctggcttcccggccctccctctccccattagtctttggggtgcatacataagtgttgtgtgaagtctcttggggtttagaagatcttgcactcattgatggagaagagcctccttctgtttcgtctcctggcctggttgacggcagttcggacggcgcactcaaacacctgctgtactccccgattgctaagggctgagcactccaggtagcccttgcctctgacatcctgggccagtttcttcccttccatggcattgacgcaggaggccctgtggggccccatctcccgctggtcagtctgggtggccaccaccagcacaggggtacagggcaagttgctcctaatttcaccaatccacttgttcttcaagttcaggaatgagttatggttggccacagagtagcacatcagcaccacgtctgcctgctggtaggacaggggccggatgcttctgaaggcgtcattgccggctgtgtcccagaggcccaggctgatctggatgccatccaagaagacgtccacccctgtgttctcgtacactgtgggcttgtaggcctccgggaaggtctcggaggtgaagcgcaccaacagagaggttttccccacagcagagtcgcccaccaacacgcacttgatggaactcagcatcttcccagcctgctgtcctactctgaagtccagaatcccagggaaaagagccctcagtgggcagctgcagcacacgccattcagcaaggggaatgcaagccaggtaggtctgtgtcctcaggacctctgacggcgatttgcagaatgttacttctccctgcccatccaagcaccgtctgctttgaaaacctccaaagcctagtcttcaactggtgtgtgaaggagaagtttccaaacagctctctgtcggcttctactccaagaagtggcaaaggccccgagagcgttctccacggcttcagtttctgatggatctagccatgttggaaactggctgcgagacccctgtccctttcaccccctggctgaccacccttctgcttctgaagaactggttttctgtgcctggaattgccagttttagatgatctggtacagtccagcgttgggcttcctcctgctcctgacctacacgcctctccc

SEQ ID NO: 257177 - DNA, 589 bp, Homo Sapiens
gtttccattgctgtcaatgtgatccagagaaccattgaggtcttcgtggacggcctgcagtaggccactggatgcattatttatcagtccaggattacttagcaaaggtaaactgctctctgccaaggcagttactaaggttggacttcctgttatcttttgtgaccttcgcttctggtattctacttcatccacagtccatactgctcctttaacattttctactcgaacaaaacacttgtgcaggctaagattatgacgtactgcattcttccaagttgctgcattacgcctgaagtaagcaaatgtccgtgtaaaccagctgtaaatttcattaagtgttaactgcctgtcagatgactccatgatagcctgccttatgagagttgcataagtaaatggaggtctgacatctgcatttttataaaattcatagtttggggcaatttaggtttgggagatggtttgggctctgagggtcgcatgtgcaagtgggtcatcattgcttgaagacgttcgcgttctttagaaagctgttaagaaagagtgagatcagaagcgttttagaaatgactgatacagctatttt

SEQ ID NO: 257178 - DNA, 912 bp, Homo Sapiens
  misc_feature (699)..(759): n is a, c, g, or t
agtggtacgtagagattatcctagagtagcgaacggatggggttactctgcaatgcgtcgataggcgtaactatgcaatgtgttccttgcgattcgttaggagaggatgggcatagaaattctgtggaaggggtagtatgcttcccctgggccgatggcatgaataggcaattcggctagccacaccaagtatagatttcagatacgtatatttgggaaataacataagggcgtgctgttgggagcctttatatttgagggcataagatgctcttcgtgtgcatagagaagagactgggcattctagcttggttaatttccttgtggctcccataactatcatgggaatcttttggaaagtgcatgggctcccagacgggggaattccagtaagagtgtggctgggcaatttgtccattttacacgtcagccacagaggtcatttagtaactgctggatgaactggtctggagaccccaagatagctcatcctgtgtgtctgctgccttgccagggatggctgaaaggctgagctcacctggagcacccgggctctggtggcttaactcaaatagtcaaatcctatttgaattttctctttgctacttaccccaacctctccctccttctcctcatttttctttttgtatttataatgaatattatgatgtctatcctcctctttgctgcaatataacnnnnnnnnnnnnnnnnnnnnnnnnnnnnnnnnnnnnnnnnnnnnnnnnnnnnnnnnnnnnnggccagtataaatagcacatacacacttgctgcaataaagccaagctacaaagggtttcctgactgctcttaaatattctcaacagcattatggggcagtatttccttgtcctcaatacaagacctgggcctgtggtgaagtcaactgtgaaa

SEQ ID NO: 257179 - DNA, 584 bp, Homo Sapiens
caggctttgaagagcatggagggggagcctcagagctgacagtcctgcttagagcccttataaatcctacctagagacctttggtccttaaagcaataactgacaactctttgtagtcctccttgtgggtagttaagagtggggtcacccctttaactccaagcactacattttggcggctgccggcctctgggggaggtggcagttatgctgttactagtgattttagggctttgttatttaacttatttcaagggtgctgtgctcagccctgcccatggctgtgcagctccctccgtgcctcagatctgctgtagccagtgcagacctcactgtcgtgtccatgccacccccggcatggctccaggtggcctggtgactccatgatggacgatcttgctcccaggacctgcctcttcccaggcttcctggggaagagttgtacgcccaggcaacaagggctgacgtgcgcttgcgtggctgtttcatgaccgcttgtttttctccttttggtgtaatgttttacaaatcctttggcctgagaactaatatgttaattgccttaaataaattaatagaaatct

SEQ ID NO: 257180 - DNA, 1414 bp, Homo Sapiens
ggctggaccggccggattccgggatctcttctcatcgtcggcttcctcttcctcaaggatgacttcattctcgaggtcgaccggctgcccaacaaccactccacagccagccccctggggatgccacatggagctgctgcatttgtggacacctgcagtggggacaagatggactgtgtctcagggctctcggtgcctgaggtcctggaagaggacagggagctggacagcacagagcgggcctgtgacactctgttgatgtgcatcgtcactgtcatgaaccatgggctacgcaacggtggtggcgtgggcgacattctccgcaagccctccaaagatgagtctctcttcccagcccgagtggtctatgacctcctgttcttcttcatcgtcatcatcattgtgctgaacctcatctttggggtaatcatcgacaccttcgctgacctgcgtagtgagaagcagaagaaggaggagattcttaagacgacatgcttcatctgtggtctggagagggacaagtttgataacaagacagtgtcatttgaggaacacatcaagctggagcacaacatgtggaactacttgtacttcattgtgctggtccgcgtgaagaacaagaccgactacacgggccctgagagctacgtggcccagatgatcaagaacaagaacctggactggttcccccggatgcgggccatgtcccttgtcagcaatgagggcgagggggagcagaatgagattcggattctccaggacaagctcaactccaccatgaagctggtgtcccacctcactgcccagctcaacgagctcaaggagcagatgacggagcagcggaaacgcaggcaacgcctaggctttgtggatgtccagaactgcattagccgctgaggagagccaccgaaggccccaacaggggatgctcatcactggagactgcgactgggaagaacactgccccctcctcccgggtggggtggcccagccagctggccagcctccactcccactctgccagacaccctgacacccacccaggctttgaagagcatggagggggagcctcagagctgacagtcctgcttagagcccttaaaaagacttgaaagttcactggggactcagtttaccttaatgccttagcagaagataaatcctacctagagacctttgttccttaaagcaataactgacaactctttgtagtcctcccttgtgggtagtttaagaagtggggtcaccccctttaactccaagcactacatttttggcggctgccggcccttctggggggaaggtgggcagttatgctgttacctacgaatttttaggacggctttgtttatttaacttatttccaagggtggctgtgctcaaccctggcccatggctgttgcagctcccttcc

SEQ ID NO: 257181 - DNA, 334 bp, Homo Sapiens
ggaaaatgggaactagagtgctctcttgggtctgataggaaagtgaattatttatatacttacaatacaggatggtgattttcaggtataggtcctgaattttatggtaaaacttttgtagtcatttcaatagctgtctttcccaaaggcactttagtgtccgctcttatttccttaatcattggtctcactgtatcatcttgtaatttattcatttcttgtaatctgtccattcccttttaataagtttaggtcagcctcttagaaccatttctttttcatgggatggggtagggggagttaaagcttgcttgtgcacaactgagttacttat

SEQ ID NO: 257182 - DNA, 415 bp, Homo Sapiens
caactttgtctggctccaaggggtctctgtcccttacactggaaagagctctgcctaaaatgactgctccagtttcacaaggaagaatccaaggccctgccactgacacaaaagaaagcactgacagagtcaaaggtcaaacccacatctgtgactctgaagcctgcacagtccccaccttcctgggtgtacaccacttatcttcccgcccttcgcccactttgtgcccccatcatggttcagcagccccttgcagagaaaaataaatgaagctcacacgctcagcctggcttctgcacagcaagcagctcagacaggatggaagctgcagcctacagcttctcaaatgccagtgccccgcggcctctagcttccctacccagggaaacgaaaacttcacaaatgcctgagctct

SEQ ID NO: 257183 - DNA, 432 bp, Homo Sapiens
cacagtcaaagtagtaaacttcgcagatatatctaaaaccaattttcaaaccagcttcataacatatgctgtaagtaaataaataccaaaacctgataacactagcatggagaaaagaaaagctgaattaaaaagacattcctttacacaacttagtcaagacaaaatacacattactatgtgatgttacactaattattccaataattatttacttaagaagagggacaaaacagttgttgtcacattaaatctttctcttatttgccatccccacctttatactccattactgcctcctaacactttcccttcccaaggagattggagattaagaaatagcctctgcccctcaatctagaattaacttaccttttatttttacatacaaacactggatttcccagagtcgtcttttaaaggagttaagat

SEQ ID NO: 257184 - DNA, 148 bp, Homo Sapiens
aaagcttattagctcatttatcttggaacacagtagttaaactgaataaaaaccaagggccaatataactgctactggttgagtcatacagtgatgtgtagtttggaaaagaacacgaatgataagatattgagcccctataggaact

SEQ ID NO: 257185 - DNA, 419 bp, Homo Sapiens
gaaacatcatacttgcaatataatgaagatattttaagacagtttagattataatttgactaatttagattcataaccaaacactatcattttcttacaagaagacaactggagtacaaatggccacagattttcctattaaccgagtaaattggttaaaaggaaaatgaaattggcaaatttagtttggacttggcttccttgcgcttcgctttttgccttttactaaataaagattggtcatctaaactaatgagttttctcgattgtctgatgaatccaggatggagcagagtgattgacgctacacacctaaaaggatacggtaagaagagttgccaccagcagaagggaaaactcatctgcactctctttagtatgcctgtgagatttctttccgagtatagccaacaaatgac

SEQ ID NO: 257186 - DNA, 373 bp, Homo Sapiens
gaaataactgtgtgaaaataatgaaatgttagtcttatcattcttaaatgtaactaattttgtgaatgtgcttgaggaaattggacttgaccacattcagatctaggttcaccttatacaggttatcttgttgagctgtatgtttgtattccttcccatattggctcatcatttaaatttatcaaattagtggcaatcaccgaagaaatggcttgcccttgagtgtctgaacatataggattctattaataaaaattactaagtacattataaggcttgtctgtaaaagaactaataagccatttagaaatattacattacacatcaaacattatttaaatgcaatcacttgagctaaagtaattatgaaaca

SEQ ID NO: 257187 - DNA, 1224 bp, Homo Sapiens
actacccaggaaggcggagctgggtgcgagcgccctaccgctttcgctttcccttcgcggtgcccactccactccttgtgcggcgctaggccccccgtcccggtcatggccatgctcagggtccagcccgaggcccaagccaaggtggatgtgtttcgtgaagacctctgtaccaagacagagaacctgctcgggagctatttccccaagaagatttctgagctggatgcatttttaaaggagccagctctcaatgaagccaacttgagcaatctgaaggccccattggacatcccagtgcctgatccagtcaaggagaaagagaaagaggagcggaagaaacagcaggagaaggaagacaaggatgaaaagaagaagggggaggatgaagacaaaggtcctccctgtggcccagtgaactgcaatgaaaagatcgtggtccttctgcagcgcttgaagcctgagatcaaggatgtcattgagcagctcaacctggtcaccacctggttgcagctgcagatacctcggattgaggatggtaacaattttggagtggctgtccaggagaaggtgtttgagctgatgaccagcctccacaccaagctagaaggcttccacactcaaatctctaagtatttctctgagcgtggtgatgcagtgactaaagcagccaagcagccccatgtgggtgattatcggcagctggtgcacgagctggatgaggcagagtaccgggacatccggctgatggtcatggagatccgcaatgcttatgctgtgttatatgacatcatcctgaagaacttcgagaagctcaagaagcccaggggagaaacaaagggaatgatctattgagagccctctctcccattctgtgatgagtacagcagagaccttcctgctttttactggggactccagattttccccaaacttgcttctgttgagatttttccctcaccttgcctctcaggcacaataaatatagttataccactaaatataaaaaacaaaggggggcggtctagaagtttccccgagggggccaggttagggttccaggttgctggttcaagggggcctatgggggcggataaaaaataggatggccgggttaaaagtgtgtgggaaatgtctgggaatgggagaactcttgtgggggagatatggaaactagaaataagtggaataaacaggaagtgagagagtggcgatgtagttaga

SEQ ID NO: 257188 - DNA, 826 bp, Homo Sapiens; identical to SEQ ID NO: 166216

SEQ ID NO: 257189 - DNA, 625 bp, Homo Sapiens
aggagagtggaagctgagtttgatgaacaggctgatgaaagcacttatgatgagcacgtggatatctatggctcttccatggaagagttttccggagagaggtcagatgggaatctaattgggcacagacaggaagctgccctctgcagcaagttacagtgagaatattgaaatggtaacagggattaaagaagaagcttcccacttaggattctcagccaccgacaagctgtatccttgtcagtgtgggaaaaggttcactcacaagagtcagagagatcggcacatgagcatgcacctcggtcttcggccttaccgctgtggggtctgcggtaagaaattcaaaatgaagcaccatctcgtgggccacatgaaaattcacacaggcataaagccgtatgagtgtaatatctgtgcaaagaggtttatgtggagggacagtttccaccggcatgtgacttcttgtactaagtcctacgaagctgcaaaggctgagcagaatacaactgaggctaactaaaaataggatctggcccttgagtggcatgcacaaaaataaactatggtaattaatgcaaatctgggcacagatgatgcgtgctacttgctattatgagagaagctt

SEQ ID NO: 257190 - DNA, 490 bp, Homo Sapiens
  misc_feature (422)..(440): n is a, c, g, or t
agaaattgagatgtttttattttgactatttgagagtaaaattgtagataatgttccaaaccatcatcaaaaatgcagagcaacttttctgtatataaactgtacataaaaacaaggcactatacatttttggggagatattaaggtagaaaggttgattcgcatagattctccagagtccatgccattaagtacaaattctttgttcattttagcaccggaaccagtactcagaccaagtcatacctaatgctgcaggaaacatttccaaacgtgtatgaagatacatattggtggcagagttaattcaacagaagcaactccatctaccttttcatgttattttgacaccaaacacaaatcttgaaagtgaatgaatacatattgctttgttaaatacatatttgacttatatggtgttnnnnnnnnnnnnnnnnnnntttagaatccacaaactatcaaaataacactttataaagagaactgcttc

SEQ ID NO: 257191 - DNA, 413 bp, Homo Sapiens
gtatggtgtcagcccatggctagagccacatgctgactttggtcttagggatttcccactgggtactctctgagtttctgaggacctggctgcagccactctggttacatcaggaggaaaaggtgacggacttatctcccacagcatacactctctcagaaagttcccaacacaaagaaatgataaatgttagagatgatgggtatgcgaatcactctgatctgatcaccatacattacatgtatcaaaatatcactatgttcccaataaatatgtataattatgtgtacgccaatttttaaaaaagacagttaaagtcatgaagacgcaaacatggaaagccctccttttcaagaacaggagtctcccctgtatgtggagaagcccaaggaccaaaaaatataccactctct

SEQ ID NO: 257192 - DNA, 369 bp, Homo Sapiens
ggcacgagcccccacctctcaaatctatgatctctttcatatatgcttacttttctattagatagttgatccttcctcttactgagttatagaagccctttgttaggtgcattagctcattgaggtatgagttgaatgtatccagatttataaattttaaaagagggatttacaaaagtcctctaagtcttgctttaaggtaatggttagagctgtgaaaacctaattaagtcatttcacacaatggtctcccatgagaaaatccaaaggttggttaaaattctcacaatattgtgtaaccaccaccactttctatttccagaagtttttcatcacccaaactacaactctattaaagtgataactact

SEQ ID NO: 257193 - DNA, 758 bp, Homo Sapiens
agacagcatgaagtacatacatctagcctgaaaacataccaccatcaacctatacatctaaatgcttggacttcatgtgtgtctacccacagtgcccatggcctatctacttacacaccctctacctggagcttctgtggaaagaagggctgtcctgtgacaatttgcactaacatacttttccagctaaactctagttcaaaggtctgtgagcttgtcactttctggagttgggaaaaggcatatcaacttcttcatcaagggaaccatcctgtcccctgtgaaagattataacagccctttcccaggtaagggatgtattgtgattatctgaaatattgagatttttggtagacctgcacaatactaaccctgatttccaggatctggaagttctctttcctgactgctcaatagatgttgaatggggcatattttgatgcgcagtcttgtggttcctgtggtattctaacacttgcttggaaatgagatagttggaatgctatacgcaaccaatatagttgtgtttctaacacttcatggggagaggagagaaaaaggaatccaagcttatataacccgctgaagtttccagttactcattacttaatcatacccttaagaagtatgatttcagttcttctccacacactacaaattaacgagtttcactagacaataagctgatcaattaggctgattcacatttagagctgcctttccaattactagcacatggcgagggttctcaggaaaat

SEQ ID NO: 257194 - DNA, 757 bp, Homo Sapiens
atagccgccaccattattccccctagtgaccccactgaactctactgaaaaccttgcctcatcctcctgcccacgcctggccaaccccactgagacacagtcatctgcagggacaagcacaaattccaccctctgtgctttccagatggatgatgacaccactctgtttgtttaagaacccgtcttttgattctctcataattcctcacactgcttctgcaagaatttgtttctaactcaagagggaagaaacaggaagatttctggcttttctttagttgccttaaggtcagcttttcaagctgtggcactgaaggggcttcctgggaagcacccaagaaaatgacatgggtttaccagacaagatgtcctgtccaccactggcaaagacagggagtagctatttctcctatgctgtgcctcaatcttctcacccggggaaatggtgcttcccttcctactttatggagcacttatgaatatctaactagaagtgaatataaaagctctttgaactataacacatgataagctactcattggttcagagattaccccaggtttataagagatgaatctaaaatttattagcaaaacttttcctccttcaaaattacacaaattatgaatttaaatactcaattactttgaaaacctctgggtgtgtgtatcttcttttttactaataggcatcatctcactgaatcaatgatccctgaatgaaaaactatatggtatatggataggaatgtagcag

SEQ ID NO: 257195 - DNA, 394 bp, Homo Sapiens
ggacaaaataattttaaaatgtggtaggattcctgttgtaatgcaatggaataacagctatatcagtaaaactgtggaggctgtgcatttatttaaaaacctaagcaattgtggtgtgtataccaaggagcagcaaattctgataatttataggtgggagaataattttcctctgggctggtctagagattatatttatagggaccctctgaagattcaaaaataagaattggcaagaggggataatcagcatttcaagagaggaataaccagcacttgttaaaacacctgctctttactgggtccctctgtgtgtctggtacttcacatacattctcctattaaagcttttcaacagtctctggaggtattaaccatcttgagagagaaaaaa

SEQ ID NO: 257196 - DNA, 864 bp, Homo Sapiens
  misc_feature (117)..(117): n is a, c, g, or t
  misc_feature (129)..(129): n is a, c, g, or t
gcccactcggaatacccagaaggccggattgggcaacaggctgcccattttgcccttgaagccggttgcaactcccaaaatttgggtccccatcccatggtgccagaaacactgtgncctgaattaaanccttggctggttcccatgcctggccatacatcccatatgccaggaacttgccaaccattaggcatatactggccaatttgttgtgcatttccataccaactgccccactggccataaggttggggatatccaatttgattctgttgcacgggatttatcatatcaagagtttctttgccccaatagcatttcacaacatgaccttcaatggtagtaccattaacagaaacaattgcatgtgctgcactttcatgggaattgaaccgaacaaatgaaataccctttatctggaaagactcgaatttcccattatttgtcccaaatggtgaaaaagtctgacgcattagttgttctgttagcccagaagtaacacctccacagtatacagtacagttgcttggactagactgatttacaacctcatcatatgatagctgtttggtatttgactcatatgtactctttggagcgggaggctttcgggttgcccagttagcagcatcccatttgttgaaaaaggagacaaagccatatcccttagactttcctgttcacatgtcttttaccactcgggcatctctgaaatcagaaacaatcagaagtttaggtttgcaaactatcctctggatatcaaataagaatttcacacacaactcattctcatgtttcaccttcattaaagtgaacctttaatgcaaattcaccttatattctacaaaatttatcatgtattag

SEQ ID NO: 257197 - DNA, 945 bp, Homo Sapiens
catgacagtcagcttcagagtcctcgctccagtgtgcatctcgtttctcagccacaagtttgatgaattgagccagcatcatctccagcttatagcataagattatccattatctcacctgtttcgtcatggtagttcacagcttctgtctccatccatgcattatcagtgtttcgaggatcatcaacatatcccttatatatcactaggtggtcttggctgaagagtttgtgcaacttttcctctatttctctcttctcagcactggttttctgtaaggagttgagagcttcctcaccaaattctcttttcagtgtggcactaatcttctctcctggatcccccatcccccctgggattgcccattctccacagtctttcctttttattgcaacaaattgtaagatatgcttcccagaaacaggatgcatgattttatttccacggctatcccttttccatctggttataatgggatctgcagcgtgatttgggccccatcgccccaaaagcccccggcccaccagtccagtccgtcctgcaggatttctcggtcttccattttcaatctcatacaggccattcttgctctttctctcaacatgcccatccttttcgttaaacttgggagaaaaattactttcactgatctgaggatctgcccacctgggtccagccaagacagagactgcagtgtattccacaggcttatagtcttgccactcaacaagccagcccactttctcattaggaacctggcttcgttcaacttttgaacctgggtaaggagacgtccgagccttattgtgagaattttctttggaaccattagaaccagacatgacgttggtattaagatgaaaccaagaagatgaaaacgagtttcagcacgtgacgccgaagcctccagcgccagctgcctggggaaaccgcggccacgaacct

SEQ ID NO: 257198 - DNA, 363 bp, Homo Sapiens
ggagtgtgtaagggggcatgtggattaaccatacatagaaagaaatattctcttagctatccttgaaatcatatttatactattaattggctcagagcactttgttcaaatacagaaaaaagattctccattataggtacaaattttagggtggtgaatccaagtgaatgaaatatcagcataactatgtgggcaaaatagatagaaataaatgcatgaattttcctcagacttattttatctgcctctgtaatatttaactttaggacccaagcttggtcacatacttctgctttacaggctttatttaaatctgaacaatcctacagggaaatcagaattaggaaaaattccctgaatcct

SEQ ID NO: 257199 - DNA, 146 bp, Homo Sapiens
gttgtggtgcatagacccagagtatagacaaaatctaattcaggctttgactcaggcatatcaaagcacatcaggtccacccatctggccgggcagtaccttcttcaagagaaatggagcccttctccaagatggagtcttactct

SEQ ID NO: 257200 - DNA, 554 bp, Homo Sapiens
gttgtggtgcatagacccagagtatagacaaaatctaattcaggctttgaaaaagcaccttatcacccacacccacacgtgttcaatacacctcccacctgtcctcaggcatatcaaagcacatcaggtccacccatctggccgggcagtaccttcttcaagagaaatggagcccttctccaagttcctccaggagtgatccaaaatggagcgcgggtcctgagccgagggctgtttcctggcgtgcggccgctgccaatcactcccattggggtgacagcggccatgaggaatggcatcaccagctgccggatgcggactgagagtgagccatcttgtggctccccagtggtcagcggagaccccaaggaggatcacaactacagcagtgccaagtcctccaacgcccggagcacctcgcccaccagcgactccatctcctcctcctcctcctcagccgacgaccactatgagtttgccaccaaggggagccaggagggcagcgagggcagcgaggggagcttccggagccacgccgagccctatgcagtctc

SEQ ID NO: 257201 - DNA, 564 bp, Homo Sapiens
  misc_feature (488)..(488): n is a, c, g, or t
gagactgcatagggctcgcgtggctccggaagctcccctcgctgccctcgctgccctcctggctccccttggtggcaaactcatagtggtcgtcggctgaggaggaggaggaggagatggagtcgctggtgggcgaggtgctccgggcgttggaggacttggcactgctgtagttgtgatcctccttggggtctccgctgaccactggggagccacaagatggctcactctcagtccgcatccggcagctggtgatgccattcctcatggccgctgtcaccccaatgggagtgattggcagcggcgcacgccaggaaacagccctcggttcaggacccgcgctccattttaggatcactcctgggaaggaaaacctgcttgtatctcagggggagtattcaaaagcatcatggcactggcagcatcaatgtcaggatcttgggagaagggctccatttctcttgaagaaaggtactgccccgggccanatgggttggacctgatgtgcttttgatatgcctgaaggacaggtgggaagtgtattgaacacgtgtgggtgtttgg

SEQ ID NO: 257202 - DNA, 742 bp, Homo Sapiens
  misc_feature (402)..(402): n is a, c, g, or t
  misc_feature (481)..(481): n is a, c, g, or t
gcacgagatcttattcctgtcatttactgatatgcacttgagccaagctgagcctctgcttctttggcctgtaaagtggagaaaagtattcttcattgtgctctcatctcatctattgcatgagtcagtacacataaaatccctagcacatagtagattctaaacaattacagcttcctttcctaatcttacaggtttttgactacttaagatcccatgttcatcatttttggtactcctggatagacttagaaggaggtaaaggtggagggaaatatcaagtctttttctaatccaatatgggctctatctttacttttcacaggggtcatcctctatttattatgggtacaatttttctttgtcctattccatcactttggtgcttaacaggaagctcanaatagactgatcatggctgagacttagctccttcgctgtgtaaattttcacactgcacatgttccaggttcatcctctntcatttaagtttcatctttttgagggaagtgcaatttcatcagaatacctacataaatacaattcacatgtcatagggaaatccaaaggcttcaatttgggggctaaatgggttcatccctgagcaagggtaatcagacatggaaacttttattctacccccagaataggagttctgggctctggacattactgaggaattggtcatgccttcttaccaattacctcgatttacaccctctctttcagaaaggattgagga

SEQ ID NO: 257203 - DNA, 884 bp, Homo Sapiens
  misc_feature (102)..(149): n is a, c, g, or t
gcccggactccctgtgccacgtgcctagacccagactaccccggaccctgtgcctgtcgcggccccagccttgacctgtgtgacttgagcgagagggaggannnnnnnnnnnnnnnnnnnnnnnnnnnnnnnnnnnnnnnnnnnnnnnnaccttggctaaggcgagagtagcgcacgccagcgccgccttctagactcgagcagagccggagagagagacgagagggtgggaggtcccggagtaacttctctccaggctgaagggcggcgaggcatagtcccgagaagtcaccaaggccatctggagactcctggctttctgaactttgcgcgttaagccgggacagctgctttgctgcccggagagtagtccgcgccaggaagagagcaacgaggaaaggagagggactctggcgtcccggcaggcgagaggcgaggctgagcgaaagaaggaaggacagacggacctgtctgtcagagttcggagaacactggctcctcagccccgagacacaggcctcagttagggacgctcggcgccccaaatctcatcagttttattgcctgctcggttatatagaaaaatacaaaaaatctgcattaaaaatattaatcctgcatgctggacatgtatggtaataatttctattttgtaccattttcttgtttaactttagcatgttgttgatcatggatcatactccccttgtttctttgggtgagaagggatcgcagtttggaaactccggcggctgcgtgcggggtttcagtcccagctgtaggcttgtaaatacccgccccgccaaaccgcatagagaacgtggcagcaagctgagggtctttgtttgggtttattattactggtatttttgtttgtaagttaa

SEQ ID NO: 257204 - DNA, 488 bp, Homo Sapiens
  misc_feature (43)..(52): n is a, c, g, or t
tgggctagagtgaccctcctgctcaccactacacctggctaannnnnnnnnnggtagagacagggtttccctatgttgcccaggttggtcttcctactcctaggctcaagtgctccttctgtctagcctcccaaagtgctgggattacaggtgtgagccaccacacccagcctcaggtttcttgtgtatattcttcaatagacagcacagacatacaatgttacttaataaatatttgctccattaattattgactaaataattattgtgcacctgctaagaatcaggtactgtggttagcttaatctgtaatatcaaaacaataacatttctcttttttctcttattctttctcaagattccactagtctttccttcagtttaccattactagatgtcctttttcactcagttgagcctgcagctgaatagcagttaagctacctcattaacatgattctgaaatacaagggaataatgacttttct

SEQ ID NO: 257205 - DNA, 1062 bp, Homo Sapiens
gctcatcctagtaaatagaaaagccaggattcaactccaggggctgggtgcagaactgctattcttcactgcttcaccaatcagcagctacccaaggcagaaaactttttcatccttggctccttcattctccctgtcaccccagatcccctctacatctagtcagagaataggtcctgtcaattccaacttctctatatggctcctctcaggcatgtgcccttaattggcctaattctctaatacaccttccctctacatgctcactccctcagatcattgctttatcacgtgttacctgggttgctattacataaagagcaatctttctaaaatgaggatcttatcacttcacttccacactaaaatgtttttcctggggaaccacactccttagcaatctgacccatcagaccttccaggctgtctcctgcctgctccctaaggctccagccacacagaattatcatgggcccacacacccaccaaatcctcccatgcctttgcccatgttgtctgggatgcccttctctcccttctgtctacatcaagcatcagactgaatatccctcttgtgcggccttctaaaacctcccgtccaaagcgaaatatattgccctctatttatacttttacagcatttggcacacaagtacagagtagtagctttttatcacattctctgataattatatagatatggtatttcttagctctctctccaactggctaataagttgctttttgtctgagtgcctaattttgtgttttgtgtctgagtgcctcagttcctcaaaaaaaggttttttgattagttcattattcatttgaacatggaaattatgctcactagtggcaaatgcccctaaccgtattccagaagctaggtgtcatgtttgcaataagatatattatcccttctacaagtcaccttttatttcaggcatttgtaaatgcccattaataaagtatggttcataaattttaccttgtaagtgcctaagaaatgagactacaagctccatttcagcaggacacaataaatattattttataatgccg

SEQ ID NO: 257206 - DNA, 800 bp, Homo Sapiens
aagacatggcttaagcgtgaacaaatctccaaaaatgacccaactgaaaagatgagcaacttcggacccattgtccacacaaacagcccatcgagtactggggctgcaggagcagggggagaggccggatagctagatatttccaaatggcataaaaatgacaaagcctcaaattcttgacaacccccccaaacacacacacaataccctaaagcttatcaaattacagaaaaccagggataaagagaaaaaatcaaaagcagccgcagaatacatacatgatgactatcatgtatcagtcaagagacagaaacatttaacacgaagaatgattcaacaggaacagagggttccactaacatgtaaagagacttccgagaacagaggcgctgaggcctcgggagaacctccaccgccagaactgagacaacaaacccacaagcgttgagtctggatcttggtgagaacctcagaaccccacgtcggctgagacacagctctgacctgagtggggctatgatgtgccgggtggtgcagttggccaaggtgcagcaggccaaggcctgaagagcaggaagcccggggcaggagtgccagcgaagactcacccagaagctctccctggggcaggagggaggcagacgccctgggagctggacagaggcaaggaagcttagcaggaatccttcccaccgtggtgaatgaacctgggtgttgctaaactcctgcagactgtcactgagagcccccgcccccaccatgaggctggcaggcacacaccacggaagccaggaaaagca

SEQ ID NO: 257207 - DNA, 483 bp, Homo Sapiens
  misc_feature (271)..(271): n is a, c, g, or t
  misc_feature (347)..(347): n is a, c, g, or t
  misc_feature (435)..(435): n is a, c, g, or t
atactaaggcatactatactcttccccatctgcaaaacaccattatattttaaataatattttggagaacaaaggtactttttataaataaagaaggcaaatttcaagaaaaaaattgaatgaactttaaaaacctattaaagtacttgaaattaatcaatatatattatatagaagtgctatagagtacgtagcaggtattaaaatgtctctgtggatgtaaacctacatttaagtaacttgcatttaaaatatatgtgtatgtatacanttgttgaaaactgttgatatttaaggggcttttttacatttgataacagcaaagacacaggaaactttttctttgntagtgtactgctataaaagaattttaaagaatattactctaggaaattatttgaataggtaatgtataaatagagttttagtgatttnttattaagcgaactattgaaattattaataccgcttaactttctttaa

SEQ ID NO: 257208 - DNA, 371 bp, Homo Sapiens
tggagacacatggccaatcagctaattggatgttgctattgaggaaaaacagaaatgattcctgtcctttggattgtctcaactgtgaagagagaaatatcccaaaagacaaggaaaggccaccccaacaaggttgtatttagctgtcctacagggaggtggtcaccagaatgcagttgtggaacaaatatatgtgagttgaccacatggaggaactgggaggaggtgtagaactggaaactctgttgagtttgagtaaagtttacttctgttatgagaatgttaaatctataatcctagaattaattaaattattgtatatggagatgacaggtagtggattgattattctcctgtagataaccatttgt

SEQ ID NO: 257209 - DNA, 463 bp, Homo Sapiens
  misc_feature (13)..(13): n is a, c, g, or t
  misc_feature (37)..(37): n is a, c, g, or t
  misc_feature (48)..(48): n is a, c, g, or t
  misc_feature (75)..(75): n is a, c, g, or t
  misc_feature (92)..(92): n is a, c, g, or t
  misc_feature (117)..(117): n is a, c, g, or t
  misc_feature (150)..(150): n is a, c, g, or t
  misc_feature (447)..(447): n is a, c, g, or t
gtggcaggaaaancccccggtaaaacctttccacccnagaaacccccnatccctgggtgcctcacccttctctcnccctaacctccagtttncccattaattggagacacatggccnaatcagcctaattggatgttgccctattgaggnaaaaaccagaaatgatcccctgtccctttggattgtcctcaactgtgaagagagaaatatccccaaaagacaaggaaaggcccacccccaacaaggttgtatttagctgtccctacagggaggtggtcacccagaatgcagttgtggaacaaatatatgtgagttgaccacatggaggaactgggaggaggtgtagaactggaaactctgttgagtttgagtaaagtttacttctgttatgagaatgttaaatctataatcaaaatgcatgctaaggtaacatatcaatataatttnctttactataaccggc

SEQ ID NO: 257210 - DNA, 399 bp, Homo Sapiens
  misc_feature (17)..(17): n is a, c, g, or t
  misc_feature (24)..(24): n is a, c, g, or t
  misc_feature (36)..(36): n is a, c, g, or t
  misc_feature (44)..(44): n is a, c, g, or t
gacagggaccctgtggncccaaancgttcccacagntccccagnaattgaacaaggaagacgtcgcctcagggagttgtttcctggtggatttaagaagccaaagccaggcacctagttcctgtgaaagtccatacctgtgattaagaggtggtcctgtacccatcccatgtggggtgtaagggtcagtggtacaagtcaaattggttatatcctagctgtcccacagggaggtggtcacccagaatgcagtcgtgtaagaaatatatgtgagttgaccacatggaggaaatgggaggaggtggagaactagaaactgttaagtttgaataaagtttttttccgttatgagaaagttaaatccataaagaaaatgcatgctaaggtaacatataactat

SEQ ID NO: 257211 - DNA, 471 bp, Homo Sapiens
gcggctacaactccggcggcggatacggcggcggcagctccagcggaggccacaagtcctcctcttccgggtccgtgggcgagtcttcatctaagggaccaagatactaacaaaaccagagtaatcaagacaattattgaagaggtggcgcccgacggtagagttctttcatctatggttgaatcagaaaccaagaaacactactattaaactgcatcaagaggaaagagtctcccttcacacagaccattatttacagatgcatggaaaacaaagtctccaagaaaacacttctgtcttgatggtctatggaaatagaccttgaaaataaggtgtctacaaggtgttttgtggtttctgtatttcttcttttcactttaccagaaagtgttctttaatggaaagaaaaacaactttctgttctcatttactaatgaatttcaataaactttcttactgatgcaaactaaa

SEQ ID NO: 257212 - DNA, 272 bp, Homo Sapiens
aaagtgggcttcgagtcagacagtggtattggctccagagcatctgtataattccagtaaatcatctggtttggattgtaatgaaccccccaaagtgtgttactcatagccgaagaaatttctaagacccttaaatgattactgtcaataatctgagactatttgcattgcctaaaatctgacaggagatctccatgtggcagttccagctaataaattatatttctacttttagtttctacgaagctactttaaaaccctgcaattttttt

SEQ ID NO: 257213 - DNA, 2006 bp, Homo Sapiens
ggagggaaggagttaattacatgtattgattaatggatagggtaaacagacgaaaatcaataaacctgagccaggctgccccagagtgctcccatgcctgggctctgtctgctaagagggtcagaggcagtctttcctggtcagtgccaggatgaagccagtcctgggccagggtgctcaggcctccagatggattgccctggtgggtgacatcagcatgggctacagatcagtcctaggatcccgctcatcactcgctattggcctcggcctcactgcctgtgcctgcccagccatatgggtgcaatggcctgcctgagaggagaggacactggggagggggagaaggcctggcacagtactggggaagatggaagcagcaaacaaggctgtgaacacagccaggatgcaagccagtggagccagtgcagagcacacatgctcagatgatgttgttctcctggatcttctctcccaagtaaaagcgggtaaagaggaaggggctcaggtcgatggtctggaacctgcccttcagtaccatctctgctacagctcgcccaatgccaggggcctgctggagcccgtgaccactgaagccagtagcaaagtacatgttgacaactagcgggtgggggcccaccacgccattctggtcaaaggtgttgtagtcgtaatagccggcccaggcgctctgaaccttcagagtctcaaaagctgggaccctcagggccaaatggggccacaccttgtcctggaagaaatcatggtccacttccaggttcgccgggtccggttcttcctgctcagtggggctacgaccacctaggtagttgctacctaatccttcccggcgaaaataggctccactggtgtctgcaacaagcggagtctctaggcctggtccctgggggcagtgccacacatacacataccttttcctcggctccacaggtagcttggtgccctgcagggtgccaggcggcccctctccaacaccagccagtgctgcgatttgcgcagaccaggctccggctgcgttgatcacaatggcgcattccacaggctggtactccaggctgcggtccatcttcacatggacttcatggatccttttcaagaccaccgctttgtcatctgtggtcaacatgcgttgagatgaagagacaaaacgtgtcacctctccctggcagaaaaggactcccaaggactggacctttcgccgaagcccctggagcagacaccaggggtcaaaccaaccttcgtcctccatcccataagacgccaaagccactccctctgtgtttatccagggaaacttgttccgaagctgatcaggagacatcagagaaactttggctccctcctgcctctgcactttcacgttgctctccatggctgcagcatccttttctgaagccagcaagaggtagcccgaggggttgaaccggaggtccaggggaggagcatcgactacggccaggtactcattgatgttccgtagaaagctggctgaaaagagggagagctggatgttctcaggcaatgagaactgctgacaaatcccacctactgagagcccagtggaggcctgtgaatacgtgtggtcccgttccaccactagcactcgaatagcacctcgtctgctctccagcttcttcagccaataggccacagacaagccaagcaccccacctcccacgatcaccacatccgagtgctcgggaggcaggtggctggtgtcttgcagtagatcacaggaccttccaggcaggatcgacttgatcttcttcttaatctcagacacctttccatcccagtccagagaaaagcctcctctgcgcgtgcctggcctccgggtcaagaggccccggcccatgccgtgcggcagaaccctccgaatcatagcccctctgagcccggaccctctgaaagctgcactgctgcctcgctattatcgcagccgtcactgctccgcgccaaacgccattcagacgagcgcgccaatt

SEQ ID NO: 257214 - DNA, 1540 bp, Homo Sapiens
  misc_feature (1304)..(1317): n is a, c, g, or t
attacacagatgcacagctggacgtgggatccacacagctcagaacagttggatcttgctcagtctctgtcagaggaagatcccttggacaagaggaccctgccttggtgtgagagtgagggaagaggaagctggaacgagggttaaggaaaaccttccagtctggacagtgactggagagctccaaggaaagcccctcggtaacccagccgctggcaccatgaacccagagagcagtatctttattgaggattaccttaagtatttccaggaccaagtgagcagagagaatctgctacaactgctgactgatgatgaagcctggaatggattcgtggctgctgctgaactgcccagggatgaggcagatgagctccgtaaagctctgaacaagcttgcaagtcacatggtcatgaaggacaaaaaccgccacgataaagaccagcagcacaggcagtggtttttgaaagagtttcctcggttgaaaagggagcttgaggataacataagaaagctccgtgcccttgcagaggaggttcagaaggtccacaaaggcaccaccatcgccaatgtggtgtccaactctctcagcactacctctggcatcctgaccctcgtcggcatgggtctggcacccttcacagagggaggcagccttgtactcttggaacctgggatggagttgggaatcacagcagctttgaccgggattaccagcagtaccatagactacggaaagaagtggtggacacaagcccaagcccacgacctggtcatcaaaagccttgacaaattgaaggaggtgaaggagtttttgggtgagaacatatccaactttctttccttagctggcaatacttaccaactcacacgaggcattgggaaggacatccgtgccctcagacgagccagagccaatcttcagtcagtaccgcatgcctcagcctcacgcccccgggtcactgagccaatctcagctgaaagcggtgaacaggtggagagagttaatgaacccagcatcctggaaatgagcagaggagtcaagctcacggatgtggcccctgtaagcttctttcttgtgctggatgtagtctacctcgtgtacgaatcaaagcacttacatgagggggcaaagtcagagacagctgaggagctgaagaaggtggctcaggagctggaggagaagctaaacattctcaacaataattataagattctgcaggcggaccaagaactgtgaccacagggcagggcagccaccaggagagaaatgccctggcaggggccaggacaaatgcaaaacnnnnnnnnnnnnnnctgagaacagaattcttgctctgtcccccaaaagttgaaaggccccagggggggtacaatccccccttacactgccaaattttttgccccccccgggggcacaagcgcgcatctatgctgtgtctcctcgccgccccccatattttaccgccctttatcccttccccccaatcgtcgtttccatatacgccgcgcccccgcgcgccaaaacggtcttaagtcc

SEQ ID NO: 257215 - DNA, 586 bp, Homo Sapiens
actttccctttcgaattcctcggtatatcttggggactggaggacctgtctggttattatacagacgcataactggaggtgggatccacacagctcagaacagctggatcttgctcagtctctgccaggggaagattccttggaggaggccctgcagcgacatggagggagctgctttgctgagagtctctgtcctctgcatctggatgagtgcacttttccttggtgtgggagtgagggcagaggaagctggagcgagggtgcaacaaaacgttccaagtgggacagatactggagatcctcaaagtaagcccctcggtgactgggctgctggcaccatggacccagagagcagtatctttattgaggacgccattaagtatttcaaggaaaaagtgagcacacagaatctgctactcctgctgactgataatgaggcctggaacggattcgtggctgctgctgaactgcccaggaatgaggcagatgagctccgtaaagctctggacaaccttgcaagacaaatgatcatgaaagacaaaaactggcacgataaaggccagcagtacagaaactggtttctgaa

SEQ ID NO: 257216 - DNA, 910 bp, Homo Sapiens
caagtctgagagtcaaaatagaaagccctccagcccatgtgtatctccttttcagattgatgctttgacagaagtggtggctgctgtaaaggggaaaattgaagtctacctggatggcggggtccgaactggcaatgatgtgctgaaggctctggcccttggagctaagtgcatttttcttgggagaccaatcctatggggccttgcctgcaaggtgagagtggcaaagcaaaccagcaagaagatacagagcttctcattcatttctgtgctttcctgtggttcattttccaagcttagacattttcaagcccattgcaaatgttcaatagctttcatcccctatctttgtctctgtgctttcctttattcccaaggtaattctcacttcacagataatccccatctttcccattatagctctgactacatctagaatttatactagtggatggtcagaatgttcctttatgtctctttgtgtctctgtctgtctgcctcgggagcagggtgaacatggtgttaaggaagttttgaacattttaacaaatgagttccacacttccatggcccttacaggctgccggtcggtcgctgagatcaatcgaaacttggtccagttttccaggctgtaagaaaaaagggccaataaccagactgctgaggttgcccacaggaggatcacaaactcacagcacagtgtgtgatgctgtccttcctggaccccattctgtccggaggctcatggcccatatttcccacatttctaataccaccacccctgtgcttcaggccctccaaacccctgtgttccccaaatgttccatgcccttctttgtatcactgactattatatgttgctctcttgcctaaatcttcctctgaagtaaaagatctcaaaaggacagat

SEQ ID NO: 257217 - DNA, 476 bp, Homo Sapiens
ccccttgaggctaagtgcatttttcttggagacgcaatcctatgggcccttgcctccaagggtgaacatggtgttaaggaagttttgaacattttgacaaatgagttccacacttccatggcccttacaggctgccggtcggtcgctgagatcaatcgaaacttggtccagttttccaggctgtaagaaaaaagggccaataaccagactgctgaggttgcccacaggaggatcacaaactcacagcacagtgtgtgatgctgtccttcctggaccccattctgtccggaggctcatggcccatatttcccacatttctaataccaccacccctgtgcttcaggccctccaaacccctgtgttccccaaatgttccatgcccttctttgtatcactgactattatatgttgctctcttgcctaaatcttcctctgaagtaaaagatctcaaaaggacagatcattaatgactggaa

SEQ ID NO: 257218 - DNA, 388 bp, Homo Sapiens
gctctgttgaccaggcttgggtgctctcctgcagggcattgcaatctttaggacaccttcattacccctcctaaaaggagattttataatgagcgccaaccagctcaaacaagttaggatctcctaacatgtctggtgaaaatacaggagtatttttcatcatctctggaaaagttgctatcatgtccttcaataacccagtctaaccatgtttttccagtggaaatgattcccggtagaatgtcctatgttccttttgcacatttctccttacaaacatcatctcatttaatcctcaccacgctacgtgatctatgcaaggtcccccagctaggaagtagcaaagatggaatttgacccaggtctgactccagaagcactttcctct

SEQ ID NO: 257219 - DNA, 1079 bp, Homo Sapiens
gacactcaagtccagatggagactccaggggggtccttctgcccctctggccagccccacccagcactccccatcaccccatgtaagtgtgtatgccagggctgagctgcctccaggctcacccactgcatctttgccccaaataggtctttgtccagtggtactttgttcatgagcagcacaggccatcttgttggacactgtcactttgggccttgccaggtctcacagaatcacatcgctgtatttattgtataatattgtgaatattggaagttttgagtgagtgctgtctagaaggttttggagtgtggatgctggtccaagaaagaagatgtgccctggcctgctggaaagattgtgaattctagagatagagccgttagcatccatctcctccctgtaactcttaggaaatgcatcaaggaccattatagaaaggatcccctgacctaaggatgaaatcgacctagggttaatcatgacagctgcatcagttgtattggatgcaagtcaactctggaggtgagtgcccgcaagcagttcccctgctttgaaagaagatggtcagcccgctgcctccccagcggccacagctcctttgagtgtggggggtcacagccaggatgtattcctgacaataaggatccttttattttcatttctgcataatgaaagagcctttcgatttattagaagtggtttttcctccctacatctttaaattcttggttctctttagtcctcatcccttgaatggacttgtcagctacctccccaggaggagttcagaagcttctgttggccatcacttgagtagatgacaagctgtaaggtatctgctgctaacgtggctgcttctccgagagcacattgaggtccagacagatccaaaccttggccctaaaaaatgtgtgctgtaaagttacttgatgtatatttattataattatttatggttgcatttaacaaacttttcattcaatctgatgctatttacaccatgctgtgtaaaggaagctcactaaaggaaaaaagtcacaccaataaataaccttcatctaattttgatttaaaaa

SEQ ID NO: 257220 - DNA, 454 bp, Homo Sapiens
cggaacggcagggccgcctttaggcttacatccctggaactcccacctccacagacccgtccgggtgctgaaagtccacggatgctatccctggtcaaatcagaggcttgtccagccggaagccctgagggcagctgttcccactggctctgctgaccttgtgccttggacggctgtcctcagcgaggggccgtgcacccgctcctgagcagcgccatgggcctgctggccttcctgaagacccagttcgtgctgcacctgctggtcggctttgtcttcgtggtgagtggtctggtcatcaacttcgtccagctgtgcacgctggcgctctggccggtcagcaagcagctctaccgccgcctcaactgccgcctcgcctactcactctggagccaactggtcatgctgctggagtggtggtcctgcacggagtgtacactgttcacggaccagg

SEQ ID NO: 257221 - DNA, 1036 bp, Homo Sapiens
  misc_feature (495)..(495): n is a, c, g, or t
  misc_feature (530)..(530): n is a, c, g, or t
  misc_feature (541)..(541): n is a, c, g, or t
  misc_feature (569)..(569): n is a, c, g, or t
  misc_feature (572)..(572): n is a, c, g, or t
  misc_feature (578)..(578): n is a, c, g, or t
  misc_feature (582)..(582): n is a, c, g, or t
  misc_feature (587)..(587): n is a, c, g, or t
  misc_feature (608)..(608): n is a, c, g, or t
  misc_feature (612)..(612): n is a, c, g, or t
  misc_feature (618)..(618): n is a, c, g, or t
  misc_feature (654)..(655): n is a, c, g, or t
  misc_feature (675)..(702): n is a, c, g, or t
  misc_feature (704)..(704): n is a, c, g, or t
  misc_feature (716)..(716): n is a, c, g, or t
  misc_feature (729)..(729): n is a, c, g, or t
  misc_feature (736)..(736): n is a, c, g, or t
  misc_feature (756)..(756): n is a, c, g, or t
  misc_feature (758)..(758): n is a, c, g, or t
  misc_feature (778)..(778): n is a, c, g, or t
  misc_feature (789)..(789): n is a, c, g, or t
  misc_feature (796)..(796): n is a, c, g, or t
  misc_feature (817)..(817): n is a, c, g, or t
  misc_feature (848)..(848): n is a, c, g, or t
  misc_feature (874)..(874): n is a, c, g, or t
accccaccctcaaacccccaaagtgcctaagagtgaagacgaagatgccatggagacggcgtcttcagtgaacacctccccaaagatgcccggggactcgggcctatatcatcccattgatcttagtccactcgtagatgtcctgttcgcacactatgtcagagttgatgaggaggtatctgtcacctacacagaaatgcttctgacaggcggcgcacttgaaacattccaggtgatacactttgtctttcacccgcattgtcatctcataggcacgaatccgcttgtcacaggatgcgcagagaccgtcttgcccaaaaagcctgagatagtctctccggcagagcttccggcccagtttgtagtagaggcgccgccccacctcacccagccggcagccacagaggtcgcagctcaggcagtcctcgtgccagtactggtcgatagccttcaagaagtagcagtccccaatgttctgctagcagccgccgcatntcagcagggatggggttatctgcagcactttatcnactttttcttnttaagggtccaggttcttcttttcaatnacnaagaanattnataantaatgcaaaataccgagcagnaaangaaatncatttttagaacaaaaataaacagatgccagagatnnaaccccctcgggtgatcggnnnnnnnnnnnnnnnnnnnnnnnnnnnngntcctgcgcctcngcttgctccggcntccgccngcgagctcgcccctccgcgntnaagaacagtcaccgcgaacnccttcggcccnggtcgcngcgcgctgctcgccgccgagngcagagagggggcggcggcctaggggcgggnaggaaaccgtgcgtctctctccgggnttcctcctatctcgggaaggtctattttcgctcagcttccctctgtctctggtttcatttcctttttccttacctgcctctccactagctactgcaagttcaggttgaaaaatatcttcttttcagagcagttgttactaaaagaaaatgagaggaaccctc

SEQ ID NO: 257222 - DNA, 386 bp, Homo Sapiens
tcatttattcctgcctatccaattcttccctatatttcctggaccagctaaagtccagtgtttccagagacttttgaaagtcaacttacactttttccttcttcattcacaaagctcttcttccctgggccctggtatgtatgcctttctctcctactgtctaatagcacctcgtaaattgtcaatgaacttttctaaggggtattcttgaattcccaactagattgtgagcttctggaagacaaggctatgtctttgattgttgtctcccctaccacagcccagtactttagttacagaaaataataaatatttactgattgattgactttcctcttgtccactagctttaggtttgggggccaaattctaccctggattttgac

SEQ ID NO: 257223 - DNA, 508 bp, Homo Sapiens
cacatgcttaccagctctaggccagggcagatgggatatgacgaatggactgccagctggatacaaggatgctcaccaagcaccaagttctcacaagttattttatgtgactttgcaggaactgaggcattatatctgaggacaccaggggaaaagtgtggcatctcagggaaatacagccctgggctgtgtctacacacaccatgagagtgctgatgggggcgcaatagtcttgaaaatgtataaagtgtccaggaatggaagtgctctttgattcattattattttcttccttcatattcccctcccagagtctcctatctaggacatcagcattctcacacaagcctaatggcttatctgagtaagcagggcttaagaaattcactttctttgatactccagtcttgccttcctaaacactccttgatcttgcctacctctcccctaccacagcccagtactttagttacagaaaataataaatatttactgattgataaaaaaa

SEQ ID NO: 257224 - DNA, 382 bp, Homo Sapiens
acagcttgtccaagagaaccagcaatttcctggagttcagataactgcatctgacctatggggaaaagttcactttagcattctttgcattgctccatcacattatagaattctaaggctttctagtcttacctgagcaaaacacagcagtcatattaatgaggggaggaaaaggaagaactcaggagaatatattttaagttggaattaaaggaaaaacaaaggtagataaaacagatacaagaaaaacgaatgaaaacatagtgggagaatatatgtctcttaatttaatactttctcctaccaatctttgtttaccaatgaagcattatcatgcatttctattatcatgtgtcattttaaaaaataaagtgttaatttt

SEQ ID NO: 257225 - DNA, 775 bp, Homo Sapiens
atgtagagagagcgttgcctcttgagcatctcagattcctcggtgcttcctgtgcacgaagaatcagcaatgttctcaggaagttccagctccttcctactcagcagcctcttgcgctccaagagggcagagtccagtaggtctccggctcttggccggtgaatggagtttctctccagggaagcttctacaagctctctcatccctggacttgcagtcatctgcaatgtcttccagtggaggtgcttgcgtgtggattatgtacaggtaggagggataggctgagcgagggtagcgcttcacacagggtggggtgcccgtctgcatgtggatgagcgtggcccccaggctgtagatgtctgctttggttgaatggcccctgcacaggatgacctctgggctcatgtaaatctctgttcctcggaggtccttaggaaaagtggacatgaaaacaatgttgctaggtttaatatcatgatggatcactttcctttgaagtgtagaaaatcaagtcccttgagaacatgctttgtcacccaaataatttcaaattctctcattggtccacagctctccagtttctccagaacaaaccctccctcgcctgcttccataaagagatggacagtttcaccccacaggactgcgccatacagctctgcgatgttctcgtgccggaagcaagcctggatttccacatcagatggcttaaattgatctactgggatctagaacacaaaaatacaagcgagattctaaataaccccaaagtcat

SEQ ID NO: 257226 - DNA, 1257 bp, Homo Sapiens
  misc_feature (1198)..(1198): n is a, c, g, or t
  misc_feature (1225)..(1225): n is a, c, g, or t
  misc_feature (1247)..(1247): n is a, c, g, or t
gtagcgaggcctgggtggcgaattcggcacgaggctcagatgcttcacttctttggaattccaggactctcaatggggggacgggatgcctggcctaagcacctggagcaggggaccccatatccactggtagccacctccccattgctgtggccccctgaaatctcactcagtgctgttgctccatctactgccctaatggggctcttttcccacctcctgctggtttcccgagggaacttctgaccctggagtccatgagggctcctttcctttttgaccacgaccttggccccagctctgcactctctggaataagggcccgatgcagcattttcttgcccagtgtggcaagacctcagaaaaaccagtcaattacgcctaagatcattttgctgtccttaaaccccccaggttccttcttgcacaaatccactctgctgcccaccttccctggcattttaaacagacctaccccaccccaactcagagttaagcatacatggcaatgctgaaaataaacaaaatccactgaggcttcccaggccatttaaagcctggagtaccagcgcatatcatctcatggggtccagagtggagtccaggcttctctgaaaccagggctgagcatatttccatagccaaggaggtgggactccctggagctatctgtggtcttagggaaggatccagacatacacggctttggggtacaagctgtgatcactgatcaataaattatctctagattggtccttgtgaggggagttttaagaatccagaacatcttgctcttgatcagcacatccaaaaacaccaagacaaacatccagtggagcagaacctctcctgcctcgggagttctgaccgggttccccagcagggtgttaagcctctgtctctggccctaccagcatccaggttccactttcctaggagagagtggagatgggaagacagggaaaggaaggcagcaggaggccacaagcccaccagggtcttcatgtcaagagagggagtaacatgtcttctcatttgcccacggacccaacctctgttccagggtgccccttcattcattcacagttttaacacaagctcccctggttccagccaaattgatcttcccagtctttgtcctttacccatttccaagtggtttgccagcccttgtttcatccaagtttttaagttcttncaccctgtttttaagggatgttccaangggtttggggcttcagtgggtnattgtacacc

SEQ ID NO: 257227 - DNA, 529 bp, Homo Sapiens
tctctggccctaccagcatccaggttccactttcctaggagagagtggagatgggaagacagggaaaggaaggcagcaggaggccacaagcccaccaggtcttcatgtcaagagagggagtaacatgtcttctcattgcccacggacccaacctctgtccaggtgcccctcatcatcacagtttaacacaagctcccctgctccagccaaattgatctcccagtcttgtccttacccattccaagtgctctgccagcccctgttcatccaagttttaagtcctccaccctgttctaagagactgttccaacggctctgggcctcagtggtcacttgaccaccattgtctcagagctgcccactttgtgtgtgtcacatgctgcctgagtcacatgtacatcttatttctgcctctagttttgtaagctcctggagggcggataacatcttatactactcttgtattctcatggacctagtgcagtgctgggcacagagtaggtgctcaataaagacttgttgaataagg

SEQ ID NO: 257228 - DNA, 535 bp, Homo Sapiens
  misc_feature (97)..(150): n is a, c, g, or t
gtgcaatagcaattaaaatatatcaaatcgcactgaatactcaacaccagagctctaatgtgggaaatggttctcctttccctctcaataaatatcnnnnnnnnnnnnnnnnnnnnnnnnnnnnnnnnnnnnnnnnnnnnnnnnnnnnnnatgaattatttatgattaaaccacatccagaatcttcgttttctgtgaaaaggaagaactagaaaattgctttaaatcttgaaaatacaaggaatgttttaaaatataaaacaaagccaagttaaactgtttacactgatgtgctataaaagcaccaaaaagaaactttactgtagagttacaagtacatttatatatatatgttgctgcatcacttgtgtagttaaattgtatttcaaaacagtgaaaaaattgacatgtatatactgttcattcttgtttatattaagtcttgttttaaatatgtattatgtgtatatattgtttgcagacattattgttcatgccttagaggattgtagcattttattttcgtctgaaggta

SEQ ID NO: 257229 - DNA, 400 bp, Homo Sapiens
gatcaggaacattagccaggaactagggaaattttaagttggctttagtcagtcggtagtgtgtttaaaccgtaaactgtctgtaggccaatgttgcctcccctttcctctctgatgaagtagaaaaataaaaggatgaggcagagacaacaaatgtaaataatcctctagtcacatgctcgattaaggaactattagcatttttatactattttaactctctccacattttgtggccatcttctagaatagccttcttaaacaagctcctaaatcagtctcttcctcaccctacttgtatccccaatttcagttgtattccttgctctatattagcaaggcttctgtgcttatgaatgaatatgaataaagcagacaaacatatataattaaagtgaaa

SEQ ID NO: 257230 - DNA, 391 bp, Homo Sapiens
caggaattcggcccaagggaaggccaaaagatgaaatggaaaatcctcttctgctcagcatctgtaaagaacaatttgacactcgcagcctagaagcactcaggagggattcccaggccaagagaggcagattgttttcttaatgataaggttaatgtggtgaacacctagcttcctcctgatttgctgccatggctcacatccttgctgtcctcgagaactccccacaccaaattgctgttgcaggcacacatgcactcttgcgcttatcaacccttttctctttttctcagcaagaaggcttttgacctcaaatatattatattataacatgatccacagcttttgatttcaacttaatgtatgagatctggaattatttcagaagtat

SEQ ID NO: 257231 - DNA, 315 bp, Homo Sapiens
aacaaaggtttgtttccagaagaacttttgatgtcagtaaatcttcacaatcccacctgtacattttaacattcatggacttgtaatggtgatgctttggctaacagcctagtagatgtattttatttcaattttatgatactacaatttcaaagtaattattcagaactctgaatataaaatagccctaaaccttaaaggacaaatcaaatttgaaataagaatttaaatctttggacaagctgttagggcttagtgactcctcttctactttgagcttttaaaatactgactattcataatgaaggaaaatcc

SEQ ID NO: 257232 - DNA, 841 bp, Homo Sapiens
ggggggagactgtattcgggggcgcgagctgccccagtaaatggaaatgttttctaacatataaaaacctacagaagaagaaaataattttctggatcaaattagaagtctgtattatattgatgtctccagattcaaatatattagaaagcagccgtggagacaaccatcttcattttgggagaaataactaaagcccgcctcaagcattagaactacagacaaaccctgatgcgacctctccagattgtcccaagtcgattgatttcccagctatattgtggcctgaagcctccagcgtccacacgaaaccagatttgcctgaaaatggctcggccaagttgcaagtatggcagattttcgaaagttttttgcaaaagcaaagcacatagtcatcatctcaggagctggtgttagtgcagaaagtggtgttccgaccttcagaggagctggaggttattggagaaaatggcaagcccagggacctggcgactcccctggcctttgcccacaacccgtcccgggtgtgggagttctaccactaccggcgggaggtcatggggagcaaggagcccaacgccgggcaccgcgccatagccgagtgtgagacccggctgggcaagcagggccggcgagtcgtggtcatcacccagaacatcgatgagctgcaccgcaaggctggcacaagaaccttctggagatccctggtagcctatttaaaactcgatgtacctcttgtggagttggggctgaaaatttacagagtccatttgtccagctttatcaggaaaaggtgctccgaaactggaactcagatggccgcatcccaggtgagaaactt

SEQ ID NO: 257233 - DNA, 792 bp, Homo Sapiens
  misc_feature (602)..(602): n is a, c, g, or t
  misc_feature (633)..(633): n is a, c, g, or t
  misc_feature (650)..(650): n is a, c, g, or t
  misc_feature (673)..(673): n is a, c, g, or t
  misc_feature (683)..(683): n is a, c, g, or t
  misc_feature (697)..(697): n is a, c, g, or t
  misc_feature (719)..(719): n is a, c, g, or t
  misc_feature (728)..(728): n is a, c, g, or t
  misc_feature (733)..(733): n is a, c, g, or t
  misc_feature (742)..(742): n is a, c, g, or t
  misc_feature (762)..(762): n is a, c, g, or t
  misc_feature (772)..(772): n is a, c, g, or t
gtcatacctgtgctcctgctgggcaggcccggtgtgttcaccatggaggcagcacgttcagctgtgcctgcctgcctggttatgccggcgatgggcaccagtgcactgatgtagatgaatgctcaggccgttgtcaacccggatattatggggatggatttcagtgcatacctgactccacctcaagcctgacaccctgtgaacaacagcagcgccatgcccaggcccagtatgcctaccctggggcccggttccacatcccccaatgcgacgagcagggcaacttcctgcccctacagtgtcatggcagcactggtttctgctggtgcgtggaccctgatggtcatgaagttcctggtacccagactccacctggctccaccccacctcactgtggaccatcaccagagcccacccagaggcccccgaccatctgtgagcgctggagggaaaacctgctggagcactacggtggcaccccccgagatgaccagtacgtgccccagtgcgatgacctgggccacttcatccccctgcagtgccacggaaagagcgacttctgctggtgtgttggacaaagattggcagagaggtgcagggcncgtcttcccagccagggaccacccctgcgtntatacccaccgtcgctncaaccatggtccggcccacgtcncggccagatntgacccttccattntgttggggaactttgctggttntattaattnagggnccagcaganttgggttaatttaacccttnaattgggaancaagggtttaagaagggttg

SEQ ID NO: 257234 - DNA, 864 bp, Homo Sapiens
  misc_feature (456)..(464): n is a, c, g, or t
  misc_feature (549)..(610): n is a, c, g, or t
gggaagcagatgctgggagaacgcttgttcccactcatccaaacaatgcattcaaatctggctgggaagatcacgggaatgctgctggagatagacaactctgagctgctgcacatgttagagtcccccgagtctctccgctccaaggtggatgaagctgtagcagttctacaggctcatcatgccaagaaagaagctgcccagaaggtgggcgctgttgctgctgctacctcttagacaaggaaaaaccgattcaaaagccaaataaccccttatggaattcaactcaaggtttgaagacttcctagcttgtcctatggacctcaacaccaaggattacaaattgcaaatttaataggtcattttgtatcaaaaggtcaattatgaagcacctagaatttttcaattatacgaatatgttctttgggttctgctgtggcccagacagtgttaacnnnnnnnnnattgcgggttttgattttctcccccccgaaattggttttatttgatgaacccaagccttacgtctttcccattaaacaaaccaannnnnnnnnnnnnnnnnnnnnnnnnnnnnnnnnnnnnnnnnnnnnnnnnnnnnnnnnnnnnnttactcggggcgggccataccggggcgcccctagaacctgttttaaaaccaacccaccctggtgctaggggtcccccctatttacacttctcccaaaacccttttccctagcacccctattaccacccccgtgggtccgcactcaatagcgtattgtaaatcctcgcccaatcaacccgcccccctctagcagaaaccattcgggggcttgtccatgccactttccctcactacccttttctataaagtgatcc

SEQ ID NO: 257235 - DNA, 392 bp, Homo Sapiens
  misc_feature (362)..(362): n is a, c, g, or t
aaagtttcacaaatgctttccaaactgcaataaaaagaactttaataataccactaaatgtaaattttgtaacatcttgaatactttctaagcccacttttctgtcattacaaaaataaaattccaagaaatttctgctacattaatcttaagagatcaaaataacctatgtagttttctaggttaatgtaattcaagtaaagtggtactaaagaaaacacatcattttaataaaaaccaaacctgcttaagagacataacagagttaagcaaaagtataaactactataataagcagttgctgtagatttaatataagaggatttgttttcactggaaaaaacgttaaagccctttctttnttctggagctgaaacagtggcttgtgttct

SEQ ID NO: 257236 - DNA, 1645 bp, Homo Sapiens
  misc_feature (413)..(422): n is a, c, g, or t
  misc_feature (477)..(502): n is a, c, g, or t
  misc_feature (549)..(549): n is a, c, g, or t
  misc_feature (570)..(570): n is a, c, g, or t
  misc_feature (574)..(574): n is a, c, g, or t
  misc_feature (591)..(591): n is a, c, g, or t
  misc_feature (614)..(614): n is a, c, g, or t
  misc_feature (618)..(618): n is a, c, g, or t
  misc_feature (620)..(620): n is a, c, g, or t
  misc_feature (622)..(624): n is a, c, g, or t
  misc_feature (630)..(630): n is a, c, g, or t
  misc_feature (663)..(664): n is a, c, g, or t
  misc_feature (1548)..(1548): n is a, c, g, or t
caggaagtagggaactttgcacccaacatatacagcattcattcgctgagtacctgccaagagcgaggctaggtgcttggccctgcagggacctgagacatatacgagtcatgtttcctgctctgcagagctcccagcctggtgggggagacaggcagaggcacagccatctttcatacaagtctccaagtgccagaagctctacaatgtcaaggagcaatttattccttcagcagaggaagaaagaacccccaggagccacatttgctcagagccttgggagctgagaaacttctgataggaggtaaagtactgcaggcagctgtaaaaaatctggagtggagatggagcttggaggctgggcagcagtgcctggacagaggagtccagattatggaagtgttttaaaaggnnnnnnnnnnttatggggctaacatagtaccataacttttaatttttacaagttgggacatcacnnnnnnnnnnnnnnnnnnnnnnnnnngctaccacttactttcaccatcatttcacaaatgcaggaatattttnagtcctcagcctctccccganagancataatctccaaatgangggctctccttcacgggggctgngaangnannntcatgngatcctaattttcattttccacaaacccttaannacctccctcatggactggtcttttcttttttgtaaaacagggtgtgggagccacttggttgggggtcatcaagtggcctgatggatccagggcatgggaaggtggaatgagggaggaagaggcagtggcaagaggagagcaggttgggcaggtggtcggggtttgatcctgaatgcagaggcgacatggaagggctttgtgcaggggctgctgtgctctgattcacacattagaaagaccattctggaggcagcatggaggctggtcagttgaagaggaggcagagtcctgtgaccaggttgttgtgacgccttctgagggtccacccctcaatggctggtcctcagtgcccccatagccgggagccctggggcagggggactggcagtccctgcagtccttgccatgcaagaatgggaacaggcaggcctgggcagtactactcgtccccctggaagtagaatatggtgaccatgacgccttcgtcaggcatattggtgaggctgacgggctggtcagcttccatcgctgtgcaagaggaaccaaccggggcaggcggcagactcaaaactggtggtggggccactgtctgagcggatgaaggcgaagcgcttgtcctgctttctgttctcgctcaggtcagtgatgttaactgcctccagctggagtctggtctcatcaccagacttgacacaggacaggcacatcttccctccatggattcccaagaacagagcatgaggctcaatgggtaccacatctatcttttcttctaaattgacatttggtccttgcaagtatccggcaactagttggttgttcctcagatagaaggtcttctggttaacatcccagattctgaaggcttgcatcttgctggattntctcccagagggtcggcagatcgtctctgaatggaacaggaagaggaggagagtgattaggtgactgcggaggcctctgcagatttccattctgtga

SEQ ID NO: 257237 - DNA, 677 bp, Homo Sapiens
  misc_feature (131)..(157): n is a, c, g, or t
  misc_feature (212)..(223): n is a, c, g, or t
gagcgaggcctgggtggcgaattcggcacgaggggagagcccttcatttggagattatgttctttcggggagaggctgaggacttaaaatattcctgcatttgtgaaatgatggtgaaagtaagtggtagnnnnnnnnnnnnnnnnnnnnnnnnnnngtgatgtcccaacttgtaaaaattaaaagttatggtactatgttagccccataannnnnnnnnnnnccttttaaaacacttccataatctggactcctctgtccaggcactgctgcccagcctccaagctccatctccactccagattttttacagctgcctgcagtactttacctcctatcagaagtttctcagctcccaaggctctgagcaaatgtggctcctgggggttctttcttcctctgctgaaggaataaattgctccttgacattgtagagcttctggcacttggagacttgtatgaaagatggctgtgcctctgcctgtctcccccaccgggctgggagctctgcagagcaggaaacatgactcgtatatgtctcaggtccctgcagggccaagcacctagcctcgctcttggcaggtactcagcgaatgaatgctgtatatgttgggtgcaaagttccctacttcctgtgacttcagctctgttttacaataaaatcttgaaaatgccta

SEQ ID NO: 257238 - DNA, 575 bp, Homo Sapiens
tgacctttgaaagaaccagactagtaaatggtcccaaaacatggatttgttcgctatcccaaggtgttaactggtctttctagacttgatgtcctgttcaaataaaggacaggtttgattcagatagaatcaatcattgtcctgaccggaagcagatggcatactcaaagggtctaactgaaggatgtgaaatgaagggactatttacagatgtgtgggcaggcatagggaacaagcgatggtgaggcactgtgggactgctggccctaggtctacaacagcctgagctgagtgcagttactgaagcattgcaggagctggagctttgggagaggggtccccaccaggagccatggatgtagcagcaacacaggcaccaccaaaactgcacctgggcagggagtggggtggtggggaacaaataccacaacatctctctcctctaccttcaaaacggctgttggaacccctgcgttggcctcgtgccacatttctgccgcccggctgatccactagttttagagcagtcaggcaccgcggggtgctgcacatttttgttcctatagtgagcgcat

SEQ ID NO: 257239 - DNA, 1006 bp, Homo Sapiens
ggctggtaccggtcggtatcccgggatatcgtcgaccacgcgtcgtgtatgatgtcataatttaatctgttcatatttaacttgtgtgtggtctgcaaaataaacagcaggacagaaattgtgttgtttgttctttgaaatacaaccaaattctcttaaaatgattggtaggaaatgaggtaaagtacttcagttcctcaatgtgccagagaaagatggggttgttttccaaagtttaagttctagatcacaatatcttagcttttagcactattggtaatttcagagtaggcccaaaggtgatatgactcccattgtccctttatttaggatattgaaagaaaaaataaactttatgtattagtgtcctttaaaaatagactttgctaacttactagtaccagagttattttaaagaaaaacactagtgtccaatttcatttttaaaagatgtagaaagaagaatcaagcatcaattaattataaagcctaaagcaaagttagattgggggttattcagccaaaattaccgttttagaccagaatgaatagactacactgataaaatgtactggataatgccacatcctatatggtgttatagaaatagtgcaaggaaagtacatcttgtttgcctgtccttttcattttgtacattcttcccattctgtattctggtacaaaaagatctcattgaaaatttaaagtcatcataatttgttgccataaatatgtaagtgtcaataccaaaatgtctgagtaacttcttaaatccctgttctagcaaactaatattggttcatgtgcttgtgtatatgtaaatcttaaattatgtgaactattaaatagaccctactgtactgtgctttggacatttgaattaatgtaaatatatgtaatctgtgacttgatattttgttttatttggctatttaaaaacataaatctaaaatgtcttatgttatcagattatgctattttgtataaagcaccactgatagtaaaa

SEQ ID NO: 257240 - DNA, 389 bp, Homo Sapiens
aaaaggcagaagcacttgacggggctcatttgatgcagatcctctggtatgatgaggaagagtctctctacccagctgtatggttgagagacaactgtccgtgctctgattgctacctggattctgcaaaagcacggaaacttctagtggaagctcttgatgtgaacattggaattaaaggcttgatatttgacagaaaaaaggtgtacatcacatggcccgatgagcattacagtgaattccaggctgattggctgaagccagaatgccaatactggggctcagagctccagctacccactttggattttgaagatgttttaagatatgatgaacacgcatacaagtggctctccaccctcaagaaagtaggcatagtaagactcacc

SEQ ID NO: 257241 - DNA, 396 bp, Homo Sapiens
ctcttgcctacttccagtcccagagaatggggtgcagggaggagggtggagaagggtagaagaggggacagaggagggatgcgaggtcaagggtgtgggggagaagagcaggaccgataatgcagagcagctaattcctgaaaactataaagtgggtggctttgaaggcctgaagggctgtgcccaggtgtgcaatggagaaaggggtttgccagctctttgctgggcaccagggatctagggttctgagaggagtcccttatccaaggtggacccggacaaggagataacgaaaacataggtagcatccaacagcatgcagcactatggcatgccagcagccgtgctgggcgttttacagatctctttcaggctcagaacaaccttgcacatgag

SEQ ID NO: 257242 - DNA, 1345 bp, Homo Sapiens
gccagatcagcttatatagtacatgcattatagtcacatgaaatgttgtcttggtgctatcttcttggaggactatggcagcagctttaagactactaacaaagattattacacaggtcatcttatccacaggcaaactgctttgcacaactagaacattaacagttgtttttaagttaagttcagatgaaactgtcacaagacagacttgatgtattttatatatactgggaaactttagaaacagccatttattatttggattaaatgtgtgatgtgttctgcaatttggaatacacttttcagtttatagccagtctccacatgagcagattcataccattgcaatacacaggagttcataaataagattctactcaggtaggcagtaactagcaagttttgagtcaacaaagtctcagtattacatagttctcttcaccaaagatgagtctcccggatttcagcaataatttgactggctccttgtaatgcctttagcatatcagctgcttctttcctgcgctgtgccatgtcctcagattctgtcagaagatcatccaataaggatgatttatacagctggcctactagctcactctgaagagtgtctttcacatgattaaccaaaaaatgcattactgcctttggcacactgtcttggaatattctttctgacaatgagaaaatatgatttaatgagtcgttcaataacctcaacaatctcgctgttcccgagcagatagttttcgtgcaacaggaactggcacatctagcaagataacggcatgacctttttgtggactggctggcataattggaatgggttttgattttttcttctgctaataactcttcagcttttgaagttttcagcattcctctccagttgcctgtggttggttcttgaacaccatctccaaccccaccacctccagatgcaacatttttagtttctcttctgctgtcctgaattaacttgtctcgtgatacagctgaaggtaattctctggctagcctgtttctcctttgttcctctatattattgttcattagcccacaagcatcagcaaagtctggatgttttgtgttgatataagccagttcaattgccactaagttatggaccatttcatttgtaacaggcaaccttttacgaagaagacaagtcaccacttcaactatggcatcatgaagtttaggaaatcgtaacaattcctgatactgtaattgctacagtgctgaatgatcctttgcatttcctcatgaaccagttccacacagcggaggctgggctcttctagacgtttgatttgccgcttcaccagtaactcaaatgaaaccc

SEQ ID NO: 257243 - DNA, 1287 bp, Homo Sapiens
cctgggtggcgaattcggcacgaggggccaatagaaatggaacaaagtatcttgctaggactctaaacaggttactgatgcatcacatcagagattgtttaccagagttgaaaacaagaataaatgttctagctgctcagtatcagtctcttctaaatagctacggtgaacccgtggatgataaaagtgctactttactccaacttattaccaaatttgccacagaatattgtaacactattgaaggaactgcaaaatatattgaaacttcggagctatgcggtggtgctagaatttgttatattttccatgagacttttgggcgaaccttagaatctgttgatccacttggtggccttaacactattgacattttgactgccattagaaatgctactggtcctcgtcctgctttatttgtgcctgaggtttcatttgagttactggtgaagcggcaaatcaaacgtctagaagagcccagcctccgctgtgtggaactggttcatgaggaaatgcaaaggatcattcagcactgtagcaattacagtacacaggaattgttacgatttcctaaacttcatgatgccatagttgaagtggtgacttgtcttcttcgtaaaaggttgcctgttacaaatgaaatggtccataacttagtggcaattgaactggcttatatcaacacaaaacatccagactttgctgatgcttgtgggctaatgaacaataatatagaggaacaaaggagaaacaggctagccagagaattaccttcagctgtatcacgagacaaggttgcatctggaggtggtggggttgggagaaatggtgttcacagaaccaaccacaggcaactggagaggacatgctgaaaacttcaaaagctgaagagttattagcagaagaaaaatcaaaacccattccaattatgccagccagtccacaaaaaggtcatgccgtgaacctgctagatggtgacagttcctgttgcacgaaaactatctgctcggggaacagcgagatgtgaggtatgaaacgactcattaaatcaatactcctgcatcgggtccggaaacgaatcattccagcacaggtggcagaaggcaggaaaggaattgccgggcacaccggtgaaaagacaccctcgaagggagcaaagggcccgccgtataacaccctagggacgacccgcccacacggggacggccagggcggaagaaacgggaatgcaggaacaaggggcccaaatgggaaacggcacctgcggcgagacacagaggagcgaaa

SEQ ID NO: 257244 - DNA, 488 bp, Homo Sapiens
  misc_feature (21)..(21): n is a, c, g, or t
  misc_feature (62)..(62): n is a, c, g, or t
  misc_feature (84)..(84): n is a, c, g, or t
cagaaaagaaatattccaagnaccagttggccccaagggcagtaaatgccattttttgggtnaaatccatgtgaaaagaccacnccttccagagtgagcctagtaggcccagctgtataaaatccatcccttattgggatggatccttcctgaccagaatcctgaggaccatggcacagccccaggaaagaagcagcctgatatgcctaaaggcattacaaggagcccagtcaaattattgctgaaatccgggagactcatctttggtgaagagaactatgtaatactgagactttgttgactcaaaacttgctagttactgcctacctgagtagaatcttatttatgaactcctgtgtattgcaatggtatgaatctgctcatgtggagactggctataaactgaaaagtgtattccaaattgcagaacacatcacacatttaatccaaataataaatggctgtttctaaagtttcccagtatatat

SEQ ID NO: 257245 - DNA, 482 bp, Homo Sapiens
  misc_feature (47)..(47): n is a, c, g, or t
  misc_feature (49)..(49): n is a, c, g, or t
  misc_feature (316)..(316): n is a, c, g, or t
  misc_feature (382)..(382): n is a, c, g, or t
  misc_feature (387)..(387): n is a, c, g, or t
  misc_feature (393)..(393): n is a, c, g, or t
  misc_feature (428)..(428): n is a, c, g, or t
  misc_feature (435)..(435): n is a, c, g, or t
  misc_feature (448)..(448): n is a, c, g, or t
actattgaaggaactgcaaaatatattgaaacttcggagctatgcgntnggtgctagaatttgttatattttccatgagacttttgggcgaaccttagaatctgttgatccacttggtgcccttaacactattgacattttgactgccattagaaatgctactggtcctcgtcctgctttatttgtgcctgaggtttcatttgagttactggtgaagcggcaaatcaaacgtctagaagagcccagcctccgctgtgtggaactggttcatgaggaaatgcaaaggatcatttcagcactgtaggcaattacagtnacacagggaattgttaacgatttccctaaaacttcatggatggccatagtttggaagtgggtgganttgtnctttcnttcgtaaaaaggttggcctgtttacaaatggaatnggttccntaacttagtgggncatttgaacgggcttattttcaacacaaaacttc

SEQ ID NO: 257246 - DNA, 767 bp, Homo Sapiens
  misc_feature (223)..(313): n is a, c, g, or t
gctcagcgggcggcttgtccctaggaagaggcgattcaacacaccattggaattttgcagacagaaagagatttttgttttctgttttatgactttttgaaaaagcttctgggagttctgatttcctcagtcctttaggttaaagcagcgccaggaggaagctgacagaagcagcgttcctgaagtggccgaggttaaacggaatcacggaatggtccagcannnnnnnnnnnnnnnnnnnnnnnnnnnnnnnnnnnnnnnnnnnnnnnnnnnnnnnnnnnnnnnnnnnnnnnnnnnnnnnnnnnnnnnnnnnctagtctcactaaggagaaacttttactggggcaaagagccgatggctgccctgtcccgggcaggggccttcctatgaatgtaagactgaaatcaccagcgagggggacagagagtgctggccacggccttattaaaaaggggcaggccctctaacttcaaaatgtgttttaaataaagtagacaccactgaacaaggaatgtactgaaatgacttccttagggatagagctaagggataataacttgcactaaatacatttaaatacttgattccatgagtcagattattggagattttgatttctgtaaaataagagaaacttttgtatttattattgaataagtgaatgaagctatttttaaataaagttagaagaaagccaagctgctgctgttacctgcagaactaacaaaccctgttactttgtacagatatgtaaatattttgagaa

SEQ ID NO: 257247 - DNA, 685 bp, Homo Sapiens; identical to SEQ ID NO: 176336

SEQ ID NO: 257248 - DNA, 1022 bp, Homo Sapiens
  misc_feature (199)..(199): n is a, c, g, or t
  misc_feature (664)..(664): n is a, c, g, or t
  misc_feature (671)..(671): n is a, c, g, or t
  misc_feature (683)..(683): n is a, c, g, or t
  misc_feature (736)..(736): n is a, c, g, or t
  misc_feature (761)..(761): n is a, c, g, or t
ttctactctgagctcttgttgcctagacctcagaaaacaccaattcaccacagtagaaccgggagcagggatagctcagcttctctgaatagcacactttgctcaagtcttaacttgagggcctctccggtactaacatcctgcgatagctggtcccatgagcacagaagagcctccagtagagtcaaagtcctgctgncagctgccccaccccaagtttctatcatttcctctttaaacaaaaaatatgttatcctacacattaagtgtcaatccaatggttgtctcttatctgtctaaatagcaaaatcatgaaaatcagctgttttatttgcataggacaactaacctgtctgtgtaactttgtttttattttaactcttactagaaaatctaatcttaaaacatttgaattctaaacatgtaaaatgtgacagcctgcaattttgtagacagtgaagtaatggctgctatttataaatggaacatctatcaaaataagtaactgtttataaaattcagtttttgtagggttttccaaggaaaaatcaccttggttgaatgtttctcactcattaaactttgcagaagtgattcatatccagtactgtttttaatcactttttaaaatataaggaccgaatgcaaggaaaccaaagtttantaataanttttatataacnaaaataaaatagatgtggagggatctgtgatcatataaaaagggagggttacnggaagaattttagcaatatattgantcaggaaaaggagctgttttataaatgatcattcactgttcctatggttctatgtatctttcaaaccgatacctttactatttaaagagcgtaaatagtgaaagtaagatggtcatacttactgactttatctatttaagtttgatggagataaactatatcttggctagtggctactgtgtctgtgaatgtaaccagtacttctttaagctctattcagtagggttccagccactgcttttttgttgtttctagccactg

SEQ ID NO: 257249 - DNA, 480 bp, Homo Sapiens
tttcccaagactagcatagggagtatccatttaaaatacattcatcttcctcccatttccgtgctattaatcacttgttagagcaacatgacatgcccagcatcccacttcccgaaaatgtctactccttctactctgagctcttgttgcctagacctcagaaaacaccaattcaccacagtagaaccgggagcagggatagctcagcttctctgaatagcacactttgctcaggtcttaacttgagggcctctccggtactaacatcctgcgatagttggttcccatgaggcacagaagagcctcagtagagtcaagtcctgctgcagctgccccaccccaagtttctattcatttcctctttaaaacaaaaaatatgttaatcctaacacattagtgttcaatcccaatgggttgtctccttatctggtctaaaataggcaaaatcatggaaaatcaggtgttttatttggcataggg

SEQ ID NO: 257250 - DNA, 931 bp, Homo Sapiens
aaggtagcgaggcctgggtggcgaattcggcacgagggaagatcttccggactgccatgctgttccagtttgtgaacgtgctgctccaggtcctggtccacaagtcccatgatcttctgcaggaggagattggcatcgccatctacaacatggcctcagtcgactttgatggcttctttgccgccttcctcccagagttcctgaccagctgtgatggtgtggatgccaaccagaaaagtgtgctggggcggaatttcaagatggatcgggacctgccctcattcacccagaatgtgcacaggctggtcaacgacctgcgctactacagactctgcaacgacagcctgccccctggcactgtgaagctctaggcctgctactgcctggggacacggacttctgctgctgccacctgcgccagccctaccttccaccacagatgtctcccagatgggccttggtcacactccttggcttctcccaccgcaagcaacgctgcctgcctctgccgctcctccacatcttgccgctgcccagcagagctggcttctgggtccacctgagcactggacggtgctcccagggcgttggagcaggcggaggggtgtgtggccaggtactaggaggcaccaggaaatcccgcggggtggcccatgcagaccaggcgcacgtggctcatggggcagaattgccaaggacagctcacgacagtgccaccttctcaccattccagccaaggagagatgtgacgttggaactgctctggcacttctgtcaagcctcccccgccccaattgccttgagatctctgctctttgtcagagatttgcaaagactcacgtttttgttgttttctcatcattccattgtgatactaagaaactaagaagcttaatgaaaagaaataaaatgcctatgttgttgttctaga

SEQ ID NO: 257251 - DNA, 1020 bp, Homo Sapiens
  misc_feature (158)..(181): n is a, c, g, or t
  misc_feature (604)..(614): n is a, c, g, or t
ggtattgggagtgacgagggttactccagtgccagtgtcaaactttcattcacttcatagaacccagcatgacataacagtgcagggcaaaatattcactgggccaattcaatacaaacaatctcttaaattgggttcatgatgcagtctcctctttnnnnnnnnnnnnnnnnnnnnnnnnctatacttgaacaaaagggtcagaggacctgtatttaagcaaatacttagcaaaaagtggggcagagcctcccaaggagaacaaatattcagaatattcatattggaaaaatcacaatttttaatggcagcagaaaacttgtgtgaaattttcttgatttgagttgattgagaagaggacattggagatgccatcctctttctcttttctagtttgctcatactacattgagtagacacatttaaggatggggttatgaacccttcctgagctttatggtcctaaaagcaaaataaaaactatttgaatgaaaagacaagaaaatcaggtattaatcttggatagctaataatgagctattaaaactcagcctgggacagtttatcatgaagcctgtggatgatcaatcctttattattatannnnnnnnnnngaaaaaagctcatttcatgctctgcaaaaggagagactcccatgaagccttttgaaagggatcatcatgcagctcaactttctgttggattccatgctaagcaagctaaccttatcctgcattgttagcactaggcacccagctgccacctctccatcctgctgcccttaggccacatgggagcagtccatgcatgacagcctctatcctacaaggcctatgagtatggattgggggggccaaaaggaaaaagctccatgtgcctctttgtctgcgtgggtcagaagagttgtgcacgcagattagcaggccaaggtctgagccacagcagcatttttatttcagattttgataactgtttatatgtgttgaaaaccaaaatgacatctttttaaagcttatccat

SEQ ID NO: 257252 - DNA, 442 bp, Homo Sapiens
caggtagactcttgacaaactcctggagtttagcagaaagggatgagaacccaggaagactaaagacaaataaatttgaaagatctagtaataaaggagagaatgctacacagagaaatactcccacagatctccaaaggagaatatttctgaatattcggcaaagtgttcaaaatgtgtaaagaaaacatgtgaggctggggaaagaatcacccaaaaggattacagagaatagtaccaggcattcacacagggatgggaatagtgtctatttccaacagtgagactgcaaaatctcatcaatttacatgatgttgcatagacgcagtaagaagggttgtgtagtaggattagttagccccaaacattcgtgtttccacctagcaaatcttaaacgcaaggcccaaaaggattaagccatttcgcgctcgtgccgaattcc

SEQ ID NO: 257253 - DNA, 297 bp, Homo Sapiens
tcaagttctttgacttaaacagagatccttctgagagaaatacaattagtcattttctatggtagggagaaatccaccataagacaaagaggccagaactaagccaaagaggacctgtgttctggcactggctctacagtgttgtggctgcattatctagggtaaacacgcccatgggactctgcctggatctctattgagccacaggacactgaaattatccattcgcaggtctgccctccccgtgtatagcccgtctgtcctggtctgggctggcgggtaggcattacaccttcc

SEQ ID NO: 257254 - DNA, 1171 bp, Homo Sapiens
ggtccggccggaagtacgggatatgcgaccacgcgtcgggggaggggcttcctgagcctggatgctgggcttggggcagaactgcgaacctccccgactgtgtgtccttctcctgtgatctctgtgttttcccttttctttctggggccaggaagtcagggtcaactcccaggcctcagatgcagggggcccagaacacctgctctcacctgagccccaggtgaaggggcccgggaacacctgctctcacctgagccccaggtgaaggggcccggggaacacctgctctcacctgaaccccaggtgaaggggcccggaacacctcctctcacctgagccccaggtgaaggggcccggaacaacctcctctcaacctgagccccaggtgaaggggcccgggaacacctctcacctgaacccgggggtcccatcccaggaagaagggccatctcaggacatgagtcctcaggggccctgcacattcaatctgaaggtgaccctggcctggctgaagctggaagagctgtggggactcagcctgtaaacagagcgtaaggttcacatgctggttgcttaatccgtttctggaggaagagtatgacacccacttgtgatggggtccttgtgcggtggggaccggggccggcgggctccaggccagcacacctaacccatggatgtggaacctacggccgagaaggaatgttgcatgagtcggatcccagtccattgtcagtggagggtgagggtgaccccatctgctatttttgtgctcatcctcatacaaccatttggggatgtgcctattagggctccgtaagaactcagatgcctgggaagcccagcccctcaggtgcccccacacacagccttcccttgacgcctacatttctaggcacatgtgaggcatctttcctggagccccgagccagccctgtccctccccagtgcagcatggcactcaggagatacaggctggacatggggcagtcgttctggggaggcctggcctagcagccacccacctgagccctcccggccaggcttcgtgctggggtgggccatgtgccaggacaggagggtcccggcggaaagccagccccggactcatcgtgacattgagatcccactggagggtaggggtggtaataaacttctccaaacgataaaa

SEQ ID NO: 257255 - DNA, 422 bp, Homo Sapiens
gcacgagaccaagtcccatcacagagtagaaacctgtgaaacgctaattgtccttgccttcctcaggtttccctaatgtgggaaagtcctcgctgatcaatgggctgggggggcggaaaggcgtgagtgtctccagaaccccgggccatacccgatactttcagacctactttcttaccccctctgtgaagctctgtgactgcccaggcctcatcttcccatctcttctgcctaggcagttgcaggttctggcagggatctaccctatcgcccagatccaggagccctacactgctgtgggctacctggcctcccgaattcccgtgcaggccctgctccacctgcgccacccagaggctgaggacccctcagcggaacacccctggtgtgcctgggacatctgtgaagagattctgccattg

SEQ ID NO: 257256 - DNA, 1011 bp, Homo Sapiens
  misc_feature (754)..(754): n is a, c, g, or t
  misc_feature (774)..(931): n is a, c, g, or t
  misc_feature (946)..(946): n is a, c, g, or t
gctgggtggcgaattcggcacgaggtgaccatcggctgtgtgggtttccctaatgtgggaaagtcctcgctgatcaatgggctggtggggcggaaagtcgtgagtgtctccagaaccccgggccatacccgatactttcagacctactttcttaccccctctgtgaagctctgtgactgcccaggcctcatcttcccatctcttctgcctaggcagttgcaggttctggcagggatctaccctatcgcccagatccaggagccctacactgctgtgggctacctggcctcccgaattcccgtgcaggccctgctccacctgcgccacccagaggctgaggacccctcagcggaacacccctggtgtgcctgggacatctgtgaagcctgggcagagaaacgtggttacaagacagccaaggcggctcggaatgatgtgtacagagcagccaacagtctcttgcggctggcagtggacggccgcctcagcctgtgttttcatcccccaggctacagtgaacagaaaggcacctgggagtcccatccagagaccacggagctggtggttttgcagggcagggtggggccagcaggtgacgagggaggaggaggaaaaggaagagctgaccagctcctgtgaggaggagggagaggaagaccgggatgcggatgaagggggaaaacgggatgatgagacccctacgttggagtgatgggccagcgctgcctgggggaagaccctgtcgcgagatgcnagagggagagaggtgaggannnnnnnnnnnnnnnnnnnnnnnnnnnnnnnnnnnnnnnnnnnnnnnnnnnnnnnnnnnnnnnnnnnnnnnnnnnnnnnnnnnnnnnnnnnnnnnnnnnnnnnnnnnnnnnnnnnnnnnnnnnnnnnnnnnnnnnnnnnnnnnnnnnnnnnnnnnnnnaacggaggctgacgncgtccgggggctgggagggtctgctgcgccccacggcgtggtacacacgacaggcgagacggaca

SEQ ID NO: 257257 - DNA, 365 bp, Homo Sapiens
  misc_feature (259)..(269): n is a, c, g, or t
agttgtaataaggagcaaaaagcactccaaaatgaaatggccaatactagagagcagcagagctgtgcatcaccaggggtcactatgtcttcccagatcacagaagtttgccagttgtaacaaagcagtctatagacatcagaatttgtgtgaacgagatacagagagagaagaaacctttaaaatataaaaagtgtaatttatctagggtgactatagttacctataatttagggtatatttcaaaatagctagacgnnnnnnnnnnncacataaacacacagcaaaatcagcaaacaaaactaagtagcatttaggcggaaaacagtggctcacgcctgtaatcacagcactctgagagcgcg

SEQ ID NO: 257258 - DNA, 373 bp, Homo Sapiens
atcacccttaccgacaaatatagaataaccttcctgtgtgtaattgagccaagaaaagtgcaagatatgtacctaattttctacctgtaaaccagtgttccttataattgcatataaatgatctttcatttctgaatagagaaaaaaccacgtgtcatccatatttccagaagccgtgtaaaaacgtgcgataatcttcactagtaactcctccttctgccattctcatcctctcctcctcatccagctgatgtgcaattgaggataattccacagggctaaaatattctccttgcaataagttactcaggcaatgttgagcacaaagtgagccctcgtgtttctcgtgaaagatggactccatgtttatttt

SEQ ID NO: 257259 - DNA, 422 bp, Homo Sapiens
aatggtatgggtagggagaagagggtatgggatgtgggtacagggtagggcctgaagtagccaggaggtccctccctaccctggcttagtcatctgagatggaaagtctgctgaagatggccaggcgtcttgagttgtccaaggtcgggaagtctgagccactgtggctgctgctggagctgctcaggtagccctcctggtccgagagagaatcctgagggctgggggaagagtcaacacatgtgaggggactcggacatgggccggaagaggaaggtggtcgggaagccacccccggacagccccatgctaggggcaaagaggcttgccagctcctggctggagaaggcaaaagggttattggtgccatcggacagggtaggtgagcccaggaggtcatcggcgctcagaatagggggtgg

SEQ ID NO: 257260 - DNA, 367 bp, Homo Sapiens
ctcaaactttagggagcttcagaatcccccagagggcttgtcaagacaacagagggctgggccccaccctctcagaggttctgagtcagtaggtcttgggagaggctcgagaatttgcatttttgacaagttcccaggagatgctgatgctctggggtgagaaccactgctcttggagacccctgggggatagatgtacagacttctataggtaagtccctcttcccttgctcttggtcttcctcaaagatatttatctttcctaccttgtaacttggctttggacacctcagtgcactactccttccatatactttagccagtggtttttgactggtggcagatttgccccacaacccccaagagg

SEQ ID NO: 257261 - DNA, 375 bp, Homo Sapiens
aggtgcagggatcatgcaatagtttcgtaccagatttcaagataccaagtagcaaggaaacacaatggaattgaaggctgaggtgaagtacaggcataaggcaaggaaagcagaacattcaagatgtacctatatacaccagttcttaaaacacgcaaatcatttccaataaggcactggctcatgtatttctgttgaggcagaagtcaatcttaggatgtggtctgtacatatctgcagataagtgcattttcaattgctttcctgtgatataacttatctttatcttggtcttccccatttgttttgcaaatagttatgtcgcaggtcatttactggctagagcgacgacgcaccagccgcagcaatacccac

SEQ ID NO: 257262 - DNA, 1037 bp, Homo Sapiens
gggaggcctatttccggtaggaatcagtggacttggcggcagaggcagtgcggatccggcgttctccactgatcttttccaaggctgtacagacatggcggcggcttttcggaaggcggctaagtcccggcagcgggaacacagagagcgaagccagcctggctttcgaaaacatctgggcctgctggagaaaaagaaagattacaaacttcgtgcagatgactaccgtaaaaaacaagaatacctcaaagctcttcggaagaaggctcttgaaaaaaatccagatgaattctactacaaaatgactcgggttaaactccaggatggagtacatattattaaggagactaaggaagaagtaaccccagaacaactaaagctgatgagaactcaggacgtcaaatatatagaaatgaagagggttgcagaagctaagaaaatcgaaagactaaaatcagagctccatctgctggatttccaggggaagcaacagaacaagcatgtgttcttttttgacaccaaaaaggaagttgaacagtttgatgtcgcaactcacctgcaaacagccccggagctagtcgacagagtctttaataggcccaggatagagaccttgcagaaagaaaaagtgaaaggagttaccaatcagactggacttaagcgaatagctaaagaaaggcaaaagcagtataactgcctgacacagcggattgaacgagagaagaaattgttcgttattgctcagaaaattcaaacacgcaaagatcttatggataaaactccaaaaagtgaaggtgaagaaagaaacggtgaactccccagctatttataaatttcagagtcgtcgaaaacgttgacgtgttatagataagccttgtcattctgtatcaaaaatctgttgtcgttttctagtaacttcaaattccattactccaaatggcatggttttccggtttgtaaccataactaaattgtcagtctgacatttaatgtctttctatggacaacattaaatctccctcccttctgtaattgtt

SEQ ID NO: 257263 - DNA, 1048 bp, Homo Sapiens
  misc_feature (110)..(110): n is a, c, g, or t
  misc_feature (168)..(168): n is a, c, g, or t
  misc_feature (176)..(176): n is a, c, g, or t
  misc_feature (197)..(197): n is a, c, g, or t
  misc_feature (859)..(868): n is a, c, g, or t
aggacggcgcctctaggaccctcgggagagctggacccgcatcacgcggcctccagaggggcgcgtaccggagtgtcaaatcgcctgtccgaatacacgccgcagactcngaggagcgtttcgttgtcttctcccagcgggagagctttttcaatgtcacagtgaagntatttagncacagtgtcatcgcaatcganatgaagtatgtactgctacgaatctcatagaggatgacaatcgatttcaaagctggaaacatgtcgtctacaagcttgccgaaaaataattagatgtaatgttcttaagaagaaaccgaaggagccgctacgatatttcaaatgtaagcatacaaatgtaataagtacctagagccatgtccctttgaataaacactcaggattttaaggaaagatgatgccttggagctctgtgcctttggcccgttggtcaaggtaattcgtcaagtgcaggcacacaaactggcctgcaagcacgttcaggggcttattttgtttttaaagagcaacaaccagaaggaaatgtctttaggtgccaggggtgagcacctcctaagaacacggggcatcttcagagccatggcatggcccagcaggagcaggggtcaccaccagcttttcttctcctttctcaggtggagacagacataagttcgaggtttctggaagacggctgcccacagagggcttgccttctaactcctcatttgaatcttttccatcatcaataccctggccattccttttcccacaggtacagctcagtacaatctggggcttaaaatttcaattctttggtgacctgaagattcttccatgaaaaggattactctgaacttaannnnnnnnnnaaccaaaagtccttcaatgctcagagataaagaggaacaaacgtgccattcacttgtggcatcataacacaggcctgatgacagcacagccgctggctgctctcagcatgctctctgtggatttcctgtgtgactgtatggaggcccaggcgtgtcttcacaggcactgccataaaaact

SEQ ID NO: 257264 - DNA, 2005 bp, Homo Sapiens
cttttcatttgcgtttatttaaacacagttctcaaaacatttgagtgaaattgggcctcctttggtaagcaaaggacctgaaaataatatttaaaaaatgaacaggcaaagtcttcagttcatccatgacacaggtatagtgttcccttatcatgtactttgaagcacccggttttttcatatagtctaaaagctagaagaacaagagtgtatttgtggtggaatgtattgtcacttgctgataactagttgaaataccattatccccttgtaacacctttaagaaacagccttttaaggcatacactgtgtaactcttcgtatttcctgctatacatattacagattacataaaagccgacaaatccacattgatataagcattaagcactggctgtattttaagatttttagttctaatactagcagtacagagttacagagcataattttaaacacttagttgcaggtatataagtatggtatgtttcatggactggaggaaaacgggcatttgtctttaaatttactactgacaatctgaatagttctgctaagcattgatatgttagaaagaaaagtaaaaatcaaactgtttattgttgctttttgccatttggtagcattttacacaggcttcgatcttcagaataccctggattcagtagaaaaaccttttaaatgaagttttgtacaatagaaacttctcagcagtcaaaatttagactgtaaaaaaatacatgcaaaacatacttttctgaaaacacttaacttggaacaaagcaccaaactacacaaatgcagaatgaaaacagcatttcaactccaccaaaagtagtcatcgtaaaaggtgtaaaagtcacctaacttcactaggcactgttcactttttaaacaagagacaataaaaaatattgcccacaaacaatatcccagctctagggcaggtttcagaaagtcttcatgctttaatagcgacgaggtgagtatgatcgagatctggaacgtgatctgtatcctccacgactatagtaaggagaaggtgaccgccttctataaatctgatccctgtcttgggcagctctccatcctactcctcctccacctcctcctctgtatgatctgctatagtagtcccgatcatcatagccccgatcatatcctctgtcatagtaatcccgacggcgagagctgccataggtaggtctccccatgtaaattcctggtgttggcgtatgtggtctttttgttatagagaaatcaactctgatccttacgcccatcaagctccattccattggcacgttctttagcttccttggcatcatctacattttcaaaatatacaaaggcaaatcctcttgaacgcctagactgctggtcatatacaatagacacatcggcaatgggaccatatttagagaacacttctcttagatctctttctgtggtgtacaagctcagcccaaatactccaagacaacagttaggatcaggatttgcccgattcccaacatgacgcctgcgagtagacatgggagaatggctgtggctgtgccgtctacgataatctcgactgtaagacctgctacgtgatcgtctatgggagcgggagcgagaccgtgaccgggtataatgccttcgggagcttcttctggatctagacctagattcagatcgggacctggactttgatctggaacgcctggaatcttccttggagcgagaccttgcaggggtatgccttgcagatttccccgatccgtgagcacttccacttctggaagcagaacgggattcccgctcgccgtagttctgctcgccgctgtcgctcatgactcctggctgctgtcgccggtcgatgtgcttcaatcgaagctgccaacctcttgcaccttccttaaggaggctccgccgcagccccgcacgacgcgccggtcgcccagccgctcagagccgaaatgctccgcaccgcctccgcacgggctctaactctaccggatgt

SEQ ID NO: 257265 - DNA, 365 bp, Homo Sapiens
ctcaggtactaagaacctgtactcagtggactagtacagtgaaatgtagactgttgtcttcagagccactgccaagctagagagcagggggttttattattaagcatttgtctggttgctgtaaacttttgattagtttccataatgccagtaaagttgattctgagagtatttgccagtttatttagtgcaattgtaaaaaaagataaattttgagggttccctactctgccatatttgctggcatcaagcttgatgacatcttaagacttattttcaagccaaaaaaattaaaatagcatttagtagttaaatcatagcaaacaattaataaatgaagcgtcacactttgacatggacaagag

SEQ ID NO: 257266 - DNA, 572 bp, Homo Sapiens
acaggtgtgtggtcctgctgagctgtccacgtgtcggaagactgtttaagacagtcatttttgcctctccgccaactgtcttcagagaaaccattaggttaggtgatacggtgccagcaagggaagcaccatcgtccaggatctgcaaatctggttcctgggaaccccagactcctcagcagatctggctgtacatggatcagaaccacttcttcccccgcttaagctgtggtttgacccaagggtcagcatataggactgcctgctgcatttaatgaaggtgtttccttttggaagtctgtgctaccctctgcgcctagttgggaggagacatccatctggtctgggatttcgggaggtagaatggaaagctctttgctaaagactggagtcatcctggcctgccaactggtggttcagagccggacgggcttggtttggacatcactgttgccttcactcagcagccacgggagagtgctccccatgcaactccaccttagaaaccacgtcagatactgagtagcttgctgactcctggaaacttctggttttgttaggatcataatgaa

SEQ ID NO: 257267 - DNA, 342 bp, Homo Sapiens
tgacagagccagactgtgtctcaaaaaaaagaagaaagacaatatgcaaacaatctcaacatctcaccaacaggaaaacagtcaaaaaatgtccagaatgtccacgaaaccatgctgcatagtcatgggacagaccaagctgctgcacaaactacagagccaaagggaacgccctcattttaaatagtgttgttataacagggggcttactttcttatttgtgtgtttttattttatcaactttcaaaacttatttttaaagaaatcacttatgcgtgtgggtagtcatatcaccgcatttctcttcaagcgtcattaggctctgtactctccctcgtgccg

SEQ ID NO: 257268 - DNA, 796 bp, Homo Sapiens
  misc_feature (36)..(36): n is a, c, g, or t
  misc_feature (66)..(66): n is a, c, g, or t
  misc_feature (78)..(78): n is a, c, g, or t
  misc_feature (87)..(87): n is a, c, g, or t
taatgacatgaattacgaaatttaaatacgaactanctaatagggaaattttggccctcgaggccnaagaaatttggnacgagcctncccctcccacatgtacccgtctccttaagccccacctcaattaatcccctaagatttatcaagggtgttatgggcccagctttggggggccagtcccgatgcactttgaggggtgttggagaggggactcccccactcgcacttaactcaacggctctcgggccctggggctgtttttaccatgtttgtttttgaagctcaggtgtctcacgtctgggctgcaccaggcgaagagagaaattaaagatttgaggtttttccagaagctttgtctgcctctcgggaggaaggccgtggggctgggaccctgtggtgggcaagtgggtggagtctggcagctgcccacagagggccgagggtcacccgtcggccgccgccaccccaggcgaggccggaggaaggatcatctgagacgcaggaggcatctgctggagcagcaatttcccaatttattgaaagtgatcgctttgcaaggatgtctaagctaatcccgtcacagaaaggaaacgcacaggcgcctaggcagaaacttggagactcaccgcagaggccacgtgaacccacggtcacagagaggcaggacggcagagccatgatttcccaccgagcgattaccgagaacctcttcccccaatagtagacacatctccaatacaaacacaggttataataagtaataggaagtcactataatatagatcatccccag

SEQ ID NO: 257269 - DNA, 860 bp, Homo Sapiens
  misc_feature (78)..(78): n is a, c, g, or t
  misc_feature (185)..(185): n is a, c, g, or t
  misc_feature (472)..(489): n is a, c, g, or t
gtcctgagcaccgttgctaacccccagtcctgtcacagtgaccgtgtctaccaggtgggtgaggccacgggtggcagnctggggcgggtctcagggctctctggaggggagtgaagccctggctgtgtctccctgtagggctgcctgacgcccgcccgcctgggagccgcagcccacggaggttnggagcctgcccacccgccttgtcctccaggatcggagtcaccctgaggaagccccgcggcgacgcgaagaagtgccggaaggtgtatggcatggagcgccgggacctctggtgcacagcctgccgctggaagaaagcctgccagcggttcctggactaagtccggctcgttcaagaacataagctaccaccttctccctccccaccccctccaggcccggggctgaaacagcccgaggacagccccaggggctggctttcaccagctgcagggtctgcttttacttnnnnnnnnnnnnnnnnnncttgaccctgaaccctcccccccgccaggtcgggggaggggtcccaccactcaaagtgcctctaaagaaaccagctttttgcactaaagccaaaccacaccgctgtccccttaaccccaagggcccctgggggcagccacccctccgcctgtcggcccgtagatttatcaagggtgttatgggcccagctttggggggccagtcccgatgcactttgaggggtgttggagagggactcccccactcgcacttaactcaacggctctcgggccctggggctgtttttaccatgtttgtttttgaagctcaggtgtctcacgtctgggctgcaccaggcgaagagagaaattaaagatttgaggtttttccag

SEQ ID NO: 257270 - DNA, 375 bp, Homo Sapiens
aaaggagcactttagaaatggttagtgctggactccaattatctttcaatatgtccaagcaaataacaccttgactgttaatattacaatgatagattcttgtccgaaatgtaacctttggaggcttgaagggatattctggtgtaaaagtgatatcgagaaagaatacaccaccctcatacacggatcctggaggccctagaatggttgatctccattcatagatgttatcgcctttgggaccagcactgcaattaggtgaagggtctaaagtgatgttgctcatgctgactttactctccttcttcttgggggtgtgtgtttctttctcggtttgctggttggaagacgaagatgaggaggagctggtgctgg

SEQ ID NO: 257271 - DNA, 819 bp, Homo Sapiens
tatttgcctgtttaatagttgctgttgctgcacttccgcttctctcccagcgagagagagacacgagtggccaggcccagccgcagccgcagcagcagccgccgcggcggcacggaggagccagacacaaagagaggggctgtttgcggggtggggtggggggttcgctatgtcggatgacgattcgagggccagcaccagctcctcctcatcttcgtcttccaaccagcaaaccgagaaagaaacaaacacccccaagaagaaggagagtaaagtcagcatgagcaaaaactccaaactcctctccaccagcgccaagagaattcagaaggagctggcggacatcactttagaccctccacctaattgcagtgctggtcccaaaggcgataacatctatgaatggagatcaaccattctagggcctccaggatccgtgtatgagggtggtgtattctttctcgatatcacttttacaccagaatatcccttcaagcctccaaaggttacatttcggacaagaatctatcattgtaatattaacagtcaaggtgttatttgcttggacatattgaaagataattggagtccagcactaaccatttctaaagtcctcctttctatctgctcacttcttacagactgtaatcctgccgaccccttggtgggaagtattgccactcagtatatgaccaacagagcagaacatgacagaatggcccagacagtggaccaagagatacgctacataaattggggtttcacaattcttacattatttgtctgtcacagaagagagctgcttatgattttgaaggg

SEQ ID NO: 257272 - DNA, 899 bp, Homo Sapiens
  misc_feature (789)..(789): n is a, c, g, or t
  misc_feature (818)..(818): n is a, c, g, or t
  misc_feature (837)..(837): n is a, c, g, or t
  misc_feature (842)..(842): n is a, c, g, or t
cttagatgctacaagtgtgtcagagcagccggagtttgctggaccacaaggaagaagagaagagacttgcagtgaactgtttttgtgccaagaaaccctggacctggggccaagtatttcccaagccaagcatccacttgtctgtgtctgggaagggatggccaaggccgctagggtccttacccctcaggatcactccccagccctttcctcaggaggtaccgctctccaaggtgtgctagcagtgggccctgcccaacttcaggcagaacagggaggcccagagattacagatcccctcctgtaagtggccaggcattctctccctgccctctctggcctctggggtcatactcacttctttagccagccccatcccctccaccccacacctgagttcttgcctcctccttttggggacacccaaaacactgcttgtgagaaggaagatggaaggtaagttctgtcgttctttccccaatccccaggaatggacaagaagccaacttagaaagaagggtctcacgtggctggcctggctcctccgtagacccctgttcttttcaacctctgcccacccgtgcatgtcatcacaaacatttgctcttaagttacaagagaccacatccacccagggattagggttcaagtagcagctgctaacccttgcaccagcccttgtgggactcccaacacaagacaaagctcaggatgctggtgatgctaggaagatgtccctccccttcactgccccacattctcccagtggctctaccagcctcacccatncaaaccagtgaatttcttcaatcttggcntcacagtgacttgcagcgncaagnggcattccaccaaggcattcaagttgggaggaaaaggggaacccaaggcagtaggag

SEQ ID NO: 257273 - DNA, 2425 bp, Homo Sapiens
  misc_feature (700)..(797): n is a, c, g, or t
  misc_feature (2089)..(2098): n is a, c, g, or t
  misc_feature (2368)..(2368): n is a, c, g, or t
ggtatgattagttacagagaatattttcatcccctctccctgaatagaaaagcaggggtcaccatttgtatccttacccttgaggtgtttttgaagatgctgtaactcttgaagttgagctgaggcagaaaggttggaaaaatgcagccctctgggtattgtggggagggatgtgatgtagtaagagggtgttttgtggtgctaggattcccacgccaccaacttgcagctttataagagcgctaccaagaaccaccactggggaaaaggttcttattcattgtttctgttggaatgtgatcttgctttctggattttaggaattcaggttactcagtataaaactctgagaaatcagtgtgacttagtccttcacctcctaagataaagtgaatatttctttacaaaataattcatgtccttaatgttaaagatgtaattttattttcaaaacatctataacatgactttcagaagcagttcatttttccaagattcctcacattatactagataaataataggccctcagttaatacccttcagttattgaattaatctagtttgtggaatgaggtgtatcctgccaacttccctctgctcccaagtacactctgagaggtaaaatgctctgggaaatggaacaagaatcgagtggatgctgactctgtgtgcccacctcctcaactgatgataatgnnnnnnnnnnnnnnnnnnnnnnnnnnnnnnnnnnnnnnnnnnnnnnnnnnnnnnnnnnnnnnnnnnnnnnnnnnnnnnnnnnnnnnnnnnnnnnnnnncattgtaaatcaaagttaatagaatacttcagggtcctctgtggaggatgtcttgagccagagtttaagcctgacacacaggctttggtcctcactgagctgtctccaagactggaactacttagtgactcggcaaattttctgccccccacccctcatcaaagctgctagttcagatgttgacagtgttttcatgaatgttggaatcttactagtccagacttacttaggatgttgttggggaaggcacttgggattttctgtgtcttgcattcacagagggaggccatttcagattcaagagcattggattagggaatcgtgaggcagggatgctactgcgtatttctctctgcaggttggggattaaagttcctttccccatgggtttgaagcagactcagactgtctcaggatcaaagcaaccctcaatggttttgatttatgtcattgcttaccactccccaaccaatcccaggacagctgggtcactgtacccctttgtggtatctgtacctgggcctctccttcctcatagggaccagctgattgaataaatgtgaccaccttatttccaccccccacccccaaaagctacattggaattatttttcctagaaatgtgtataacactcagaattgggcattgatccttaaagcttcatcccattcaccgtattcaacatctgtcatctcttagtgtctgcagtctgaacctaaccttgaccttttttccctctggtttgagaaaactttggacactatttctacttggccaggtgtgggctcaagagccttactctttccatctcagtttaggggcgcagccagctcctcttcccaatagggctctttctgctttccctctccttggccctagatttgtaatccatgaaaaagcacaaggtcctggctccttgcggtcacattctggttctctgtgttttgtggactctgctctcactgttcacccagcactagcagtaccagatggttctgtggagtcctggggaatggagagagcacagtctgactccctgccaagtagccaggagttgacttgcccatggtccgctggctttcccaccacttcctacaggatgggatctaagagactcaagagctgggtttctttcagcactctgtactgtcccaaatagcaaacaaatcactttgtagccagatttctgaatggaaatgagaaattgaattctccatggacttttaggtttatgggggagttttagctgtgtttcttggttttatttcagccaaacatgtctgcttttgannnnnnnnnnaaagtataagtggtctatatatatgttcaccttttaaatgtaaatgtttaaaaagtaagcatttatgtgtttccataactgacatctgatgcagacctcattctctccccctcttctaccctcctcttttcccccttttcatactcttgtattggttctaataaatggttggcttttgcaacgcaccgccttataaaaacgaaccataaaaccttggccggcccggccctcgggccctccgaagaaggctttttttaaaaacccatttcntttttgggctccccccgcgggcccccaattcaggggtaaaacctggaaaaccacggc

SEQ ID NO: 257274 - DNA, 1033 bp, Homo Sapiens
gtcgcttcgagcgcgctagtcagctccctgaagggagtgacggcggttgggtgcccgcggccacttttgccttcccgggttaaattaaaaataccttttggaaataaattactagatgctgtttgtttggtacctaacaagagcttaacatatggaataattcttacacatggagcatcaggagatatgaatcttcctcatttgatgtcactggcatcccatcttgcatctcatgggtttttctgcctgagatttacctgtaaaggccttaatattgtacatagaattaaggcgtataaatcagttttgaattacctgaagacatcaggagaatacaaacttgcaggtgtttttcttggaggtcgttcaatgggctcaagagcagctgcttctgtaatgtgtcacattgagccagatgatggtgatgattttgttcggggtctcatttgtatttcttacccactgcaccatccaaagcagcagcataaactcagagatgaagacctctttcgtttaaaagagcctgtactgtttgtgtcaggctcagcagatgaaatgtgtgaaaagaacttgttggagaaagtggcacagaaaatgcaagctccccataaaatccactggattgagaaggcaaatcattccatggcagtgaaagcacggtcgacaaatgatgttttcaaagaaataaatacacagattttgttttggatccaagaaattactgaaatggacaagaaatgtcattagttaaaagccatgttatcttgagtacacatacagttaatttgataaagaagagtatgcctctcagcattgtgagatatatttcagactaatttgatgttctttaatgttcccttatttttgaaacacgttttaaatgtgaaattaatgtccttcacaaaatgtcttttgaaagcactgttacagttgtataaagatgatgtaaaaatattgaaggtggtctacatataatttattttcattagtatagttaagttttgaaaaaaattaaacatctgaattttgttac

SEQ ID NO: 257275 - DNA, 831 bp, Homo Sapiens
ggggcaggcgaggcggtcgcttcgagcgcgctagtcagctccctgaagggagtgacggcggttgggtgcccgcggccacttttgccttcccggggagatgtcctttgcttctcagatgtaaatgcactttaagtttgttattcaacagtgaaaatgagtcatacagaggttaaattaaaaataccttttggaaataaattactagatgctgtttgtttggtacctaacaagagcttaacatatggaataattcttacacatggagcatcaggagatatgaatcttcctcatttgatgtcactggcatcccatcttgcatctcatgggtttttctgcctgagatttacctgtaaaggccttaatattgtacatagaattaaggcgtataaatcagttttgaattacctgaagacatcaggagaatacaaacttgcaggtgttttttcttggaggtcgttcaatgggctcaagagcagctgcttcctgtaatgtgtcacattgagccagatgatggtgatgattttgttcggggtctcatttgtatttcttacccactgcaccatccaaagcagcagcttaaactcagagatggagacctctttcgtttaaaagaacctgtactgtttgtgtcaggctcagcagatgaaatgtgtgaaaagaacttgtttggaaaaagtggcacaagaaaatgcaagctccccataaaattcactggatttgaaaaggcaatcattccatgggcagtgaaaaggacggtccgacaatgatggttttccaagaaataatacccggattttggtttgggatccaagaattaactgaaaggggcaa

SEQ ID NO: 257276 - DNA, 385 bp, Homo Sapiens
agtaaggtaaggggagcgcgcggtcgaggtgcggaggtaagagccgagcagaccaccaaaacccccaatggtcctagcaatttcagaagagtaacttaagtgttaaaaagggaaaggagatgctgcaggtaggcagggagaaggattcaactcctagggaaagcaagataagaggggttccactgcacaggaaaaaggggatgccagcataatccttacctagggctgctcagaggctgagaatataaggaacagagtgaaaggctacagagactagtttcaggaggaaagaaaagtcaacttagaagaattaagaaagaaaacatagttggtcacaaactccttgtgtttactgaaacatgaagcctcgtgccaattcctgcag

SEQ ID NO: 257277 - DNA, 488 bp, Homo Sapiens
  misc_feature (16)..(16): n is a, c, g, or t
  misc_feature (51)..(51): n is a, c, g, or t
  misc_feature (57)..(57): n is a, c, g, or t
  misc_feature (67)..(67): n is a, c, g, or t
  misc_feature (78)..(78): n is a, c, g, or t
  misc_feature (96)..(96): n is a, c, g, or t
  misc_feature (102)..(102): n is a, c, g, or t
  misc_feature (122)..(122): n is a, c, g, or t
  misc_feature (350)..(373): n is a, c, g, or t
aaactaagggtttccnttccttaaattccttccaaaggtggaatttttccnttcccncccgggaaanctagtcccctngaagccctttcaactcgngttccntaaaaattctccagcttctngagcagccctaggtaagggattatgctggcatcccctttttcctgtgcagtggaacccctcttatcttgctttccctaggagttgaatccttctccctgcctacctgcagcatctccctttcccctttaaaatgacccatgtagtggcaagcagccttttactcttctgttagctctggactcttaacacttaagttactcttctgaaattgctaggaccattggggnnnnnnnnnnnnnnnnnnnnnnnnatgtccgacctgtgatcgtggtacagcattagctgaaatttacccttgttttactccactcctcccttttttaaaaaaattttttgacaaataaatgtttctaacacttttaaaa

SEQ ID NO: 257278 - DNA, 361 bp, Homo Sapiens
taggtttaggaaatttataaatgttcccattcaccttcagctaagttgttaaacctaattggggatcacaagtctacatggttcaatcgaagagctctccagtttgctgaatgttttggaggatgaataccattaagaaaataaagaaagatgccacaaaacgtgtgagaatttcagcacttaaaaataaataaccctacagaagaagctgattatactcttagtcctccctcttgctcttcacatgagatttggttcttctttttagcagttcaatgtattgacagaagtaaaaaagtcaaccaagtcctgttagtcttattcctaagtgtcccctacatttgtttatttccaagattac

SEQ ID NO: 257279 - DNA, 363 bp, Homo Sapiens
acaggcctctgtggtaactctcaatctgtgtacagagaaaagagaagcaacatctgatacaaagtcacctgccaacattcttataagactgtgtcccagccagtgaatttccacactgcttcttgggtctgcagaactcaaagcaccaaaacagagcattctgtaccaatataagcaaacggaataagaataattatgcacctttaaggaacatgcacccttataagtctgtaccctgatatgaaaatagcagaatgaatttcaagtatgaagaaatacagtaaaagtgtggcctgtctcttggtaccacagccaaaactgaatgctctgtacaatgacgtggtttaaaaatcaagatgcata

SEQ ID NO: 257280 - DNA, 1717 bp, Homo Sapiens
tctaatttggaaatttgacttgttagtttctgtgtttgaaatcatggttctagaaatgtagaaattgtgtatatcagatactcatctaggctgtgtgaaccagcccaagatgaccaacatccccacacctctacatctctgtcccctgtatctcttcctttctaccactaaagtgttccctgctaccatcctggcttgtccacatggtgctctccatcttcctccacatcatggaccacaggtgtgcctgtctaggcctggccaccactcccaacttgacctagccacattcatctagagatggttcctgatgctgggcacagactgtgctcatggcacccattagaaatgcctctagcatctttgtatgcatcttgatttttaaaccaagtcattgtacagagcattcagttttggctgtggtaccaagagaaaaactaatcaagaattattaaaccacattccaggctgctgttttctctccatcttacagggccacacttttactgtatttcttcatacttgaaattcattctgctattttcatatcagggtacagacttataagggtgcatgttccttaaaggtgcataattattcttattccgtttgcttatattgctacagaatgctctgttttggtgctttgagttctgcagacccaagaagcagtgtggaaattcactgcctgggacacagtcttataagaatgttggcaggtgactttgtatcagatgttgcttctcttttctctgtacacagattgagagttaccacagtggcctgtcgggtccaccctgtgggtgcagcacagctctctgaaagcaagaaccttcctacctattctaacgtttttgccctctaagaaaaatggcctcaggtatggtatagacatagcaagaggggaagggctgtctcactctagcaaccatccctccattacacacagaaagccctcttgaagcaaaagaagaagaaagaaagaaagcttatctctaaggctactgtcttcagaatgctctgagctgaatgctcttgctcctttcccaagaggcagatgaaaatatagccagtttatctatacccttcctatctgaggaggagaatagaaaagtagggtaaatatgtaacgtaaaatatgtcattcaaggaccaccaaaactttaagtaccctatcattaaaaatctggttttaaaagtagctcaagtaagggatgctttgtgacccagggtttctgaagtcagatagccattcttacctgccccttactctgacttattgggaaagggagaactgcagtggtgtttctgttgcagtggcaaaggtaacatgtcagaaaattcagagggttgcataccaataatcctttggaaactggatgtcttactgggtgctagaatgaaaatgtaggtatttattgtcagatgatgaagttcattgtttttttcaaaattggtgttgaaatatcactgtccaatgtgttcacttatgtgaaagctaaattgaatgaggcaaaaagagcaaatagtttgtatatttgtaataccttttgtatttcttacaataaaaatattggtagcaaataaaaataataaaaacaataactttaaactgctttctggagatgaattactctcctggctattttcttttttactttaatgtaaaatgagtataactgtagtgagtaaaattcattaaattccaagttttagc

SEQ ID NO: 257281 - DNA, 1047 bp, Homo Sapiens
taaaaaatgcggaaattcccgccttttgttattgcaccaccttttaaaaataccgaagtttaacggataattcccggtgagggcacgaaatgtgaaccctatcaacaacattcttcccattcagtatttcccatcagaggataaatccaacaacaaaagccaaacacccatgatttgccagtcctatacaaaaggggccctgtcaaaacattctatcacaaaacaagcacaataccacaaaataacacaacaccaacaaaaaaaccctgaaatttgacatccctacacaaattgtggaatttcatcttcaaggtcttcaaactgtcgcattcgtttaagccttggtctctgacacattggattcacatcaggcaagccaagctcctcagagtcttctttaggttgaccagttgcttgcccaggacaagctgatgctttgtctggtgtctggcattgacttcaccacgagaccgtggggatcgtgatctgtgccaggaggcactgctgctgagggtgaagctggcttctcctcattccccctgatactgatgatgggagcatgtggtttataaaatgttgtccaatgttgagactgcagtgttctgggtgctatgacaggagcgagagggctaggaatctgaagaccgtctctcagatgcctctctcactgacctgactggctctgcatatggcttactgggtggagtggcatagatagaatggtccccactaatctggaggcttgttgtcactcctttttcctggagtgcactgggcatgatcatcgtagtcttggcagttaggctgttttgttcataatgtttgtcacgaacttttcgtgtagagtttgctggtcaaagccattaaatttggaacaaacagtagtagcagcgtcttttctattaactccttcaaaggcaggattcttgcaaacttgtctaaatttacatttcccatatttctgccatttctctcattaggaggactctgcaagaagtagtctatctacaggcaacttacaggtctaatcttggtccttggagtatg

SEQ ID NO: 257282 - DNA, 1086 bp, Homo Sapiens
tgtcattgattcggggcaagtctctgctctttgtcaacactctagaacggagttaccggctacgcctgttcttggaacagttcagcatccccacctgtgtgctcaatggagagcttccactgcgctccaggtgccacatcatctcacagttcaaccaaggcttctacgactgtgtcatagcaactgatgctgaagtcctgggggccccagtcaagggcaagcgtcggggccgagggcccaaaggggacaaggcctctgatccggaagcaggtgtggcccggggcatagacttccaccatgtgtctgctgtgctcaactttgatcttcccccaacccctgaggcctacatccatcgagctggcaggacagcacgcgctaacaacccaggcatagtcttaacctttgtgcttcccacggagcagttccacttaggcaagattgaggagcttctcagtggagagaacaggggccccattctgctcccctaccagttccggatggaggagatcgagggcttccgctatcgctgcagggatgccatgcgctcagtgactaagcaggccattcgggaggcaagattgaaggagatcaaggaagagcttctgcattctgagaagcttaagacatactttgaagacaaccctagggacctccagctgctgcggcatgacctacctttgcaccccgcagtggtgaagccccacctgggccatgttcctgactacctggttcctcctgctctccgtggcctggtacgccctcacaagaagcggaagaagctgtcttcctcttgtaggaaggccaagagagcaaagtcccagaacccactgcgcagcttcaagcacaaaggaaagaaattcagaccccacagccaagccctcctgaggttgttgggcctctctggagctgagcacattgtggagcacaggcttacacccttcgtggacaggcgaggctctggtgcttactgcacagcctgaacagacagttctggggccggcagtgctgggccctttagctccttggcacttccaagctggcatcttgccccttgacaacagaataaaaattttagctgccccaaaa

SEQ ID NO: 257283 - DNA, 848 bp, Homo Sapiens
  misc_feature (44)..(54): n is a, c, g, or t
  misc_feature (75)..(75): n is a, c, g, or t
  misc_feature (273)..(281): n is a, c, g, or t
  misc_feature (566)..(650): n is a, c, g, or t
ttggtgcaggttttgggaaaaggattcccccaatgggggcaagnnnnnnnnnnnagaggggaccctccccttttnaaaataatcccggtgttattagatttgctttggaagtaaagcagtctggggcttgggaaagggggcacagaaagaaggccagagggaagaagaaaattccaacactaggcaaaaacctgtttagggaaaaagatatttaagcccaaaggtttggcctggagacaaacaggtactcacagatcagaaaagcagaatatnnnnnnnnncttttacccatctcctggttcttaggggtcacctgggcctgacccttatcccacctcctttcttcctaactagccatggactacgggaactccatggagtcataaaatttaggaccaaatactaaggttcagcagagcttcctagcgggtgctgtggcatcagtgagtcacccagtgggtcactggagtgccaggatactaatctctgcctctggccacatggagcctctgctgtttaaccccgggtgccacacaagtattaccattttcccctcggaaaacaannnnnnnnnnnnnnnnnnnnnnnnnnnnnnnnnnnnnnnnnnnnnnnnnnnnnnnnnnnnnnnnnnnnnnnnnnnnnnnnnnnnnaatgatgtagctggtcctgagtacataccaagaaaatgggagaagaggatgttcaaggcttaaacagaacttcagagtaacacagaagagagtagtaaactaggttccaggagagagggagcaacaaaatcaaatgaacagaaagtcaaaacaattaaaaatgcaaaataaaatgaataccttctaccaggtatcccc

SEQ ID NO: 257284 - DNA, 919 bp, Homo Sapiens
ctctagtgggaataccagctctttccgctttatctaacccagtatactgcggctttgttgaagataacaatagcaatttgtgcagagctatttggttcccgagtactgtctataatttcttcaaaagagaaatgatttgtcagggagccattcttcaacactgacccatttatttgcatgctttcaatcagattcttgactttcacacgtggggaaccttcagctcgtgcaaccacactgccaatcacccaggcttcttccttgtgctgctggatatccctcagaatctgctctgtctgctcctttgataccacaaggacagcgccaaccccacagttaaatgttctggccatctcttcctcagagaggtgtccttcctgctgcaaccatgagaagaccctggggatcctccaggtctgggcatctaaatctaccccaagtttctcagggaggactctggggatgttctctagtaatcctccaccagtaatatgggcaaaggctttgacatgtcctgaacgtaggacaggtaacagtgaatggctgtagattctggtaggcgtgagaagtaagtcccctaaagtctggtcaccacaaccatcaggtgctggagaggagtactggagggaagattttgccacgattttcctcacaaggctaaatccattgctatgaagaccagatgaagctattccaacaacaacatcaccctcagtgattctttccaggtgagggagtttctgatctcgctccatggcaccaacggcaaacccagctaggtcatactctccagggggatacatgtcaggcatttctgctgtttcacctcccaggagagcacatccagcttttccacaagctttagcaattcccggcacgcgtgggtcgacgatatcccgagattcgcgaccgtaccact

SEQ ID NO: 257285 - DNA, 462 bp, Homo Sapiens
tgtgtatactgactgggagacacctcccagttggggctgacagacacctcatacagaagagctctggctggcatctggcaggttccctgctgggtcgaagcttccagaggaaagaacaagcagcaatctttgctgctttgcagcctccactggtgatacccaggaaaacagggtcaggaggggacctccagcaaacaccagcagactggcagcagaggggccccaggcacatgcagcagaagtcaggaaatggctgtgtggcagagttcacaagggaggcagggtagtctcaaccctggggcacagctgcagagtcctgttcttcccaggcacttccttggcacacccggtgaagctggggaacagatgactctgcccagccagctctcctaggaccctctcaggtacggatggcaggaatcaaagctcgtgccgaatcctgcagcccgggggatccactag

SEQ ID NO: 257286 - DNA, 659 bp, Homo Sapiens
  misc_feature (579)..(579): n is a, c, g, or t
  misc_feature (594)..(594): n is a, c, g, or t
ccagaggcagaaagaagaagaagctcgcgttcgtgaagaagcagagagggtccggcaggaacgagagaagcatttccagagagaagagcaagagcgcctggagagaaagaagcgacttgaggagattatgaaaagaaccaggagaacagaagctacagataagaaaaccagtgatcagagaaacggtgatatagccaagggagctctcactggaggaacagaggtgtctgcacttccatgtacaacaaacgctccgggaaatggaaagccagttggcagcccacatgtggttacctcacaccagtcaaaagtgacagtggagagcactcccgatttggaaaaacaaccaaatgaaaatggtgtatctgttcagaatgaaaattttgaaggaaattattaaacttacccattggatctgaaaccatccagattaagatgttcaccaacagtgaggagcccagaaattccttttgaatccaattttggcctttgatgatgaagggacacttgggcccctgcctccaggtaagatggtgttcagacaccagcagacttgcagaagttatatggagtgtttcnttcctgaagaaccanagctgaaatttaattgagaatttctacaattaatggaattccctttccctgcctataaaggagca

SEQ ID NO: 257287 - DNA, 636 bp, Homo Sapiens
gctcacctgaccaaccagtatatgcaacgagtggctggaatgagagcacttcctgccaatgccatcttaaatcagttccagcctgcagcggggtggctactttgtgccagcagtcccacaggctcagggaaggcctccatattatacacctaaccagttagcacagatgaggcctaatccacgctggcagcaaggtgggagacctcaaggcttccaaggaatgccaagtgctatacgccagtctgggcctcgtccaactcttcgccatctggctccaactggtaatgctccggcctctcgtggcctccctactaccactcagagagtcgggtctgagtgcccggaccgcttggctatggactttggtggggctggtgccgcccagcaagggctgactgacagctgccagtctggaggtggtattggatgcacacagaagggggaaagatgggatttgacgggtctttgcccagactgatgggctttaattgtatttgttctttccctaaggcgttcccacagctgtgcagaacttagcgccacgcgctgctgttgctgctgctgctccccgggctgttgccccctacaaatacgccttcagtgtccgcagccctcatcctgccatacagcctttgc

SEQ ID NO: 257288 - DNA, 1422 bp, Homo Sapiens
  misc_feature (1086)..(1087): n is a, c, g, or t
  misc_feature (1260)..(1260): n is a, c, g, or t
tttctgcttttggaaacatactgtcctgcaaggtggtgtgtgatgagaacggctctaagggttatgcctttgtccacttcgagacccaagaggctgccgacaaggccatcgagaagatgaatggcatgctcctcaatgaccgcaaagtatttgtgggcagattcaagtctcgcaaagagcgggaagctgagcttggagccaaagccaaggaattcaccaatgtttatatcaaaaactttggggaagaggtggatgatgagagtctgaaagagctattcagtcagtttggtaagaccctaagtgtcaaggtgatgagagatcccaatgggaaatccaaaggctttggctttgtgagttacgaaaaacacgaggatgccaataaggctgtggaagagatgaatggaaaagaaataagtggtaaaatcatatttgtaggccgtgcacaaaagaaagtagaacggcaggcagagttaaaacggaaatttgaacagttgaaacaggagagaattagtcgatatcagggggtgaatctctacattaagaacttggatgacactattgatgatgagaaattaaggaaagaattttctccttttggatcaattaccagtgctaaggtaatgctggaggatggaagaagcaaagggtttggcttcgtctgcttctcatctcctgaagaagcaaccaaagcagtcactgagatgaatggacgcattgtgggctccaagccactatatgttgccctggcccagaggaaggaagagagaaaggctcacctgaccaaccagtatatgcaacgagtggctggaatgagagcacttcctgccaatgccatcttaaatcaattccagccctgcagcgggtggctactttgtgccagcagtcccacaggctcagggaaggcctccatattatacacctaatcagttagcacagatgaggcctaatccacgctggcagcaaggtgggagacctcaaggcttccaaggaatgccaagtgctatacgccagtctgggcctcgtccaactcttcgccatctggctccaactgggtctgagtgcccggaccgcttggctatggacttnnggtggggctggtgccgcccagcaagggctgactgacagctgccagtctggaggcgttcccacagctgtgcagaacttagcgccacgcgctgctgttgctgctgctgcttccccgggctgttgccccctacaaatacgccctccagtgtccgcagccctcatcctgccatacangcctctgcaggcaccccagccctgcggccatggtgcaggggcaaggagccactggactgccttcattgctgggcttgcaccaccccccccaaggaaacagaaaaccaaatggctgggaaaaaaccctttgtttcccccattcattccaaaccaattggcatt

SEQ ID NO: 257289 - DNA, 1002 bp, Homo Sapiens
agcaggctggtccggtccggaattacgggatatcgtcgaccacgcgtccgcaaagggttggcttcgtctgcttctcatctcctgaagaagcaaccaaagcagtcactgagatgaatggacgcattgtgggctccaagccactatatgtggccctggcccagaggaaggaagagagaaaggctcacctgaccaaccagtatatgcaacgagtggctggaatgagagcacttcctgccaatgccatcttaaatcagttccagcctgcagcgggtggctactttgtgccagcagtcccacaggctcagggaaggcctccatattatacacctaaccagttagcacagatgaggcctaatccacgctggcagcaaggtgggagacctcaaggcttccaaggaatgccaagtgctatacgccagtctgggcctcgtccaactcttcgccatctggctccaactgggtctgagtgcccggaccgcttggctatggactttggtggggctggtgccgcccagcaagggctgactgacagctgccagtctggaggcgttcccacagctgtgcagaacttagcgccacgcgctgctgttgctgctgctgctccccgggctgttgccccctacaaatacgcctccagtgtccgagcctcatctgcatacagcctctgcaggcacccagctgcggtcatgtgcaggggcaggagcatgactggcttcatgctggtgagcaccccaggaacgagcagatgctgggagaacgcttgtcccctcatcaacatgctcaatctggcgggagatccgggaatgtgcgggataacactcggccgtgccatggtgaaggccgaggttcggcaggggaacgggcatcaagcccagcgcaaaaagccaagggcggggggacccaagaaacgcacacaccctggtacgcgggacccggcccagagagaagggcgggcgcacaagcggcacgggccgccgccaaaagaaagatacgccgacccgg

SEQ ID NO: 257290 - DNA, 799 bp, Homo Sapiens
ggtctgcgaggtggggtaggcgggcaaggcgggcgccgaggtttgcaaaggctcgcagcggccagaaacccggctccgagcggcggcggcccggcttccgctgcccgtgagctaaggacggtccgctccctctagccagctccgaatcctgatccaggcgggggccaggggcccctcgcctcccctctgaggaccgaagatgagcttcctcttcagcagccgctcttctaaaacattcaaaccaaagaagaatatccctgaaggatctcatcagtatgaactcttaaaacatgcagaagcaactctaggaagtgggaatctgagacaagctgttatgttgcctgagggagaggatctcaatgaatggattgctgtgaacactgtggatttctttaaccagatcaacatgttatatggaactattacagaattctgcactgaagcaagctgtccagtcatgtctgcaggtccgagatatgaatatcactgggcagatggtactaatattaaaaagccaatcaaatgttctgcaccaaaatacattgactatttgatgacttgggttcaagatcagcttgatgatgaaactctttttccttctaagatcggtgtcccatttcccaaaaactttatgtctgtggcaaagactatttctaagcgtctggtcagggtttatgcccatatttatcaccagcactttgattctgtgatgcagctgcaagaggaagcccaccctcacacctcctttaagcactttattttctttttttcaggagttttaatctgattggataggccg

SEQ ID NO: 257291 - DNA, 453 bp, Homo Sapiens
gtaatgtccaaaagtatctttccatttaacttctaaaaatctcttaaatgttttttttaaataattgtaaagtgagtttttgttaagcttataggaatgggccagttaactaaggtagacagatgtaggaaattaaatatttgatttacttagggatctatatgacatcagttatcaaagaatacattttaaccccaaaagtatacccatgctcattgtatctttgatcgttcttcaagtatttctcaatcttttaatctatcaggaacattaatatcaagagcagattgttgtaacataatactcaggatacatgaaatgtatgtgagagataaatagataatagaaagtttattgttataaaaatgacctacaacttatataaaaaaattctgaaaatgttgactttttttggactgaaggctgcaaaataaatggcttctcaaagtaaaa

SEQ ID NO: 257292 - DNA, 366 bp, Homo Sapiens
ttgctaagatgccttagaggcctgccaatgtgcaaaacatttcataagaaaatctttgccaggaagtcctaattgttagaaatctgcctcctttaaccacacaattgaaagctaggtatcacatctgccagaagcattctttcttccggaccttgcagagtccttagaatatatttcttgtttgtatattattaatatctcctttagtgtttaatcaaatgatatagtggttaataggacaaaatttattcatggtattttggtgaaagaagataagtggaaggctgaagctctgcaactcatagtgtaagcattttaaagactattttagtaaaagattaaataaagaatattattttagcaatc

SEQ ID NO: 257293 - DNA, 367 bp, Homo Sapiens
aaatattcacaaaaacatggataaaataatcacaatggtgattacttcttaaggctgggagggagaagaaaaaaacaccgaagcaaatatagcaaaagtaaaatatttgttaagtcggggtgggtgcacagctgttcattacaaaagtctaggtgctattgtgaatgtctgaaacatttaagaggcttgtagagaaatattttttcttttaatattttactgcactgaagagaaatacttttgactgaattatcttctggcattctgtaatttttaatctcaaaagaatcaatgtgggcctgacaaaaagggagatttcactgattttggcaagttcctaaaatgttgtgtcttctttgcacatctt

SEQ ID NO: 257294 - DNA, 974 bp, Homo Sapiens
aagaagcgaggcctgggtggcgaattcggacgagggtcagtttttaaaaatcaagatccggtgctaccccctcgtcccaaaccaggacaccctctctacagtaaatacatgcgtggggatgtacttgtgatgctgaagcagacggaaaataattacttggagtgccaaaagggagaagacactggcagagttcacctgtctcaaatgaagattatcactccacttgatgaacatcttagaagcagaccaaacgatccaagccacgctcagaagcctgttgacagtggtgctcctcatgctgtcgttcttcatgatttcccagcagagcaagttgatgatttgaacctcacttctggagaaattgtttatcttctggagaagatagatacagattggtacagagggaactgtagaaaccagattggcatatttcctgccaactatgtcaaagtgattattgatatcccagaaggaggaaatgggaaaagagaatgtgtttcatctcattgtgttaaaggctcaagatgtgttgctcggtttgaatatattggagagcagaaggatgagttgagtttctcagagggagaaattattattcttaaagagtatgtgaatgaggaatgggccagaggagaagttcgaggcagaactgggattttccccctgaactttgtggagcctgttgaggattatcccacctctggtgcaaatgttttaagcacaaaggtaccactgaaaaccaaaaaagaagatttctggctcaaactctcaggttaacagtcttcccgcaaaaatggtgtgaaagctcttcacagtttttacagcagaagaccagggaatgacttatcatttccagagggggagacgggatcccgaaatctggaaacgtctggaattctgactgggtgcaaggggcaaaactgcagggccagggaaggggatccttcccaacaggtgttttgtgagggccctgc

SEQ ID NO: 257295 - DNA, 283 bp, Homo Sapiens
tgaaaaaagactttaaattgacaaaaagctgtaactgccatactgctttaaaagcaagaagaatggcagggtaagttcaaagttcgagaaggctaaacaacttagacgaacaattgactgagcaaacccttctatggagttacttcctgattcttgaataaatcattcagaatccacagcctctactaatacgccagtggaattccagatcaatcctggcacttcattccccatagacttcagtttgcaccaatcccccatccgaactgtaacaggtttcttc

SEQ ID NO: 257296 - DNA, 970 bp, Homo Sapiens
ctgcaaatgagggaagtacatctgtgtcaggaaccaccactcctactaaggatgaccgtaagctctccccgtgtacaaaaatttgtaacactggttgactcctgttgtagatattttctatcttctctggtgcaatgtattctccttgggccagcttgaaaatgttctttttacggtcgatgatcttcagagttccattcgggagccagcgaccaatgtctcctgtgtgaagccagccatcactgtccagggcttcctgtgtcttctcagggtccttcaggtatcctttgaacacgtttgtacccttgatgcagacctctccttcattattcactgtaaagtagttcatgtcagccacatcttccagcttcacgtaattgcaagccaggggcaccccaacgtgacctgatgtccagtccccaggtaatgtaaatgtacagccacctgtgcattctgtttgaccataagcttcatacacctgacatcccattgctgcccggaagaatgtcatgactgaagtggacatgggggcagctccagtgacaattacacgaacccttccgcccaggctgtcctggatctttgcaaagatgagcttgtcccagaaactatcatgcctgatgatacccttttgaagctctttgaatttactggaaacagccagcttcaacaagaacttcttcaagggtgtcttggcctcattttgtaccttatcgtagatcctgttaaggagtcgaggcaccgcgggaaacaatgtgggcttcaaagtcttcatgtcgtcagccagcaaccgaatatccccttggaagaatccaactctggctccacagctgtacacaacagcctgtacaatcctctcaaacatatgagccagagggaggcaggatatggccacatcatcaggagtgggctcataagcatgctccacacatttgagaaaggcagcagcatttgaaacaatattttgatg

SEQ ID NO: 257297 - DNA, 421 bp, Homo Sapiens
cacacatacagccaagcttaaaccaagaggacatttacatcaccacagaaagccttaccactgctgctgggagcccctgggacaggagaacatgttcccaggttctgagatgcctgtcccagactatacctccattcatatagtacagtccccacagggcctcatactcaatgcgactgccttgcccttgcctgacaaagagtttctctcatcatgtggctatgtgagcacagaccaactgaacaaaatcatgccttagcctttctttggtttcccaagagctacgtatttaatagcaaagaattgactggggcaataacgtttaagccaaaacaatgtttaaaccttttttgggggagtgacaggatggggtatggattctaaaatgccttttcccaaaatgttgaaatatgatgttaaa

SEQ ID NO: 257298 - DNA, 412 bp, Homo Sapiens
gatcccccgggctgcaggaattcggcagagagatggcagcccaggctttggcgctgctgagagaggtagcgaggctggaagcgccgctggaggagctacgcgcgcttcactccgtgctgcaggcagtgccgctcaacgagcttcgccagcaagcggcggagctgcgcctcggcccgctcttctccctgcttaacgagaaccatagattggaagaattgttgaaaattctgatgctgttactgagattctaaataatgctgaattactaaaacaaattgtttattgcattggtggagagaatctatctgtagcaaaagcggctatcaaatccctgtcaagaatatcactaacccaagctggactggaggctttatttgaaagcaatctgctggatgatttgaaaagtgtaatg

SEQ ID NO: 257299 - DNA, 956 bp, Homo Sapiens
ggagcgaggcctgggtggcgaattcggcacgaggggattttgggcgccgaccagacgcggcattttcggaaaatagcgccctgtgcagctgaagcgctttgtgtgtagcggggccgcgtcagcccggccgggtacgaggcgcctcgggtccccgcaccacctcctgctgccttcccgtcgccgctcccgaagcttttccaggtcagtgcgggtctgtgtagggccctgttaccaccggatgtggaagttgatctcttcgctggtaaaaaataattccacttcccccggaacccagatcatccccgcgatttcctgtttattgcattaaggcgccgggtttccggggctcctggccccgcttattccgcgggggtcggcggggtcggcctgggcgcccgcgccgccgctgcgctttgtccgctgggcacactgcttctgggaggggcgggcagacatggtggcggccgccgccccctcctcggccctagcatgccgcggccgcctcgcggctacccggcttgccggtcccgagcggcagccccggggtggcgatggggtcgcgcccaggcaacggaagttctgcgggcgactggacgttggcaatgggcgggagaaacaaggaagggcgggggggatgggacatctgcatccgggcgacagggggggatgtgcgctagggaggataagagggcggggcaagtctgaaggacggggctcgaggccgcggggcgcggagaaagggcccgtgggtggcggagaggaggtgggagccatgaaatccgcagggcgtcgagatgccagtagttgaggagagaaaaggaagaggacgtgacctaggagcggcgcgggtcatcgggcccggggggggacgctgcggctgcggaagactgtcgcgctagacagggcccgtggttcgagccgcctgcgccctgggggcagaagggacgcacggggca

SEQ ID NO: 257300 - DNA, 1439 bp, Homo Sapiens
  misc_feature (49)..(49): n is a, c, g, or t
gtcatggcttaagtccaattatccatcggtagtctcttctatcattcgntattcccatggctgtacctttgttgtgtacagttcaagattgtattctttcttgaccaaaagtaaaatcaaactacatgttcatttcaattaaacagcttctttattagtctgaagacgagtcatagcttccaacttctgtctgtaggcctctgcttcctgttctttctttaggagctgctgtcgatatttttgtgcttctcgatttgcttcatccagctgtttctgaagagcttctctctcttctatttctgcagattccacccggttttcaataatttcgatacattgtctcttagctggtggttcttcacttataacagtttcttcagcaatgtctgttgctggtactgttaatacttgttgtccatctggcatggtcacaatgatgggctgaccaattccactggttggaatagagtgcaaatttccaagctgaattccatctgtaactattgtgatgacttgctgaccccctgaactaactacttgctgaatggcaccatccacagattctgcagtaactacttcttctgtggccactactggagtttctgaagaattggacaatggagcagatgcttcagctaaggcagctaatgtagctaatactgatgtagaagagtttccaaactgaacagcagatacacccgtttcatctgttaggttcaccacccctccaggtccaatgataaactgtggtgttgcagcatgtattgtcacagtgtcaggactctctgggtttgtgttgatttggttctgcatagcaatctgtaatatctctgctaaatcttcatttccattgtctattgaaatatcaaatgcagttttacaaaatttactttgcgtgtgtacatcagcaccatatttgattaaaagttccaccacctcttgatgattgtgttctgtggcccaatggagagctgtccatctttaacatgtcctttgcattgacatcagcaccatgcttaagtaaaacctctactatgctggcatggccctcagaagctgccatatgtaatggtgttcggtccactttggttctggcatctctgctcacaccagctcgcagcagtacctctgtggtggaataatgaccatactgtgctgctagatgaagtggagaagttcccagccagtctgtagtaaagggagctccatttgccatcaaaatacgaacttcatcatcttgacctgctcgtgccgcttctaaaagcttctttcccaaatctaccagggacatctggaaaagcttcgggagcggcgacgggaaggcagcaggaggtggtgcggggacccgaggcgcctcgtacccggccgggctgacgcggccccgctacacacaaagcgcttcagctgcacagggcgctattttccgaaaatgccgcccc

SEQ ID NO: 257301 - DNA, 370 bp, Homo Sapiens
gcactgaatgataagaagggataagcagttgaataatttatcaaggatgctggtgtagctaaatcaggagacaagtaggataccagtaggtaacatgggtgaagaactagggaggcaagagactgcatacaatcttacagatcaggagaaagggtctggattttactctaagtgtaaagggaaactatgggagagatttaagcaaataagtaagacaatattttacttgcaatgattaccctcactgctgtgtagagaatacatgtagaatagaaacaaggagactagtaatctcaggccaagagctgaggctggcttagacttatactacatttagcaagagtaagattaagatcttttaaggcgtgtt

SEQ ID NO: 257302 - DNA, 559 bp, Homo Sapiens
  misc_feature (31)..(31): n is a, c, g, or t
  misc_feature (64)..(64): n is a, c, g, or t
  misc_feature (123)..(123): n is a, c, g, or t
tttccccttggggcgggtgggccccttggtnaactccccaacaggccacgttaaccgggctccnggcgtgtgctccccacccaacccacggcaaacaaaggcgtccctccctcacttgaaagnccctggcctgtggttgtttcatctgtttttttgcctcagtgaacaaaacgttctgaaattagaactcaccaaagttaaaagcagtaaaacaacatatgctacttaagacattttgaagcggaaagtaaagctatgtgaatgccgtccttccttccttcctttttctacagcttggaaacctctgagaatttgctgggggtggcagaggagggtttgtctagtttgaaggaaggaatgttggtagacagtctccagccacgaaagcccaggaggtgccctcttccacacaacagactaagcactacacccactttctttgatccagaaagcatccctactgaccctgtaacctacaccctctctgtccaaagaacagaggccgaccagagttgccagcctggagaggcaccatggagatgaagcttgccctttctgc

SEQ ID NO: 257303 - DNA, 392 bp, Homo Sapiens
accgggctgcaggaattcggcacgaggtttagcagttcactcttctgggagaaaattatgtattcaactatacatgtttgttataaattttgctgatagcaagaacatataacacaattaacaaataataagatacaaatactttattgtaaatcccatatagccagttgattctcacagtatacttagttgctcaggaaagaactaaaatgcttttttaaaaggatacttaattgctttttgctcaactcctacagtcaacctatgattgattgtctttcaactgtgatttgaaaaatggcagactgtccaaatctaactcatttcccaataaatttattatcattcaatctgatacgtgatctactgttagctttaacattaattgtgaa

SEQ ID NO: 257304 - DNA, 368 bp, Homo Sapiens
ctgctaacagggcaggtttagaaaaacaaagatacagcaacataagcattgggctaaacttacttgagagctttggaaaacactgaaaaagtattagttttgttcatcaaatggtataatctaaaatatatcactttcatgaagctgttgttagactaacctgactgaagattttcttgaatatattacattatttctggataataattctttatgccatgtcagtattactttcttccccttggcctttacctacccctccttgttggttcctcttcaaacataatggaacatacctttctgctttctttaaaaatcagtcagcccttctcaacctccaattatcatgggtgcattgctatgggttg

SEQ ID NO: 257305 - DNA, 421 bp, Homo Sapiens
  misc_feature (227)..(235): n is a, c, g, or t
ggatcccccgggctgcaggattcggcacgaggcactctctatttcttaaattgcaaagagttattcatgaaatttgtgataaatatttgaatctgaggcaacgtttttggattctttatacgaggtttttagcagcatgtgtacatgtatgtgatagctgttaacggaattcacttaagttttacttagaagcctgggtagtagaacctagaagttgcagtgggaannnnnnnnnaatttgaaagattaaataggtaaaaagtcatctttaatctctattaaacttttttgtataatgtcagaagtgaaagttccccacatctgcttacagcctgtttgtatccttcctgacttgattgattaaatggacatctctatatacatatgcatataatttcaatttttgcttagtaacaaaaac

SEQ ID NO: 257306 - DNA, 377 bp, Homo Sapiens
cgtttatattccaatcccactaacaacagaataattagattctatgtaatattatgtaatgaataataaaattgaaaagactacaaatgtctgacatttgctgtatatttccttcttcccacattctctcaaatgaaaaatgtatttgttttctaagaattgaaactgaaatcaccacagcacaaaagttaaattttagataaaaaacgtattcgtttgtgtttgtcccttataacaccaatattttgttcacatattatatacacactgaagtgaagaaaaataagtctttgaaatgaaaatggacagagttcacacaaaaattcaagttgttcaaaaactggaaagccctaaaaactagaccaattccaattaac

SEQ ID NO: 257307 - DNA, 364 bp, Homo Sapiens
ctgttaaactttcactactattaatgctgtatacaccaatagactttcatatattttctgttgtttttaaaatagttttcagaattatgcaagtaataagtgcatgtatgctcactgtcaaaaattcccaacactagaaaatcatgtagaataaaaattttaaatctcacttcacttagccgacattccatgccctgaccaatcctactgcttttcctaaaaacagaataatttggtgtgcattctttcagactttttcctatacattttatatgtagaaatgtagcaatgtatttgtatagatgtgatcattcctatattgttattgatttttttcacttaataaaaattcaccttattcctt

SEQ ID NO: 257308 - DNA, 958 bp, Homo Sapiens
  misc_feature (940)..(940): n is a, c, g, or t
  misc_feature (956)..(956): n is a, c, g, or t
tccggaattcccgggatgaaagatggaggcagcggagacagaggcggaagctgcagccctagaggtcctggctgaggtggcaggcatcttggaacctgtaggcctgcaggaggaggcagaactgccagccaagatcctggttgagtttgtggtggtatgtacaagatgagagcgagcctttcagaagccagggtctggtcctggctcctcttactgagatacagggcagcattggcagagagcagacttaaggaaacctgtaaggaggtaaggatgttccctgtctctgccctccctctgagcaggactctcagaagaaagacaagctgctctgcagccagcttcaggtagcggatttcctgcagaacatcctggctcaggaggacactgctaagggtctcgaccccttggcttctgaagacacgagccgtgagtaggcaggggattgtagtagcagctgacctgagtggggaaggaaggaggatttcagttaggtctcccatttggctgatgggaaggaggcccagtgttgcagggaggcaggctagcaggccaccctcactcatgtactcattcctggtggctcatctcaggacagaaggcaattgcagctaaggaacaatggaaagagctgaaggccacctacagggagcacgtagaggccatcaaaattggcctcaccaaggccctgactcagatggaggaagcccagaggaaacggacacaactccgggaagcctttgagcagctccaggccaagaaacaaatggccatggagaaaacgcagagcagtccagaaccagtggcagctacaacaggagaagcatctgcagcatctggcggaggtttctgcagaggtgagggagcgtaagacagggactcagcaggagcttgacggggtgtttcagaaacttggaaactgaagagcaggcagaaaagngcgggacaagctgcanag

SEQ ID NO: 257309 - DNA, 1631 bp, Homo Sapiens
  misc_feature (1604)..(1604): n is a, c, g, or t
ggggtgggaaggcagctgaactcggcgcctggaaagatggaggcagcggagacagaggcggaagctgcagccctagaggtcctggctgaggtggcaggcatcttggaacctgtaggcctgcaggaggaggcagaactgccagccaagatcctggttgagtttgtggtggactctcagaagaaagacaagctgctctgcagccagcttcaggtagcggatttcctgcagaacatcctggctcaggaggacactgctaagggtctcgaccccttggcttctgaagacacgagccgacagaaggcaattgcagctaaggaacaatggaaagagctgaaggccacctacagggagcacgtagaggccatcaaaattggcctcaccaaggccctgactcagatggaggaagcccagaggaaacggacacaactccgggaagcctttgagcagctccaggccaagaaacaaatggccatggagaaacgcagagcagtccagaaccagtggcagctacaacaggagaagcatctgcagcatctggcggaggtttctgcagaggtgagggagcgtaagacagggactcagcaggagcttgacggggtgtttcagaaacttggaaacctgaagcagcaggcagaacaggagcgggacaagctgcagaggtatcagaccttcctccagcttctgtataccctgcagggtaagctgttgttccctgaggctgaggctgaggcagagaatcttccagatgataaaccccagcagccgactcgaccccaggagcagagtacaggagacaccatggggagagaccctggtgtgtccttcaaggctgttggtctacaacctgctggagatgtaaatttgccatgacttcctggaggacagcagcatggagaaagatcctagaaaaggcctctgacttccctcacctcccaaccatcattacaggaaagactgtgaactcctgagttcagcttgatttctgactacatcccagcaagctctggcatctgttggattaaaatccctggatctctctcagttgtgtatttgttcatcttcatatgctggcaggaacaactattaatacagatactcagaagccaataacatgacaggagctgggactggtttgaacacagggtgtgcagatggggagggggaactggccttgggccacctatgatgcagacatggtgaatttaattcaaggaggaggagaatgtcttaggcaggtggttatatgtgggaagataattttattcatggatccaaatgtttgttgagtcctttctttgtgctaaggttcttgcggtgaaccagaattataacagtgagctcatctgactgttttaggatgtacagcctagtgttaacattcttggtatctttttgtgccttatctaaaacatttctcgatcactggtttcagatgttcatttattatattcttttcaaagattcagagattggcttttgtcatccactattgtatgttttgtttcattgacctctagtgataccttgatctttcccactttctgttttcggattggagaagatgtaccttttttgtcaattcttacttttatcagatgatcaantcacgtatttggatttttatttgtttt

SEQ ID NO: 257310 - DNA, 1041 bp, Homo Sapiens
  misc_feature (889)..(889): n is a, c, g, or t
  misc_feature (945)..(945): n is a, c, g, or t
  misc_feature (959)..(959): n is a, c, g, or t
  misc_feature (992)..(992): n is a, c, g, or t
  misc_feature (1017)..(1018): n is a, c, g, or t
  misc_feature (1023)..(1023): n is a, c, g, or t
  misc_feature (1026)..(1026): n is a, c, g, or t
tcggcgcctggaaagatggaggcagcggagacagaggcggaagctgcagccctagaggtcctggctgaggtggcaggcatcttggaacctgtaggcctgcaggaggaggcagaactgccagccaagatcctggttgagtttgtggtggtatgtacaagatgagagcgagcctttcagaagccagggtctggtcctggctcctcttactgagatacagggcagcattggcagagagcagacttaaggaaacctgtaaggaggtaaggatgttccctgtctctgccctccctctgagcaggactctcagaagaaagacaagctgctctgcagccagcttcaggtagcggatttcctgcagaacatcctggctcaggaggacactgctaagggtctcgaccccttggcttctgaagacacgagccgtgagtaggcaggggattgtagtagcagctgacctgagtcgggaaggaaggaggatttcagttaggtctcccatttggctgatgggaaggaggcccagtgttgcagggaggcaggctagcaggccaccctcactcatgtactcattcctggtggctcatctcaggacagaaggcaattgcagctaaggaacaatggaaagagctgaaggccacctacagggagcacgtagaggccatcaaaattggcctcaccaaggccctgactcagatggaggaagcccagaggaaacggacacaactccgggaagcctttgagcagctccaggccaagaaacaaatggccatggagaaacgcagagcagtccagaaccagtggcagctacaacaggagaagcatctgcagcatctggcggaggtttctgcagaggtgagggagcgtaagacagggactcagcaggagcttgaanggggtgtttcagaaacttggaaacctgaagcagcaggcagaacaggagcgggacanctgcagaggtatanaccttcctccacctctgtatacctgcaggtaantgttgttcctgagctgagctgaggnnagatntcngatataacccacagc

SEQ ID NO: 257311 - DNA, 1756 bp, Homo Sapiens
  misc_feature (1506)..(1656): n is a, c, g, or t
  misc_feature (1661)..(1661): n is a, c, g, or t
  misc_feature (1664)..(1664): n is a, c, g, or t
  misc_feature (1667)..(1684): n is a, c, g, or t
  misc_feature (1692)..(1710): n is a, c, g, or t
gggaggcagctgaactcggcgcctggaaagatggaggcagcggagacagaggcggaagctgcagccctagaggtcctggctgaggtggcaggcatcttggaacctgtaggcctgcaggaggaggcagaactgccagccaagatcctggttgagtttgtggtggactctcagaagaaagacaagctgctctgcagccagcttcaggtagcggatttcctgcagaacatcctggctcaagaggacactgctaagggtctcgaccccttggcttctgaagacacgagccgacagaaggcaattgcagctaaggaacaatggaaagagctgaaggccacctacagggagcacgtagaggccatcaaaattggcctcaccaaggccctgactcagatggaggaagcccagaggaaacggacacaactccgggaagcctttgagcagctccaggccaagaaacaaatggccatggagaaacgcagagcagtccagaaccagtggcagctacaacaggagaagcatctgcagcatctggcggaggtttctgcagagggtaagctgttgttccctgaggctgaggctgaggcagagaatcttccagatgataaaccccagcagccgactcgaccccaggagcagagtacaggagacaccatgggtgagagaccctggtgtgtccttcaaggctgatggtctacaacctgctggagatgtaaatttgccatgacttcctggaggacagcagcatggagaaagatcctagaaaaggcctctgacttccctcacctcccaaccatcattacaggaaagactgtgaactcctgagttcagcttgatttctgactacatcccagcaagctctggcatctgtggattaaaatccctggatctctctcagttgtgtatttgttcatcttcatatgctggcaggaacaactattaatacagatactcagaagccaataacatgacaggagctgggactggtttgaacacagggtgtgcagatggggagggggtactggccttgggccccctatgatgcagacatggtgaatttaattcaaggaggaggagaatgttttaggcaggtggttatatgtgggaagataattttattcatggatccaaatgtttgttgagtcctttctttgtgctaaggttcttgcggtgaaccagaattataacagtgagctcatctgactgttttaggatgtacagcctagtgttaacattcttggtatctttttgtgccttatctaaaacatttctcgatcactggtttcagatgttcatttattatattcttttcaaagattcagagattggcttttgtcatccactattgtatgttttgtttcattgacctctagtgataccttgatctttcccactttctgttttcggattggagaagatgtaccttttttgtcaactcttacttttatcagatgatcaactcacgtatttggatctttatttgttttctcaaataaatatttaaggttnnnnnnnnnnnnnnnnnnnnnnnnnnnnnnnnnnnnnnnnnnnnnnnnnnnnnnnnnnnnnnnnnnnnnnnnnnnnnnnnnnnnnnnnnnnnnnnnnnnnnnnnnnnnnnnnnnnnnnnnnnnnnnnnnnnnnnnnnnnnnnnnnnnnnnnaaaanttnttnnnnnnnnnnnnnnnnnnaaaaaaannnnnnnnnnnnnnnnnnngggggcgggccccaaaaggaaagggaaaaggggcaaatttttttcc

SEQ ID NO: 257312 - DNA, 361 bp, Homo Sapiens
ttgagcaaaagtggcttatacggatgatcataaaggatttaaagcttggtgttagtcagcaaactatcttttctgtttttcataatgatgctgctgagttgcataatgtcactacagatctggacactttattttctgcatttaaaccaatgctagctgctattgcagatattgagcacattgagaaggatatgaaacatcagagtttctacatagaaaccaagctagatggtgaacgtatgcaaatgcacaaagatggagatgtatataaatactactctcgaaatggatataactacactgatcagtttggtgcttctcctactgaaggttctcttaccccattcattcataatgcatt

SEQ ID NO: 257313 - DNA, 372 bp, Homo Sapiens
  misc_feature (14)..(14): n is a, c, g, or t
  misc_feature (50)..(50): n is a, c, g, or t
gtaaaagacagggncctcgcctgtgttgccccaggctggtcctcaaaacnccccgggccccaagcggaccctcctcacccttggcccttcccagagtgccgggattaataaataggccatgggcccactgtgcccagttggaagagcttatttgaagaatttcccatgctgttggttttgtagaaatgtgttgctttttgtaaagagcaaatgattggttccttccctggagtgggggaatgaggaggaatagaattaattcaatatttcagttagttaacgttctagcacatttattttataatgcaatacttccttgggaataggaagtaatactgtataagacaagacactaacttgttatgcagaagg

SEQ ID NO: 257314 - DNA, 502 bp, Homo Sapiens
  misc_feature (19)..(19): n is a, c, g, or t
  misc_feature (30)..(30): n is a, c, g, or t
tggagggcaccctacagtntccaaagaaancccaccccagtgatttatccccccagtgcacaattccagtccagctccctgcaccctgttatggttatttggtggctttaaaagaattgggtgtcaacctatagcagagtgtattgtcaatacattattgactactttaaatgattgtggttttacaaatgaatatttgaaagcaaatttaattgcattttgttctgatggtgctaatacaatcctgggaagaaagtctggagtagctacaaaattgttagaaaattttcctgaaatcatcatttggaactgtttaaatcatcgattacaattgtcacttgatgagtctatatccgaaataaaacaaattaatcatttaaaaatatttattgataaaatttattctatttatcatcaacctaataaaaatcaaaccaagcttctatgaactgtagctaaagaacttgaaactgaaagtattactgctgtatggcatgcatat

SEQ ID NO: 257315 - DNA, 440 bp, Homo Sapiens
cggggaacctgaactccctcctctgtgccccccccaccgcagggctggacccctaaggagggaggacctcagtagataggtattgaagtgatgaagatgagggaaacggctttcctgtggcccgggaaaactccctgctgcagggggtcccacctgatgggtgagtcagagaaagactcaggcctgttgaaagtggatcaacaggcaggcagggagatggccagtagccagccgtccgtcctgttcacagcctgcggagtggtgaggctgcctctgtgttttcatggatctgagattcagaacatagctggtttacagccatggcccagttgtgtgctctggagtttcactgcctgaattttaacttgaaaatgtaggacttgggagtctctcttgacgattctggcttgggagattgcctgattatatatttaaaaaaa

SEQ ID NO: 257316 - DNA, 897 bp, Homo Sapiens
atgttgtgggaatgaagtgggtgaaggaatgcgagtcctgagaaccgtgtctgctttgtgcacgtgctcagacgcatcaacgattctgcttctcattcgcttctggtgccttttaagtgctgccagggtgtccgcactgtgaacggtccttgacggggtgttatcttcagaaagggaagactagcacccggccccccaggcttccaaagcatcatccatgcaaccatgttggctttcaattccttggagttaaggctgacggccatctggttctaacccggcctcctgtcttcctgtcccactgacttcccgttcttcagctgctctaggcttccctgtctgtctccagaccctagcccacctctgttcccttcccaggctcagctcatccatcaccaactgccatggacccctcttcagcaccctgccccctcctgcagtccctccgcccagccagtacctggtttctgtctcagcggggagctgactcctctctgtgcccccagcgcagggctggactctgaggaggaggactcagtagataggtattgagtgatgagatgagggaatcggctttctgtggccgggaacactcctgctgcagggggtccacctgatgggtgagtcagagaaagactcaggcctgttgaaagtggatcaacaggcaggcagggagatggccagtagccagccgtccgtcctgttcacagactgcggagtggtgaggctgcctctgtgttttcatggatctgagattcagaacatagctggtttacagccatggcccagttgtgtgctctggagtttcactgcctgaattttaacttgaaaatgtaggacttgggagtctctctgagacattctggcttgggagattgcctgattatatatttcaaa

SEQ ID NO: 257317 - DNA, 442 bp, Homo Sapiens; identical to SEQ ID NO: 174295

SEQ ID NO: 257318 - DNA, 343 bp, Homo Sapiens
atttctggctttccatcatgggtcatactgaaagtactgtagatgctagctaacctctgccctttttaagaataaaccttttttttaaacttaagaactaaagctgagattctcctattctgttgttgaggggcttcctgcatgcccgcccattttatcacagcaatttgagaaggtttctttttggtttctgacaacaagcatttggggagaaagccaggcataaattagttacgatagttggtggttaatggttctccagtgaaaatttggacttttctttttcccttatagaatgcataattaaaacagactattattttgaaatgaaatattgaatatt

SEQ ID NO: 257319 - DNA, 426 bp, Homo Sapiens
  misc_feature (22)..(22): n is a, c, g, or t
  misc_feature (41)..(41): n is a, c, g, or t
  misc_feature (64)..(64): n is a, c, g, or t
  misc_feature (72)..(72): n is a, c, g, or t
ccttgaaaagggtcaaaaaaanggatggcccccctgaagcncctttgtaaagaaagggtagatncccatatnggatgtaacctgaaaaaaaagataaaatgtgaccttccccctgcctctgtgcaagcagtcgggctggatgcccctgtggccctttccttgggtccctcatgcccacccccacagctccccggaaccttgaagcccaatctgggggactttcagatgtttgacaaagaggtacccaggcaaacttcctgctacacatgccctgaatgaattgctaaatttcaaaggaaatggaccctgcttttaaggatgtacaaaagtatgtctgcatcgatgtctgtactgtaaatttctaatttatcactgtacaaagaaaaccccttgctatttaattttgtattaaaggaaaataaagtt

SEQ ID NO: 257320 - DNA, 500 bp, Homo Sapiens
cagctgcctttcctagactctccccagtgaggcatggaaggtgtttctgaattttgtctacctcacagggatgttgtgaggcttgaaaagggtcaaaaaatgatggcccccttgagctctttgtaagaaaggtagatgaaatatcggatgtaatctgaaaaaaagataaaatgtgacttccccctgctctgtgcagcagtcgggctggatgctctgtggcctttcttgggtcctcatgccaccccacagctcccaggaaccttgaagccaatctgggggactttcagatgtttgacaaagaggtaccaggcaaacttcctgctacacatgccctgaatgaattgctaaatttcaaaggaaatggaccctgcttttaaggatgtacaaaagtatgtctgcatcgatgtctgtactgtaaatttctaatttatcactgtacaaagaaaaccccttgctatttaattttgtattaaaggaaaataaagttttgtttgttaaaa

SEQ ID NO: 257321 - DNA, 622 bp, Homo Sapiens
cttactatggagaagaaattggaatgggaaatattgtagccgcaaatctcaatgaaagctatgatattaatacccttcgctcaaagtcaccaatgcagtgggacaatagttcaaatgctggtttttctgaagctagtaacacctggttacctaccaattcagattaccacactgtgaatgttgatgtccaaaagactcagcccagatcggctttgaagttatatcaagatttaagtctacttcatgccaatgagctactcctcaacaggggctggttttgccatttgaggaatgacagccactatgttgtgtacacaagagagctggatggcatcgacagaatctttatcgtggttctgaattttggagaatcaacactgttaaatctacataatatgatttcgggccttcccgctaaaatgagaataaggttaagtaccaattctgccgacaaaggcagtaaagttgatacaagtggcatttttctggacaagggagagggactcatctttgaacacaacacgaagaatctccttcatcgccaaacagctttcagagatagatgctttgtttccaatcgagcatgctattccagtgtactgaacatactgtatacctcgtg

SEQ ID NO: 257322 - DNA, 641 bp, Homo Sapiens
gaaactgcatgcctgctctatagaagtcatgcacctgataaagtgtcacgtatttgtgcttcttagattatttacccttgagtagccacaggtagaaatgaggttgtcaaaccaggaatttagtttctcaagtggaaattgcattgaaagataatcctcaatgtaatctgcatgttcttacccatctggagtttagataatgcagacgagtcattttctggtgcttctcttttcatgtgttttatttcgtacctttttgtttacatggaattttcttgaaatgtttgctagatggatcaactgtcacctcttagtacaaagccatgccagacactgcacctactctgcactctaatgagaacaatccggaaaggatgattttcaagggagagtgaacctcttcctggagatctgaggttatgttacagtattgtggagttttgttgcttaaaattctcctcctgtcctcacaggcaattttgctagagttgcaatcctcacatttgagagaactgtcaaaactctaagacataaagtttaaataactcattaataattgcatgtgaatcccccagtaatgtatgtacatgagcatacctttcaaagatgttcaatggtgctgtaaataaaatttttttaaa

SEQ ID NO: 257323 - DNA, 746 bp, Homo Sapiens
taattttaacatcaaaggcaaagaatatggagaggaagagagattatacattatacgtaaatctatgaagatgtcaaagtctcaatttgatagtctagaagatcatcagaaagaaacttttcttaaacgagagctctggatcaaggagaattatgaggtctacaagcaagaacaagaggaagaattaaagaaaaagttggcaaatgaccccagatggaagagatacaggagatggatgaagaatgaagggcctgggcggttaacatttgtggatgactgaagattgatggaatgctactatgccaaaccttaattgtgatattattttcataactgaattattttagaaatgtatcaattgactgctgctcagcagtaactaaaattcctcaagtatttgattaaacagaataatgtcaaaatttaaaccttcccttaaaactttatacataagacatttatgattgttcaatttttataatctatttgtggattttgttaaaagatttcacatgaagatttattagttgccatttaaaatttttatatgtttagttaaaagatttgacatgaaaatttattagataccatttaaaaattttatgtgttatgtgtttattctttgagaatgttaccttactgtttgtaatagtgctacatttttctgctttcatggcctctgtattttcacaaaacaccaaaaacagcatttaattatattatcatgagtgtgttatatggaaaaa

SEQ ID NO: 257324 - DNA, 551 bp, Homo Sapiens
tgcctctcgcctaaagaatacaggactgctgctcttatcaggtagctctaggtcagtgtaatgaactactagaggccaatcctaaggccgaaggattgcttcaaggtaaacatagcaccaaggggctgggcaagatggctcccagttctgcccacttcgtcaccctgtaagtactcagaaccaggaggactagaagactccttttggccagataagactacgttctctattgcagcttctgaaccagagactgatgttgacacactttttttccatttggcaggaatgggagtacagtgccattaggaccagcaagtgacacaggaattctgaatccagatggttataccctcaactacaatgaatatattgtatataaccccaaccaggtccgtatgcggtaccttttaaaggttcagtttaatttccttcagctgtggtgaatgttgatattaaataaaccagagatctgatcttcaagcaagaaaataagcagtgttgtacttgtgaattttgtgatattttatgtaataaaaactgtacaggtctaa

SEQ ID NO: 257325 - DNA, 411 bp, Homo Sapiens
ggacctcctggggaatccatgaagctggtccgcttgagccgcaggcgggcacgggcctgggcaccacaggccttgcctcgagctgcagaggccacaagacacttctggtactgaaccatacaggcagcctgcacagcttcagagagtccccctgcatggggctggcaccagaaggctgcgcactggaagctctgacggcccaggtcagcgatgaggccaaaggtgtgtgggtcgcggccaacaccaataaatgtcacaaggcgcacagggcactgccacaatggctcctcctctgtactggcctctgcctgaatgggatgtgcagtcatgagagagtcagacacactgagcatggtggggacacaggcattccggtcccccctggcggtgagggtaccaatggcctcgttc

SEQ ID NO: 257326 - DNA, 1503 bp, Homo Sapiens
  misc_feature (419)..(434): n is a, c, g, or t
  misc_feature (1302)..(1356): n is a, c, g, or t
  misc_feature (1370)..(1370): n is a, c, g, or t
aagccgggagctcggccacgggtggcgaggctgcggtgaggcctggtctccggctgccagaccatgctgagtggagcacgctgcaggctcgcctcagcgctgcggggaacgcgcgcgccgccgtccgcggtcgcccgtaggtgcctgcacgcgtcggggtcgcggcctttggccgaccggggcaagaagactgaggagccgccccgcgacttcgatccggcgctgctggagttcctggtgtgcccgctctccaagaagccgctcagatatgaagcatcaacaaacgaattgattaatgaagagttgggaatagcttatccaatcattgatgggatccctaatatgataccacaggcagctaggatgacacgtcaaagtaagaagcaagaagaagtggagcagcgctagttcataatttnnnnnnnnnnnnnnnncgcaacagccaacttttcttaataccatataccttttaaaacacagtggcaggtaataagtggaagagaagaatgtttctgtctcttcctacgttgactgttcttattccactggtttctttagcaggactgttctactcagcctctgtggaagaaaacttcccacaggcctgcactagcacagccagcctttgcttttacagcctgctcttgcctattaccataccagtgtatgtattcttccacctttggacttggatgggtattaaactcttcaggcataattgatgcaactagagtcaatatgctgtatatattaatgatagctcttgggcatcgatctctgaaagctcaaatggatggaatttagtttgcgggaaagaggctttgctttgcgcatatcaggcttaggactgtgggaggcttaagttgcagatgcttcttttattgtactcttgttctgcccttgttttttgaaggctctgacttataactgctgtatcagaagaaacattttgacagtgtcttggttggagatgaacatccctaattgacatgtgatgactatttcttattccattcatctaagagtcattgaaattttgttttgcttgtttgtttagcttcaaggtctttggtaaagtcacatgttaaggatgactgaaataattccaaaggagtgatgttggaatagtccctctaagggagagaaatgcatttgaacgaatgtgatataaaaccacataatcaaatagaaacttcatgtacttacaaaaactgagtttgtaaaattaccttcatttctttgacattaaatgcttatattagcaataaacatgttgacactttcctataaaaaataaaccannnnnnnnnnnnnnnnnnnnnnnnnnnnnnnnnnnnnnnnnnnnnnnnnnnnnnntttacaacgccttngcccttggagaagcttcccaaaccattacatgtgcctcgcggcccccctgttgcaaagggaaccccgggccttacgctgtttccctaggaaaatccggccatttaaaaaggggcttgggattctcccccaaat

SEQ ID NO: 257327 - DNA, 959 bp, Homo Sapiens
  misc_feature (542)..(542): n is a, c, g, or t
  misc_feature (552)..(552): n is a, c, g, or t
  misc_feature (900)..(909): n is a, c, g, or t
accatggagtgccctaccatgctacagggctgctttcctttatccggcgagtcaagttatcaaaccctcccagtgctggccccatcgttgtacattgcagtgctggtgctggacgaactggctgctacattgtgattgacatcatgctagacatggctgaaagagagggtgttggtgatatttacaattgtgtcaaagccttaagatctcggcgtattaatatggtccagacagaggaacagtacatttttattcatgatgccattttagaagcctgcttatgtggagaaactgccatacctgtctgtgaatttaaagctgcatattttgatatgattagaatagactcccagactaactcttcacatctcaaggatgaatttcagactctgaattcagtcacccctcgactacaagctgaagactgcagtatagcgtgcctgccaaggaaccatgacaagaaccgtttcatggacatgctgccacctgacagatgtctgccttttttaatttacattgatggggagagcagtaactacatncatgctgctnctatggacagctacagggcaacagctgctttcatcgtcacacaataacctctgccaaacactgtaaaaaacttctgggaaataagggtatgatttatggctgtaccctccatggggatggtaaacgaagtcaaccttgcccccagggctgcccctcaatactgggccaaaggaaaggaatgcttccaaattggcccctttccaaggggaaaggtatggctttggttccatgggactggggaattgggttccacccggaattttttaaggaatttggaattctaacaaaaaccccccgggaggggtgtttttttgtgtggggggaaaccaattttcccaaccccccgannnnnnnnnnttttctccctcccagaaaaaagcgcccttggtaatcccaaaaggggggtc

SEQ ID NO: 257328 - DNA, 455 bp, Homo Sapiens
gtcttttgcatgatgatccggatttaaatttgatatcacagtctaatttttattcataagccaatttttctgcactgagcagagtcttgctacctccagtcagtattgttttggtttgctacttccctcacccactttggcctccgttcaccccaccccaccccacctctccccaccttacccgccgccgccgcttggcttcttctttaggattgtgatggttcgttctgtttacatcaatcagttttaacgagaggtatgcctgtactcgcttgtgcagaaaacattgttccagattcaatcgactgggtttatgtcccttcacatagtttttaaggttatttatttaaatgtctaatgtattttattgtaacagacattgttttgccaacattgcctatttcagtggcacgtcatctagttttaaaaaaataaaacattttaaatggacagag

SEQ ID NO: 257329 - DNA, 1779 bp, Homo Sapiens
  misc_feature (94)..(102): n is a, c, g, or t
  misc_feature (112)..(112): n is a, c, g, or t
  misc_feature (122)..(122): n is a, c, g, or t
  misc_feature (222)..(247): n is a, c, g, or t
  misc_feature (530)..(578): n is a, c, g, or t
  misc_feature (626)..(688): n is a, c, g, or t
  misc_feature (970)..(1008): n is a, c, g, or t
taagggacttggtgtgcgcgggtgaggtgtataaaacctacatatggtgcggtgtgggagcggtgacgtgaataacgcgcgtgcgtgcagaacnnnnnnnnnaggtgaatanttgcatgtanagcggcattttatgggacgccacacttataagggcgcggaggggagtaaatgtataaaccccgccggggggccgttaggggccgggaaataatatctgtnnnnnnnnnnnnnnnnnnnnnnnnnnccgccgaatttgtacaatgcgaccacttaattagggtggggggtagggggcccccgttttacatatgggaaacaccttggcggagcgggggcgtctccccacacggggcgggggagcggtatttgttttttggcggatggcggacccgaggctcgcttggataaggggggagcgcgcgacccgggggaggcggattcaatgtgtatataaacacgtcaggatgcggaaggaatgttgaacctagaaggtcgcgagtagagtgtcttcatataacaacgcggannnnnnnnnnnnnnnnnnnnnnnnnnnnnnnnnnnnnnnnnnnnnnnnnttacgcggtgtaacagtgaaaagaaaaacgggggggcgggacaaaaannnnnnnnnnnnnnnnnnnnnnnnnnnnnnnnnnnnnnnnnnnnnnnnnnnnnnnnnnnnnnnaataaacggctagaagtggggatgtgcccaattaaaaatggtggtttttcgtaaaactagagggcgagccgctggaataggcaatagtgacaaagcgatgtctgtggcgataaaatacattaggcatggaaatgaatggccttaagggctatgtggagcgacatgagcccggtcgcttgaatctgggacaatattttatgcacaagggagtgcaggcatacctctcgttaaagctgatgtaaacagagcgaaccatcgcaatcctaaagaagaagccaagcnnnnnnnnnnnnnnnnnnnnnnnnnnnnnnnnnnnnnnngtgaacggaggccaaagtgggtgagggaagtagcaaaccaaaacaatactgactgaggtagcaagactctgctcagtgcagaaaaattggcttatgaataaaaattagactgtgatatcaaattaaatccggatcatcatgcaaaagacacaatacatgctatttagttttagaaaaaaaaccacacacattcatttcctaaaatctgctgccaattaatttgctgacaatgtctgctggctcaactattttttttatacaaggatgagtattaaacagaacactgtacatgctttttcatctacaaaaaaatatttgcataaaatagtgttagttctctgtacatgtcaatggacactttaattatgtgtataaaaaaggaaaatcttgccccactggagtcagaaaaagcaaaacaaaatctagagtatgaaacctccatcaccagccagtatgttcatgtgaaaattcagcagaaatagacagttgctttaaacaataaaaaaattaattgattaaggtaaacatcttctttatggaaaacggtcaggcaagaccagaacatatcgctaaagttagtgtctgtgcaatagacacagatcaccaggggcattatgagcagcacaacggccaggaaatcccatcggtgcatgccgagaacgagcaggatttggtggcaggctgcacacactctttaccaggttccaggtagttgcggggcacaaacttgagcagctcatccaggagaatcacgggcaaggatagtttcag

SEQ ID NO: 257330 - DNA, 426 bp, Homo Sapiens
tctgtccagtaaaggttccctctcacggaatccgttacaatgcctctgggattcaccaggtcagtctcaaagagcacccggcgctgcgtgccgtccagcttcgccacttctattcgatccaggttagagtctgtccagaagatgttgcggccaaggtgatcaacagcgataccttctggacttccaagatcttgtctaatggtggtggttggctctccaccatgtagactagctctcccaatggaaggctcagtgatgtccgtccagtaaaccatcttgtccacgcagtcaaaggccagtccaatgatgactttagccgggacatgaaggaacgcctttgcttctgtcttcctcatggtatttccctacaggggcaggcgctctatcttcacagtctgggcagagagtatatgggtcacaggaggc

SEQ ID NO: 257331 - DNA, 424 bp, Homo Sapiens
tttggtatgtgtgtagggtcatttccagtgttgatcatcttgagcatgttcaatgacagttcaagatggggtaaaagagttcatttccacattcaaataatagagattaaatattataataatatttgctatatccaataaatctatgattaactaaaagtgcttgctttttagcttttcttgatacagctctaaatgaactggaaaccataaaattaccccccaaacggttgcagaattagctcatgttctattgtcaaatcaacattaattagcctcgattctcatttttaaacaatgtaaaagatttttctatcaaatcaagatggcctaacttcaccacattatcttgtgactcatttttagtattatagggcagaatttttagcctcttctcagaagtctacatgctttttcctcgtgc

SEQ ID NO: 257332 - DNA, 739 bp, Homo Sapiens
aaatgttagacatgacttcatggaatctttttgagggatataacttggagagttttgtcataaaaatgagaacattctttcttgcttaaacctttttccttaacagaggaaggcactgaagttgtagatattggaaatctctcagaaatctaatgtagaacagtcttttgaggagggacagagcatttccaaattaccaacttcaaggctataaaggaaatgcaagcatcatcaagcgcagttcaacctccttaccttacaaatggaggcccccagacaaaaacgttacatgccaaacctaggcataaatccaagcctctctgtgcctgttcatccaggcctctgcatgcgtatccagtagtctttccatgacgtggcagttgtccacctgtgcagagagcaagagaaatgtgaatgtttaattcattacaagctaagcagaaggcttttgcctgggaaattcccattagattgatgggatgggagagcaaggagaaataggagaagcttaatgaagacgttgctcctcacaccagtatgtggcacttactccctgccaaaatgtttactcatcatcttacagatccttgcatgctcattatttatagataatattgattttttaattttaattactagagtatttcactgccttgcttcttgacttacagagcaaaagccttcatggtctttttaagccatgcgtgttggcaaataagtcacagaaggttacctttag

SEQ ID NO: 257333 - DNA, 607 bp, Homo Sapiens
  misc_feature (466)..(466): n is a, c, g, or t
  misc_feature (509)..(509): n is a, c, g, or t
  misc_feature (520)..(520): n is a, c, g, or t
  misc_feature (539)..(539): n is a, c, g, or t
  misc_feature (567)..(567): n is a, c, g, or t
  misc_feature (574)..(574): n is a, c, g, or t
  misc_feature (592)..(592): n is a, c, g, or t
tggaaccccagcatatcaccctaccccacatctccacatccccaaaatataaccatacttcaagggcagttcaaataccatctccttctatcctccatgaagtcagttatctcttccattggaattatcgccccctctcctgaacagtactatttcgtgtgaatctcctccaagccttcttttcattttatatctcatgctgtaattcttggaaagtatgctgtagctcaagtgcagaattctcatcagttttatctttatatctctcctaaacactttacctgatgaagagcctggcatacacataaatatatattgaatgaatcagtgatggattgaaaagagaaatgatggatctcctaaattttaacttttataaaatattttgatacattcatgaccttactttaggcaaggcaatgaacgtgatgtaaactattgttggatatagtttttatattggganagtgtaaggtaggtttgtgggcctgggggttgtgacatatccnaggggttcccncatctgttttttattggantgtaatttcacaagcccttaaaatttgnccccttnaaagtaaatggtggcgtnggatttaggttattt

SEQ ID NO: 257334 - DNA, 963 bp, Homo Sapiens
  misc_feature (636)..(644): n is a, c, g, or t
gcctgtgtccccagggcgcagggccgcgcgtccagccccagacccgccggggtccctggggacgcgccagcccggcagtggctcgacgatggaggagccgcagcgcgcccgctcgcacacagtcaccaccaccgccagctccttcgcagagaacttctccaccagcagcagcagcttcgcctacgaccgggagttcctccgcaccctgcccggcttcctcatcgtggccgagatcgttctggggctgctggtatggacgcttattgctggaactgagtacttccgggtccccgcatttggctgggtcatgtttgtagctgtattttactgggtcctcaccgtcttcttcctcattatctacataacaatgacctacaccaggattccccaggtgccctggacaacagtgggcctgtgctttaacggcagtgccttcgtcttgtacctctctgccgctgttgtagatgcatcttccgtctccccctgagagggacagtcacaacttcaacagctgggcggcctcatcgttctttgccttcctggtcaccatctgctacgctggaaatacatatttcagttttatagcatggagatccaggaccatacagtgatttaccattttaataattaaaaggnnnnnnnnnggaagcctctcgctgtaaaaacagctgtaggtataatgtatattcccagagaattgtatttaactaattaatgttttttatattcttaaatttgctcacaaattgtggtttgttacaattaaactggatacttatttgcaaagtgttgtagcttataatgaactcttaagtatcttattaatgtattaatgtcttcatagatcatattttcttagacaatgtttaaatagataaattgctaatattgagaatgtgtcaagtttgtaaacctaacttttaagataccaaattcttttttgattaaatgttgcaaaatccc

SEQ ID NO: 257335 - DNA, 456 bp, Homo Sapiens
  misc_feature (391)..(391): n is a, c, g, or t
  misc_feature (406)..(406): n is a, c, g, or t
  misc_feature (411)..(411): n is a, c, g, or t
atcagtgtatttagacactatcttgaaaatcagatttatatgctgtgtatcacataatgccttgcctttaacatttactttttttgtacactttttcagattatttctggaaacatatcaatataattacagtgtttgggggtgtctttaaatatattaggttatacattagtcagcattttaaagacatttcttcccaagtacgagaataggcatctttcattttcattttattttgtattacttaatcttttaagcaagcaaaaatttattctcagggtcagctgtacacctttattgaccagtacttggataatccctcccgtatatgatggaatacatttttatacactaacattagcattaaccaggtgataagttggccatgggntataatgggaattangggcngggacctttcctttggaaaggaaaacctggatggtaatcccgtgg

SEQ ID NO: 257336 - DNA, 396 bp, Homo Sapiens
tgaaagctttggtgcattaaccacaggatttgcctcgtgcaagtatctcctccctgcactcttgtaatcataggtacagccatgagtttctgcataacgatgagatgcacagaagttgtttccacatctgcattcgtagctactagccagtcctgttttctttccacaaagaaaacaatgatttgttgttttcttctttgtctgaagaggggctttcacaggtggaaggtgatgagtagtacattctcctacgcttttccctgctgctgcattatttccattcattccaacaccatgggtagacaaaaaaactcctgtatgttctaactggggagaacttttcctaaagttttcttcctgaaaatgctggaggtttgtagacagcccagttccaga

SEQ ID NO: 257337 - DNA, 1328 bp, Homo Sapiens
  misc_feature (18)..(18): n is a, c, g, or t
  misc_feature (21)..(21): n is a, c, g, or t
  misc_feature (25)..(25): n is a, c, g, or t
  misc_feature (28)..(28): n is a, c, g, or t
  misc_feature (32)..(32): n is a, c, g, or t
  misc_feature (34)..(34): n is a, c, g, or t
  misc_feature (42)..(42): n is a, c, g, or t
  misc_feature (45)..(45): n is a, c, g, or t
  misc_feature (47)..(49): n is a, c, g, or t
  misc_feature (57)..(57): n is a, c, g, or t
  misc_feature (59)..(68): n is a, c, g, or t
  misc_feature (79)..(79): n is a, c, g, or t
  misc_feature (82)..(82): n is a, c, g, or t
  misc_feature (84)..(84): n is a, c, g, or t
  misc_feature (88)..(89): n is a, c, g, or t
  misc_feature (118)..(118): n is a, c, g, or t
  misc_feature (120)..(121): n is a, c, g, or t
  misc_feature (529)..(529): n is a, c, g, or t
cccctttgggtgggaagnccngggntgntacntnttcccatntgnannncccgccangnnnnnnnnnntttttggaaanttncntctnntatgggaacattttttccctcagaagaangnnacccgacaatcacttctacctaaaggtgggctcactggcttcatttgcagaagaaaatgctgatgaacagagcagcggcttagaaggtgcgtgcaaagtgaatctggagttgctactcactaatgctgacaaagggttgaaagctccagagcagcatctcaagcatgttgcaggagtgctgaatggggaatcagtagagacttcagttcttaactaccgggaattaagtcctcacaagaatagactcttgtcacctcttcgctgttctgcaccaatgtcgctacataattctctggtgaaaccagagatgacagtccaaatgttttgagtttgggaagctacagccttcttcttctcagtcactggatgttcaaaacataactgattcttctttctctaggacaactngctttcaaggtgttaaagttgattcacttgggaaaagatctgatgttatttccaaagttgaggctcgggatatcacagaaatgactaacaaggcttccaaagagcctgttggttgtgtaaataatatcagttttcttgcctcactggccgggagcacaagcagaaatagattacagggcacacgtggggcaggcaggcttcagaactctggaactgggctgtctacaaacctccagcattttcaggaagaaaactttaggaaaagttctccccagttagaacatacaggagtttttttgtctacccatggtgttggaatgaatggaaataatgcagcagcagggaaaagcgtaggagaatgtactactcatcacctcccacctgtgaaaagcccctcttccagacaaagaagaaaacaacaaatcattgttttctttgtggaaagaaaacaggactggctagtagctacgaatgcaggcaggttggcgagctggagaagctcagatgctttctctgtgataacccagcttggggattatgcaaaataaaatatttaaattgcctgtttataacatcattaagatgatgttcaatagctatcttcagttgaacttctaattggctgaagtaaagaacaagtagatagctcatgggtttccaaaagacaaaaacagatccttccttgtcctttaagttaggaggtttaaaccaatctgagagtgtacctttttcgtcttatgatgaacctgcttggattttgtttgagtggcaccttggaagaacccctccctgaatattc

SEQ ID NO: 257338 - DNA, 505 bp, Homo Sapiens
gatgttcaaaacataactgattcttctttctctaggactacttgctttcaaggtgttaaagttgattcacttgggaaaagatctgatgttatttccaaagttgaggctcgggatatcacagaaatgactaacaaggcttccaaagagcctgttggttgtgtaaataatatcagttttcttgcctcactggccgggagcacaagcagaaatagattacagagcacacgtggggcaggcaggcttcagaactctggaactgggctgtctacaaacctccagcattttcatggaagaaaactttaggaaaatgttctccccagttagaacatacaggagttttttttgggtcagtattttcctttcaacatgctctagtagttatccttggtagtgattcaacttatttaaagtttggtttttgtttacataaataaggaaggctaagattagattattttcataaatttatctgacaaatgtttatttagtttgtatacaaatcttg

SEQ ID NO: 257339 - DNA, 986 bp, Homo Sapiens
ggtaccggcccggaataccgggatatcgtcgaccacggcgtcggttggacatgctttaaataagattttgaaagacatagccaatcgattccatatgatgaatggctccaaaatacattttgtgcccggctgggattgtcatgggttgcccattgaaataaaagtattatcagaacttggtagagaagctcagaatctttcagctatggaaattagaaagaaagctagatcatttgctaaagcagccattgagaaacagaaatcagcatttattcgttggggaataatggcagattggaataattgctactatacatttgatgggaagtatgaagccaaacagttgagaactttttaccaaatgtatgataagggcttggtttatcgatcttacaaacctgtgtttaggtctccgtcatctaggactgcattggctgaagcagaacttgaatataatcctgagcatgtcagtcgttcaatatatgtaaaatttcctctcttaaagccttctccaaaattggcatctcttatagatggttcatctcctgttagtattttggtctggaccacacaaccttggacgattccagccaatgaagctgtttgctatatgcctgaatcaaagtatgctgttgtgaaatgttctaagtctggagacctctacgtactggcggagatcaagtagcatctgtggcttctacttggaaacaaccattgagactatttcaacacttcaggcggtcgaattcggcaactggcctggcggcatccattaattccgaaaagcctcccttaacgggaatatgtgacccggccaacggacggcttgggcacaagccccgctgatgaaaaacggggacggctccaacccgccggtgccaccggcacagagtcccaatggcagcggaacacaaaaggcagaggaagtggaaaacacaagaaacaggagaacgcgactccggaaaacggcgcgaaaaaacaaagaa

SEQ ID NO: 257340 - DNA, 353 bp, Homo Sapiens
  misc_feature (226)..(239): n is a, c, g, or t
gtggaatttcagacagaagcttgactgggtcttcaatgacaggcttggactagctgtggcccagacatcggccctgcccagaattgccaggaggaggctttgcaggctctagaggagccgcagggcctgcctgcctctggtgagtccaacaggcacaagcaagctggcgtgtggccagaggtagccggagtgtgtcacagcccctcagatgcctttccttccaccnnnnnnnnnnnnnnaagaatcccaaataactcactgaagtgtctcaaaggcgaacaagttttaccagttcctttccccagttagagtggggaactgggcaagtgttaactgtgggactcactgcagcg

SEQ ID NO: 257341 - DNA, 670 bp, Homo Sapiens
  misc_feature (56)..(69): n is a, c, g, or t
  misc_feature (115)..(123): n is a, c, g, or t
ggggccagaggtagccggagtgtgtcacagcccctcagatgcctttccttccaccnnnnnnnnnnnnnnaagaatcccaaataactcactgaagtgtctaaaaggcgaacaagtnnnnnnnnntgaatcctttttcagttaacagatcaaatggatgagttctgagcctctcaagttcctttccccagttagagtggggaactgggcaagtgttaactgtgggactcactgcagcgtcctatcctaaaggcacgagaagacggaaatgcaacctgcggagctgggcttggttccccaggtcacagtttggcccccgctacaggatgctgccctgctcagagagagatttaatagggagctgaaggaatcgttagggggccagggagatgtgactgaggctggctttccacgtgaatgagacggggtcggtggagggtttgggtgctacagccagtcagaagatttgcaaatgcgaacacattcctgtgtgaggcacgttaccctttgtcagttattgtgaatatgtgtattttaagcaataagattcagctggtcagacttttctgggcagtctcagtgacgcatttcctgtgctgtgattgttctgaagacagagtggctctaaccactgtgagaagcccaaataaaaattgatcccaaaaatgctccc

SEQ ID NO: 257342 - DNA, 991 bp, Homo Sapiens
  misc_feature (47)..(47): n is a, c, g, or t
  misc_feature (64)..(64): n is a, c, g, or t
aatccctccctctcatccctgaaactgcctaaaatgtcaaaccacanaaaaaccctccttgtgnctgaacattggaaaacaaggatccgttctttcaggctgacagggagaattgggcatagaaactgactctggacttgacatgtcagtgctcagccacacgccctcaccaacacctgtgcattctctactctgatgacaaggaaaggccactgcaaggtgggtgggatctggggtgtggtggcggtggcactgctggtggagaaccacggcgtggcgcatgcctgggtgacggtgtcaccgccacacactgctctggggcaggcgtgatcagtgagggtgggagacagacaatgtgaaaacgtaacactggccaatgattcccctgcttctttggtactttccaaaattctctgatcaaaaaagtataagggaagcacaccattaaaaaattacagttttacgtatttacaaaagcaatgatgatatattacacaacaatcaatacacagtatatgaacaaatcttcagtgaaagcacttgtgagctcccgtcccgctgtcatcccacagcacgcgacctctgcagggtcaggttgcctgttctgaagctcattaccttacagtatattagaaggcaaaaacatcatttggaaaaaaaatcattttccaatctacactttccttttagaaggcttaacatttgccatcgaaatagttatgtacaagatttattgaatattgacttctaggcaaagatctccactcccaacttgaatatgtttgaaataatgctgcctattctatggatacaatagatatttaatatataagtaactgcaccacattatatcaccacgataccagtttaatacatattattatgtacagtagttaagttagctcgggaaggtgagtctccgcagcctgggtgaacagtgtgggatggagcctcctggaagggaggcagagagctggtcatgagagagccg

SEQ ID NO: 257343 - DNA, 479 bp, Homo Sapiens
ccacaccccagatcccacccaccttgcaagtggcctttccttgtcatcagagtagagaatgcacaggtgttggtgagggcgtgtggctgagcactacatgtcaagtccagagtcagtttctatcccaattctccctgcagcctgaagaacggatccttgtctccaatgtcagcacaaaggaggctttttctgtgctttgacattctagcacttcagggatgagagggagggagaatcctggatgctggatggagtatttctctgaggcccacacaaagctggacacccccaggctctactccatcccattggagtctcttctttttttgatagcgggagggaggaagtacgactaatgttggagcctgaaactatggaaatgctgctaaaatttttatattgacaaacattttcttggtacttcattgtcatttttcattaatcaaccatattaaatttataataaaaaatgcccctca

SEQ ID NO: 257344 - DNA, 1077 bp, Homo Sapiens
ccgctccagatctgcactgggtgtggccccgcagtgcccccacccagtccgccaaacactccaccccctccagctccagtttccaagttcctgcactccagaatccacaaagccgtgcctttctctggctccagaatatgcataatcagcgccctggagtcccctgggcctggaccgcttcccagaggccaggaatctgccattactctgcggtggtgccagaggttttaggaaacctggcatggtgctttcaggtctggggcttttagagccccccgtgtggcttacaaattctacagcatacagagcaggccacgctcatgcccggcatgcgggccaccaagttctggaaaccacgtggtgtccctgcgaatggggcgatcaagtccagagccggggcactttcagagtttgaaggtaactgagagcagatggtcctccatttcaactccagaaatggggctctgggagggatgttctagccctccctggcatgtcagagccaggctctgcctggaggatccctccatccggctcctgtcatcccctacactttggccaagcaagaggtggtagaacaacttggctgctcattccttctggaggacacacagtctcagtccagatgccttcctgtctttctggccctttttggaccagatccaactcttcctttctaaatctgagatctccctccagggaatccgcctgcagaggacagagctggctgtcttcccccacccctaacctggcttattcccaactgctctgcccactgtgaaaccactaggttctaggtcctggcttctagatctggaaccttaccacgttactgcatactgatccctttcccatgatccagaactgaggtcactgggttctagaacccccacatttacctcgaggctcttccatccccaaactgtgccctgccttcagctttggtgaaagggagggcccctcatgtgtcctgtgctgtgtctgcaccgcttggtttgcagttgagaggggagggcaggaggggtgtgattggagtgtgtccggagatgagatgaaaaaaatacatctatatttaag

SEQ ID NO: 257345 - DNA, 1134 bp, Homo Sapiens
gggtcttcgaggccgtcctgaactgggccgaggcggagtgcaagaggcaggggctgccaatcaccccacgaaacaagaggcatgttctggggcgagccctctatctggtccgaattccaaccatgaccctagaggagtttgccaacggcgctgcccagtcagacatcctgactctggaggagacccacagcatcttcctgtggtacacggccaccaacaagccccgcctggactttcccctgaccaagaggaagggcctcgccccgcagaggtgccaccgattccagtcttctgcctaccgcagcaaccagtggcggtaccgcgggcgctgcgacagcatccagtttgcagtggacagaagggtatttattgcagggctgggcctgtatggctccagctctgggaaggctgagtacagcgtgaagattgagctcaagcggctcggggtggttctggctcagaacttgaccaagttcatgtcagacggatccagtaacaccttcccggtctggtttgaacacccggtccaggttgaacaagacaccttctacacggccagtgccgtcctggacggcagcgaactcagctactttgggcaggaggggatgacggaagtgcagtgtggaaaggtggccttccagttccagtgctcctcggacagcaccaacggggactggggtccagggtgggcagatccctgagctcattttctatgcctgaggtgcccggggaggctgcagcaggtcagcgagtgagtggaggggaagtcaagatgctaactgcttcttgacaccatgaaaggctgctcttaactttgtctctctttgacatgtagtcagctgaagcttgactgtgtagagacattttccacacagccagaacccagggattggagtcttaggcatctctggtacagtggggtgcacgtctcaggtggaggaagatttacggctcaagacaggccccagatcccctcccaggtggcacccatgccacctgctttgaggggttggatcttcctgctaccctcttggattctaagtggttccaagcttaacttgagaccttcccttcaaatctaaaattggcaaaaagtcacttaaaatagtggacttctgtaataaagccttgcct

SEQ ID NO: 257346 - DNA, 1010 bp, Homo Sapiens
  misc_feature (843)..(843): n is a, c, g, or t
gtaccggcctgggatgtacgggatatcgtcgaccacgcgtcgccaacttaatgtttatacacaggggatgtttactaggttaatgacatttaactcccctctcttctgtaggtgagagaaaataagtaagtcttgatctgtttcttaccaaagagagacagacctatgatggaaaatgatcacgtctctgaattttttctttaacgttatagttccttattacagatagtaagcatatgggaatttctgagctataacatgttgagaagttagaaattaaaactaacacaacaaaaggcgctgaatcaaaagatcttgcttttatttggctcagaatgttttggcttttctgctaaagatggcagaaattactctacacagacctgatttttctttattgcagaccattcttgtgggcttaccctgagacttttatcccaattagtgaatcttggagggaatacttgcttatttatgacttaggtatttccccccaaactttaatattcttgagcacttgaaaatacttttgagaaattttaactgtgattaaatttaggtttattagaaatattctgtacacatttgcctccatggtggcgtaagttctgaaaaattatatgaccgtgacaatagtttatcatcatcattattgttattcaaaataagggtaaataaatctctgtatggccaagtgattaaaggttctgatgacaaaaaagggtgatttcttagcagagaaagtggtgtaaaactaaattgtacacttttctagacgtcaaggttacaaatagggttttcttgtggtcctcttatagttaggaaagcgtaataggaatgtgncgtcatgggaggactcagttagttagggacagggtagtaaattaaataagagggtgaacaatataacagttaaaatagggggagaaatggataattggactgaataataaaaaggggttaaatagaggtttcgtagggataacaaaatgatatgatttgtagtttta

SEQ ID NO: 257347 - DNA, 551 bp, Homo Sapiens
  misc_feature (461)..(461): n is a, c, g, or t
  misc_feature (512)..(512): n is a, c, g, or t
tgctaggtgcagggaatcagcagtgggtccagtccaagctcacgccctcacggatctacattctagaagccggctacctaaacaaacctatgccaaaaaaaattctctctccctgctcaagggctgggatcggaacaaaggaagggaggaggatgtgtggcttggggaaaggtgaggaacgctatggaactaaatttaaggcctatctaccctcgaacctttgcccctcccaggcagctgggggaaagtggaggcagggtcgctcagggttctacccacacgctgctgttggtcacccgggccccgaaccagcccttccagtagacggagtcctgccccccgtgctcgaagcggacgaagcggacgcccggcccgtagtcggtgaaggtgtgggagatctccatccagccaccgccgtcactgtcttgggcactgccacctgcccgctgctgaactcagcncagacgttctcgtgctcggacagtagcttaacggtgagctcgtagaggcanaccagcgtcgctgcggcccgagtaccagtccttcaccac

SEQ ID NO: 257348 - DNA, 488 bp, Homo Sapiens
ctacaacccgctgctgcccagcggcatgaagtttgagattggccaggccctgtacctgggcttcatctccttcgtccctctcgctcattggtggcaccctgctttgcctgtcctgccaggacgaggcaccctacaagccctaacccaggccccgcccagggccaccacgaccactgcaaacaccgcacctgcctaccagccaccagctgcctacaaagacaatcgggccccctcagtgacctcggccacgcacagcgggtacaggctgaacgactacgtgtgagtccccacagcctgcttctcccctgggctgctgtgggctgggtccccggcgggactgtcaatggaggcaggggttccagcacaaagtttacttctgggcaatttttgtatccaaggaaataatgtgaatgcgaggaaatgtctttagagcacagggacagagggggaaataagaggaggagaaagctctctataccaaagactga

SEQ ID NO: 257349 - DNA, 365 bp, Homo Sapiens
actccattcataaggttttcttttctgcattccaggaaaggtattcgattaaaaattacatcttctttgcacttttccacatcaccctctttatagatcatatacacaatttcactaacccaggttgtaccagatttagggtaggtggcaatgacaagatcatctggtcttgcctggaacgcttccacattatcccaatatttgacaaaatctttatacattagaatcccatggacttcttcaaacttttcataatagtcaagttcagaattcattgtggtacactgtttagttgatcctgtgaaagaaattgatctagtttatatctcttcaaataccaaggcagatcttaagctgcaaaaaag

SEQ ID NO: 257350 - DNA, 445 bp, Homo Sapiens
  misc_feature (378)..(378): n is a, c, g, or t
  misc_feature (413)..(413): n is a, c, g, or t
  misc_feature (418)..(418): n is a, c, g, or t
  misc_feature (426)..(426): n is a, c, g, or t
tctgggtctatgtaggcccctggtctgccctgggctcatcagccttcctgacctcctcctgccctcccctttcactccctccctgggctctgccagtccgggttcccacggagccatttttagctctgatcagcatgggaatgtgcctcggcctccaaggggctttgtcctggtgcccccgcccctggtcccaacctgatcccacgagggagttgggacaggaggattgatggtgctccccttcctgccagcgtcagaggccctgggagaggggctgtccatggcagctggtctttattcctccctcatgagcacagggtcgggggggtccccattcttgggaagaggttgagaagactcctgggcttcagcctctcnccacccagccctgcccttcaacttgcctgcccttnccttnccccattntattaattaaggggatttt

SEQ ID NO: 257351 - DNA, 735 bp, Homo Sapiens
  misc_feature (324)..(374): n is a, c, g, or t
  misc_feature (395)..(395): n is a, c, g, or t
  misc_feature (426)..(426): n is a, c, g, or t
cagccttcctgacctcctcctgccctccccttcactccctccctggctctgccagtcggttcccacggagccatttttagctctgatcagcatgggaatgtgcctcggcctccaaggggctttgtcctggtgcccccgcccctggtcccaacctgatcccacgagggagttgggacaggaggattgatggtgctccccttcctgccagcgtcagaggccctggagaggggctgtccatggcagctggtctttattcctccctcatgagcacagggtcgggggggtccccattcttggaagaggttgagaagactcctgggcttnnnnnnnnnnnnnnnnnnnnnnnnnnnnnnnnnnnnnnnnnnnnnnnnnnnactctatactagggactggantctcagcctctgatcagtttcacaaagtttngttccctaaggaaatcaaatccccattgtcacctaactctgaagatctaaatagcccttggatcagtatgggaaccccaaatcccacagggccagatgtggagtctgtgtctgcccccgtcttctctccatcctcaaagcccccacttctctccaggctgtttctttttttatgactgtaaacatagatagtgctttattttgttaataataagataatgatgagtaacttaaccagcacatttctcctgtttacactcgggggatttttttgttttctgatgacataataaagacagatcaattcaaa

SEQ ID NO: 257352 - DNA, 392 bp, Homo Sapiens
gcctccttaagtgctgggattacaggtgtgagccactgctcctggccaagtatgccatatttttgtaataagtatattctaataaaattttatgtagaatcacattttggttctgttgagcaaatcatttaaacaactttatgtgagttcatttataactcacaattaaactaaaaatgatttaatgagtttagggttcttcaagtaggagaaatatgtataaattggtggttactaaatgcctttattgctcttatcatttagaatcttcaaattggaatgaaaatgtcctcctcggtgttatttcttctgtgtggcactcatcaaatttaaccaagattggaaagctgggtttaaatggaagtttgtcttttctatggaggggtacaact

SEQ ID NO: 257353 - DNA, 423 bp, Homo Sapiens
gaatcttttacatcgtagttttgatcagaattccaaagaacaaggttaacaaaaatgtggcttcctctatctgtatccctgtatttcttactttacatcatgatttttctccacatgttttataacagatccctgaggcagctgtataaatgggttttacatgaaaataaaatgaaatactttgagtaattctggcgaccgcatcagagaaatgagggattcaactgagacagctcacgtgatcagtcccttcctgtgtcctgtgccaagggccctcggtgcctcttcttttggaagctcattttctaattgtgaccaaggaaactcctgtatatttggttagcaaagacagccagtggagaccctgaaaggaagataagtgggaaagaaggaacagagcagagtaaatgcaaaaaagcctgc

SEQ ID NO: 257354 - DNA, 413 bp, Homo Sapiens
ggatcccccgggctgcaggattcggcacgaggagagaactactctcatttgtgtttttatgggcgattccttccttctggcagaaaaatgaatcaaatcagccttgttcactatcaacccagaataaatcattgtgggcccaggtatcttatgatttttcttttatttttattacttgtaaacatggccatatatcaaaattttagattatgttaccctgtaaggctgatctatcagactgatgcagtaaccagttaattaaataacttcatgcaattagtaggttctatcctttcttagaatgatcatgatgcactaaagattgcaaataggctctttcttgtccacagtaaacagttaagggatgagtacaatggtgtaatttcctctattttactatacttaggctctct

SEQ ID NO: 257355 - DNA, 572 bp, Homo Sapiens
  misc_feature (370)..(387): n is a, c, g, or t
caggtgtttgccaccgcgcccagcccaaattattacattcgtaagacagacacctcttagaatctatatatatgaggttttactcccttttctacactcagtatgttttaattgatgcaaagcaattaattggcctaaaatgtttcaaatattatagtctatacattcagaaagtaaggtttaagaatgaattattggtgcttcttggtgggtgtatatagcagtttttagaagtttaaatttcacctctactcagaaagataagcttttgattcagtggtttcaaattttcagatcaatccatttaagaattgttttttcaaatgtatatacacgtataacataaaaatttttgtaatttcaaatgtcnnnnnnnnnnnnnnnnnnggatgaattattatatttgggtttagttacatttaaaagcctgaaaaataccttttctacaatcatttgaatgtcattcattggcacatgaaaatcggtaattacgtttttttctaatgctaaaataatccacattggaaattggccctatttttcccttttttatagagataaaagcaatggat

SEQ ID NO: 257356 - DNA, 348 bp, Homo Sapiens
caacacatggaaaacaatgtttaaaagcaaaatagcctgtgtaatgttaggtaatgtaatgcccaagtgaataaaagatttttcgtcaagcaaactactgtttctactttgggggaaaaaagtcagttttacatttgtaatttaaggaaagaacagaaagcacaaaggtttttcttttctttattaatggcctactagaaatgagcagtgcaagagtctacctgtactattctaatacagtaagatattggacacaaaatggaggtaactttttaaaatagattggcttggaagttgaaatgtagattaatggatataacccaatagaaagggattttcaaatcctaa

SEQ ID NO: 257357 - DNA, 436 bp, Homo Sapiens
caaaggcttgggtgtgagacagcagcggtggcagacaccgcagaagcaaagagcagtgaggctcctgcattcgggtggagcaccatggacgaagctggcagctctgcgagcggcgggggcttccgcccgggcgtggacagcctggacgaaccgcccaacagccgcatcttccttgtgatcagcaagtacacacctgagtcggtgctgagggagcgcttctcgccttttggcgacatccaggacatctgggtggtgcgggacaagcacaccaaggagtccaagggcattgctttcgtcaagttcgcccgcagctcacaggcctgcagggccatggaggagatgcatggccagtgcctcggccccaacgacaccaagcccatcaaggttttcattgctcagtcccgatcatctggaagtcaccgagatgttgaagatg

SEQ ID NO: 257358 - DNA, 449 bp, Homo Sapiens
ttatctgtatgaacacagatttgacattacagctaaggaaataatttgagttgattcagaaatcctggcatgtgacaattttgttaaattaccaagtttggtttttaataatttctcaatattatgcgccaagatctaattttaaaactgtatgaggactttgtgctgaaaatagagtatttttttaaagtaaggctgtcttggtttaaaagcagattacagaaatgtaagtcaacttaagaacagtgaatgaatgtaaaaacattcagtcgagaccatatgcattttctgtgctgtttgtacttgaggtatgtaacatttgtatacctgaacttattttaaagatgaactgaaatgcacatagccaagtcttgagatacaagattgaatgtgtatttcttaaaaatacaactttgtgttgtactttgaaataaatgatgcttttttcc

SEQ ID NO: 257359 - DNA, 137 bp, Homo Sapiens
gtggatcccccggactgcaggaattcggcacgagattttctcttaaagtttcaaacctctaaggtggagcctgtaattatgagaacagtaaactttaagtaataataaagaatcccatccatatatcccaaaaaaaa

SEQ ID NO: 257360 - DNA, 404 bp, Homo Sapiens
catagtaagctttgttttcttctacaagcttctgccatctccaaaacaaacaaacaaacaaaatgctgttttgttgctgttgttgttttacaccaaagcttgggattcatttattcaaagcttccatattttttcacagaaattctaattccttatgatattccattacccagattcagccccagtatatacttttattctactcaacatacctctcctctaccaaaaacaaaacgaacaaatccaaacagagccatccacaattccaagaagtcttaatgtctttatctatgctttcccattacatgataatcttttccttagacattagctcatattagtgtcatttttttattcaagaccaattaaatgttaaaatattcctcgtgccgaattcctgcaga

SEQ ID NO: 257361 - DNA, 547 bp, Homo Sapiens
accaggtacaaaatcccctgggacaaaacagaactttcataactggctgtagagttattgtttttgccttttggaagcttccaccttgtgacgggaagagcactgtcagcccaacacagaaactctgccgcctggagtcacgtggatccagatgcgaagggactccaacgtcatgctaaggagtttgggctaagaatttgtacagccatattacagatttggaaaatgatgtgaagagaagctaagggatttgccactgccactcagctgccaaggatcagagacattacttctacttctcaacgtccatcctccaaccattgtccagtgattcaggcagaattccctcctgctcaggaggtagccatcctgtgaccctggaagaaaccagcccaaggaaggtgctaacctacagaagaaggacatggccagggtaatcacatagacccggagttgaagccctgactgcaccacacccgaagcctccccacctttcaacctctcggtgatggtgaaccaataaactctttttattgttcaagccaaa

SEQ ID NO: 257362 - DNA, 1026 bp, Homo Sapiens
  misc_feature (76)..(76): n is a, c, g, or t
  misc_feature (586)..(873): n is a, c, g, or t
  misc_feature (875)..(875): n is a, c, g, or t
  misc_feature (877)..(878): n is a, c, g, or t
  misc_feature (880)..(881): n is a, c, g, or t
  misc_feature (884)..(886): n is a, c, g, or t
  misc_feature (890)..(890): n is a, c, g, or t
  misc_feature (892)..(892): n is a, c, g, or t
  misc_feature (906)..(907): n is a, c, g, or t
  misc_feature (914)..(914): n is a, c, g, or t
  misc_feature (926)..(926): n is a, c, g, or t
  misc_feature (933)..(933): n is a, c, g, or t
  misc_feature (935)..(935): n is a, c, g, or t
  misc_feature (938)..(938): n is a, c, g, or t
  misc_feature (942)..(942): n is a, c, g, or t
  misc_feature (946)..(946): n is a, c, g, or t
  misc_feature (950)..(950): n is a, c, g, or t
  misc_feature (953)..(953): n is a, c, g, or t
  misc_feature (956)..(956): n is a, c, g, or t
  misc_feature (959)..(959): n is a, c, g, or t
  misc_feature (961)..(961): n is a, c, g, or t
  misc_feature (970)..(971): n is a, c, g, or t
  misc_feature (979)..(979): n is a, c, g, or t
  misc_feature (984)..(985): n is a, c, g, or t
  misc_feature (988)..(989): n is a, c, g, or t
  misc_feature (998)..(999): n is a, c, g, or t
  misc_feature (1012)..(1012): n is a, c, g, or t
  misc_feature (1016)..(1017): n is a, c, g, or t
  misc_feature (1019)..(1019): n is a, c, g, or t
tctaggccgagcgggaggtcggggctgcgggcgctcgactggtgagacaggacccaggaggctgcatgcggcagcnggggctccgtggcctaggattgaatccgatcgggagccatgagacgtggacaaagctgagctatgcggagtctctgctcacctggttacagacgttccacgttccgtctccctgtgccagccctcaggacctgagcagcggccttgccgtagcctatgtgctgaaccagatagacccctcctggttcaacgaggcatggctccagggcatctcggaagatccaggtcccaactggaagctgaaggtgacaagtggactcctgattagaggacagactggatgaagagatgacaagggacgaggccagctaggaacatgtcctgggtgatgggcaagaagagggacagatgtctggtgatcaaccatttgttcatccattcatctatggagtactcaccctgtgccaggcctgggcattcagcaaggaataacaaagacaaaaacctgcaccacacagccatcattctagtgacaagcaacacatacacaaccataaaaattaacttccannnnnnnnnnnnnnnnnnnnnnnnnnnnnnnnnnnnnnnnnnnnnnnnnnnnnnnnnnnnnnnnnnnnnnnnnnnnnnnnnnnnnnnnnnnnnnnnnnnnnnnnnnnnnnnnnnnnnnnnnnnnnnnnnnnnnnnnnnnnnnnnnnnnnnnnnnnnnnnnnnnnnnnnnnnnnnnnnnnnnnnnnnnnnnnnnnnnnnnnnnnnnnnnnnnnnnnnnnnnnnnnnnnnnnnnnnnnnnnnnnnnnnnnnnnnnnnnnnnnnnnnnnnnnnnnnnnnnnnnnnnnnnnncnannanncgnnnacgnanacgatatagaaaanncttttgntgcccgtagttntgtgaancnacnaaanagangggnttnagnganancatgagggnnaggtgggngattnntcnnatgggtaannccacataatttgngggnngngttccag

SEQ ID NO: 257363 - DNA, 860 bp, Homo Sapiens
  misc_feature (13)..(13): n is a, c, g, or t
  misc_feature (70)..(70): n is a, c, g, or t
  misc_feature (85)..(85): n is a, c, g, or t
  misc_feature (99)..(99): n is a, c, g, or t
ctaactcctaccnactgcaattccccacccgttaaagactgttacaaggtcatcctgcaaaacttttgcnagagcgtccaaacanggaatcctaagaanccatcctctgaaatggttccagagtcttcccccaataacgccttccccaatttcatcccaaacctgccagctcccagtgaatataaatcaggagaatgatccttggctagatgcttatgacgagacagcaagcttgaaatatcatgtagcacttgcagttcagaaagaaagagcaggtcaacttcattgttcctactcagagaattgagggggagtgaactgagaacagagttttcttgaaacaggcgattacgggagtggcgcaaggtgactgaaaggtcttcaaacactgagtttgccttccctaccatatacactctttcctcactgggagccaactgcaaaacaacaggagtttcctcagaaaataaggagtgaatggaatttgcaacactgtcaagactaaaaggaactgcattctccaaagggtacgaaatgacactgcctgggggtagagccagtttgttcactcccttcaccatcaccatgacggtagcccgaggacgatgaaacaggttacccactgcgagtcctggccaagaaaggtcttctttcacagagaagcccatggacaatgcagccacgtctgggatccgcaatatactaaactcgttccccaaaacacccgccaccaacgccaggagcacgacaaacacagccatggtgccgcggcggccgcagcactgcgggacgacacggaacgggccggcgggacacgggcgacagccgcagcgtgaggaggtgacgcgctcggactcgtc

SEQ ID NO: 257364 - DNA, 392 bp, Homo Sapiens
  misc_feature (43)..(43): n is a, c, g, or t
  misc_feature (62)..(62): n is a, c, g, or t
  misc_feature (68)..(68): n is a, c, g, or t
cttatgcaacctggattacaaccagactgtaagaatcaaaagnccaactgaccatctatgcnacatantattatatagtttgtactgagctattgaagtccccattaaccttaaagtatatgttttcaaattgccattgctactattgcttgtcggtgttattttattttattgtttttgactttggaagagatgaactgtgtatttaacttaagctattgctcttaaaaccagggagtcagaatatatttgtaagttaaatcattggtgctaataataaatgtggattttgtattaaaatatatagaagcaatttctgtttacatgtccttgctacttttaaaaacttgcatttattcctcagattttaaaaataaataaataattcattt

SEQ ID NO: 257365 - DNA, 820 bp, Homo Sapiens
cccggcgccccgaagcgggaaaaaggctgggtgccgccgtcccccagctgcgcaaccctaggaactctcggcaaaaaaaagagcatgaggaatttgaagactgagagatgagttgtgtagcaccaacattttctttctgcctgaccttcatacctgatgaattaaaagcataggatgtttggaagagtgagacaggggacacattgaaaacagagaggcaatctgaaggccaccttgacgcatctgcaaagctcccagattctgactttcacaagacttgctttctgtttctgggcctcgcctaaacagactgccagtcatccgaaccgtggcaggatggagatgtttgtgtaaggtagactcaagtttgcaagactcaagaaggaaaccaccaaactaattttactttcacttaaaccagattgaaaccaagacttgaagaattaaaaactttgacattaaccattgattcactccaatgaaataattgtgttatagccagaatcatggtgaaattggaacaaggcttttgatgggatttttaattgagggacttatattaaattggatattttctttaatgaacagcatgtggccaaaattctattttcattaaagtatattaagcatcatgacaactcatattaaacctgcaacaaatgattaatgacatttagagacttcaaatgtcatgagacaccttaaatattaagaatcaaaaagaacacctcaaagttgtttctattcttagtaattatgcttaaaaaaacatctttccttgctttgaaagccagttgctaaaaataaaaactgttccatg

SEQ ID NO: 257366 - DNA, 1463 bp, Homo Sapiens
acagtcgcagccccggcgccccaaagcgggaaaaaggctgggtgccgccgtcccccagctgcgcaaccctaggaactctcgggaacttggctgtgttgtcctgcctcagagacaaattcatctattgtaggcctagcccctgcctttgaaaacaaggaaaggttggtagaacatcaacacagcatggaatttccagggaggtctcatttcaaaacttcataaagaacaagaaccacctggacttctgtgagggcgatgattaaactggcctgagtttgaatgaaaggataatgtatgctcaacctgtgactaacaccaaggaggtcaagtggcagaaggtcttgtatgagcgacagccctttcctgataactatgtggaccggcgattcctggaagagctccggaaaaacatccatgctcggaaataccaatattgggctgtggtatttgagtccagtgtggtgatccagcagctgtgcagtgtttgtgtttttgtggttatctggtggtatatggatgagggtcttctggccccccattggcttttagggactggtctggcttcttcactgattgggtatgttttgtttgatctcattgatggaggtgaagggcggaagaagagtgggcagacccggtgggctgacctgaagagtgccctagtcttcattactttcacttatgggttttcaccagtgctgaagacccttacagagtctgtcagcactgacaccatctatgccatgtcagtcttcatgctgttaggccatctcatcttttttgactatggtgccaatgctgccattgtatccagcacactatccttgaacatggccatctttgcttctgtatgcttggcatcacgtcttccccggtccctgcatgccttcatcatggtgacatttgccattcagatttttgccctgtggcccatgttgcagaagaaactaaaggcatgtactccccggagctatgtgggggtcacactgctttttgcattttcagccgtgggaggcctactgtccattagtgctgtgggagccgtactctttgcccttctgctgatgtctatctcatgtctgtgtccattctacctcatctcgcttgcagctttttaaagaaaacattcatgggccttgggatgaagctgaaatcaaggaagacttgtccaggttcctcagttaaattaggacatccattacattattaaagcaagctgatagattagcctcctaactagtatagaacttaaagacagagttccattctggaagcagcatgtcattgtggtaagagaatagagatcaaaaccaaaaaaaatgaaccaaaggcttgggtggtgagggtgcttatcctttctgttattttgtagatgaaaaaactttctggggacctcttgaattacatgctgtaacatatgaagtgatgtggtttctattaaaaaaataatacatccatcaaaa

SEQ ID NO: 257367 - DNA, 431 bp, Homo Sapiens
attgagtaattctctaaagagcttaacggaatggacgctgatttagactttgcaaaactggttactttaacaaataatattcccatgagggcaagctcaagcacttaggatgcataccttgacatatgcaaaaactcaggtttacagctcttcagaaaataggttgacaaccagtctgtgtcacaataactttgttccttttactattctaggatactatgaagtgtatgttaagaatcagaattatacaattaaaaaaatttatactcagtcaactgtttctcagaacatgccatttttctactacctaacaaactatagctcaatgtggcttttaagacaatgaagttttagaatgaaaaatgcaacacggcactttcctttggttaacaaattgaatttagtactaaaggtttaaagcagagtgttct

SEQ ID NO: 257368 - DNA, 1293 bp, Homo Sapiens
  misc_feature (444)..(444): n is a, c, g, or t
aaggatttcctgctcaacttagagggtgggccaatggggccaggccgggggaaggtgagggttggaaggcagaaggaagtgacaaaggccacctcagcacagcagtgagaggagctgaggccaagggaggcagtcacacaccctagctctgcaagacctccaagatggcccggaggatggcagcagctgccaccgccccggggtctggctgctccagccgtgctgagctgatataactggctcttccggctccagcttccaatattcttggtgccctcggctgcaagcttcggccaatcttgactgctttggttcaggacttgtaacagaatcagctcctgggctcttccaggcttggagctcctgccccgctgcccacagagaatccagcatagtcctgtcccctggagcagccttgccatacttctgcatggcttccaggcncggcatccatggcagcagacccaggctgggaggctggtcttggccttcagggggctgtgcagccgcagtcaggaacaggccatagagcgccccagatgagcctcccatcttctccaggagcagaacagacaacttggagagcagctgggcagggctggcagggggtgggccctccttcagccactcctggattgctctggccgcacggctgtgggtggtgccacagtcgccgtcaccagcagcccggtccagggcattcaggtgttcctccaggcccaggagagtgctgcacacccgttccagcaccagcgccatccgcttcgaggctgagcctcctgcagcagtggaatcaggggcctcctggggctcggcaggggctacccggctccgcttccgcccagtaatggagactgcagccacgttaggccaggctgctgcagtggtttcagcatctatcagtttcaggagaggctcatccaccagcaggagggtgagagaaatgccaggcatctccagtgctgacatgaaggtgcccaccagggcacgggcaatcttcaccccgcggccctccagggagcggacggtagcgtcggctatgatgcccagttccaggaatgacaggccacccaggttgttgaccatcatcacaactgaggagccgggctgcacaggcacatgggacgcgttggtggtgtttgtcatgtggtcgagcatgagtttcacaatctcatcggcggttgccatctttatccggcgcacaccagcttccccgtggatccctgcggatagatgtgggcaatgctgacccactcaaggcctgatccggagaattccggaccggtccagcct

SEQ ID NO: 257369 - DNA, 722 bp, Homo Sapiens
cttatttaggccccagcacactcagagacagacctcaggatatcattgtgtttgtaattggaggagccacctatgaagaggctctaacagtttataacctgaaccgcaccactcctggagtgaggattgtcctgggaggcaccacagtgcacaacacgagctctcaagtcacatcaagggtcagcgagcagaagatgaaacggtggttgggggaagggcacagacttctctcttgccccactacaggttttccctactaaacaaaggtgttggagagcagctttgggttctgtgctggttgttagaactcatctccaggtagcccacggatacgtggttggcacagacacaagactcccagagttgtcctaacaataagtctgagcccatctcaacccacttttctccggtagtctttatgtatctgttagcacaatcacttcagttactgatgaattttgttgggatctgacttggggaaagggttatcagagcctagaggggcttaaaaagtaatcatttgatgtacataccacactccttggcttcctttctcttcccttaaccctttctgcttttcattaaccacattcctgcacaactcatttctgaaaacctaccatgtttctttacagagccatccaaaaattttttgtccctacatagcaattttctgtggcactgagaaaccatgtatgaccacaataaaaatccattttgtg

SEQ ID NO: 257370 - DNA, 596 bp, Homo Sapiens
  misc_feature (144)..(253): n is a, c, g, or t
ctcagaagaccaggctgtagtgcaggggtgcaaacttggcctcggtgtacctgtgactccccgggcctggttacaagcaatatattctgtctgagccttccgaggggtcggatttacatgcacgtgccaccatgcccagttaannnnnnnnnnnnnnnnnnnnnnnnnnnnnnnnnnnnnnnnnnnnnnnnnnnnnnnnnnnnnnnnnnnnnnnnnnnnnnnnnnnnnnnnnnnnnnnnnnnnnnnnnnnnnngtcgtggcaacggcgcccggccggaacatgcccatttctacagagaattaacagaggtcttggagagagagtaagagtggctcggataaagggttctgggagcagccctggtgcccagctcctcaggtcaggagagcttcctggcccagggtggacccaggctcacagggctggtcctggaatgatggaagctgatggagctgccccaggtacccgcgcagactcgtgccgaaatcctgcagcccggaggatccactagttttatatcgttcggcaccagtgctggagctccaagctttggtaacctttagcgagggtttaaatgggaagcatggcgtaatta

SEQ ID NO: 257371 - DNA, 603 bp, Homo Sapiens
ctcctaaatcccacggaatcctctaaattcattgcagaaaacagtcgggatgtgtttattgacagcggaggcgtacggagggtggcagagctgctgctggccaaggcggcggggccagagctgcgcgtggaggggtggaaagcccttcatgagctgaaccccagggcggccgacgaggccgcggtcaactgggtgttcgtgacagacacgctcaacttctccttttggtcggagcaggacgagcacaagtgtgtggtgaggtacagagggaaaacatacagtgggtactggtccctgtgcgccgacgtcaacagagccctcgacgaagggataccaataactagtgcctcgtactacgcgacagtgaccctggatcaggttcggaatatacttcgttctgacacagacgtttccatgcctttagtagaagagaggcatcggattctcaatgaaaccgggaaaattctgctggagaagtttggaggctcttttctcaactgcgtccgagaaagtgagaatagtgcgcagaagttaatgcacctggtggttgaaagttttccttcttacagagatgtgactctgtttgagggggtattggaagga

SEQ ID NO: 257372 - DNA, 622 bp, Homo Sapiens
  misc_feature (314)..(314): n is a, c, g, or t
  misc_feature (521)..(521): n is a, c, g, or t
  misc_feature (523)..(523): n is a, c, g, or t
  misc_feature (565)..(565): n is a, c, g, or t
tgaggatcagtgataaccgctgtatgtgtcctgctgagaaccctggctgcagagaccagccctttaccatcttgtaccgggacatggacgtggtgtcaggacgctccgttcccgctgacatcttccaaatgcaagccacgacccgctaccctggggcctattacattttccagatcaaatctgggaatgagggcagagaattttacatgcggcaaacgggccccatcagtgccaccctggtgatgacacgccccatcaaagggccccgggaaatccagctggacttggaaatgatcactgtcaacactgtcatncaacttcagaggcagctccgtgatccgactgcggatatatgtgtcgcagtacccattctgagcctcgggctggagcctccgacgctgcctctcattggcaccaagggacaggagaagagaggaaataacagagagaatgagagcgacacagacgttaggcatttcctgctgaacgtttccccgaagagtcagccccgacttcctgantntcacctgtactatttgcaggacctgttcaccctggcagggantttgccacccccagtttcctatggacacagtttattcaaaaagtatttattcatttg

SEQ ID NO: 257373 - DNA, 368 bp, Homo Sapiens
  misc_feature (350)..(350): n is a, c, g, or t
tgaggatcagtgataaccgctgtatgtgtcctgctgagaaccctggctgcagagaccagccctttaccatcttgtaccgggacatggacgtggtgtcaggacgctccgttcccgctgacatcttccaaatgcaagccacgacccgctaccctggggcctattacattttccagatcaaatctggggaatgaggggcagaggaattttacatgcgggcaaacgggtccccatcagtgccacctggggtgatggacacgcccccatcaaaggggccccggggaaatccagctgggacttgggaaatgattcactgttcaacactgttcattcaactttcagagggcagctcncgtgattccgattgcggg

SEQ ID NO: 257374 - DNA, 306 bp, Homo Sapiens
aggggggtaatgaatacctactcaaaactaaggcacgctgctatccttacattaaaaataagtcctaagcctaccaagacattttcaaatattcagtttaggtgccattattagagttttagttcagcaaaattgtactttataaaaaaaattcaacgtcctacagttaactttaagaacaagactcaatatactaacgctttgtgttctaattccctacaacattgttttgatgtgctaataacccacagtacaattatcaaatttccattaagaacaggaatatcggccaggtgcagtggctca

SEQ ID NO: 257375 - DNA, 352 bp, Homo Sapiens
aagagccaccgcgcctggtcagccagggctgttttctatctcctaaacaggataacactgcaggaggtacttcacctttaagagcttacaatgttgtagcaagtgcccaactaccttgtggaggaatctagaccccatagccagacatcacattttatgatgtacactctaaacatggtggagcagaaacgtcagattattttaacagtataagctatggagagcgattatgagccttgtggtgcctgagaacaggaaagaaagaagtatcctaccttccttatataatttatacctcggggtaactaaatggttgtgagggagatttcctcattacagaataattccagtt

SEQ ID NO: 257376 - DNA, 443 bp, Homo Sapiens
cctgacacttgggtagtactcaataagaaaatttcctttctcatgaggtggctgctcagggagagatggtcaggacagaatatctacccaaggttgagaagacagaggagaaaccagggcacatcctggagaaggcagcttcaggagtgggtcctggggtctggggtggggtgggagacgttttcgatgttgtttaatgggcggtagtgggaccaaggagacttccagtcacttggaaaacaggactgcagagtggaggcaagagccatagaaaagagagaaagccctagaaggggctaggagggccatcttctgccacttcactcatctgtggatcaccaggtctacccacaggtttacaaatttcactccagttctgccctaacctattacatatcaaggcctttcactcattatctcaaaaatgacatatagagatcttt

SEQ ID NO: 257377 - DNA, 292 bp, Homo Sapiens
gcgcctggccccatcccctacctttaaatgatcatcttaggcggctgatttccagccttcatatcaactcacagagaagagtaccaatatttctattgccactgttttttaacgtctaatccatagaaaacctgaccaacataacaatactttgttccttcaagctgcagtttaaaatcttttatttttgcaccttatatgtgtagaaaggagactatctggctaacactattgtcaaagccgctaatggacagttaggaagaaggaattcaggaaatgaaacagtgctgga

SEQ ID NO: 257378 - DNA, 518 bp, Homo Sapiens
aaaaacaagtacaattacaatagagacatagggtacacagtacattcagatatcactacttcacaggttgaaaaaagctgtcttaagaaacactaatgcaaaagcttatgaagatttaatgaagaatttaagttatgactcactttgtgatgagctggcaggtgatagggcagctggagaaagcatgctaacttgattgagatccacagatgatttccgaggaatacttgatggcttagaagaaggaggaggagttggagatttgagaaagctgcttgtctgttgtggtgtaaaatagttacctgaggaactatttcctgagcttgagggaagtttgattggtgggggtcgatgttttacacccttccccaataccgaagactgaactgacacggtttcagtttgatctgtttctttccctggagaaacctgactcagactggctgagccactggagctgtgtgacatcttgaccggacatttggcttcattctggactaattcttggtactgattgc

SEQ ID NO: 257379 - DNA, 741 bp, Homo Sapiens
tttccagaaaaacggaattagacagagaagaaagtgtgggtgtacatctgatccatcaggaactccaggaggctgaaggaatgtgagtgcatgagataagcaagacagatcttaacggtcccctcacatccctttctgggcaatctccagaatgcctagttttgtgaagacaccatgtactatctggctgcagagactttcttaggtcccgtgttagacccatggggtctcagcatgtggtcatgtggtaatgcattcctttcaaaggctttgggttgaactcaagttggaaatacctggaaaagaccaagcttctcctttgggtgtctgcggatcctattaaaaatattcgtgatgttttaagttctccaatacaattttctccacgaaaacaagcatcagatacactacctctaagtatttattggaggggttccaacagcctcgtggacaggccttctcagcagctactgagtgccccctaggggtggggaggggccagtgcacatggaggcaaaccacagagcccttttgtggcctattattatgaagaactaaaatgtggccagtgaaccagtcagtgctcatcactacggggtactttgacaatggcacaatttcattttaccaaaagaaaccttcactggctctggggactgcaatatcttcattttaaaatattttgctgcgttttcttcaagggcggcttgtgacaactgaactgctgattattccttccat

SEQ ID NO: 257380 - DNA, 622 bp, Homo Sapiens
  misc_feature (117)..(117): n is a, c, g, or t
  misc_feature (119)..(119): n is a, c, g, or t
  misc_feature (121)..(121): n is a, c, g, or t
gatccgcagacacccaaaggagaagcttggtcttttccaggtatttccaacttgagttcaacccaaagcctttgaaaggaatgcattaccacatgaccacatgctgagaccccatgngntnaacacgggacctaagaaagtctctgcagccagatagtacatggtgtctccacaaaactaggccattctggagattgcccagaaagggatgtgaggggaccgttaagatctgtcttgcttatctcatgcactcacattccttcagcctcctggagttcctgataaaaggaagccagggtgtggacattttttagctattgatttcccaatagcttgtggatcagttgtacacccacacttccttctctgcctaattccgtttttctggaaaaagtagtatgcccatgtatgtgtgtttttcttaacacaggtccatgaaagtttggcttcctggtttgatgtctgttgcgtggcctggaaaccagggagcagcaactattgagatggtttctgtgttcagtgaaaaattctatttcattgagacaattttttctttatccacagtaattttttgacactgtcatcatgaaactacccttaggaaaataagattacctccaat

SEQ ID NO: 257381 - DNA, 392 bp, Homo Sapiens
agatgtcactaggggatgaatgctgtaatacttcatatgctgcgagagagtcacatagcttgtgttgtctgcacgtggcaactagtagtctgtgaaacctttcattgccattttcacatcacatgacctggcagtgggaataagacatcagaatcagccactgttaagctactaaatcagtcggtaaggtggggaagggagaagacatcagcagaaagccgggaagagagcaagaacattcacattccactccaccaacaatacggcagttggtaaaaatcagcaggaaacgtgaaaaaaatcagaacccttgtacactgctagtgagattgtaaaatagggcagccactttggacaacagtctggcagttcatcaaacaaagagagttagc

SEQ ID NO: 257382 - DNA, 461 bp, Homo Sapiens
  misc_feature (406)..(406): n is a, c, g, or t
ggttgggctcagaaaatgttgtaaagttgtgatttatcttatggaaagaagtgaaaaggaattaaggtatatggtgtaattaagagtttaaatttctgtggtaaatgcaagtgagtttcattttaagtaaactcatttttacgggatttgagatttaaaagtgaaattaattcattttgcacagtgtagtcatggttgggctctgagaaaatgttgtaaagctgaaattatttatcttgtggggaaggaagtgaggaaggaaactaaaatgtgtgggtattatcaagaagtttaggatttcccggggtaaatataaatgaggttccccttaaacccatttttgtggaatttgaggtttaaaagtgaaattaattttgtagaatctaagtccatggttcgggctctngagaaaatgttgtaaagcccgtaatttatccttgtgggaaaaagtgaaaaggaac

SEQ ID NO: 257383 - DNA, 829 bp, Homo Sapiens
gaacacttcaacatatgtggtacaaatttatattgaagatctaaataaaccacgtattttccagtcttcgttgtgtgaagctaaatggtggctagaacttttgtacacactaaatattgatgtcacaccatttctaatctgagcatccttagccagagaatattcattatacttcctaagggagcaataatttaaatcagaagctattttattttaatgtaattaacctttctttacatttcttatgtgttcacctctaatctgttttaggaagagagttggttattatgttgatcccataatataaatcatatcctttatattttagaatatctcaaatgtattccttttttgtatggtgggtttgcctagggacgtgtaactacaggcttttactaagccaaggaaaaagagaatttttcttttcatcttacaaattccagatatctacaaaagatgtgaaagcactaaaaataccatttttaagcagtactttacctgttttttctttagcaaaccaggttatgtggtgtaaaggtttgttatacgtgccacaatatagcatataaatattatgccatcattccttctcttgttaaaggtagaagaataaaattgtgatttttataacctgtgcttattactcaaatggtcttcaacatctttttaaacaacacatactttttgaatgttcagtttctattttgcttgaggtattttgtacatatgtgccttgtgattgctgctgctttaaaggataaagtactctttgggggatgagtctggtttgttttgttttattttttaatgaaataaacctatattcctg

SEQ ID NO: 257384 - DNA, 563 bp, Homo Sapiens
  misc_feature (405)..(405): n is a, c, g, or t
cagcaggagaaaccattttctaggctctttaggaaggaccatgcaatgagtaggtgatgtatttgagccctcacagtctttacacccctagaggagctggaggacttaagagtttgctgcagaagcgtggccaagcacaaaacacatgatcaggaaagcagagtgttttcccattaccaatggatgaactatgcaaaccctaaacgccttggcagaacacctcccaccccttacccctcccatgcagctgaaaaatctgagactagaaccaatcatgactctggatggcagagggaaacctctaaagggacttattacattggtacagacatatttatgctttcttccatcaccaaccactaaacccctttgggaggaattgaaataactggcattaaactagtncaactggaacactggggccacttacctcaatgtttattacaaagtcctgggatgatttggattctggaaaccacagcctttgcagggagttggggggaattcagatttgctcatggtggacatccctttttccactttttgttctggggcagtaaata

SEQ ID NO: 257385 - DNA, 169 bp, Homo Sapiens
ggaggtgtctgccaaggcgtttagggtttgcgtgcttggccacgcttctgcagcaaactcttaagtcctccagctcctctaggggtgtaaagactgtgagggctcaaatacatcacctactcattgcatggtccttcctaaagagcctagaaaatggtttctcctgctg

SEQ ID NO: 257386 - DNA, 583 bp, Homo Sapiens
tgggtaaagaccagggatgctgccaaacctgcctttcacaggacagcccctgcaacaaagaattatccagacaaaaatatcaatggtgctgaggttgagaaaacctgacttaaggggctgggatgcttttgaactagcttaaggcccaggactgtggagtgtgtggaccaccccacagagagggactcagatttatttactcttgctggatctgtagtgatggagttccttctggtgtcagccccacaggaggctcccaggcctccctcgacttcccatacccagtctaggagctccttctggctcccaagcacccagagctttcctccgccttttagttttggttcctccactggaatgtaagctcctcacgggcgatggctgtcttttcttgactttgtatcttcactgccaagcaaaaagtctgccaagtgggaatgtttaataaatattcattgaataatgaatgaaccatcttcggacatgaataataatactggcttacgtttttctggtgctttataatgtatacattacatctgagtattttattttatttaattttcaaaacaatcccttgtaa

SEQ ID NO: 257387 - DNA, 780 bp, Homo Sapiens
aaaagacccataccataaatttcactttatttaaaacatatgaaagaggtaatttcaaaccacactaaacataataaatatagaactcgctttgttaaaaatctacagtatacattcaagtaaaggctaaacttccaatgccaactattaatacctataagagaaaactcagtctagtgcttttgtttccatccaaacatctatacattcctttattcacagaacaagatgcttctgttactaaaaatacatatccaaagcttttatatccttttaaatagatttaagatttcaactctttgggggaagacagggaagtccaaacaaacaactcagaccatcttaagttattagagataactgactttatgacacaccctgtttcaacttagatgtgaaacttgatgaacacattaatgaaaaaaattccagtccacatgtctaaggtaagtcatctttttctacatgagaatttgtgtagctcaaggagcatccactatagcaaccttcctgtgatccaggtcttgacgccacactccatttttgatttgtacgttctcctccaacctgatttggtttaatttcttcagcagttatattcagtacattgattgaactatgttcagatatgcaggaacgtgtctggcaaaagtctgaagtggaaggtgaagcaggaagagatttagtaagtttagacatgcaaactggaacccattagacacactgtgaggcttcttttgcggctgcctcgagtgcactataagattgtcccaatcagaa

SEQ ID NO: 257388 - DNA, 358 bp, Homo Sapiens
ggatgatgtctccctcttttcccctattctcaatgtttgcttgaatcttttattattttttttaattctcccccatacccacttcctgatactttggttctctttcctgctcaggtcccttcatttgtactttggagtttttctcatgtaaatttgtataacagaaaatattgttcagtttggatagaaagcatggagaataaaaaaagatagctgaaattcagattgaagaaatttatttctgtgtaaagttatttaaaaactgtattatataaaaggcaaaaaaagttctatgtacttgatgtgaatatgcgaatactgctataataaagattgactgcatggagaagtcttaaaa

SEQ ID NO: 257389 - DNA, 615 bp, Homo Sapiens
  misc_feature (62)..(62): n is a, c, g, or t
  misc_feature (432)..(432): n is a, c, g, or t
  misc_feature (556)..(556): n is a, c, g, or t
ccccccccgaagtgtccctgcccagaaggctgtcccctcagtgggcaggaccttagcgaccntgctccttgggtcacaggaggctggttaggaatttctcaagagtccgtgattcactctcgtggggcctccccaggaaggtcacctaattcccagagcaagaccatcctcggggctgtggctcccctggctgggctgcacaggggcctctgctgccccaagctctcccccagaagccaagggcacaccacataagcactggttctcaaacaagtgctgagttctcagcaagtctaggaaatgaggccactcatggattctggggcctggagggtgacatgggctgacctctgggaggaaagtcaagtcctcacctccctcttcccttgggcgtggccagggactggggctgcggagggactgccatggggntggtggggagcacagcaatattaggaaagcttcagggagcacaagaatgagggccacagggaaacaaggtttgtccttcagcagggaaaggaggtgcctcatccgtcatggtggactcattganataagtctcctccagggaggttcatctcaggtctaccctggagcagggaacagtgtctc

SEQ ID NO: 257390 - DNA, 419 bp, Homo Sapiens
ttgaccaaaacttccataatgaacattattttgagtgccaaattgagcacgaaaaaaacacctacttttaactattatgaaatattatgaaaagtagtaagacttatttattaggctggttaaaaagtaatttaaaaccaaagagagttaaatcttccttgagaacatactctcagaacttaagaatggggtaaatcagatggagcacagccatgctgtacacatcaactcactgaaatcacataacttctattctcatggaccttattttctattatcttgaaaacaaactgattataatctcccaaaataccagtggtaccttaaaatttaatcaactcctttccttaacagaattaggactttcaattaaaaatactgtaatatccaagagggtttcaatgcaagagaaacctttg

SEQ ID NO: 257391 - DNA, 428 bp, Homo Sapiens
aacataacgtacagtattcgttatggcccttaatgtgttagacccgtatggtgcgcagccctaagtatatggtttgtcagataaaattcaaaagattcccttcatcctcagtaaaaggaaaagactagtccttgtcacagtttagtattatcacgtggcccagtaaccataaccagtctctcgtatcacgatggtttctcttagcctcttatacagtgttgatgtaagctttcatgccgtcatcccgaaatgtcccttccagctcgttccaggcatatcacttgaccttgcccgtgaagtccaactatccgggtccgacctgtacctacgtcgccagcagttgcttgattgtagtggtcatactttaacaacatcatgtcattccatgtcccggtcaaagtgtgactaactcactcacaagctttctc

SEQ ID NO: 257392 - DNA, 252 bp, Homo Sapiens
cacacgtactaaccgaaacgagccgaggaaaacacataaaattatgcctattaataacagctcaaacgttacctttttaacctctaattgcctacaaaataaagttcaaatttctcaacatgcattcaagaccttctctagggaaggatgaacataacttaccacactcattactgcttagcaaccattcttatattgctttaaacacccggatactatacttggcaacaatgaacaagagacattgtgcct

SEQ ID NO: 257393 - DNA, 363 bp, Homo Sapiens
ttctaacactgaagccaatttgtactacatccacatagtaatccaaaattgaattcagggctttaaaaatatccacagttcctgcttcaaacactacttctagaaatactaaaaaagtgatcctcaatatggaaagcatttatgcacaaaatacgtatttatattatctaaaaaccagaaacacaccaaatgttcaaatacaggagaatggttaagttaatgacaatttattcactcaatgaaatactataaagccattaaaaatgatgctgtagaacactatttaatgatataaccaaatattcatgagatatggctctgttgggaagcaggatttggccaggtgcagcggcacactcctgt

SEQ ID NO: 257394 - DNA, 366 bp, Homo Sapiens
ccacaagctgtcggctcggttcggtcgcgttacagggcaggcgccgcggccaaggcagggagggatcttaggagagatcgcacgacatctgaagagctgccatgtctggggcatcttcctcagaacagaacaacaacagctatgaaaccaaaaccccaaatcttcgaatgtcagagaagaaatgttgtgagttctggcagagaggagggactgctctctctcagcattttatcttgggaatatagttataatcctggactctgctgcttggtgggagtgataaataattatttgacatggaaatttaatgcaaagtctccagggtagaatgtcctgtcttccagcagtttcttactgctttcttaa

SEQ ID NO: 257395 - DNA, 370 bp, Homo Sapiens
atctgctcagtgtgagcggtttgctgttagccagggctatttatggcaaacacatgcttttgtatcttgtcatagttatccacaaatggcaaaactggacttgattctactggtatgcaaaacaggcatgctagtaagcagtcagtcgtggctcagaacttaaccccatagctcagaggaatgcttttagcagaaaacaggaaagaaaatatcccttaaaaattttttttgaatgtgtggaagtaattttagtataattagattttttccatatttttgaaagatttttcagatgtgaacattaaaaatagggattaaatgtctaggcttccatttttccagctgtccctgtgagttatcctggacattt

SEQ ID NO: 257396 - DNA, 1127 bp, Homo Sapiens
gtaactctaacatagtttaaaaagtatgtggcttcagattgcctatactttgttcacaaacgtgtgatttagatatgactgatttagaagtgaacaacttggtaacatccctagactccactcatgaacgcagaattattacctgctgtttgctttctgaaagaatttcagaaatcagagcaaatgtgtctttaggcagattcagctccttttaatatttttctcttggcccactctctttgcctcccctgaatctgtgtggtactatagcagctctactctgtgcaccatgctaggaagcttcctttttggcagaatatgtttggcagcaaagctatagagacaggtgcattcagaacatcctgggcaccagtcatgagtcttactgtgtcaaaaatctgaaaacacttgctgagaaccaaatttattccattggaaaaaccctctgtggagctataagcctcttggactcttcttcctagattaaggcttgcatttccctccctgtttcagtaaaagatgatgaaagccactatcaatcctcactgctgagtggcagggagaagcagcaccactctcagctcttttctaatcttgtaacttagtgctagaagtctctccaggctattaccatgggcatttgttctctgttggagctgtaagcagatgaacccaagtagagaagatagatcttggaaggagagatccattgagtccagaagccagatcagcaaatggaggaacctcggaggtgaccagaaagatctccatcggttgcccaaggctgtaagtagtgatggttttagcgatgaataacgtaattggctatgaagtactgtggcagagctgctgctttctgaaggcgagaaaccatttttagctcacagccacccttaagagaacttttggcaaattttgttgggcattattgaaatacatatacaaaaagttgctgattgcaatgggttactgggaatggaaatttaatgaacctttgccaatttaattacccttcattgggttttctattggattaatagggaatgggcctggaccttttttatttctcccacatatggggtccccttttaaccaaaaaacacggaaacctttttggggccattaac

SEQ ID NO: 257397 - DNA, 386 bp, Homo Sapiens
aatctcttcaagtcattgactaaacataaagttttttgtgcacagaaaaatgttccacaagagactagggcaaaggacatctactgaggaacagcaactacaaggcaacagtgagctcaataaagctcacagagctgagatagcactgggggcggttggagttctgaccagccagaggagagtgaccacactgaacatcttgggcattcagcagagaccccagaaaagccagactttaggagtagaattagtgtattcctagaattaaggcagctatagagaaaacctagcaaggctgaaaggcaggtgtccaagcatcaaaatggtgtccaagtcaagttactgcctgctagagaaaaactcaaccttctttagaggtaaacaac

SEQ ID NO: 257398 - DNA, 391 bp, Homo Sapiens
ctagtggatcccccgggctgcaggattcggcacgagtgaatacaatcaggaggttgggcaactgtggcacatatttctaagtgcagtcccacttcagcttctagatggtagacctggtcttaatcttagaaaggtgagggtcacttagggagctcaaggttggtaatttaccaacacagcatcaagtgagtctttgctcttgccctcactccaaacttgctagccctgttctccacttactggcttccagctatggctgcttattattggattcacttgtgactgaaaccttgttccattccctagggtggtgccaacctgaccacttgtaacttcgtgaccaggttcctttcactccccttctccagttactgagttttgtccatgtcat

SEQ ID NO: 257399 - DNA, 779 bp, Homo Sapiens
tcaaatgcttagaactataattcttcacagaggacaaagctttagttacatacattcttctggacatgaaaggaaaggtctttttgtccccttctcagtctgaaagggaaggagaacgaatagacctgccactggcagggctggagaaagtgaaaggctccttgtccttttctttactgtcatgcttatgcttgtgtttgtgcttatgtttatgcttcttcttctttttcttgtgctcatggtgatggtggtgatggtggtcactgtgtttggaggctgtagattccttagtaaagactgagagtggagcgcttgccgctggatgcatactcatctccaaaggtgcttgttctttacctgttcccttccgtgcaagttccaaactccactggggttttgtggtgggtgtgctgtcacagcctgctgagtgctggggtattaaagcagatcgggagctagctggccgatatttcgagagccctggagttgacggcctttcaagcatgtttaaatgatgggaaatgaaggcctggctatcatgaacagtatccatatcaatctcctcctcatcttgagaactggaaaactaaaacacacacacataaaacagaggataaaagaaccattacatcatgttatgtttggatattagctcttaggaaaagtagcagagaggccataggatatacccccatataatcttaaaataaaaagtagtttctttcttcaaagatattaagagaaagaaaagattatgtggtccagcctctaaaagaagc

SEQ ID NO: 257400 - DNA, 687 bp, Homo Sapiens
ctcgtgccgattcggcacgagtgaaattacagattcaagtggatgaaaaggggaagattgtggatgctaggtttaaaacatttggctgtggttccgcaattgcctccagctcattagccactgaatgggtgaaaggaaagaccgtggaggaagccttgactatcaaaaacacagatatcgccaaggagctctggcttccttccgtgaaactgcactggttcatgctggctgaagatgcaatcaaggccgccctggctgattacaaattggaacaagaacccaaacaccagctgtttcccacctgctgtgcagtcaccttagatgttcagaagccgcttcctctccactgaagagcctatgagatacgcacaatacttgctgttcacgttatgactctcatgcaagcaaaatacacagtttcattgttctgaatcctgtggtttctttcagcccacttttatcgccttaacctagttaatgtatattttgaattgtgtgtatgacctcagaactgaaattgataatgaagttgcaagttttgatagcccgtgaagtgcataagtatctaattttacctgaattgatttggggggaaattaccagtagaatgccttggtctgaatatttgatagaaccaattgttgtacataaaacagattgcgcatatatatatatgtataaaaaata

SEQ ID NO: 257401 - DNA, 937 bp, Homo Sapiens
tctaggtatctcaaatctgtgaagtattgtagaggagacacaaaaggaattgggggtcacaaatggttctcattgacatgagtgtagacctttctactcaggtgaaatttggtatttagtgattgcctgccaggttcaagatgctgaccgaggagcttaccatcaaaccagagaccagtaccaatagagagtgaacatgatttatcttaaccctctcattttaggttgttgatcattatgaaaatcctagaaacgtggggtcccttgacaagacatctaaaaatgttggaactggactggtgggggctccagcatgtggtgacgtaatgaaattacagattcaagtggatgaaaaggggaagattgtggatgctaggtttaaaacatttggctgtggttccgcaattgcctccagctcattagccactgaatgggtgaaaggaaagacggtggaggaagccttgactatcaaaaacacagatatcgccaaggagctctgccttcctcccgtgaaactgcactgctccatgctggctgaagatgcaatcaaggccgccctggctgattacaaattgaaacaagaacccaaaaaaggagaggcagagaagaaatgagccctccctcggcgaagcctccagcaggccacaccagctgtttcccacctgctgtgcagtcaccttagatgttcagaagccgcttcctctccactgaagagctatgagatacgcacaatacttgctgttcacgttatgactctcatgcaagcaaaatacacagtttcattgttctgaaacctgtggtttcttttcaccccacttttatccccttaaccttagtaatggacattttgaattggggggcatgaccctccaaattgaaatggataatgaaggtgcaaggttttgataagcccgggaaaggccatagtatcttaatt

SEQ ID NO: 257402 - DNA, 711 bp, Homo Sapiens
ttagtggtctctactgtggcaaatgccaactgttggaattcactttattgtagaaaaacccaaactgagactcttaagttttgtttagcaatgtgtttctggtatgaaacaaactactgtgtcactgtccaggtaggaaacaattctttcaactgggttttcagcataaatgggaactgatgtagaaggcaggatttagcccttctaggcaaaagaaaagctcagttgggtttcacgagtgttcctgtgcttatattcagtctgtgcctacatgttctcatgcatgtctaacctgatttacctcttacctgtaacctaccttatcatgtggcttttaattgacagtcactcagccatttctaagcagatatagtagtacctttcagaactcacattggcaagtgtaaaaagatgacttaaggtgaagtgaggacaaaatcacattctgcatactaacctatttttttctccctttaaggtgctaaacttgcacctcatgtccactcagtaacaagtattgggacgtagagcacagcctcactcagctctgaaaggtaatacagcctgtgaggaagtgagccagcagtggcctttgcaattgtggatcttaagctctgctctcagcagatttcaggtgtaaccatttgttaactgtactgaaggtgtgtcctcaagaagaaagtgttcaaattaaaaaagctgctgccaagt

SEQ ID NO: 257403 - DNA, 413 bp, Homo Sapiens
  misc_feature (21)..(21): n is a, c, g, or t
  misc_feature (98)..(98): n is a, c, g, or t
ccccccactgaatgacctgtnattgagccaccaacattggcccccctgcctccctcagcccccggaccgtgggtggggcctgtgaccagcctgtccancgtcctgccccagtgctcccaccccttcctcaacgatacgtggttgcagtaggattggagtgtggaaagatttgcttatatacctggaaaaagactgatcaagttcccagaaataaatgactggacccactgtgtagaaacaagtcaaagccaaagtcatacactggctatcagaaaattatgctggaagaattgcagtggagaaaactgaacagaaggaagcagaaggtgctgagtggttacactttgcaagctgtggtgaagatcacactgtgaagatacacagagtcaataaatgtgcactgtaatggactt

SEQ ID NO: 257404 - DNA, 150 bp, Homo Sapiens
cctccttaggatttaaaaaatccttggagaggcgggagaaggttaggcaatccgtgcttcaaatgcaatgcgcacacacatgcagccgtgtacttagttactgctgcaaacactgggcgacccagcgtagtcagtcagcactggggcaag

SEQ ID NO: 257405 - DNA, 374 bp, Homo Sapiens
tatgactgtgcctggctacatggcaatagtattttcctttggtttttcattacagtaacttatgcatttaggcagatgatcctttatatatgtaaacgctataaattcttaggaagaaaataaatttattaagtttttcacatcaaaatttctagtatgattatgagttcaattttcaagtgaaagtaatccttaaaggattttatttcaaataagaactacgtacaaaatatagatttaaattaattttcactgtatgaaatgtacagtatacatagaccaactcctttaacaagaatttctggtatgtcttaaagggcatgggtggttagagggagatccccaaacaaacaattcaaaattaagagtttaaa

SEQ ID NO: 257406 - DNA, 368 bp, Homo Sapiens
ccctgccttaaagctccgactcatttcccaatacaggtatacccttgttacattgtattttttacaaattaagcatttgtgtcatgaactatgcccattaaagatggtaaacttttcatcaataaatgtcctgaatgcccaccaaacagcctttccctatttctcttctctctcctcaggcctccctgttccctgagacaaaacaagattgaaattaggccaattattaaccctacaattgcatctaagtgttcaactaaaaggaatagtccccatctctcactcttctttaaatcaaaagccagaaatgattaaacttagcgagaaagtcatgttgaaggccacgagaggctgaaagctgggcaggc

SEQ ID NO: 257407 - DNA, 496 bp, Homo Sapiens
  misc_feature (401)..(401): n is a, c, g, or t
aacaaagatggtgcttatggggcaggttccctaacagtcaggattccggttgcagtttttctcccccgccccaaagatacgtggttgcagacggagaaatggaggccagagacaaacaagtactccgctcacttcgcctggagctgggtgcagaggtattggtggagggactggttcttcagtacctctaccaggaaggaatcttgacggaaaaccatattcaagaaatcaatgctcaaaccacaggcctccggaaaacaatgctcctgctggatatcctaccttccaggggccctaaagcatttgatacattcctagattccctacaggagtttccctggggtcagggagaagctgaagaaggcaagggaagaggccatgaccgacctgcctgcaggtgnacagattgactggggatccccttcgcacatccttcaacagcttccccattcaggaccggtcaggatttaaccaggttgggcccaggaggctggcc

SEQ ID NO: 257408 - DNA, 489 bp, Homo Sapiens
  misc_feature (14)..(14): n is a, c, g, or t
  misc_feature (48)..(48): n is a, c, g, or t
  misc_feature (63)..(63): n is a, c, g, or t
  misc_feature (73)..(73): n is a, c, g, or t
  misc_feature (104)..(104): n is a, c, g, or t
aattcccgggcccnggtttcccacggggacacgcttaggaaggcacgngggagcatttaacanggctaacccntcccctttcccttttccccctccttcctacncctccccccaagaaaaaagggcccttcaaggcagggaatgagaaagcaaagcccaatctcctcatttagacccggcttctttcctcctgaacaaagtagggttcaaaatgcagactgtcatatccagcgagtccctgaccctttctgcgaatgtaacgagcaagcagtcagcacagcctgggctgccctggcccgggattgatgtagccccggtaggtttgcctctgcagaactaatggctgtgacttcagagaaagccctgcaggaagtttaacctgcgtgtcatctgcctggtcatctcagacccatgaaattaggcgccttgtttgagctgcgtttcacacttctttagagctagctgacctttggccaaaaataaactttg

SEQ ID NO: 257409 - DNA, 3003 bp, Homo Sapiens
gttttccccccctaaaggcatagacaacaaaagaaattttattgagaggaaaacacaagtcctataaactgcaaagatgtttgccaggatgtctgatctccatgttctgctgttaatggctctggtgggaaagacagcctgtgggttctccctgatgtctttattggaaagcctggacccagactggacccctgaaccagtatgattacagctacgaggattataatcaggaagagaacaccagtagcacacttacccacgctagagaatcctgactggtactacacttgaggaccaagctgatccatgccagcccaacccctgttgaacacggtggggactgcctcgtccatgggaaaaccttcacatgcagctgcctggctcctttctctgggaataagtgatcagaaagatgcaaaatacgtgcaaggacaacccatgtggccggggcaaatgtacatcattacccagagtcctccctactaccgctgtgtctgtaaacacccttacacaggtcccagactgctcccaagtggttcctgtatgcaggccaaacccctgccagaatggggctacctgctcccggcataagcggagatccaagttcacctgtgcctgtcccgaccagttcaaggggaaattctgtgaaataggttctgatgactgctatgttggcgatggctactcttaccgagggaaaatgaataggacagtcaaccagcatgcgtgcctttactggaactcccacctcctcttgcaggagaattacaacatgtttatggaggatgctgaaacccatgggattggggaacacaatttctgcagaaacccagatgcggacgaaaagccctggtgctttattaaagttaccaatgacaaggtgaaatgggaatactgtgatgtctcagcctgctcagcccaggacgttgcctacccagaggaaagccccactgagccatcaaccaagcttccggggtttgactcctgtggaaagactgagatagcagagaggaagatcaagagaatctatggaggctttaaaagcacggcgggcaagcacccatggcaggcgtccctccagtcctcgctgcctctgaccatctccatgccccagggccacttctgtggtggggcactgatccacccctgctgggtgctcactgctgcccactgcaccgacataaaaaccagacatctaaaggtggtgctaggggaccaggacctgaagaaagaagaatttcatgagcagagctttagggtggagaagatattcaagtacagccactacaatgaaagagatgagattccccacaatgatattgcattgctcaagttaaagccagtggatggtcactgtgctctagaatccaaatacgtgaagactgtgtgcttgcctgatgggtcctttccctctgggagtgagtgccacatctctggctggggtgttacagaaacaggaaaagggtcccgccagctcctggatgccaaagtcaagctgattgccaacactttgtgcaactcccgccaactctatgaccacatgattgatgacagtatgatctgtgcaggaaatcttcagaaacctgggcaagacacctgccagggtgactctggaggccccctgacctgtgagaaggacggcacctactacgtctatgggatagtgagctggggcctggagtgtgggaagaggccaggggtctacacccaagttaccaaattcctgaattggatcaaagccaccatcaaaagtgaaagtggcttctaaggtactgtcttctggacctcagagcccactctccttggcaccctgacaccgggaggcctcatggccaacaatggacacctccagagcctccaggggaccacacagtagactatccctactctaagcagagacaactgccacccagcctgggccttcccagaccagcatttgcacaatatcaccaggcttcttctgcctcccttggtaacccaaggaatgatggaatcaacacaacatagtatgtttgctttccttacccaattgtaccttctagaaaatcagtgttcacagagactgcctccaccacaggcatcctgcaaatgcagactccagaatccccagcatcagcgggaaccaccatcacatctttattcctcagcccagacactcgaggcactcaacagaatcagccatccacgtctaggtatcagagaggaccacaaatacaacattctccatctgctttcagagttattattttaataaaggaagatctgggatgggctggtgggccattccagcttgccgaaatcaaagccatctgaagcctgtctctggtgaacaaacttcctctctggcctctcaggaatcagggtggcatggctcacaacagcagggccttcttctttttgacgtgcagaatctcagtggcatctgggttcacctccccactctgatgatctccagcctccactgcttctgccccccgctgctgaaatcaaacataccccaagttaaaatgaagctcccccacccccactcccggccccggttcccacaggacacgctaagaagcacagggagcatttaacaggctcaccctccctttccttttcccctcttctaccctcccccaagaaaaagggccttcaaggcaggaatgagaaagcaaagccaatctctcatttagacctggcttctttcttctgaacaaagtagggttcaaaatgcagactgtcatatccagcgagtccctgaccctttctgcgaatgtaacgagcaagcagtcagcacagcctgggctgccctggcccgggattgatgtagccccggtaggtttgcctctgcagaactaatggctgtgacttcagagaaagccctgcaggaagtttaacctgcgtgtcatctgcctggtcatctcagacccatgaaattaggcgccttgtttgagctgcgtttcacacttctttagagctagctgacctttggccaaaaataaactttgaaaagaaaaa

SEQ ID NO: 257410 - DNA, 433 bp, Homo Sapiens
  misc_feature (41)..(41): n is a, c, g, or t
  misc_feature (150)..(150): n is a, c, g, or t
  misc_feature (171)..(171): n is a, c, g, or t
gccgggtgggaatatggggaattggccagtatatttcttcnaagtctgagtttactttcttcctgatcatgaccatctgaccttgttatttctgggcttggctcaagaccaaggagagtggatgttgatgaacattccttttaaataaanagtgcttaggttgtagttagnggctttgtcatagaatggtgatgtcaactgtgagtgtaggtctgtgatatagaaagaattcaactttccagatctagaaagatgctaccttgcatagatttgctccttaaacataaattgcaaaaataaaaatatcacagagaacacctgtactttgcttactgaaagatttgctcactaaagaaggaaagttgccatttacctgtttaacaaatctgcacatcctgcacatgttccccagaatgtaaaataaaaaaagttt

SEQ ID NO: 257411 - DNA, 128 bp, Homo Sapiens
tctgtaagccagagattagttggtcatagatctcttcttatgagaccaatgagggggtttgaggctgaggaggaagtcaagagagtgaccaacctgtgttggcaactaagttatgcctttaggctcat

SEQ ID NO: 257412 - DNA, 365 bp, Homo Sapiens
aaataaaccactagtaagaagctgttcgaattacacgatgttttaaatttatgtggcttagtgttttcaatgttgtatttatccctatgtacatataatcaaatctaaccattatcataaaagtcaaaataattattttcaacctaataaagctatattttcccagtattgacattgtagaaatgatgtattttgatcagcatttgcagattatgtaagattattcctataattggtttcaaagcattttctcatatttatctccttgaatattaaacctcattaggaaatatatatttagatatgcagagaagactaatttataaaactaaaacatccaaacaagatattttcttgttgttttg

SEQ ID NO: 257413 - DNA, 1366 bp, Homo Sapiens
  misc_feature (869)..(887): n is a, c, g, or t
  misc_feature (1326)..(1326): n is a, c, g, or t
  misc_feature (1345)..(1345): n is a, c, g, or t
gggggttcttctggggtgctaatcaggcccctgttatgcttagggggagccctggtgctacttgcttgaagttttcagtgtaagtaccctgatgccttttggaccttgggatcagatcaagagttttggagatcaggtaccaaggaaataaggacagtctagctgcctcaagtgaggggccctttgcatagctctccttccccctcactgaagctgggtagcctattggggttgagagggaaaatgtgaaatctcagaatttatctcccttagaagagagccagtaacttatgtacaaggatgaaagaaaggtcgcagcagtagctttggggaaagggaggaagatatggcacttctccaaccccggaaaacattgcttttgaaaactgctgataaaatatgagccggttattacttctgtttgggagactgtgctctctgtggtgcctctcttggctctactccacagataccagacctcttctaagaggatgagcagaccagctttgaggttgacctgtttctctttgtctgccttcccaaaacaccagcccccaggaagacattaagcagccttaagcttaaattcctactccctcttccaaatttggctcacttgccttagatccaaggcagggaaaggaaaagaaggggggtctctggctttattactcccctaagtctttactctgacttccccaaacccagaaagattttctccacagtgttcatttgaaagaggagtattttgtcccattttccccttcctcattatcaaacagccccagtcttccttgtctctgctaagaaagtagaggcatgatgatctgcctctcaactgccctaagtcctagctaagtatcaggggnnnnnnnnnnnnnnnnnnngcctaacaaatgggattagactagggctgcaagtagtgaggattttgttgatacctctgctgggatgtgtgctttcccatatcttgccttcaggaattacactgtgccttttccccagggatatgggctctgtctacccagtgctccagtttcccggtaactgctcttgaacattgtggacaagggcaggtcttcatatttttgatcatccctttctcccagtgaaatcccatagcccttacctagagtctagggcacaaagacttcggggaagatacactgagattgacctgaggagacatctacacacaccagtgggcagctgccccagggcctggctttcccctttccttaagtcttgttcattcctctgggaaggggatggggtgggtgcttccaatcttctgggtggccttaaaaacccaagttttattttctnttttttaacattgggcatnaaccagttccacaccattgtt

SEQ ID NO: 257414 - DNA, 627 bp, Homo Sapiens
  misc_feature (590)..(590): n is a, c, g, or t
cacgaggttcaggtaaggaattaataagcagcagaggaggcatgtccaggctggcttgtccccaggccctctgccttcagccaccattctcagaagatccaaagatgccaaggggaaagaagccggatgctttttcaccttaggtgaaagtcagtaattggagttaccctttctgaggccctgctttgcagtataactgaggatcaggtgctgttctgtttctgcttcaaattcaagtcctagaggacagtctgaacaaaagcatcattaaaccagggaaggaccaacctctaagccaaaaactaggcaattatatgaatcctcagaaaaagaaatgagcccagagacctgtgtccccaaacatccgtaaatctcatagtaaggcaggacaggataaccagaaaaaaacaatgtccaactggtctggtttctggtctcaatggtaccaaagggatagtcaccacctcaatcaaactgagatccaaaacaggcagctgctttcctacaaggaaagacatcaagaactactgagtctgaagggtgacataatcaaccacaagaaaatgttacggtttagcctgggcacagtngtgcattgcctgcagttcccaacttactgggagaggg

SEQ ID NO: 257415 - DNA, 446 bp, Homo Sapiens
  misc_feature (390)..(398): n is a, c, g, or t
  misc_feature (414)..(414): n is a, c, g, or t
  misc_feature (419)..(419): n is a, c, g, or t
gaatccccctggccccataataaattgtaattttatactgcttactataatttttttaacactgtaacaactttgagaccacctctgaaccgtcgccattataactgttgtagaatccttaaatgttaccaagatgattcccaatgaggggttggaattaaatgccattaagtagtgaattcacgtgtttgtttccaacttgattttccaactctaataaaggtttctgtccatcttattacatttgtgtagtaaatggtacttcccagcctctcttttgccccattctggaatactccccagagtttgggggtgttcatgttttatacatgtaagtctgttggcatgaaggaccattttctacataatatgacatggatacttgacccnnnnnnnnntgtttagtgctaatgngcagnaaatgaatggttccataataaattgat

SEQ ID NO: 257416 - DNA, 2263 bp, Homo Sapiens
  misc_feature (35)..(35): n is a, c, g, or t
  misc_feature (348)..(348): n is a, c, g, or t
  misc_feature (611)..(625): n is a, c, g, or t
  misc_feature (1665)..(1674): n is a, c, g, or t
  misc_feature (1884)..(1884): n is a, c, g, or t
  misc_feature (1957)..(1957): n is a, c, g, or t
  misc_feature (2034)..(2034): n is a, c, g, or t
gttgagtcagcttggtggctccctgtggacagtgngctgagccttgtcacgcgcactcgccaattaagagatggaccagccagcagtcaagtgcattctccagtccttgcaagaaggatcagccctttctgtgccagcctcgatcgccttgtgctttggtctctttttctcccccccgcctgggatcctgcctcgcgcgggccgtcctgttgctgagactcggggtaccgttctgctgacccagctccctttagtcacgtttgcttggctctggtaccaaatagttggggattaccgaagagtccccttccttgcgtgtcagcacggatgctgtgactgtccacctgncgttcctcgtcaagtgcccgagctcgccgccgtgtgtgctgcgctggagtgagttatgaggtgcctttcccggaaccctcctctcgcctggacccaagagaggcgacagctgtggctggggctcttggtttccagagggtctggactggtttgggtgctttaaaatagatatttagttcagtggtgcttatgggggagatgggactagaacttaagtgtgagacttgggtggatgggaaagttaaatattggtctcttcaagnnnnnnnnnnnnnnngctttgttaccacttgtcactgtctccatgttaaaatgccaaaaatgatgtagttgttgttgcttttttccctattttccaccccagtcgctccttaccgtgactcctgcccttggagggcatgtagcagtgtctgtcctgccagtcccaaggccctgtgggaggagactggcctgcatctctctaagacttagtctgacgccacgcgcatctcttgttctgtgttcaatcagtagtccaggggagaagcttctgctacttcagagctttgctaaactaacctaatttgtccaaatcaccccaaaaccaccatctctgacgtaagcttccatgcgacagcctgatccgtttccctggacaggtctctttcctggaatgcagcccaggcacctgtgctcctggcacccttgaggtctctcctttgagccgtggtcaccgagagggttgaggacgcagcacccgaggtcccagcctttgcaggagcctccctgggcttagctggacttagatcttcggtggcctcatgtaaacgtggcagccagcctcttctagaaccctagcccagggactggagcaggaaagggaccttcaaagtgaagactgccttgtcccgcagctccttctggcttagattgaaacatgggcttcctaatgggttaaatcctttaaaacaaggagttgtgggggaagggtgtcgtgcactcctagagaaaggtacacagttgcccggttgggaatgtgcttggcgctgaccctgcgggcatctgactggtcttccagctcaggaaaaagaatttgaaagaggcttagcgtgaaggggaatcaaagaggaggttgtgatttggtcgaaggtgcctggtttagtgctgtaattgtcttattattttttttatatatatatttcttggagtaaacattttaaataaacaacaacattgtctactgaaaaactgacaacacccccatcaaaccaccatctcttctatagtgcacgcccctatacacaatcctttaccaactcaccccattcaccaccaagnnnnnnnnnntggcgacccaaccgttacgccccaacgggaatctcctctcttaaacccttacccccttagcgtattcctttccctccgtcttctatacccccacacacggccccctttattatcatctcccggcataccccccagtgaaatctttaaccacccgccgcctccaaacatctcacactataaattcaccccgcacccgcccattcccgtganagacccagcgccatcgaacgcgttcgcaatatagccccacactaaggacggtcacccctcccacccaaagccnctccaacccaaatgccgagagatttcccgctgaagcctgacggagtacgccccgcgcggcacgcaatgccacgctgnatacacccgccggcatacacgcacgctcgagtcaccaatcacccctcgcttctctctcgccctctatacaactcaacgtcagacatcatcctctcaccagttctccccctcgtattacaacaccgccgcactcccccccaactcaattgcccgcgtaaggagcctcaacacacccgccattattctaatccacgcaacccacatacaccccgacctgactatacctccc

SEQ ID NO: 257417 - DNA, 412 bp, Homo Sapiens
  misc_feature (299)..(311): n is a, c, g, or t
gtttacttgtgcaatgctaatatagtaactcggctgtcctttgaatatcactgtgttgagtagattcctctaggacctttgatttcatgagttgggcccaaaccgtggtggaataataacacaaaagaagttaaatgccacaaattttaatagtgagcttacttgaaggatttaagtaggtttaggaggtgaagaaggccgatggagaaatttacagattaattttggaagctctactctagctatcgaacaatcaaaggaatgcacctatcagctacaaagaacagctagacagctgnnnnnnnnnnnnnataaatgtttctgtgttgtgtcaaaatgatttctggtgatttaaactaacagataatcacagctgctgtctaaaattcatagtgttgaaaattacaaaatg

SEQ ID NO: 257418 - DNA, 605 bp, Homo Sapiens
  misc_feature (580)..(580): n is a, c, g, or t
aaaacgagtccgaagccgaagctgaccagcagatggacaacttgtacctgaaagccttggagggtttcattgccgtggtgacccaagatggcgacatgatctttctgtcagaaaacatcagcaagttcatgggacttacacaggtggagctaacaggacatagtatctttgacttcactcatccctgcgaccatgaggagattcgtgagaacctgagtctcaaaaatggtatccttaattgtgtttacttccttcttgcccccactgggtgggaatctgcctcccctttggctacgggtataagggagatagctcatggcccttgtgatgcaggaaaaatggatgtccttaatacttataaatatctcctgctggccctgcatggtgcctggtgtcccactactaggggacacctttgggttaggacactgactctaggaggtttcatcacccaagagtcaagcatctctgccaaatgacaccacccaaaccaattgagggaactagtctgttgccaaagtgctcattagttaactactgttagtttatcctatttgcttgttcttaaccaaacccaccntattaacataggggctttttgatgg

SEQ ID NO: 257419 - DNA, 280 bp, Homo Sapiens
atgagccactgtgcttggccttgacaggttcttttaaggtttaattacaagctgacccaagaaaattaaataggaatccctcaaagcagctgagtcatgctttgtcaagtgaactaaaaagcatgaactgcatttgttacctcttttatgtattatttctatcttaactgttttattcccactgcagttgatagattttaacatcagattataaaacagtggcaccgtgagggcgtagaagaagaataaagggaaatgtctctcttaaaagagcccttgg

SEQ ID NO: 257420 - DNA, 493 bp, Homo Sapiens
cccatttagaaacttctgtgcttagaacatacttggaaaactctaagtacatacatacaagggctattggcacaagagcccaagatgagtaactatctttctccctaatttgacatcaaatttaatagatttttaagaaaaagaatcactgccagtcacagacatttaaaaaagaaatgactgaggtgataagcctcaggaaaattacagagtagcactgctccagaaggagcagaaacagaaaagcagaatttccatttacaaatgatgacagtactgtgaaagctcccagaattagcagtaagaagcacaactctgcaggttcattatactctggacacagtatatgtttcttctcttctgaatttcaaggtaatatgacatttgcttaataaatgaaaattcataatatagaagatggaggacctcagtaagtatttagatattaaagacaggaacaaagtggccattttggaattagtcttttatcaaa

SEQ ID NO: 257421 - DNA, 1334 bp, Homo Sapiens
gaccgttgacaacaagggggcctgcacaccgctagccacgaagaccatcggggatgataaggacctccaacaggtcccaggattgttcccgtgtggcaaccccaacgagtagcaacagtagcaagaattcgctccacgaagcccgcaaagaaggaaggcacttaggtcttcaattgcccgctcttttggcagagaaagaaagaggaccgacctgaccaaaccggcaaaggaagcaataggacaacgctggtgtttccgagggggataaatacatctcaggatcccttgaacctagacaactgagggtgacaggctgaacaactcctaaactccaacaagagcatgaattgatggaggaagcacggagacaaggtttacctcttgcccaatgggacgggccaacggttgtggtctggctagagctctgggttgtgatgccagcctggtatgtggctgcctgccgagcaaacgtgaaaagcggggccatcatgtcggccctgtccgacacagagatccagcgtgagattggcatcagcaaccccctgcacaggctgaagctgaggctggccatccaggagatcatgtcgctgaccagcccgtctgccccgcccacatctagaacgacactcgcctatggggacatgaaccacgagtggatcggcaacgagtggctccccagcctgggcctcccccagtaccgcagctacttcatggagtgccttgtagacgccaggatgctggaccacttgaccaagaaagaccttcgagggcagctgaaaatggtcgacagttttcacagaaacagtttccagtgtggaattatgtgcctgagaaggttaaattatgaccggaaagaactggaaagaaaaagagaagaaagtcagagtgaaataaaagacgtgcttgtttggagcaatgatcgagtgattcgctggatcctgtcaattggccttaaagaatatgcaaacaatcttatagagagtggtgttcacggagcacttctggccttagatgaaaccttcgacttcagtgcactggcactgctgttacagatcccgacgcagaacacacaggctcgtgctgtcttggaaagagaatttaacaaccttttggtcatggtgacttgatagaaggtttgatgatcatgatgataaaagctttaggagagcaccttcatgtagaatcttccttgatacctccgcgtgaatttcttctatgctttaccccttctatgcatcccattaaatactgtcattgtacgctctgctttaagtaccccacggctcggattctgcttcagctttgcactttactcctgcttacgtcctcctgtt

SEQ ID NO: 257422 - DNA, 673 bp, Homo Sapiens
cacaacccagcgcattgcttctgaatcacattacagaggactcttctgtttctaggactgcagtcgccaaaacagcaacaggagctgaaatgcatctataaagagaagtttcccactaaaactagaatccattgcttcagtaggactgtcactgaactgaccgtgtgttagaagaaactggcaggcagtatttccacatatagttctttaggggtgctaggtattctttgttgctgccatttagaatcaatgtactgaccatactcattttggcagagaacctacttttgacataagctttgaaaatgtttgctgcccccccaccccgccttgcctcaccctaccccagcattgttgctcatggctacaatatgttcgcactaataactgcaggctcttgtgcacataaggaagttagccaccttggtagaaattagaggaaaggaagaaggagggaagaacacgtttattttcaaaatccaattctgtggaaaaaccagaaatgcaaagacagtgtttgttaggaaagctaggaccaacaaagtgaaatcagatatatttgtttaggaaaaataggaagctgttgctttctttaggttaaaagtatgttttgcaaactttaaaactgctcggataccttggttcctaattcttttttgttaaataaaatttt

SEQ ID NO: 257423 - DNA, 846 bp, Homo Sapiens
cttcgcctcacccctcaactgctacttccgccagtactgttctgccttccccgacacagacggctactttggctcccgcgggccctgcctagactttgctccactgagtggttcatttgaggccaaccctcccttctgcgaggagctcatggatgccatggtctctcactttgagagactgcttgagagctcaccggagcccctgtccttcatcgtgttcatccctgagtggcgggaacccccaacaccagcgctcacccgcatggagcagagccgcttcaaacgccaccagttgatcctgcctgcctttgagcatgagtaccgcagtggctcccagcacatctgcaagaaggaggaaatgcactacaaggccgtccacaacacggctgtgctcttcctacagaacgaccctggctttgccaagtgggcgccgacgcctgaacggctgcaggagctgagtgctgcctaccggcagtcaggccgcaaccacagctctgggtcttcctcatcgccctcctcggaggccaaggaccgggactcgggccgtgagcagggtcctagccgcgagcctcaccccacttaacatatcctgcggggaggaggagcccccagggtgctagtctggactgctgggactccgggccctggggcctcagagggaccccggctgccactgacatatgaagattatggttctgccagggctcccctccctgcctgtccccaagtcctcacctcaaactccctccaagtcccatgtatataggtcctgatgccttcccaaccccgcccctcaccctgttgccaccttgtttcatttgtaaaaggaaatacagaaaccccccc

SEQ ID NO: 257424 - DNA, 980 bp, Homo Sapiens
ttcttttggccctgtgacacgtagcaacggggctggttcagggtctgaaacagagtttgggggttgtttgggattagtgaagctactgcctttgccgccagcgcagcctcagagtttgattatttgcaatgtcaggctttgaaaacttaaacacggatttctaccagacaagttacagcatcgatgatcagtcacagcagtcctatgattatggaggaagtggaggaccctatagcaaacagtatgctggctatgactattcgcagcaaggcagatttgtccctccagacatgatgcagccacaacagccatacaccgggcagatttaccagccaactcaggcatatactccagcttcacctcagcctttctatggaaacaactttgaggatgagccacctttattagaagagttaggtatcaattttgaccacatctggcaaaaaacactaacagtattacatccgttaaaagtagcagatggcagcatcatgaatgaaactgatttggcaggtccaatggttttttgccttgcttttggagccacattgctactggctggcaaaatccagtttggctatgtatacgggatcagtgcaattggatgtctaggaatgttttgtttattaaacttaatgagtatgacaggtgtttcattttggttgtgtgggcaagtggtcctgggatattgtcttctgcccatgatcctactttccagctttgcagggatattttctttgcaaggaatggtaggaatcattctcactgctggggataatgggaaggggggtaggtttttctggcttcccaaaatatttatttcctgcttaacccttgggagggacgcaaccttttagaagcatatccttgcgccttgggtatatgggagcctttggccctgaatttcccgccttttggaaatttattcggggaatgggggaacttagtgggggccaaatgttacaaaagaggacctttga

SEQ ID NO: 257425 - DNA, 1563 bp, Homo Sapiens
  misc_feature (1284)..(1441): n is a, c, g, or t
aaggagcgaggcctgggtggcgaattcggcacgagggctggttcagggtctgaaacagagtttgggggttgtttgggattagtgaagctactgcctttgccgccagcgcagcctcagagtttgattatttgcaatgtcaggctttgaaaacttaaacacggatttctaccagacaagttacagcatcgatgatcagtcacagcagtcctatgattatggaggaagtggaggaccctatagcaaacagtatgctggctatgactattcgcagcaaggcagatttgtccctccagacatgatgcagccacaacagccatacaccgggcagatttaccagccaactcaggcatatactccagcttcacctcagcctttctatggaaacaactttgaggatgagccacctttattagaagagttaggtatcaattttgaccacatctggcaaaaaacactaacagtattacatccgttaaaagtagcagatggcagcatcatgaatgaaactgatttggcaggtccaatggttttttgccttgcttttggagccacattgctactggctggcaaaatccagtttggctatgtatacgggatcagtgcaattggatgtctaggaatgttttgtttattaaacttaatgagtatgacaggtgtttcatttggttgtgtggcaagtgtccttggatattgtcttctgcccatgatcctactttccagctttgcagtgatattttctttgcaaggaatggtaggaatcattctcactgctgggattattggatggtgtagtttttctgcttccaaaatatttatttctgcattagccatggaaggacagcaacttttagtagcatatccttgcgctttgttaatatggagtctttgccctgatttccgtcttttgaaaatttatctgggatgtggacatcagtgggccagatgtacaaaaaggaccttgaactcttaaattggaccagcaaactgctgcagcgcaactctcatgcagatttacatttgactgttggagcaatgaaagtaaacgtgtatctcttgttcatttttatagaacttttgcatactatattggatttacctgcggtgtgactagctttaaatgtttgtgtttatacagataagaaatgctatttctttctggttcctgcagccattgaaaaacctttttccttgcaaattataatgtttttgatagatttttatcaactgtgggaaaccaaacacaaagctgataacctttcttaaaaaacgacccagtcacagtannnnnnnnnnnnnnnnnnnnnnnnnnnnnnnnnnnnnnnnnnnnnnnnnnnnnnnnnnnnnnnnnnnnnnnnnnnnnnnnnnnnnnnnnnnnnnnnnnnnnnnnnnnnnnnnnnnnnnnnnnnnnnnnnnnnnnnnnnnnnnnnnnnnnnnnnnnnnntggggcttggtgggcgggccgccctggtaattcccaagcttacttcagggagggcttgaaggccagggaaaaaatggtggaaaccccagggaagggggggaaacctttgccaaaattggaag

SEQ ID NO: 257426 - DNA, 646 bp, Homo Sapiens
  misc_feature (588)..(588): n is a, c, g, or t
tagagctggaagagtgggctctctgattctttacacccccgcctcaatcctcctgctgcctgaataaccatctccccgtgacctaggatatatcccagccccttagaggcatgcaaagccttccatgtctgaccctgcctcatgtcttggaagccctagactgctgctgtaccctgaaggaggtacctgctcacattggcccctctgtctggaataaccccaccccggttccacccaattcaggaaagcttcccaacccctccctcccaccaccccaaagctaagtgaagtgacccctcttcttgcctctgtaacaccgccatgcacatttcatacagcccttgctgaaacttcatctagttctctgttagacttaacattccctaagggcaggtttggaaccttactcatctttatatggcgtctaaaatagtgcttgctttatgataggtgctcagtaaaggttgtcttgaattgagcagatcctctagggacaggagttgggatgggagagcagactgtaaagcctcatgagggcaggggcctggcttctttcctgaggcttcagggatacccaggggcctaggntcagttgcctgccatggaaattgtttcactccattcaagccttgtttaaatggagttc

SEQ ID NO: 257427 - DNA, 754 bp, Homo Sapiens
cgtcaattctttcttggaaaataggtttcccacacaacaggaattcccacccagtagtttggcatacgcttagaataccttctctggaagtctccataccatcctccctgaccccgcttcttgagtcatggattcctggagaggctgggatcctggagggtcattttagtgaagctttagtgattgtgaaaaacccaagtgactctggctagtcttaagcaaacggggcatttatttgaaagatgctgagcatccatctcagtgagtccaggaaagaatccaaacaggcaagatcaaatagctagaacaggacagccagagccactcctgtgggttgggaggacagaccccaggcaggaggcatcccccacacacaacccagtggctcccactacgtgtcccagtcccggcttttcttgaggactctcttctaatggcagcaccaattcctgtccctccccttctccatatctgtttaactgccaggtcctggctccacagcgatctcgagatctcagggagatgaaaaagtagattcttaccacaaaaaggtcagggattcttgagccaaaaacaatgagtcccattgtctgaccacgtagagggagagaatgggtggaagaaatgggttgaaggggttggaatacatctatttctggatcttttgggacttggtacttttggtataaacagagtatcccttgtatatttaaaattggtgaattttaccacacaaaaaccaaacatccaaaaa

SEQ ID NO: 257428 - DNA, 815 bp, Homo Sapiens
catctgggataggatcatcttcttctgaggaagaagatggctcctctggtaagaagggaggtttcccagtgttggtaagcattgcacctttcatattaggatctttcacttccatcatgaaacttctgggaattccagtgctctttttaatcctaggaccagattcaaagtttttatccccatttgttgggcaattcttaatataatgtccaggtttaccacaacggaaacacgtgtaagatggaggtggtggacctagaggtttcttcatgtaattgattgggtcgtattcatggccagattgcgacatcattgctttaattttatcttcttcagaagcattggcttcagccagattggcagtctttgtaagctgggccagagaaatagacgcggaagagtcatcaattgcttttgtagttgccatcgctggttcagttcgacttataacatatgtcttgcttgtagatttaacacctccaataggaattcttctaacaattacagaagaattcttaggaatcagagcattatcatcagtatattcttctttcgtctgcgcattggtgatctgcaggtcgcagtcggcagctttcagcttctctctccccataatctgcttctttaagtcgcagagggagatgtggagcccatcaaaggtgacggtatcatagttgagtttagaggaaaatttataatgcacacaggacatggtgccaagggattcctaaggttcagcgaggagacgtggacactctcaatatacgtatatttataaactttaagagcaaaatatgtacacacaaaacactcaa

SEQ ID NO: 257429 - DNA, 1362 bp, Homo Sapiens
tcagatggctgggcttttaagaacaacatggacatcagaaatcaccagaaccttcaggatcgcctgcaggagcccatctactgctggccaggagcccccagtgccctgtggtggtggacaccatgcagaaccagagcagccagctctacgcagcactgcctgagaggctctacataatccaggagggcaggatcctctacaagggtaaatctggcccttggaactacaacccagaggaagttcgtgctgttctggaaaagctccacagttaatctggacagatacctcaattctaggtgaccaacgggagggcttctcaaggcttagctctccctgagacccagctggcttttacccttgacctgtgtccctagctgaatcactagctcagatttttctgatctaagcaaacaactcccagctgaggaatgcaggccacagcacccaatcaagacaaattgttattatcagaaaatgaagcaacacttgagctgttcaggccagttccctgttgaagaaacagttccctgttgaagaaagtagagcctgacactgctcccactttggagaccacattccctgcacacggtctttgagagagcagttgcactctacaggcacacttctgaggtacggtatctctctccagccactctgataccaagtaattcaagctggcattccttctattagggaaattcattttacccaatttgcatttatggaattgatcatttaagacactaaattagtttttagaaccaattatgggaagaattccagttgttaggaagagatgaggagttggaagaggagggattagaaacaggaggaggcagtcatcctctccttgccaaaagatttaaacctgtccacattggtggtgatgatgggtgagtttccatggtaacacatccctaattttaccagggaagaggagagtactcactttaccatctttgaatatatttcatagaaatctagctctctgtaccctgaaatcttccactagcctcacttttcaacagagtcatctagaagggagggttggcttcccaaaagcataaccttgaccaaaccaaacaataggcacccagcaatgctgtcattcagttatgcagaagctcatttgtgaaattctgtttctctgatttcttcgcaagtctcttaatggtcatttgtgttagattacatcaaactgatggatagccattggtattcatctattttaactctgtgtctttacatatttgtttatgatgccacagcctaaagtacacacggctgtgacttgattcaaaagaaaatgttataagatgcagtaaactaataacagaattattaaaatatatcaggctattt

SEQ ID NO: 257430 - DNA, 1127 bp, Homo Sapiens
  misc_feature (101)..(101): n is a, c, g, or t
  misc_feature (241)..(254): n is a, c, g, or t
  misc_feature (1023)..(1073): n is a, c, g, or t
ggcaagagggggcagggggcggtaattggagaaaggggcggcccaaagacaagacatttctttcccccgccgcgccctgtttaatggcgccgggccggtgntttctttgcggagggcgataagagaaaggttgtgggcctgggggcgccccgggagagtaaaccctctggttccctcccccgaaaatactggggaccagagacagcggttggggcgcccgacaatgtcccccgaaatgccnnnnnnnnnnnnnntgtatgtgtccccgcttggccccagggggagaagttcgggggtttttaaaccatcccagttccaattttccttcgcggtttgggagtgcggaaccggattttggaagaaaaaaattggattccaaatccgggtccattgggagttcgttcccattcccctgaagggccccgccagcgggttcccagttcgcccctttaaaaaatcttcttttctcgttcccaaatttctcgagtcgggggcggggcttttttctttcaagtttgttccaagtttcttgatgtgtgctttggctttgttgagcaaaccaagtgttgtgtgccgggtgcagtctggtcctagtggaatcagaacttttaagcgttctaaacaaaggcgcagatgagctcgtcgattcttttccagctcattgtgtgtagatctgttggcagtgctggtgttgctgctcccgctgctgtgtttctgtgcccggctcaacctccgtgggggctttgaatgctgcagtcgggggctcggcatggacgggaatgaagaggcgtagccatgttcacactctcgctcccggcgctccaaaaactcggcagcctccagcagacgctgcacgttgatcatcttcacccgctccatgggcaccgcgggtggcgaccggcgcctctccgcactcccttctcgggccgacaggaggcgccgcaggcggctacggccgggcgccgttccggaacatgtgcgacgggcgggcgggccagctcggccgcggctcggcgcgctctnnnnnnnnnnnnnnnnnnnnnnnnnnnnnnnnnnnnnnnnnnnnnnnnnnncgtgcagaattcgccagggcgaggtgggcctcgtggtggatctaggggggagaa

SEQ ID NO: 257431 - DNA, 808 bp, Homo Sapiens
cgcaatgggaaggcttcaagcccacatctctccatctggttcacaaggatatcataagaggctctgttaaatgccttgctgaaatccagttacattatgtctatggcactttcctggtcttccagtctagtagcccttgtggcacaggagctatctgacctgtttctacttttttcccaggagttttcttatgatctcctttgggtttctttacacgtttgacctggaatgtaatccattctgttgcttcatcatcttcacttctgcagtctccatagcaagagcttctggccactccatcctggggacctttcttcagcacccgtattccttgtaagtctagacgccgccctttcatctctagtgcacccccaaagccttccaaaggccatgcctgttgaaattcatccaccaaagccagtatttcttctgacattttggtttcatctgaattctccatctcatcagaaccattgctctcctcaaccaccgtactttcaagtctaagggcatctgagtccctccctgaattctcaacagagaatacagggtcctcctctgttcctctctcagagggctcttcttcagcagcatccagtgactgtgagttgtcaaaatatttctgtttgtcatggctgttgtccagggttttctcatgacaattaccactgcaaacagaagaagtgatgttgtacagaaaaggataaaactgcatacagcggatcaacttcaggctgttttcacactctggacatttggtggttaatttcaaggcctgtctaaaggcctcaagtgccccactgatatt

SEQ ID NO: 257432 - DNA, 765 bp, Homo Sapiens
  misc_feature (182)..(215): n is a, c, g, or t
  misc_feature (635)..(697): n is a, c, g, or t
ggcagaattagttactctttcctctgtgcaattgttctatatcttcgctctagctcttttcctgttgtattgtaatgatttgtttatgtttaccttccttactagactgtgagctcaagagcaggccgtcttaattattcctttctgtacccctagtgtcttttatggttctcagccccttnnnnnnnnnnnnnnnnnnnnnnnnnnnnnnnnnnattattaaatgtaaaagaaaattaagattttttgtgaaaattatggcttatttaagttattaatttaaacagagttaatttgaaactcttccaaaactgttcctttctgttttgttaaaatctcaatctaaacccctgcctgtacctcaaacagttttctactgttcgtaaattcctataatataaaaagcgctatacagaactaaagttctccttcctgcctattccattataactccttcagaaaacccttcccagacaagacagttctgctcttttcttgggggatttgatgtaaggtaaaggggcccacacccaaaaggtgggtacttacgaaggatattaataaacagagctttaaatttttttgtagctttaaatagcttgttgattgggaacatacacgttagagtcaaacannnnnnnnnnnnnnnnnnnnnnnnnnnnnnnnnnnnnnnnnnnnnnnnnnnnnnnnnnnnnnngagtctcctgtttttctcatcttgagaaaatgaggggtttaaaaacctactttcacggcccaaaatgc

SEQ ID NO: 257433 - DNA, 1034 bp, Homo Sapiens
ctcatttattcttacttctcccctatctttactcagagatgatctttagttccattgcataatgacgagattttaattagatcatagatgggggaaatgttaaagactacaggaatgactagcacctccaaatacaccaatccaggtgaagtaatcaccagggcataaggccctttgggttctcttcctttgcaattgtgtggattcatggcatactttccttccaggaaaaaaacgtgactaccagcgtctgggatggcccagcccggacgaatgcctcaaactccgctgggtagagctgactgccatcgtgagtacctggcttgcagtttcttcaaaaaacattgacatcacagaacacatagattttgccacccctatacagcagccagcaatggagcctctttgcaatggcaatctccccacgagtatgcataccctgggaccacttgcatggggtttccaacccgagccagccttgcacttacacaggggagagtcagttaacagaggtattacaaaatctcgggcaaagaccaatatccacaacagtcgcttgaacagattggcacccgaattgccaaagttttggaaaagaaccagacgtcctgggtcctctccagcatggcagccctctactggagggtgaaaggccaaggaaagaaggcaatcgactgcctccgccaggctctgcactatgcgccacaccagatgaaggatgtgcccctgattagcctggccaacatcttgcacaatgccaagctctggaatgacgccgtcatagtagccaccatggcagtagagatcgcaccacactttgctgtgaaccacttcactctgggcaatgtctacgtggcaatggaagaatttgaaaaagcactggtgtggtatgaatccacattgaagcttcagcccgagtttgtcccagccaagaaccgaatccagaccatccagtgtcacttaatgctgaagaagggacggcgctctccttagtgcacttcttccttctctctttctctttactcatgctctaa

SEQ ID NO: 257434 - DNA, 1022 bp, Homo Sapiens
gaaaggtccccaggatggagtggccagaagctcttgctatggagactgcagaagtgaagatgatgaagcaacagaatggattacattccaggtcaaacgtgtaaagaaacccaaaggagatcataagaaaactcctgggaaaaaagtagaaacaggtcagatagaaaatggacatcgttaccaagcaaacctagagatcactggccccaaggtggcatctcctgggccacaagggctactagactggaagaccaggaaagtgccatagacataatgtaactggatttcagcaaggcatttaacagagcctcttatgatatccttgtgaaccagatggagagatgtgggcttgaagccttcccattgcctacaggataaaattcaaacttcctagtgtggtgtacaagaccctttacagcccgcctctgtgtacccttcaacaccattctctgaaccaaccatgctcatgtttttacctcagtgcctttgcacatgctattccctctgcctggaatgccctgtgccccctctgccctctgccgtgctaaaatatcactcatccttaaacttcaaaatcaagtgccatctcttccttgttaccttcaggcagaattagttactctttcctctgtgcaattgttctatatcttcgctctagctcttttcctgttgtattgtaatgatttgtttatgtttaccttccttactagactgtgagctcaagagcaggccgtcttaattattcctttctgtacccctagtgtcttttatggttctcagccccttataacaggtgctcaataaatatttttcaaatgaaattattaaatgtaaaagaaaattaagattttttgtgaaaattatggcttatttaagttattaatttaaacagagttaatttgaaactcttccaaaactgttcctttctgttttgttaaaatctcaatctaaacccctgcctgtacctcaaacaggttttctactgttcgtaaattcctataatataaaaagcgctatacaga

SEQ ID NO: 257435 - DNA, 917 bp, Homo Sapiens
  misc_feature (30)..(30): n is a, c, g, or t
  misc_feature (65)..(65): n is a, c, g, or t
ttaggaagggttgaaggtcttcccagtccnaaggaccaaggtctggaaagacttggaaaaacggnaaccagattgaccgttttagggaagggaggacaccaggcttgcccccaagggttcaagaattaaaggggtagcataagacaagagtgccttacccttggcagtggagtcacacttctccttttacaaccccaaagaaagtctggtgtccagttcagccctgcttgtgtcacgtatcctttgctgctctgagtccttggggcctgagaactgggacccatgagtcctgctgcccagctgctacgggctgaattctgtccccctaaattcttacgttgagaaacccctggaacctcagaatgagactgtacttggagattgagcatttaaagaggtgattaacttaaatgaggctggttaaagttaaaatccagtccaactggtgttcttagaagaggaacgttgggcacataatgaaactagagatgtgtgtgcatggagggaagaccgcacaaggacacagtgagaagacagctgtctgcaagccaacaaaagaggcctctaggaaaaaccaggcctgctgacaccttgatcttgaacttctcgcctccaaatgtgagaaaataaatctgttgtttaaaccacctggttctgtggcattttgttatgggggccctagcaaactgaaacccaagccttctgcactgttccgggatgttaacttttctgtgaactaactccaaacctctgctgtgtaatgtgtgagaaaccagacccggagaatgcctttccagagtccaggaggttagatgggttgggcttccccagccaattgacaaaaacgtgcctgtggtggatcacaaatgcacttgtgtgcagtcagagattgtttccactcttagttccttcagccc

SEQ ID NO: 257436 - DNA, 188 bp, Homo Sapiens
caaaagcctgttaatgcaatgtactaataacatggagctggccattatttgcaaaaacactatttgtatgaaaattgtattcagaactcaaatttgtccttaaatgattgaattttgtaaaatctcatttatcctttatgggtcatttcttatttattgaaagtggtaattagaaatattttaggcat

SEQ ID NO: 257437 - DNA, 435 bp, Homo Sapiens
  misc_feature (254)..(356): n is a, c, g, or t
tcggcacgaggtgaaaagtcactgtggaaaaaggtgaagaaaaaggtacctattttgcatcacccactatgtcatatcaagtaaatgaattaaaatcccatgtcaagtactgggctttattccccatggtttcacaccaagtttctcttagaagatactctaagatgcactaagctttcccattcacttctgtctaggcaggaagattctactcaagttaagaagcagtgttgccagatgcagtggctcactcnnnnnnnnnnnnnnnnnnnnnnnnnnnnnnnnnnnnnnnnnnnnnnnnnnnnnnnnnnnnnnnnnnnnnnnnnnnnnnnnnnnnnnnnnnnnnnnnnnnnnnntcaaaaattaaccagacatggtaatgcatgcctgcagtcccagctactcagaaggctgaggtgggaggatctcttgagc

SEQ ID NO: 257438 - DNA, 417 bp, Homo Sapiens
taaatatattcacggattaccagaaagatcttgaaaaaccctattttgctccatgaccagcacttcctggccgcagatggactctaagtaactttttgcttaatgcttggtgtttcaggtcggtgatccttcctctctgacacgttacgcttgactttggcagtgattggagaagtatccgggttcagcgaaggactcgagtgcgacttcttcagtcctgcagcctcgctttcatcgttactcagtagctctttgcctccttccttgagaatgctgacatacatttcatagcgggttttctcaaactccaggatagtgggtctttcagtttggtactcatcgacgtccttgggctttgaccttcttgtcggggggatatgagcggtgctcggccagctcggtggtgatctgcttcag

SEQ ID NO: 257439 - DNA, 410 bp, Homo Sapiens
aagaagcacctaaggaggggaggagtacttattcaaaatgtatttttctagctcgcacttccagagaatctgattctgttggcagtgggtagggagtggggaccaggaatcttttgaacatccacattacgggatgcagaaagtttaacaaagaccataatttgagaaacactttaaaagtcttaggaaaaaaatagaaagagaaaatagtcaacacaaaacctaacaaggacaggagaaacccagaatccagtcaataagagcccaataacaattatattacaaaatcacacaatcaatgatgtactacaatgagcaattatgacttcttattgagttactgtgtattctccacccatttccattaaaatggctaggaaggaaaaggtaatataaatgcttgatagaat

SEQ ID NO: 257440 - DNA, 361 bp, Homo Sapiens
  misc_feature (80)..(80): n is a, c, g, or t
taggttgaaagagttaaaacagagcaaacacatttgtgtggtgtgtgctccaggctctattcacacccatctcgagaaanatctaatataaagaataaaaatagaacagaagaagttggaaaatttccttaaaacgatgcttttgtgaactactacaaattttgaaatctgagcagagacaacaacccacaaggaaagcccctgagagaggacagacggcacggatgctcagaagcgccagacagacacaggttgtcactgcaacgatgaagctccaagagagaattagtcttcaaagtctcaaatcataaatcctagaagattccatccagattacaattcatcaataagcatatttaat

SEQ ID NO: 257441 - DNA, 139 bp, Homo Sapiens
ctcgtcaaggtgaagggacacaagttgccagccaccaactttcttgcctcaactaccttcctgaattatttttttaagaagcatttattcttgtgttctggatttagagcaattcatctaataaacaggttctcacttt

SEQ ID NO: 257442 - DNA, 919 bp, Homo Sapiens
  misc_feature (706)..(706): n is a, c, g, or t
ggggtagctgatcggcccggaagtgctcacacgtgtgctccctgccctgctcctggccccttggccggccgggctgtttctggccatgggtcgctcccgccggacaggcgcgcaccgagcgcactctctagcccggcagatgaaggcgaagcggcggcggccggacttggatgagattcaccgcgagctgcggcctcagggatccgcacgaccccagcccgacccaaacgccgagttcgaccccgacctgccagggggcggcctgcaccgctgtctggcctgcgcgaggtacttcatcgattccaccaacctgaagacccacttccgatccaaagaccacaagaaaaggctgaagcagctgagcgtcgagccctacagtcaggaagaggcggagagggcagcgggtatgggatcctatgtgccccccaggcggctggcagtgcccacggaagtgtccactgaggtccctgagatggatacctctacctgacatggcctgaagatgcagggcagaggaattgcccatggacagtgacgcaaggactaggctgggagggagcgtgccaaccccttttgcctctgggtttggggagcggagggcctcttcttggtgccctgcccccaataaaggaaactgggcccccggatttcccccacccactcccaaccaccacccgccaccaacacacaactttcttcaaaccanacacagagaagattataaaaatcctttttacgggcccgccctcgcgcctccccaaaaaagcttttcttaaaaccaattctgttttggggcgccggggggcccccgtgaaggggtagagggaacacacgtgggccacaaaaccttgttttcccccagagaaagaaccgcggggccaaagagaaacaagggcgcttggggattttctcccaccac

SEQ ID NO: 257443 - DNA, 2339 bp, Homo Sapiens
tggaacgcttcggacttatcaggttaccggattcgagtcagaagcggcggcaggtctgaacgcttcgagcccaacacatacagctgatacacgcagaccagatctggtcaggtcctcggaagctgagtccagagcgatgctgctgaagacagtgctcttgctgggacatgtggcccaggtgctgatgctggacaatgggctcctgcagacaccacccatgggctggctggcctgggaacgcttccgctgcaacattaactgtgatgaggacccaaagaactgcataagtgaacagctcttcatggagatggctgaccggatggcacaggatggatggcgggacatgggctacacatacctcaacattgatgactgctggatcggtggtcgcgatgccagtggccgcctgatgccagatcccaagcgcttccctcatggcattcctttcctggctgactacgttcactccctgggcctgaagttgggtatctacgcggacatgggcaacttcacctgcatgggttacccaggcaccacactggacaaggtggtccaggatgctcagaccttcgccgagtggaaggtagacatgctcaagctggatggctgcttctccacccccgaggagcgggcccaggggtacccaaagatggctgctgccctgaatgccacaggccgccccatcgccttctcctgcagctggccagcctatgaaggcggcctccccccaagggtgaactacagtctgctggcggacatctgcaacctctggcgtaactatgatgacatccaggactcctggtggagcgtgctctccatcctgaattggttcgtggagcaccaggacatactgcagccagtggccggccctgggcactggaatgaccctgacatgctgctcattgggaactttggtctcagcttagagcaatcccgggcccagatggccctgtggacggtgctggcagcccccctcttgatgtccacagacctgcgtaccatctccgcccagaacatggacattctgcagaatccactcatgatcaaaatcaaccaggatcccttaggcatccagggacgcaggattcacaaggaaaaatctctcatcgaagtgtacatgcggcctctgtccaacaaggctagcgccttagtcttcttcagctgcaggaccgatatgccttatcgctaccactcctcccttggccagctgaacttcaccgggtctgtgatatatgaggcccaggacgtctactcaggtgacatcatcagtggcctccgagatgaaaccaacttcacagtgatcatcaacccttcaggggtagtgatgtggtacctgtatcccatcaagaacctggagatgtcccagcagtgaggagctgggacatgtgacaggctgtggtggcaccactgagcctagaccatggagccttggcatgcccagggcaagtggggaggttctctgctccccaggcctgctcggtgactgaccccatcatacccaaagtgcaatctcacggccaggttctatgccctgtccaagcgtaaaccctcttggaaacttcttttggggcaattttcctgtggccttcctggcctctacttccatgtgcgcagccccacagacgttgctgagcaactcgccagcctcctgagctccatgcccatcaggactctagcctctgaccttgctgttgactctgaaatcaggatttggaagttttcgaattaggagtagagagatctgacctcttgccaggaatgcccatggatcatgtgattggcttttctacccatagagggccttgcagcctgataccacctgggagtgagggtcacaaaggagaccttggctccctcaggtcaccaataaacctgttctttaatcaagtagttgtaatatggacctggggtacctttagttagggactctggtggcactacacggggtgctggattcaaatctcacctctatggatgatgtctggcatcgtctggcccctcctttaccaaagtgaccagaagatttgtacttcctagagatgccagactttgcctcacacccaggagactgcccctgctgtgcctggtaatgcttggcagtggtgatggtgacaacaacaatgaggccaagtaggcaatgctcccagggtccttgcagctttgtaggatcctggccaaagcaggtaggccccttgggcccaagcaccattcaagacctgctactttattcgtctaggtagggtccacaccgcaaaaacacctaacttctttatacctttaattttcgtccttccaaaacctatggcttgcgaaagcgacgggtcaataatttcccccag

SEQ ID NO: 257444 - DNA, 380 bp, Homo Sapiens
ctcacgttgatcctcaagtgattaacctaggcctcccatagtgctacaatatatttggcaattatatctgcgtgcacggtttcttcattaatgtcgtcttattcctgtgtaaataacttccactcccatttcattttagattttcttacccatctttgcaatatcttcatttcttaaattttcttctctggcagagaccataagcagtatgatatttagtcatgctaggataagacctgagtagaaattgtactagctatccagctcgtttgttaatttacttttgatgagacagagaacggtcatttaaccagcttttgttcggtgtctgttcggtactaggatctcctgagaaacccttgcatcctttatgtacttgg

SEQ ID NO: 257445 - DNA, 489 bp, Homo Sapiens
  misc_feature (115)..(115): n is a, c, g, or t
  misc_feature (133)..(133): n is a, c, g, or t
  misc_feature (161)..(161): n is a, c, g, or t
  misc_feature (172)..(173): n is a, c, g, or t
  misc_feature (185)..(201): n is a, c, g, or t
ggaggaaaataggaaggtagggtggaggaatggaatgaaaaggtaaaaggagaagatgttgggatattgggaggagagtgaggaaggaaaattaaagaaggaagtggagggggtngagaaaggaagtaagaanatgggagtgggaggagggggaaggaaanggagggggggnngggaaaggagcnnnnnnnnnnnnnnnnntttacagtttttgaattttacaatgaacaaataatatttctataaatttaaaacagaatttaaaaaatattttgaaaataactttctaaattaatgaagcatctgccaggcctaggctagaactgccagaatgaaacgaagctctagattagaatactctacattttgtcattttgagaagggagcttcctttctgcctgagaaccttagggtaaacactgctacacaaattatcgcatccacgtacacagagagagtactcaatggtgtcactaagatgaatagccc

SEQ ID NO: 257446 - DNA, 1219 bp, Homo Sapiens
  misc_feature (598)..(628): n is a, c, g, or t
ggcaatctgtattatcagaatcgctttaaaccaaagcttttatattccctgtacacatagccaaaataattagcactgttacttctgtccacttgtaagctaatagtataaaaattataaagcagatactagtagaatttgtattctggtatatccttcaaggaaaaggacaggtgatcagtgcatttagacatccagaagttacttccactattgaggaactatgtagacatgaatttaagcttgtacatgtgccaatcttgttaatgtcacttgaccactgattcacatagacagacattaacgtctgatgcctcaggttgatggcgaactttcttcctagtgtcttaacatttatgaacttatgtttgacttgaggggcatttcagcaaagctgtgaggaaaagtaggttctggactgatgtctgctttgtgccatagacattttggaacataaggaagtatctgcttctactatatgtacaggacttgtccccaaataatttctgaatcccttaatgcagttgagaatcccttaatgcagttgagaacagtaaagttcatgaccataccgaaaagcacttttaagttcacttcnnnnnnnnnnnnnnnnnnnnnnnnnnnnnnnaaaagcatatgtaactagtgatgattttagcattagctttacttggaggggagaaagaacaaaattacaccttaaactctattagatagactacaaaatgggatttgatgtattcttacttttccaaagaattttttccacctggaataagaagagaggactagttgaaacatttgagctggagaggcttatgggcaatatgaagtgggccaaattcttgcaatacaccctattcaattgaaagtacagtgtctaaggataagaatacttctttaaagaccaacaattgttttaatgcaatcttaattagtaaatgggttacattttttctattggtattgggtttaaaaattgctaccctgaattctgaaatattataagagttaataccaaaaatacttttaatgtctgacatctcttacatttcacatgggtctttttattcattgtaaataaaagtaaacttggataaatttgagaataaactttgaattgttgcaaactatgattatcaatttgtaaatttaccctttgacataataatgtacatttttaaatgtagccattaaattctctatatttaacccaggg

SEQ ID NO: 257447 - DNA, 1187 bp, Homo Sapiens
  misc_feature (139)..(167): n is a, c, g, or t
  misc_feature (1067)..(1083): n is a, c, g, or t
aaaatatcaagaggtggacaaggtttaagtcaaacccaggaagtctttcccttcactcttctataaagaagggaactggcatgaagttggatggcttaatgatcaagcagctaaaggtaagagagacagagtgagagannnnnnnnnnnnnnnnnnnnnnnnnnnnnacatgtcttctgtcacaaagtaccacaatagtctgcagtggtggcaccaccctaaagtagttaagttttaaagacaggccagcctctggttagaagagccatccttggaaccccctacaagacttaaggagaggtaggagatctgaggcagagctgagaggaatttcctgtttttcccaacccctacaccaaagcagggaaccaggaagggcagaaatgaggatccttccattctcaagcctcctaaaacctaaagggtaagtcccaatctctagtgaccatacacagaggtaaactgaccccagggtgtcacttccacaccattactcttgttcactcttaagtccctttattgcattcagagaatatataggtatttaaactttgacaataattttaccttgatacatccaagtttgacttgctttttaatatatttatagatataaaattaggcctctaacagtgatagggacagggagattgctgccaccaaacaatgtttcttaaaaaaataacagaagaggtaatatccttcctattcttccttcacttctgcccctcctcccacctcttcccagcctccctcacctgacctatttagggggtgatgggatgaagagaagagagtgaaggatatgtaatcaagtgcaaaatactgtggtaagtacagagaatgaataaggtggaaaggaaagtgaagagtgtgggatggttaggggctttaaggacttcccaggaaaataggattctgggatggggttgctgggggtgggaggggagccaactgtcataaacttttaaaaaacaaaggaagaaaaggtcaaaaacctaaaccaaagagagagtggcactcctaccctccactctggccccttggtactgaatagccagttgttnnnnnnnnnnnnnnnnnagcccaagaaacaagggagattaaagaaaaagaaaccccattccctatcccaaaccagttaacaaaataggcttccctccctcgtgccgaattcgccacccagc

SEQ ID NO: 257448 - DNA, 1458 bp, Homo Sapiens
actgaggtcaggctggggcttttctgggctgctgggtgagctggagaatgcggttgtgtgacccgcaggaagggcagagctgagcgtatgacctgtgtcgttcccctccagaaatacccgcagcccaaagggcagaagaagaagaagatcgtcaagtacggcatgggtggcctcatcatcctcttcctcatcgccatcatctggttcccgctgctcttcatgtcgctggtgcgctccgtggttggggttgtcaaccagcccatcgatgtcaccgtcaccctcaagctgggcggctatgagccgctgttcaccatgagcgcccagcagccgtccatcatccccttcacggcccaggcctatgaggagctgtcccggcagtttgacccccagccgctggccatgcagttcatcagccagtacagccctgaggacatcgtcacggcgcagattgagggcagctccggggcgctgtggcgcatcagtccccccagccgtgcccagatgaagcgggagctctacaacggcacggccgacatcaccctgcgcttcacctggaacttccagagggacctggcgaagggaggcactgtggagtatgccaacgagaagcacatgctggccctggcccccaacagcactgcacggcggcagctggccagcctgctcgagggcacctcggaccagtctgtggtcatccccaatctcttccccaagtacatccgtgcccccaacgggcccgaagccaaccctgtgaagcagctgcagcccaatgaggaggccgactacctcggcgtgcgtatccagctgcggagggagcagggtgcgggggccaccggcttcctcgaatggtgggtcatcgagctgcaggagtgccggaccgactgcaacctgctgcccatggtcattttcagtgacaaggtcagcccaccgagcctcggcttcctggctggctacggcatcatggggctgtacgtgtccatcgtgctggtcatcggcaagttcgtgcgcggattcttcagcgagatctcgcactccattatgttcgaggagctgccgtgcgtggaccgcatcctcaagctctgccaggacatcttcctggtgcgggagactcgggagctggagctggaggaggagttgtacgccaagctcatcttcctctaccgctcaccggagaccatgatcaagtggactcgtgagaaggagtaggagctgctgctggcgcccgagagggaaggagccggcctgctgggcagcgtggccacaaggggcggcactcctcaggccgggggagccactgccccgtccaaggccgccagctgtgatgcatcctcccggcctgcctgagccctgatgctgctgtcagagaaggacactgcgtccccacgcgctgcgtggcgctgccgtcccccacgtgtactgtagagttacattcaattaaaaaatgcttaattcatacac

SEQ ID NO: 257449 - DNA, 648 bp, Homo Sapiens
attgctcaatcttgtcaattgggagtccaccagtaggttcactgagatgatatggataatagaaaaaaattcctttcctttgaatgatagctgtgattcaccccaccccattttcttgtttctggtccatccgatgagacggatgctctgatgctctgaggcttctgggaggctgggccctggaggcaacgtgctgcaggcgcactctgtcagagtgaacagcaccgcgagtacaggccaggctcgtggctcggaagacaaaccccacacacactcaaggggtcgaaaacaaaccccacacgagggctctcacctccttctcctaggtagtatttattttcagcacctgtttgatgcagtttttaatcctctacctattgcactgttgtgactcgttgggccattatttgatttttgtacggaaaaaaagctttgttatagaaatcagcatactatttttttaaatctggagagaagatattctggtgactgaaagtatggtcgggtgtcagatataaatgtgcaaatgccttcttgctgtcctgtcggtctcagtacgttcactttatagctgctggcaatatcgaaggttccttttttgtttgggtaaactctaatttctatcaaggtgtcatggatttttaaaat

SEQ ID NO: 257450 - DNA, 486 bp, Homo Sapiens
catcaaaacaggtgactgaaaaaataaatactaccctaggagaaggaggtgaagagccctcgtgtggggtttgttttcgaccccttgagtgtgtgtggggtttgtcttccgagccacgagcctggcctgtctcgcggtgctgttcactctgacagagtgcgcctgcagcacgttgcctccagggcccagcctcccagaagcctcagagcatcagagcatccgtctcatcggatggaccagaaacaagaaaatggggtggggtgaatcacagctatcattcaaaggaaaggaatttttttctattgctcaatcttgtcaattgggagtccaccagtaggttcactgagatgatatggataatttcaaacttttgtttaagagcatatatatggcttattcaggcaaggagacgtgtacattctagcccaagcaagcaataggagtcattctgtttttaaggaaggtcagtcgtttaaaagatttctg

SEQ ID NO: 257451 - DNA, 919 bp, Homo Sapiens
  misc_feature (17)..(17): n is a, c, g, or t
cccgtttggatgccagntttttaaacccctcctaccctattgccactgttgtgaccccgttggcccattatttgaattttgtaccgaaaaaaagcctttgttatagaaatcagccatacctatttttttaaatctggagagaagatattctggtgactgaaagtatggtcgggtgtcagatataaatgtgcaaatgccttcttgctgtcctgtcggtctcagtacgttcactttatagctgctggcaatatcgaaggttccttttttgtttgtgtaaactctaatttctatcaaggtgtcatggatttttaaaattagtatttcattacaaatgtctcagcattggttaactaatttttgccaggaccattattgatcaagcaaataaattcaacagccatttgggaaaaagaaaagcttctagtttttttgtacacattctttctgtgaggagattgagtactctgcagctggcgaggagttggttgaggcacttcttcaaggccaagggggaacacagtgttttgtttccagctcactttgtacccctcacctctgcagacacggggagaaccccggacccctggcatgcatgctggcggcggcatgcctcccttccacaagcccatgctgctgcagagggagcctgtgtttgcaaaacccagtggactgggctgggtctgctgtctgagcagctcctggctccggtgggaactgcacacaagtccactggcctggcttggccccaggcattgcaattgacagacatttgcatttcatacggtaaatgaggactcagcacagccaaccataatcagcatgtctgggatagactggtctagaataaaaatgaagtttccattgctttgtttgctttaaaaattccacaattaaaatatctgtcattgaaagcttagac

SEQ ID NO: 257452 - DNA, 670 bp, Homo Sapiens
  misc_feature (580)..(580): n is a, c, g, or t
  misc_feature (607)..(607): n is a, c, g, or t
  misc_feature (636)..(636): n is a, c, g, or t
  misc_feature (644)..(644): n is a, c, g, or t
gataatgagtgaaaagcacagacattcctggagtaagacatctatgtgttctctcctagatgatcctaccagacaatatgaaggaccattacatcactatcgaccacagcaggaatcaccatctccccaacaacagctgcccccttcttcacaggcagagggaatggggcaagtgccagggacccatcggctgatcacacttgctgatcacatctgtcaaattatcacacaagattttgctagaaatcaagtttcctcgcagactccccagcagcctcctacttctacattccagaactcaccttctgctttggtatctacacctgtgaggactaaaacatcaaaccgttacagcccagaatcccaggctcagtctgtccatcatcaaagaccaggttcaagggtctctccagaaaatcttgtgggacaaatccaggggaaggtatgatctttattccaaattatatataaattgcccaacaagtaaaacaaatggaatatatctacaggataaggaatttgtttctcacaactaaagttcattttggcctttattccccagggaaaggtgtaaaatgangctttctttccccctggcatattaatncttaggaatggtccactggtccttggggnatttgggnactaatgaccttttaaatggaatatt

SEQ ID NO: 257453 - DNA, 454 bp, Homo Sapiens
gaaccccctctactcataaaaaccccaatcaaacatatagatgaatagaaccttgataacattagaatgccttgttctctgaaggcttagaagacaatacgtcaggaaatatgaaggagaagctgaggaacgaaagaaacttcgacaagagaatggaaatgtacatgctatagcataactgaagataaaattacaggtttgagttttaaaatatatctttagatcatatcctataattttgaaaaatttaacactatataatctcaagaaaaatatggatgtgttcttaattatatatacactatgaacaatggctatgttaaagtattattctttgagtataagatggaattcaatgttgagaatagactacgtgtttaataagtattattagggatataaatataagagacactggtccagttctcaaagaagttattgtttagtagatagg

SEQ ID NO: 257454 - DNA, 559 bp, Homo Sapiens
  misc_feature (240)..(295): n is a, c, g, or t
gctggactgtaataacagcaacagctgtgaggatcacagcagacataaaggcagctatggctgctaatgcaatttttgataaactactgtcaatcatgctgtgagttttcatggacttttccccacaccgttcaccaaaatattcttgctgacatttgcatgttactgcttccaggtgctctatatatttgcattctccgtgaatgcagaaattttgaaattctgcattacatggatttnnnnnnnnnnnnnnnnnnnnnnnnnnnnnnnnnnnnnnnnnnnnnnnnnnnnnnnngggtttatctgaagtattttcactttccgtcttgttttgggggggcttaactacctgttcaactctgactgaatcatcgacaatatagccaggtatttgtggttcgttatcatactcttctgagtagtcatagtcggctcccgaggacggttcactactagaaggcatttcactcacaggggaaatctcactccctgaagacatctcacttcttgaggtaacctcaaatccatcagcactgtggtccccagaaaatggtggagc

SEQ ID NO: 257455 - DNA, 1219 bp, Homo Sapiens
  misc_feature (571)..(628): n is a, c, g, or t
acctgggtgccagcgccccagaggtcccgggacagcccgaggcgccgcgcccgccgccccgagctccccaagccttcgagagcggcgcacactcccggtctccactcgctcttccaacacccgctcgttttggcggcagctcgtgtcccagagaccgagttgccccagagaccgagacgccgccgctgcgaaggaccaatgagagccccgctgctaccgccggcgccggtggtgctgtcgctcttgatactcggctcaggccattatgctgctggattggacctcaatgacacctactctgggaagcgtgaaccattttctggggaccacagtgctgatggatttgaggttacctcaagaagtgagatgtcttcagggagtgagatttcccctgtgagtgaaatgccttctagtagtgaaccgtcctcgggagccgactatgactactcagaagagtatgataacgaaccacaaatacctggctatattgtcgatgattcagtcagagttgaacaggtagttaagcccccccaaaacaagacggaaagtgaaaatacttcagataaacccnnnnnnnnnnnnnnnnnnnnnnnnnnnnnnnnnnnnnnnnnnnnnnnnnnnnnnnnnnatccatgtaatgcagaatttcaaaatttctgcattcacggagaatgcaaatatatagagcacctggaagcagtaacatgcaaatgtcagcaagaatatttcggtgaacggtgtggggaaaagtccatgaaaactcacagcatgattgacagtagtttatcaaaaattgcattagcagccatagctgcctttatgtctgctgtgatcctcacagctgttgctgttattacagtccagcttagaagacaatacgtcaggaaatatgaaggagaagctgaggaacgaaagaaacttcgacaagagaatggaaatgtacatgctatagcataactgaagataaaattacaggatatcacattggagtcactgccaagtcatagccataaatgatgagtcggtcctctttccagtggatcataagacaatggaccctttttgttatgatggttttaaactttcaattgtcactttttatgctatttctgtatataaaggtgcacgaaggtaaaaagtattttttcaagttgtaaataatttatttaatatttaatggaagtgtatttattttacagctcattaaacttttttaacc

SEQ ID NO: 257456 - DNA, 981 bp, Homo Sapiens
  misc_feature (339)..(403): n is a, c, g, or t
aataggcatggtacctttttccatttcttcttgtcggaagtttcttttggttcctcaagctttttcccttcaaaatttcccggacgtattgtctttctaagctgggactgtaataccagcaacagctgtgaggatcacagcagacataagggcagctatggctgctaatgcaatttttgataaactactgtcaattcatgctgtgagttttcatggacttttccccacaccgttcaccgaaatattcttgctgacatttgcatgttactgcttccaggtgctctatatatttgcattctccgtgaatgcagaaattttgaaattctgcattacatggannnnnnnnnnnnnnnnnnnnnnnnnnnnnnnnnnnnnnnnnnnnnnnnnnnnnnnnnnnnnnnnnatctgaagtattttcactttccgtcttgttttgggggggcttaactacctgttcaactctgactgaatcatcgacaatatagccaggtatttgtggttcgttatcatactcttctgagtagtcatagtcggctcccgaggacggttcactactagaaggcatttcactcacaggggaaatctcactccctgaagacatctcacttcttgaggtaacctcaaatccatcagcactgtggtccccagaaaatggttcacgcttcccagagtaggtgtcattgaggtccaatccagcagcataatggcctgagccgagtatcaagagcgacagcaccaccggcgccggcggtagcagcggggctctcattggtccttcgcagcggcggcgtctcggtctctggggcaactcggtctctgggacacgagctgccgccaaaacgagcgggtgttggaagagcgagtggagaccgggagtgtgcgccgctctcgaaggcttggggagctcggggcggcgggcgcggcgcctcgggctgtcccgggacctctggggcgctggcacccaggtgtgcgaacgtctcc

SEQ ID NO: 257457 - DNA, 378 bp, Homo Sapiens
cggcacgagagaatttcccagccatcttccgaagaatacaagatcccgtcctccaggcagtgacctcccaaaccagcctgcctggtcactgactgcttactctaccttagctggacctcgtctcccagggattagagaaaagagcaggagtcctgggtcttcccagttgagactgctggagctgagacacagtactctcttaaagaaggtggggagctgcccagggcagaacccactggtgttcatgactacccctggctcctctcaccttgtccctccactgccaacagtggaaggctgtggggtcttgctcttccttagcactcctttctccttgtgagatctctcctcagctggaatgaggaatgtagtccatct

SEQ ID NO: 257458 - DNA, 1836 bp, Homo Sapiens
  misc_feature (327)..(370): n is a, c, g, or t
tgggtggcgaattcggcacgagggctgcccctcccgccccggccccgagcgcacactcgacgaaacccacacgggaccacaagagtcagaccgggcggactggtccgagaccaggagtaaggggacaggagcgaggactgatgccactgtagaaggcgaggtctctagacccctctcacctgtggggtgcacaggtgcctgcaaccaggatggtaacccagaccaggcagaagcaagctaagagaaaacgttgggtccctgggcctggcctcgccctcccagttggaggctaacggtgcggaggttccctccagcactcgctccttnnnnnnnnnnnnnnnnnnnnnnnnnnnnnnnnnnnnnnnnnnnntgaatttgctcttgggtctttaaggggcgggaactgccaccaacgcgcatggctgcgtcattaacttgcgcctctggcctgcgcctccacgtggatttggtagagaaaccccggactgggatcatggcagccgagactcggaacgtggccggagcagaggccccaccgccccagaagcgctactaccggcaacgtgctcactccaaccccatggcggaccacacgctgcgctaccctgtgaagccagaggagatggactggtctgagctatacccagagttcttcgctccactcactcaaaatcagagccacgatgacccaaaggataagaaagaaaagagagctcaggcccaagtggagtttgcagacataggctgtggctatggtggcctgttagtggaactgtcaccgctgttcccagacacacttattctgggtctggagatccgggtgaaggtctcagactatgtacaagaccggattcgggccctacgcgcagctcctgcaggtggcttccagaacatcgcctgtctccgtagcaatgccatgaagcaccttcctaacttcttctacaagggccagctgacaaagatgttcttcctcttccccgacccacatttcaagcggacaaagcacaagtggcgaatcatcagtcccaccctgctagcagaatatgcctacgtgctaagagttggggggctggtgtataccataaccgatgtgctggagctacacgactggatgtgcactcatttcgaagagcacccactgtttgagcgtgtgcctctgggaggaccggagtgaagaccccgttgtgggacatctaggcacctcaactgaggaggggaagaaagttctacgtaatgggagggaagaatttcccagccatcttccgaagaatacaagatcccgtccctccaggcagtgacctcccaaaccagcctgcctggtcactgactgcttactctaccttagctggacctcgtctcccagggactagagaaaagagcaggagtcctgggtcttcccagttgagactgctggagctgagacacagtactctcttaaagaaggtggggagctgcccagggcagaacccactggtgttcatgactacccctggctcctctcaccttgtccctccactgccaacagaaaacaaagcagctgactgagatggtcaaaggactttggaccataggggatctttggaaggctgtggggtcttgctcttccttagcactcctttctccttgtgagatctctcctcagctggaatgaggaatgtagtccatctaaactgcttgctaggctcaattaccacttctgtttgctttgtggatcctgggataacatgtatatgtgtacacatgcctattctgccatttctcaggaaagggtggagtatgtatcatatgccttctaccatcctcctgtcctctccctgcgtaagacttgacctgggg

SEQ ID NO: 257459 - DNA, 547 bp, Homo Sapiens
ttgtatgaaccagtttatggtggctaatgagtttctcaaatatccgttacacgttggtaacctattaatggcacagctggagatgcattacgttccaaccaaacattacaaccacgatctgaagttttccaccactccagataaagacaatgatcgatatccttctgggaactgtgggctgtactacagttcaggctggtggtttgatgcatgtctttctgcaaacttaaatggcaaatattatcaccaaaaatacagaggtgtccgtaatgggattttctggggtacctggcctggtgtaagtgaggcacaccctggtggctacaagtcctccttcaaagaggctaagatgatgatcagacccaagcactttaagccataaatcactctgttcattcctccaggtattcgttatctaatagggcaattaattccttcagcactttagaatatgccttgtttcatatttttcatagctaaaaaatgatgtctgacggctaggttcttatgctacacagcatttgaaataaagctgaaaaacaatgca

SEQ ID NO: 257460 - DNA, 603 bp, Homo Sapiens
  misc_feature (429)..(429): n is a, c, g, or t
  misc_feature (486)..(486): n is a, c, g, or t
  misc_feature (497)..(497): n is a, c, g, or t
  misc_feature (533)..(533): n is a, c, g, or t
  misc_feature (545)..(545): n is a, c, g, or t
  misc_feature (564)..(564): n is a, c, g, or t
  misc_feature (582)..(582): n is a, c, g, or t
gctggcggatctcaagacacgcaggcgccctatgctccctctggaagctcagaagaagaaagactgttttcaagtcagcctatacaaatatatctttgatgccatggtacaaggaaaagtgacccctgctagcctaatccaccacacaaagttgtgtctagtgaagtctttgggtgacctcatggaacttgtcttcttgtctctaacactgtcagacctcccagttattgatatcttgaagattgagtatatccaccaagagactgccactgtgctgggtactgagattgtagccttcaaagagaaggaggtgagagccaaggtgcagcattatatggcctactggatgggccaccgagagccccagggagttgacgtggaggaggcttggaagtgccggacgtgtacctatgcagacatttgtgagtngagaaagggcaagtggagtgctcagctctacactggcgcccccaagtcaaaaaaagnccaaaatgaantagaaaggtatgcttttcaaagaaattgtttggatncctttcccttgnctccctggtttggtacccntaaaggccaaaaaagganggacccaaggttcttcttgga

SEQ ID NO: 257461 - DNA, 1823 bp, Homo Sapiens
  misc_feature (1758)..(1758): n is a, c, g, or t
catgcggagactggtgcacgacctcctgccccccgaggtctgcagtctcctgaacccagcagccatctacgccaacaacgagatcagcctgcgtgacgttgaggtctacggctttgactacgactacaccctggcccagtatgcagacgcactgcaccccgagatcttcagtaccgcccgtgacatcctgatcgagcactacaagtacccagaagggattcggaagtatgactacaaccccagctttgccatccgtggcctccactatgacattcagaagagccttctgatgaagattgacgccttccactacgtgcagctggggacagcctacaggggcctccagcctgtgccagacgaggaggtgattgagctgtatgggggtacccagcacatcccactataccagatgagtggcttctatggcaagggtccctccattaagcagttcatggacatcttctcgctaccggagatggctctgctgtcctgtgtggtggactactttctgggccacagcctggagtttgaccaagcacatctctacaaggacgtgacggacgccatccgagacgtgcatgtgaagggcctcatgtaccagtggatcgagcaggacatggagaagtacatcctgagaggggatgagacgtttgctgtcctgagccgcctggtggcccatgggaaacagctgttcctcatcaccaacagtcctttcagcttcgtagacaaggggatgcggcacatggtgggtcccgattggcgccagctcttcgatgtggtcattgtccaggcagacaagcccagcttcttcactgaccggcgcaagcctttcagaaaactcgatgagaagggctcacttcagtgggaccggatcacccgcttggaaaagggcaagatctatcggcagggaaacctgtttgacttcttacgcttgacggaatggcgtggcccccgcgtgctctacttcggggaccacctctatagtgatctggcggatctcatgctgcggcacggctggcgcacaggcgccatcatccccgagctggagcgtgagatccgcatcatcaacacggagcagtacatgcactcgctgacgtggcagcaggcgctcacggggctgctggagcgcatgcagacctatcaggacgcggagtcgaggcaggtgctggctgcctggatgaaagagcggcaggagctgaggtgcatcaccaaggccctgttcaatgcgcagttcggcagcatcttccgcaccttccacaaccccacctacttctcaaggcgcctcgtgcgcttctctgacctctacatggcctccctcagctgcctgctcaactaccgcgtggacttcaccttctacccacgccgtacgccgctgcagcacgaggcacccctctggatggaccagctctgcaccggctgcatgaagacccccttccttggtgacatggcccacatccgctgagggcacctttattgtctgggacaggccctcagcccctcctgccccatccacccagacaagcaataaaagtggtctcctccctgtgcatgcttctgctttcagccccagcctcgtcacttgactgtgaggatcctctgggtgtcagggaagtcctcctccagcagtgagtcatcgaagggttcacaaaaggtgtcgctgccaaagacagggttggggacagagaccagggtggggttggtcccttcttgccacggtgagaagtcgtcatcagcatcatcttccgcctggaacgtgangaagccaaagcccatgggttgcctcgggacggaggtagagagctccgccaccaagcaagcagtgc

SEQ ID NO: 257462 - DNA, 1386 bp, Homo Sapiens
  misc_feature (12)..(12): n is a, c, g, or t
  misc_feature (39)..(39): n is a, c, g, or t
  misc_feature (43)..(43): n is a, c, g, or t
  misc_feature (824)..(824): n is a, c, g, or t
  misc_feature (1065)..(1078): n is a, c, g, or t
  misc_feature (1203)..(1211): n is a, c, g, or t
  misc_feature (1338)..(1338): n is a, c, g, or t
cgctcgcgcctnttgttgtaataaactccaccccccaangtangaagcctgggtggcgaattcggcacgaggcggacgccatccgagacgtgcatgtgaagggcctcatgtaccagtggatcgagcaggacatggagaagtacatcctgagaggggatgagacgtttgctgtcctgagccgcctggtggcccatgggaaacagctgttcctcatcaccaacagtcctttcagcttcgtagacaaggggatgcggcacatggtgggtcccgattggcgccagctcttcgatgtggtcattgtccaggcagacaagcccagcttcttcactgaccggcgcaagcctttcagaaaactcgatgagaagggctcacttcagtgggaccggatcacccgcttggaaaagggcaagatctatcggcagggaaacctgtttgacttcttacgcttgacggaatggcgtggcccccgccgtgctctacttcggggaccacctctatagtgatctggcggatctcatgctgcggcacggctggcgcacagggcccatcatccccgagctggagcgtgagaaccgcctcatcaacccggaagcagtacatgcactccgctgaccgtgggcagcaggcgctccacgggggcttgctggaagcgccttgccagaaccctatccaggaacgcgcgaggtcccagggcccagggtggctggggcttgccctcggaaatgaaaagaagacgtggcacagggagccttcgcaggggggcccttcaaccccccggggggcctccttgtgtgttcacacgtgggggcgccagatgttccggntgacagaaggagattttccttgttccccggcgcacaccgctgtttcccgacgaaaaaaaccactcccaaagcctttaaagctttttgctccccccacaggggggcgcggccccccctccacaggttggggcgcctcttctcccccctgtggagaccccctcccacaacagtggagggtgcgcttctcatccccttaaaaatcattgtgggccactagggcttcccaaacactcacaccccnnnnnnnnnnnnnnagactcttccccacacccccttatctgctgaacacctacgccaacccacgttataatacctccccgcgcctttcgtcgccgcaccacataacgcggcggctcccctcccccgtattcggcgggannnnnnnnnacacgacgtgtctcttgacttggccctcccctcccctcgttgtgcgcatcgtcacaaaaaacacaccctcccctctcgtatctctatcggggctgggaaccctagagggccacacaacattattccntgctctagtggatggggagacgccactcccatcaaatcacgtttcacg

SEQ ID NO: 257463 - DNA, 420 bp, Homo Sapiens
  misc_feature (119)..(119): n is a, c, g, or t
  misc_feature (400)..(400): n is a, c, g, or t
ggatgagacgtttgctgtcctgagccgcctggtggccatgggaaacagctgttcctcatcaccaacagtcctttcagcttcgtagacaaggggatgcggcacatggtgggtcccgattngcgccatcttcgatgtggtcattgtccaggcagacaagcccagcttcttcactgaccggcgcaacttttcagaaaactcgatgagaagggctcacttcagtgggaccggatcacccgcttggaaaagggcaagatctatcggcagggaaacctgtttgacttcttacgcttgacggaatggcgtggcccccgcgtgcttctacttcggggaccacctctatagtgatctggccggatctcattgctggcggcacggcttggcgcacaggcatttccatccncccgagcttggagcttgaga

SEQ ID NO: 257464 - DNA, 509 bp, Homo Sapiens
tcccttagtccctaggtattgtgctccctaccttctacaggagcggacagcggacagtcagcacctgacgtgggggcacctgctgctgcaggcttgctggcctgcctggtcaatctgtacttgtgcagggtgcgcaatccttcagtcctttctcatagaaagctggtttcctccacgagccacccaggttcttcccttccacggaaatgtcagggtagtgggacctggaagctgcattttccaccatagcagttggtctggacccagccacagcctggctgtctgggccggtctgctggcttgggaataaaataatgccggggcgtccccagtagagaagctcaacaatgcaggtatgtgtcctcaacttatctagacatttggattctaaggatactggtaagaagagtatatgctgtaaaaattaagatgaaaaatacccaaatacaaaagaacattatattggctaatttcagatccggaagttccatttctgctctgtgccgaat

SEQ ID NO: 257465 - DNA, 449 bp, Homo Sapiens
  misc_feature (276)..(290): n is a, c, g, or t
  misc_feature (377)..(377): n is a, c, g, or t
gtggaaggaagaacctggtggctcgtggaggaaaccagctttctatgagaaaggactgaaggattgcgcaccctgcacaagtacagattgaccaggaaaagacaagtgtcttctgtgtgtcacagggaaagccaggagtggccttctctgcaggccagcaagcctgcagccagcaggtgcccccacgtcaggtgctgactgtccgctgtccgctcctgtagaaggtagggagcacaatacctagggactaagggatgttcgccggttgtggtttgnnnnnnnnnnnnnnnccttggttaagaaatcaaattttgcagaatttaatctacaagttgtattatgcttttgaaaactccatccctcctcaaggaatcttnaaaaaactttgaaatgctcgccaaatgtccccatgggatttttttgaccaaaagtaaggtgataactgaaga

SEQ ID NO: 257466 - DNA, 447 bp, Homo Sapiens
  misc_feature (378)..(378): n is a, c, g, or t
tctggccattcagaggattctaaagacatggctggatgcgctgctgaccaacatcagcacttaaataaatgcaaatgcaacatttctccctctgggccttgaaaatccttgcccttatcatttggggtgaaggagacatttctgtccttggcttcccacagccccaacgcagtctgtgtatgattcctgggatccaacgagccctcctattttcacagtgttctgattgctctcacagcccaggcccatcgtctgttctctgaatgcagccctgttctcaacaacagggaggtcatggaacccctctgtgggaacccacaaggggagaaatggggtgataaagaatccagttcctcaaaaccttccctgggcaggctngggtccctcttcctgctggggtggtgcttttctctttgcacaccacttccaccacggggggaaggaagt

SEQ ID NO: 257467 - DNA, 592 bp, Homo Sapiens
aaataataaaaaagccccagcactttcaacaagtgaacactttgtgggcccaacttatgtgtctgaaagagactctctttgctatttcacaagggaaaactggtttaaattggagggttttagaagagttgggattaatgtgcagattgattttactgcgtatgaatcttctgtgactgatggtttaacccttctcattgagaatgagtttacctggtgtcatgtgttgggagtagcataatttcctgatcagtacctttataattctgaaataatttacttctaaaagatgagaaactttcttaattcaatagctttaggacaaagcaagttaagtaactcaaatgtttttgtgacatttttcttttacttcagaaaactttttagaatagtgtttcttctactattcagatgactaaaataatttgaatatttcttctgagagaatgaaaatgagaaaggatgtacgaacagtccatgtcgctgcttaactcgccctagaaaagctggtcagagaacagacctaaggaaactctttagtacgaaatttcattataactaatagcaatagcatttcagcactacctctgta

SEQ ID NO: 257468 - DNA, 643 bp, Homo Sapiens
  misc_feature (371)..(371): n is a, c, g, or t
atttaaaggaccggaatgcgagagtccaggtggccttggagaggaaagaggaacggtgaagacaagctgcgagagctgggagctggagggtgaagaggtgaacacttgagtggttagagctgtagatagacattgtggggaagtgtgccagggtggcttccagctacccctgacttagagcctggtggaggtgtggttcttcagaagtcagcaaagggctcaagagccccagtctataaatacagtcacacccaggagactaataatagtaaccccagccaccatgtacttagttttatccctgctactggctttattgcaatatttattttcatctacaatagttgcacatctactcaactatccgaatnatgtccatttcgcagaggaggaaagtgaggccaagggagtgcagatagctacagagaggagggtcaaagcacgatttaatcaaggcctgattcccaagtctgtcctctcaatttcacctgcattgacaagtattaattgaaccccaactgtatgttgcactgtgctaggtactgtggagatgctggaggaacaagacataaaatttctttgtgtagctgatgtatgtaatgagagtagacagatgtcagacaaaaaagacgagaaaatgaat

SEQ ID NO: 257469 - DNA, 577 bp, Homo Sapiens
agattctgaaactctcccacctccccactcccacctacccccgatataaatcactggactgtgtgtacgtgaaacagaagaggctaagcttcctttttttacacttatgagacaaaaagtgcagtgtttggttcgtatgtttagcacatgattttcataaagaatctatatatttttgccctacagagaattgttatacaggtcaagtgtgttttcctgatgttcctatgcaggtacagtatgttgaaagtgttttaacactaagaagaaaactttaaagattcatgtgattaattggatttgaggataattattattatttgggttttagatttgaaaagtagaatttccattgagacaattgatttgaataggcctgcatttgattcttcatatcaatagaaactaaaatgatttgggagattcatttgaaaaatgattgtatacttgttcacaaagcgcaggtcacaggagtctaatatttttttcagttagataaactgaccaaacgtctattcaagaatatatgtcaatatcatcctaatgtggaaggtccgaagaaaccagaaagtgagaa

SEQ ID NO: 257470 - DNA, 840 bp, Homo Sapiens
ctctgggcaatgagacgggaagatgtgtggttttaaattggcagggaggaggaggagatgctgcttcctcccaagaagccttacaggcagctcggtctttcaaaaggcgacctaagctacctgacaatgaagttcactgggacagcattataattcaggcaagcacaatgatcatatccagagtcccaaacatttctgtacatctgctacatgaaccccctgcactgactaatgaaatgtattgtttggttgtgactgttcagtcccatgaaaagacccaaatcagagatgtgaagctcaccgctggcttaaaaccaggacaggatgccaatttaactcagaagactcacgtgactcttcatggaacagaactgtgtgatgaatcctacccggctttactcactgacattcctgttggagacttacatccaggggaacagctggaaaaaatgttgtatgttcgctgtggaacagtgggttccagaatgtttcttgtatatgtttcttacctgataaatacaaccgttgaagaaaaagaaattgtttgcaagtgtcacaaggatgaaactgtaacaattgaaacagtctttccatttgatgttgcggttaaatttgtttctaccaagtttgagcacctgggaaagggtttatgctgacatcccctttctgttgatgacggacctcttaagtgcctcaccctgggccctcactattgtttccagtgaggctccagcttgctccatccatggaccacagtgggaccagctcgagtcttcaagtgggacaatgttattctttacaggactgggaggaggagttgctaggtggaatgctttttgt

SEQ ID NO: 257471 - DNA, 1506 bp, Homo Sapiens
ctcggccacgtggtgggcggaccggggcggtcctgagcctgcgacctcgcaggcgacctcgctggaccctaagtccaggccacagtcagggaagggcgctgagaggcgagcgtgagcccagcgacaggagagtgagctcaccacgcgcagcgccatgaccagcaagggtcccgaggaggagcacccatcggtgacgctcttccgccagtacctgcgtatccgcactgtccagcccaagcctgactatggagctgctgtggctttctttgaggagacagcccgccagctgggcctgggctgtcagaaagtagaggtggcacctggctatgtggtgaccgtgttgacctggccaggcaccaaccctacactctcctccatcttgctcaactcccacacggatgtggtgcctgtcttcaaggaacattggagtcacgacccctttgaggccttcaaggattctgagggctacatctatgccaggggtgcccaggacatgaagtgcgtcagcatccagtacctggaagctgtgaggaggctgaaggtggagggccaccggttccccagaaccatccacatgacctttgtgcctgatgaggaggttgggggtcaccaaggcatggagctgttcgtgcagcggcctgagttccacgccctgagggcaggctttgccctggatgagggcatagccaatcccactgatgccttcactgtcttttatagtgagcggagtccctggtgggtgcgggttaccagcactgggaggccaggccatgcctcacgcttcatggaggacacagcagcagagaagctgcacaaggttgtaaactccatcctggcattccgggagaaggaatggcagaggctgcagtcaaacccccacctgaaagaggggtccgtgacctccgtgaacctgactaagctagagggtggcgtggcctataacgtgatacctgccaccatgagcgccagctttgacttccgtgtggcaccggatgtggacttcaaggcttttgaggagcagctgcagagctggtgccaggcagctggcgagggggtcaccctagagtttgctcagaagtggatgcacccccaagtgacacctactgatgactcaaacccttggtgggcagcttttagccgggtctgcaaggatatgaacctcactctggagcctgagatcatgcctgctgccactgacaaccgctatatccgcgcggtgggggtcccagctctaggcttctcacccatgaacccgacacctgtgctgctgcacgaccacgatgaacggctgcatgaggctgtgttcctccgtggggtggacatatatacacgcctgctgcctgcccttgccagtgtgcctgccctgcccagtgacagctgagccctggaactcctaaaccttttcccctggggcttccatcccaaccagtgccaaggacctcctcttcccccttccaaataataaagtctatggacagggctgtctctgaagtactaacacaagga

SEQ ID NO: 257472 - DNA, 418 bp, Homo Sapiens
  misc_feature (59)..(59): n is a, c, g, or t
  misc_feature (324)..(324): n is a, c, g, or t
  misc_feature (387)..(387): n is a, c, g, or t
  misc_feature (403)..(403): n is a, c, g, or t
gaagggcgctgagaggcgagcgtgagccagcgacaggagagtgagctcaccacgcgcancattgaccagcaagggtcccgaggaggagcacccatcggtgacgctcttccgccagtacctgcgtatccgcactgtccagcccaagcctgactatggagctgctgtggctttctttgaggagacagcccgccagctgggcctggggctgtcagaaagtagaggtggcacctgggctatgtggtgaccgtgttgacctgggccagggcaccaacccttacactcttccttccatctttgcttcaacttcccacacggatgttggtngcctgtctttcaaagggaacatttgggagttcaaggaccctttttgaggcttttcaaggattntttgaggggttaaatnttattgccaggggtt

SEQ ID NO: 257473 - DNA, 766 bp, Homo Sapiens
gggacgccgcgtcacgagtcagccaaagatggctgcgcccaggtaatttgagcaaaggccacagtgaactccggcgtggctgaggaaggaggaggcacccacaggctgctgggaggagagcataaggctcaaaatggaaaatcataaatccaataataaggaaaacataacaattgttgatatatccagaaaaattaaccagcttccagaagcagaaaggaatctacttgaaaatggatcggtttatgttggattaaatgctgctctttgtggcctcatagcaaacagtctttttcgacgcatcttgaatgtgacaaaggctcgcatagctgctggcttaccaatggcagggataccttttcttacaacagacttaacttacagatgttttgtaagttttcctttgaatacaggtgatttggattgtgaaacctgtaccataacacggagtggactgactggtcttgttattggtggtctataccctgttttcttggctatacctgtaaatggtggtctagcagccaggtatcaatcagctctgttaccacacaaagggaacatcttaagttactggattagaacttctaagcctgtctttagaaagatgttatttcctattttgctccagactatgttttcagcataccttgggtctgaacaatataaactacttataaaggcccttcagttatctgaacctggcaaagaaattcactgattttaaacaaatatgtaaacaaaaataaaatggtaaaaacagaaa

SEQ ID NO: 257474 - DNA, 847 bp, Homo Sapiens
ggggtggatggaattctagcacacaggtggtgggggtcccatactttttgtgagaaacttgaactgaagtattcaagaacaaaacctgtgtgttacagtagccacccaagatgatgtttatgattcaaaaaacaaaatccaggaacacatgaagcaagagaaagcgttctgcttttgatttatgtgcttctttttccaggagaacatgagcagcttcccaggacatggaaactggcaggcactctggctggagacatgctgacagcgcagtaagggctccgggccgctcccctcaaggcagtgcctgcacagggggccctcgtggacagccatgagccttccttgggaccagcagttccagagatggaattaattctccagagggcagtggaggaggaagccaatgaagtaattctatttgttcaaacccaacttgaaagagggaaaaatgagtcaactctttctttggagtggctgccagtttccagataaagtttggtcaatcaaggagctccccatctgaggtgggcatgccaggcacgggtgtggtggtgacgggtcaggtggcacatgcagaatggtgaagggcaggtgaggccaggccgggtcaacacggaggcagcgcccctgcagccactgggtgtgtcccactctgctgccatgtggcatgcatgctccatcatcctctgccaccacggtgaagaggccagtgctgattccgtggacatggaaaactgagtgggagtcagaaaactttctgtgcctcagttcctcatatgataaacaagaaggatgtacgacatgcatgacaggttttctcccataatcataaaaatatacaattaca

SEQ ID NO: 257475 - DNA, 1093 bp, Homo Sapiens
ctttctgcacgaattttgcacgagagactttctatttttaaacaccatttatatgtttacttctgttgtcactgactctgggctttatattttcatagagtctttatggaaaaaatagaatttattttccactcttgtagctatagctgctgcacactttcaccctgatttatttttttggttcttagctttgatgttttcaaaccaaggattgtgattttaggttagaattacatattagaagcattaagactatgtctttggatcagaatgctttagtgataaacctactttgaagacatactcttaagcaatctggatcttaaatttatgtgaatacttttttagaaaatgataaagaaaaatggaattacttcaaagtgtttcttgagtcattgattcttttagcatctcaaatgttaattagaataattggaatcactttttagacttttcaaggtaccttccttgggaaggttgtgcagtgttatagattagtttagctcctcttacagggtaatggtttgctagtttaaaactgtaaccaaacgaactggtcagacaacatatatctaaaacacttaaaatgttaggaagtttgggaatgttataacctaaacgtttgtgctggtaactttttgttatttatagatatttgtgtatttaacatacatacttcaggaaatatatgcctttcctaaaacttaaccatgcattcaataccatggcctatctatacaattgaatattttggaccatgttatctgcggcacagccactgctgtgcttgaggcaaatgccgcaacggctaacttgctactttgacttaccgaaggcacaaaccatgggaatgccttgactgccatcaaccacacccccgcaacgattcctcgatttctgccctgcacacagattccaatccacaccgaatcttgagcgccgctatgaatacgaacaaaagccgcgacaaacatggcacgggggcaacgggcccaagcctcaccttgccactgcgcatcccacccaccgcctcaccgcgcgtagccctacgagctgaatacgccgaaaaggggggctccccacccacaccccc

SEQ ID NO: 257476 - DNA, 604 bp, Homo Sapiens
ccccagttcttcgttcacctcctcacggaacccatgtcccagcagcagaatgtctgtctgcaggtcctcatcagcggtggcccgcagcagctgctggccaagggacagctcagtgcagggtagtggggccagaaagagctctgagggttttgtctgcccctggctgctcccttcccagatgctgttggctaggtcattgccaatagatgacataaccttcctgagctcaactggccagtcatccagctccagagatcgcacacgggaaaggcgggtgccaagactgcggtggatacctgagcattcaatacacatgaggactcccaagttcaaactggcccacttaggattctgggtcctcaacagtccacacagtgggcgttccccacgcatgttttggatcgactgcagggccatggcctcgctctggctggtcagctgggacttgcttttaactgctctcgcatgactgcaggctggccaggatctggctctggatggcttggacccaggcatcccgctcctcatacgtcgtggcttcaaagtgccacgtttggccagtggcagacacaatcataaagttgttggtgcttttcttctttag

SEQ ID NO: 257477 - DNA, 691 bp, Homo Sapiens
  misc_feature (588)..(588): n is a, c, g, or t
ccggaacatgcgcgggaactcccactgtgtggactgcgagacccagaatcccaactgggccagtttgaacttgggagccctcatgtgcatcgaatgctcagggatccaccggaatcttggcacccacctttcccgagtccgatctctggacctggatgactggccagtcgagctcatcaaggtgatgtcatccatcgggaacgagctagccaacagcatctgggaagagagcagccaggggaggacaaaaccatcagaaaactccacaagggaagagaaggaacggtggatccgtgccaaatacgagcagaagctctttctggccccactaccctgcactgagctgtccctgggccagcagctgctgcgggccaccgccgatgaggacctgcagacagccatcctgctgctggcacatggctcccgtgacgaggtgaacgagacctgtggggagggagacggctgcacggcgctccatctggcctgccgcaaggggaatgtggtcctggcgcagctccctgatctggtaccggggttggacgtcatggccccgagattgcccacgggaacacagcgctgacctacgcncggcagcctccagccaggagtgcatcaacgtgcttctgcagtacggctgccccgacaagtgtgtgtagtatctgttttatttgactgcagtctccttggtgcc

SEQ ID NO: 257478 - DNA, 793 bp, Homo Sapiens
  misc_feature (597)..(641): n is a, c, g, or t
ggggagaggctcgcggccggagtgcggcgctgggcggaagctaccatggcggccgagcgaaagacaaggttgtccaagaatctactgcgcatgaagtttatgcaaaggggactggactcagaaaccaagaaacaactagaagaagaagaaaagaaaatcattagtgaagagcactggtacttggatttgccagagcttaaagagaaagagagtttcataatagaagagcagagtttcttactatgtgaagatcttctctatggaagaatgtcattcagaggatttaatcctgaggttgagaaattgatgcttcagatgaatgctaagcacaaagcagaagaagttgaagatgaaacagtagagcttgatgtgtcagatgaagagatggctagaagatatgagaccttggtggggacaattgggaaaaagtttgccagaaagagagaccatgccaattatgaagaagatgaaaatggagacataacaccaattaaagcaaagaagatgttcttaaagccccaggattaagatggatgccttaagcgatggcccaggggtgcttgggtggaagtcagcagggcatctggagctcatccnnnnnnnnnnnnnnnnnnnnnnnnnnnnnnnnnnnnnnnnnnnnnagagattatcattttaaaaacatgctggttttgaaacagatgggtgatgggatgttggacatccctttgcttcctgggattcattccaagtgggatttttagcccccggatctaccaatggccattggtaccgggcctgccttccctaaaga

SEQ ID NO: 257479 - DNA, 1175 bp, Homo Sapiens
acagttgtttaagctttattttttaaatgcatgcatgtttcaaggaaacaaaaatttcaagatacagaatacaacatatcagattaaataattcagaattattttaatgtatacacaaataacaatataaagcacatacataagatacattatataatttgaggtttcaaaaagcagtaatttggttttaaaattctgacaccaatatctaatgtaacattcaagtaaaacatatttcaaaagttaagactcctgagactaacacataactctatgacagcctgcctttaccacgatcttcaaaatagtgctgttcaattctcctacagaaagcaaggaggttgctatagtttttcaccttctcagaaagttcatcatttgtcaattgtgtggtaagaatggtgtatagatggccaaataccagtgcgtcaagttcagtaggctgcttattgaagaaatacggttgtgttcccagtctttgagagagagcttgacagcactggtctacatcctctaagacctggtccagagtcttctttccccatccaatagctttcatcttacgtttgacttcccactgtttttgataggccaaaatatgattcagaggccaagggtaaggagatccatacctagcatgagtgatctcccctactgtagcttcatcacaccactgaagatacagctctgcagtcaacagcatattgttgactaattccatgtaagctttcatttctgctttttggacttcctccagcccatcactaagagaatggcccttggctttaacaaattggactattggaccaagttctgatactacttgatttcccacatgaataaaaggtactttaccagatggagacatatattctgcatttgccctacaaactactttgataggcaagttacacatttgcaaaaaaggcctgcactgcaagagaagctgcattgtcagaaagtaaaatttgctcccctttcaattgctgatataatgtagcattttcaggccaaggttctgcagctgcaatctgggagacgaaggcttccgccactagagacatgtcggctgggaggcccggcgcccgggtgcctgccccccacgggcctcagcgtcctccaccgcaaacccggaggctctcggcagttaacgagcctagccccgccaacgttcc

SEQ ID NO: 257480 - DNA, 1539 bp, Homo Sapiens
gtctccacagaggcaccataaacacgctggtggggccctgtactgtggtcaaagtcaaggcctccgggcaggactcgcggcccctccggctggcgggtggggttgacccgcacgtcccgccccgcctctccctccgcgctccggacgggcgacggtagctcgagacccgggactccgcccgcctccccgcgagtatttgaggtccggggcggctccggcgcctctgcccgccgttctgctcgctcgctccccgctctggagtctgccatcatggatgttctcgcagaagcaaatggcacctttgccttaaaccttttgaaaacactgggtaaagacaactcgaagaatgtgtttttctcacccatgagcatgtcctgtgccctggccatggtctacatgggggcaaagggaaacaccgctgcacagatggcccagatactttctttcaataaaagtggcggtggtggagacatccaccagggcttccagtctcttctcaccgaagtgaacaagactggcacgcagtacttgcttaggatggccaacaggctctttggggaaaagtcttgtgatttcctctcatcttttagagattcctgccaaaaattctaccaagcagagatggaggagcttgactttatcagcgccgtagagaagtccagaaaacacataaacacctgggtagctgaaaagacagaaggtaaaattgcggagttgctctctccgggctcagtggatccattgacaaggctggttctggtgaatgctgtctatttcagaggaaactgggatgaacagtttgacaaggagaacaccgaggagagactgtttaaagtcagcaagaatgaggagaaacctgtgcaaatgatgtttaagcaatctacttttaagaagacctatataggagaaatatttacccaaatcttggtgcttccatatgttggcaaggaactgaatatgatcatcatgcttccggacgagaccactgacttgagaacggtggagaaagaactcacttacgagaagttcgtagaatggacgaggctggacatgatggatgaagaggaggtggaagtgtccctcccgcggtttaaactagaggaaagctacgacatggagagtgtcctgcgcaacctgggcatgactgatgccttcgagctgggcaaggcagacttctctggaatgtcccagacagacctgtctctgtccaaggtcgtgcacaagtcttttgtggaggtcaatgaggaaggcacggaggctgcagccgccacagctgccatcatgatgatgcggtgtgccagattcgtcccccgcttctgcgccgaccaccccttccttttcttcatccagcacagcaagaccaacgggattctcttctgcggccgcttttcctctccgtgaggacagggcagtcttggtgtgcagcccctctcctctctgtcccctgacactccacagtgtgcctgcaacccaagtggccttatccgtgcagtggtggcagttcagaaataaagggcccatttgtgggatgccgcattc

SEQ ID NO: 257481 - DNA, 399 bp, Homo Sapiens
  misc_feature (49)..(49): n is a, c, g, or t
  misc_feature (57)..(86): n is a, c, g, or t
  misc_feature (97)..(97): n is a, c, g, or t
agccctagatatttccaacctacataagggaaggtgggtgaatgtcaangccctacnnnnnnnnnnnnnnnnnnnnnnnnnnnnnngtggcagcaantttttttaaaaacccaatttgtacaagtttaatagtttactttgtttcccaagttctcaaacctttcaagatctgaaaagtgagatactgtgtctaagggaatgtttcttttaattcacgccgaagaagttgggggtttgatttctttcgccggggtttcgatcgagtcaacagctcactctgctgggctgctgtttgcacacgaagtccgtcataaaatcaaactcgttttgccccagccagagttcgggcagctccttgatgcggtccaaacccatttctatcaccaaggacataagaac

SEQ ID NO: 257482 - DNA, 1057 bp, Homo Sapiens
gcacgagctccagcgaggtgtccagcttcatgcctatcctgaaggctgtcctcatcatcgctcataagctgctggtctaaaccaggcagcctctcttgctaggaggccacttctgctgttacataactcctccctgcagaagaggggacttctgcaacagattctgtttctttttcccgactcttttccttgctgccaggtatgtgatgctgtaggcttggctccaaaccagctgagtgcctgctttttactcctttatgtctggccttctaggatctgtccaagacactctcaggcctggaggcagggcatagaatcaggtcttcactctccctaatactacactctgtaaggacctggggcaggatatcttctcccccagggatcttctatttaagtggcttctgagagggtgaacaggattgttacttttaagcctacctctgctgtgacccatcatgtgggtcttttgtttctcccttctgtggtttatgagcctgcccttaccttttccctgcctctgacttggtatttccaggtccgtatttctctgtagcccagggtctggggtagagctgactgctgttcaccctttgaacaactcatggacgtgagggatgggtgctgagcagaaccaagagaggaaactttggcgctgttaaaatggaatttctcatctgccggcattattaagggtgggctaggttggatggaaggtgaaagggatgaactgccttttgctggaagctgtcttaggctgtgagacaggagcaggggaaccacagcctatggggaactgcccttgactccacctatgttggagccttagccaaggccattccttctgtgatgataaagcccagttctggaattggagccatattaaggaatgattctcttccagcgctgctcctcaagggttgggggtccttctccctcacagccaccacatgtctcagggctaccttctccgattggatttgcatttgtggcactgtctttgatgcagtgatgtacttaatggtgcaataaagctgcttcgatttggtttccaaaa

SEQ ID NO: 257483 - DNA, 431 bp, Homo Sapiens
ggccactaaatacagagtctcctagttccatctattattctaaatggctgaaagacacacttgcacaatcttgtgtaagcctgtcctaaagtttctgaaacccaaagtgactggggtgggggacactcaacccagtagtgataaaactttgtttccagtttaatgtccttctttaactaggtgtaggatctcaggtccaccatgaaaccctagaatgcctcattgctaaggaaggggatggatcataatcccagctctacccacgccagaaggcaaaatgaggatctacaatagcgtaaacactctttgacatttcacaggttaatgcagaagtcaaaaggccagcaaagctggcgaaagcacagctgcaggaggctgaccattggctgtggttcgtagacagaggggatatctgtgtttcgcaacctcac

SEQ ID NO: 257484 - DNA, 575 bp, Homo Sapiens
tcttttcccttttatcaaaacacttctatacacctggctccgggcctgcggctgagtcctataacaacgcataatgttctggaaggacttatcttcttttgtgacctttgccatcacataaatggcacacattaataactggtccagatgtctgtccatcataagttcaggacactgaattatggagaattcaaagcaggtccagatttttttcctcaattcatctgaaatatctagtttggcacagagatcccgaaggcggacagctgctaaatggtatacctttctaaagaaaagcgataaagagctggtcttcctgggtctattactactgctggttacagactggccttgcttctgctgttggccacctggggaaatctgttgaatggccacttgaccagggacttgcaaagttgttcctgtcacctgttgagagctcagacttccagccagggcctgagcactgaggggctgaatggagcctgtcacagcttgtgcctgccccccaacattgacttggacagggaagaatgttatccctccattttcattggcaatacctagtgacagag

SEQ ID NO: 257485 - DNA, 508 bp, Homo Sapiens
ctgacagtgctgaaagtgaagactgagattcacgagctgaggtgcccctgtgatccacgtcttccaccctgaaaccccatactccatcaaggtcctgcctgtagagtctaccttgcaaagcgctcctgctcctacaccatgctacaggccaggaaccagagcccatcatctcagaggcccctggatgtccttcaaaggaaccaggaccctcagagcccaacatccatctctgtcatcatcttcatcacacccaaagaagagccagccttgcaggaaggtttacatctccaggaagataggctgccagcaactgcatgaggatgcagccacctgcttaactgtgctgtccagacagccaagacagatgcagggcctcttgctgcttaagagctgatgggccgggcatgtttggctcacaccttgtgagcacagtactgggaaatgggagcacagtactaaggaaattgggagcacagtacttggggaaatggggaagcacagtacttgg

SEQ ID NO: 257486 - DNA, 350 bp, Homo Sapiens
cgcacacactcacatgctctcactcaccacactgtagggcacacacgtaccccgcacccagcaactcctgacagaaagctcctcccacccaaatgggccacgccccagcatgatcctgaaatctgcatccgccgcggtttggattcattgtgcatatcaaggataccctcaagctggactgtgggttccaaattactcatagaggagaaaaccagagaaagatgaagaggaggagttaggtctatttgaaatgccacgggcttgctgtgaggaataggtgaaaaagcagaatcactgtggtcagactcctgtgccagattcaggtcatgagatactcctgttcctccaga

SEQ ID NO: 257487 - DNA, 515 bp, Homo Sapiens
ctcctcccacccaaatgggccaggccccagcatgatcctgaaatctgcatccgccgtggtttgtattcattgtgcatatcagggataccctcaagctggactgtgggttccaaattactcatagaggagaaaaccagagaaagatgaagaggaggagttaggtctatttgaaatgccaggggctcgctgtgaggaataggtgaaaaaaaacttttcaccagcctttgagagactagactgaccccacccttccttcagtgagcagaatcactgtggtcagtctcctgtcccagcttcagttcatgaatactcctgttcctccagtttcccatcctttgtccctgctgtcccccacttttaaagatgggtctcaacccctccccaccacgtcatgatggatggggcaaggtggtggggactaggggagcctggtatacatgcggcttcattgccaataaatttcatgcactttaaagtcctgtggcttgtgacctcttaataaagtgttagaatcc

SEQ ID NO: 257488 - DNA, 815 bp, Homo Sapiens
  misc_feature (414)..(414): n is a, c, g, or t
ggattcggcacgaggaattctgcatggtggctttgccctttaaccactaactgataaatgatgtagttagcttttaaatgttggaaaaatataatttcaggttcaaccataggtcagaagtacacgtattttgttagtctatttgtctctcagtcatctcatggaaaattctcagcttttggtatggaaataattttcttgaaggcaatatttgttgagtgactgacggaatgaaaaacgccagttgcgtaagtgtgatggtgtggaggctggagcacattaataagaacagtgtcctaaattcaggaggtaatgctctgcccatgccctgtgcagctcagacggtgtgtgcagtgcagtatgtaacccagggcacatttcaggggggcccacagggagctgcagcttgtaaanggtggagtgcagcccaaacagaagcagagagtcggaatcccccccagagcggttgaaggcacaaaggatgcgcagcaaggaagacagacttataggtggtgcgactgccatcctctggtactgaaggtgctatcatggagggagggaagtagattgaccctcctggctccagagtacggaactcagacaaacggtcagaagcttacagggaggccaattttggatcaactttaagaagaattttttaaaagctagagcaatcctaaaatggaatttgctctttataaagttgcgaatgcctcaccctggaattgcttaagcaaagttgggacgggcagttgtgagtaatctcctttccaatccatacccgcaatcaccagaaacgtggacttccctgacac

SEQ ID NO: 257489 - DNA, 1527 bp, Homo Sapiens
  misc_feature (170)..(170): n is a, c, g, or t
  misc_feature (1050)..(1058): n is a, c, g, or t
  misc_feature (1142)..(1155): n is a, c, g, or t
ggggatctacccgctgttgcggatagagacgtaccgcggggtacgattatttctcttccataaatatgcgcgctttccatagcggcgtttaggcacaccggttcttcgttatatacggtagcgcaccacccaggcacgggatcttgatagacatcacgccgggcatttantctaattgtcttctggagtgtcgagagacggcagggtgatccgcttgtgtggtgagccacgcccagattgatcccaccaagtcgggctaaacattttatagtggcggcccagggggcgacccaacaggggaatgatgattctcacgcgcggggtgtttttttgagggggtgcgaggaggtgcggccctgcaccaaaatgggaataaaccagggtctgggcctagaaaggggttcacagcgaataccccacaccactcccttgtttcttttttgtggcttccggccggcgcaataaggcatatacattgggaagaatcctattggcgcggtcgcccatggatcccagttataccccacgcacacagcagcgttcgggtgggttccatttgattgttgcgaaagcccagtgagtgctgtcttttcgaaggttcccgcaaatccccatgccttctaagatctttgtgaaacaccacaactttctcctcaccagttctgtgggtcagtattgaaactttattacaaaattataaagcagagctctgtaacaaaataatacacatttgggtttgctttaacctccaagtaagtctgagaaaatcttaataaaagccacttgaagtaacaattcacatccaagagatttccacaaatttatacaatgtatattgagcactagttcctgtacagcttattcttattagtttggatccaactattccaatgtattatgaaccagtcagctatctgtcttttgaaacaagtcttaactgaaatctcagagtaatcagcaaaagctacggaataattctaagaattagatgtttccatatcattaaaaccaaggatccatgaggggcagaagggaggattcaaagatttnnnnnnnnntcaaattttagaccttggttaaatattaactggaatgggatcttggaactcccaactttaatttggtgtaataaaaatgatgcnnnnnnnnnnnnnntcagggttgtttgacaccttttttcctaaagggaaaccttcaccaaaaggggataaaagatttaaaggcaaaatgagtaaacaacctcagttttaattcttactgaggttactaaccagctatcagtatattattttcgatttgtgtctaggagggaaactgaagaggaggtaaggcttcagcagagaaagcaggttgtaagtagagagccagcttctgcccttaagttactgctagatcttagctgaattgcacatacatagacctgttttacagaggaactgagtagctgaatgaatgatcctttgctattggtaggcattgtaaactatagtattcactgcccatgacaaaagtggaaagggatgtctt

SEQ ID NO: 257490 - DNA, 678 bp, Homo Sapiens
tttgatcctgttaacaatgtgagatgaccttaacctactcttcagggtttggcagggtctagggcaaatggataaattacgcaaatggcctaggttgagaaaagttaataataaaagggctggcctgaaaagactgggtcgaagaaagaagaagtaaaacttagggtttacctcacatcttatctaggcaacttttctgggtcttgatttgggctttaagggccatgaatacccaaatatacttaaattcctacattccaagtatatatgatgtaagaaatttcacccaattggtctgaatcttctatattttgcacttctcatcaggcacctagccaacggttgagggctgatcttctgacttggctttcctggttgaccagtgctggttctataacccaattaactatcagaattccaagcaatgaactaagcttgctggtttcatcctggcagaaatgaacataatcttgagctaaaattgtacagttgtagtccaacaataatggcagatacaaaggctatgttcccggtacaaagacaagcatttcacctgcataatctcatttagcacttaacaattctgtaccggagatattatctataaaccattttacagacgagtaaacaaacccagctagattacaaagtgagaaagcgatggaagccacatctaaa

SEQ ID NO: 257491 - DNA, 662 bp, Homo Sapiens
  misc_feature (530)..(530): n is a, c, g, or t
ctgaatcaataatttcattagagctgagaaatgatgtttttctaattcttttgaattctcttctcttattagctggcattcttccgtaagagggctttctctcccaagctgggcaactaggttatcatgaaatacagttcttactgtaaagacaggataaatgctacattccttccctgtaatttctaattttcaaagtaagaaatggttttaacagctacctctaaagatgacaagctaattgttctctggctctctcattttttagtgtcattttggaattatggatttctatggatttaatgtgttttcataaacacaattattatgtttcttggtgctcaacttaccacaactttgacaagttataaccccttactgctagctgctgtgtccttttaaaaagacacacattcatctttgaaagctttctttgtttttaatacaataagatgtcccatgctcaaactcctgcccttgaaccttgaataaagcccgtttccaagaagcctgtatggttggtacagggngttcattactacttggatgacatattttttctcaggcatttcagcgaaaaatgagccaacgaatccaccttgggagaataaaatgattctttccgttgaattttaccctctcacctcactctatttcgtttt

SEQ ID NO: 257492 - DNA, 534 bp, Homo Sapiens
  misc_feature (395)..(395): n is a, c, g, or t
  misc_feature (446)..(446): n is a, c, g, or t
  misc_feature (508)..(508): n is a, c, g, or t
cccaactcacttaaaggcatcaaaaaacttaataaagggataaatatgctacattcaagatactctattgtaaataggtaaaaattttcctcatttacttatgaagtcattttttaaaaacttgctcaaaatgattctaaatgttaatgggaaaaataagcacatgagactagccaggcaaatgctagacaaacagtaatgatgaggttttggggctgtggattttctattttacacatttccatattttcaagtatgtattttgtaattagagtaacaagaaatgaaacatcagcaggagggtgtaattaatagtgatctatccactaaaaagactgagggtggaaaggaaggatataaagattacataactctgaagaagaaatattactatngactatacagaaatattatcaaggaatacttgatatcaaggaaatatacanacaagtgtatgccaacaatttgataacatgggtgaaatcaacaaacatttacaaagacacanactacctaaggctgagaagaaatgca

SEQ ID NO: 257493 - DNA, 492 bp, Homo Sapiens
cccaactcactcaaaggcatcaaaaaacttaataaagggataaatatgctacattcaagatactctattgtaaataggtaaaaattttcctcatttacttatgaagtcattctttaaaaacttgctcaaaatgattctaaatgttaatgggaaaaataagcacatgagactagccaggcaaatgctagacaaacagtaatgatgaggtttcggggctgaggatcttctattttacacattaccatattaccaagtatgtattttgtaattagagtaacaagaaatgaaacatcagcaggaggtgtaattaatagtgatctatccactaatattactattggctatacagaaatttatcaaggaatactggatattaaagaatattaccaacaagtgtatgccaacaatttggataacatggggtgaaatcaacaaacatcttcaaagacacaaactactaagctgaggaagaatggcaaattttgattgacg

SEQ ID NO: 257494 - DNA, 1947 bp, Homo Sapiens
tggaagaggacttacaggacgatgaaatagagatgttggttgatgacccccgggatctggacagatgaatgaagagtctctggaagtcagcccagacatgtgcatctacatcacagaggacatgctcatgtcgcggaagctgaatggacactctgggttgattgtgaaagaaattgggtcttccacctcgagctcttcagaaacagttgttaagcttcgtggccagagtactgattctcttccacagactatatgtcggaaaccaaagacctccactgatcgacacagcttgagcctcgatgacatcagactttaccagaaagacttcctgcgcattgcaggtctgtgtcaggacactgctcagagttacacctttggatgtggccatgaactggatgaggaaggcctctattgcaacagttgcttggcccagcagtgcatcaacatccaagatgcttttccagtctttgttgtgtaaagtccgtctgtgtgcagctgtacaggcagcttactggttgctagaggatgcgaaagtcatcaaagttctttacatattacttgtgccatatcttcttcaccctaaacatagctctttctttataatatttgtgatgatggaaacaaaagccttggaacaattgcactttaagtattacacagaagtaaaagaactacagaaaatgtacagcaagacaagtgcccggaagttcactgatccttcagaaggaaatgcgctttactgattgcaaagccttcagaatattggagtgtggtgtgtttgctcatctgatgctttttagttcagttacatgtaacatcacattttttttatcacgtgaaagatgttagatttgtttgcttataaattttttaccactcccacataaaatgctcatagtttgggagaggaaagagggaagattctctcttcttttaacagagagatgattgctctgtatacccattgcttcctccctgaggctgtcccaaagtgaacactgatggagtggtcaaaatcataagattgtagcaagccaaagatacgtatgtgacggaagcacataagcaataagcagaaaacaagaagtgcatgctgtggatgcctgttgactcctttccatcccgctcagtgccatgtcctcttttgtgatcttccagaaagctccaggattcatttgagttccacatccaagtaacagatgaattatattcatgtgtaatgcatttgtggagtttacaaaaccagtgtctgttaaaacttggaaaatgtcttagaaaacgttggtgcttggtgatgctttatttgtttaattatcaagaacaaattatggcaatgctagtttctgcttaaccaaaatactctgtgtatatattatacatatataaatacatgggatgtgtatgtctatatgtgtataaagcttactatgtcttcatttggcttccatgactatcttttatacatggaattccttaagattgagaatatgtcactgagtgaatgatacctgcagacagtcagttgatatatgtagagttcagaatgactgttttctcatgtgcccttggcaatgattctcaacactgattgtataacagaatttggggggagctctaaaacataatgactgagtctccaccagaacgattacattatctctggggcgggaccaagttagaatggcatttcgtgtcaaggtccccagattgagggtaatattgcacaaagctgaaaaaccactgatccgggggtgctggttcatgaacgaaacggtgtgcgaaacacctggttcgaaaggccattttgacgaccacgtggggtgttgaataatggaccacagggggcaaacatgagagagcggcacagagaatagagtatgattaggaagaagcgcagaacgagagaaaatgaactacaggaataaggctattttatctgttattcgc

SEQ ID NO: 257495 - DNA, 544 bp, Homo Sapiens
  misc_feature (172)..(203): n is a, c, g, or t
ctcgtgctgaattcggcacgaggcttgttgggggactgggtacagttggcaagctgtgtttcatcagctccctgtcctcctttcttccctcgttattgatctatagacattaggaagggagtgagacggctcctccaccatcctcagccagtgcaacccattccctctgctnnnnnnnnnnnnnnnnnnnnnnnnnnnnnnnncttccctaccctctcaccatctttcttggcctctctgagggtctctctgtgcatctttttaggaatctcgctctcactctctacgtagccactctccttcccccatttctgcgtccacccctgaactcctgagcgacagaagccccaggcctccaccagccttgaacccttgcaaaggggcaggacaaggggacccctctcactcctgctgctgcccatgctctgccctcccttctggttgctctgagggttcggagcttccctctgggactaaaggagtgtcctttaccctcccagccccaggctctggcagaaataaactccaacccgactggaccatt

SEQ ID NO: 257496 - DNA, 1325 bp, Homo Sapiens
  misc_feature (1159)..(1159): n is a, c, g, or t
  misc_feature (1161)..(1191): n is a, c, g, or t
  misc_feature (1280)..(1280): n is a, c, g, or t
  misc_feature (1301)..(1301): n is a, c, g, or t
gattagaaggcagccattctggaggagaagcgtcagctggaggggcgcctggggcagttggaggaagagctggaggaggagcagagcaactcagagctgctcaatgaccgctaccgcaagctgctcctgcaggtagagtcactgaccacagagctgtcagctgagcgcagtttctcagccaaggcagagagcgggcggcaccagctggaacggcagatccaggagctacggggacgcctgggtgaggaggatgctggggcccgtgcccgccacaagatgaccattgctgcccttgagtctaagttggcccaggctgaggagcagctagagcaagagaccagagagcgcatcctctctggaaagctggtgcgcagagctgagaagcggcttaaagaggtggtgctccaggtggaggaggagcggagggtggctgaccagctccgggaccagctggagaagggaaaccttcgagtcaagcagctgaagcggcagctggaggaggccgaggaggaggcatcccgggctcaggccggccgccggaggctgcagcgtgagctggaagatgtcacagagtcggccgagtccatgaaccgtgaagtgaccacactgaggaaccggcttcgacgcggccccctcaccttcaccacccgcacggtgcgccaggtcttccgactagaggagggcgtggcatccgacgaggaggcagaggaagcacagcctgggtctgggccatccccggagcctgaggggtccccaccagcccacccccagtgaccctaccctgtccccagatgcactaacagatggggcccagccctctacctccctggaccccacgggcccctgtcccaggaaccccgccctctgacttcttgccctttggaaatggtgcagcactctggcatttatcacccccacctgggtcccctgcaacctcccatcaaaggatgacccctaaacacagaggagcggggcaggcagggaggcaaggactggagctaccttgcttgttgggggactgggtacagttggcaagctgtgtttccatcagctccctgttcctcctttctttccctcgttatttgatctatagacatttaggaagggagtgagacggctcctcccacatcctcagccagtgcaacccattccctctggntnnnnnnnnnnnnnnnnnnnnnnnnnnnnnnncttccctaccctctcaccatcttttcttggcctctctgagggtctctctgtgcatctttttaggaatctcgctctcactctctacgtanccactctccttcccccatttnctgcgtccacccctgaactcccga

SEQ ID NO: 257497 - DNA, 1296 bp, Homo Sapiens
  misc_feature (406)..(406): n is a, c, g, or t
  misc_feature (478)..(478): n is a, c, g, or t
  misc_feature (859)..(859): n is a, c, g, or t
gtcccactactcgagccacctgaagcggcacatgcagacacacagcggagagaagccgttccgctgtggccgtgcccctacgcctcagcccagctcgtcaacctgacacgacatacccgcacccacactggcgagaagccctaccgctgtccccactgcccctttgcctgcagcagcctgggcaacctgaggcggcatcagcgtacccacgcagggccccccactcctccctgcccgacctgtggcttccgctgctgtactccacgaccagcccggcctcccagtcccacagagcaggagggggcggtgccccggcgacctgaagatgctctgctccttccagatttgagcctccatgtgccaccaggtggtgccagtttcctgccagactgtgggcagctgcggngtgaaggggagggcctctgcgggactggatcagaaccactgccagagctgctattcccttggacctgccggngctgtggacaagagctggaggaggacacacagtggtgagaagcccttccgctgcgcccgctgtccttatgcctctgctcatctggataacctgaaacggcaccagcgcgtccatacaggagagaagccctacaagtgccccctctgcccttatgcctgtggaatctggccaacctcaagcgtcatggtcgcatccactctggtgacaaaccttttcggtgtagcctttgcaactacagctgcaaccagagcatgaacctcaaacgtcacatgctgcggcacacaggcgagaagcctttccgctgtgccacctgcgcctataccacgggccactgggacaactacaagcgccaccagaaggtgcagtggccacggtgggganggagggcctggtctctctgcctctgagggctgggcccacctcataccccaccctctgttttgagctctcggggcccaccagccctggggactgctggcagccgggctgtccacacagactcatcctgaactaggtccttcttccccatgttttatacagacggaccagaagccacctttttctcccccgctggccaggggctccacacagactaacgtaggcactataaggaccagcccaaccccatgggcgggggggcccatatggaccaggggaccttgccttgactgaggcacttcacgagctcagtgagaagggccctgtattcacctccactgcccccaggggctgtggacaaaccggctgggggactgcccagcctcccacctgtttatttaacttatttcagtgctttataataaaggaaacactcacca

SEQ ID NO: 257498 - DNA, 2226 bp, Homo Sapiens
ggggccggctgcagactctcaccgcagcggccaggaacgccagccgttcacgcgttcggtcctccttggctgactcaccgccctcgccgccgcaccatggacgcccccaggcaggtggtcaactttgggcctggtcccgccaagctgccgcactcagtgttgttagagatacaaaaggaattattagactacaaaggagttggcattagtgttcttgaaatgagtcacaggtcatcagattttgccaagattattaacaatacagagaatcttgtgcgggaattgctagctgttccagacaactataaggtgatttttctgcaaggaggtgggtgcggccagttcagtgctgtccccttaaacctcattggcttgaaagcaggaaggtgtgcggactatgtggtgacaggagcttggtcagctaaggccgcagaagaagccaagaagtttgggactataaatatcgttcaccctaaacttgggagttatacaaaaattccagatccaagcacctggaacctcaacccagatgcctcctacgtgtattattgcgcaaatgagacggtgcatggtgtggagtttgactttatacccgatgtcaagggagcagtactggtttgtgacatgtcctcaaacttcctgtccaacccagtggatgtttcccaagtttggtgtgaatttttgctggtggcccagaagaatgttggctctgctggggtccaccgtggtgattgtccgtgatgacctgctggggtttgccctccgagagtgcccctcggtcctggaatacaaggtgcaggctggaaacagctccttgtaaaacacgcctccatggttcagcatctacgtcatgggcttggttctggagtggattaaaaacaatggaggtgccgcggccatggagaagcttagctccatcaaatctcaaacaatttatgagattattgataattctcaaggattctacgtttgtccagtggagccccaaaatagaagcaagatgaatattccattccgcattggcaatgccaaaggagatgatgctttagaaaaaagatttcttgataaagctcttgaactcaatatgttgtccttgaaagggcataggtctgtgggaggcatccgggcctctctgtataatgctgtcacaattgaagacgttcagaagctggccgccttcatgaaaaaatttttggagatgcatcagctatgaacacatcctaaccaggatatactctgttcttgaacaacatacaaagtttaaagtaacttggggatggctacaaaaagttaacacagtatttttctcaaatgaacatgtttattgcagattcttcttttttgaaagaacaacagcaaaacatccacaactctgtaaagctggtgggacctaatgtcaccttaattctgacttgaactggaagcattttaagaaatcttgttgcttttctaacaaattcccgcgtattttgcctttgctgctactttttctagttagatttcaaacttgcctgtggacttaataatgcaagttgcgattaattatttctggagtcatgggaacacacagcacagagggtaggggggccctctaggtgctgaatctacacatctgtggggtctcctgggttcagcggctgttgattcaaggtcaacattgaccattggaggagtggtttaagagtgccaggcgaagggcaaactgtagatcgatctttatgctgttattacaggagaagtgacatactttatatatgtttatattagcaaggtctgtttttaataccatatactttatatttctatacatttatatttctaataatacagttatcactgatatatgtagacacttttagaatttattaaatccttgaccttgtgcattatagcattccattagcaagagttgtaccccctccccagtcttcgccttcctctttttaagctgttttatgaaaaagacctagaagttcttgattcatttttaccattctttccataggtagaagagaaagttgattggttggttgtttttcaattatgccattaaactaaacatttctgttaaattaccctatcctttgttctctactgttttctttgtaatgtatgactacgagagtgatactttgctgaaaagtctttcccctattgtttatctattgtcagtattttatgttgaatatgtaaagaacattaaagtcctaaaacatctaaaaaaaa

SEQ ID NO: 257499 - DNA, 514 bp, Homo Sapiens
  misc_feature (374)..(374): n is a, c, g, or t
  misc_feature (400)..(400): n is a, c, g, or t
  misc_feature (416)..(416): n is a, c, g, or t
  misc_feature (425)..(425): n is a, c, g, or t
  misc_feature (441)..(441): n is a, c, g, or t
  misc_feature (481)..(481): n is a, c, g, or t
  misc_feature (489)..(489): n is a, c, g, or t
taacttggggatggctacaaaaagttaacacagtatttttctcaaatgaacatgtttattgcagattcttcttttttgaaagaacaacagcaaaacatccacaactctgtaaagctggtgggacctaatgtcaccttaattctgacttgaactggaagcattttaagaaatcttgttgcttttctaacaaattcccgcgtattttgcctttgctgctactttttctagttaggatttcaaacttgcctgtgggacttaataatgcaagttgcgatttaattatttctgggagtcatgggggaacacacaggcacagaggggtaggggggggccctctagggtgctggaatctacacatctgtggggggtctccnggggggtttcagccggctgtttgganttcaagggtccaaccnttggacccnttgggagggaatgggntttaagagtgcccggggccaagggggccaaactgttaggntccgttcntttatggccggtttatttacaggtt

SEQ ID NO: 257500 - DNA, 1318 bp, Homo Sapiens
  misc_feature (313)..(330): n is a, c, g, or t
  misc_feature (443)..(451): n is a, c, g, or t
aaatacataatagccctttaaattgagtaagaagctggttacttgcttgcagtgcataagaaccaaggtttctggggtggcccctgcaggttcactccgcccaggagatcaaaaaggatgcgctctctacattcttaaatgccacagtcccctaccaacggcttaggtggaagcacagctcccacatcagcactgatgccctggcgcggccagcactgcctctacgaggccacacctgcctctgccaaggccactggccctcattcatctgcggggacgttctagagatatgcacttacagaccagttacttnnnnnnnnnnnnnnnnnngcagagttcccttaatttagaaaaactcactatatatagcttgcattcagagccacatggaggcttaataaaaaataccaatttgttaggataaatgctttttctatcttggnnnnnnnnntcagacttatgcatcacctccagttaagcaccaacctaaaataaggtttgtattaattaaatcctgaaaaatcgattttttttcaagagggggagaatccaactcacagaagaaaaccaacttgaggatcccacaggcctcagacactgcaagctcctaaccagcggctcgccctcgcactgagtgggagagtgtctcgtttgtggttaacacagcgctctgcgacccctcccagacgtacggttttcactgaggagacttggggggagtgctctgctctcggctgagacgcttccccatggccgagggcgagggccggccccccgccggccgcctctggtctctgggggctccaggtgtggacttgagggctgggggctcccggtatctctctgcgggctctgccagcttcttttcctccttcccacaaccaacagtgtttggcttttgttctttttggggttgcaatggggaagaaggaggctctttactcgttctctgacaaatctctgcgtagctgggctttcgcaattccgtggcggctccgttcacctgcaccgatttacacgcggtcgcagtgagggcggaaggaagtctgtccacactgtgggtttccctctgtttctccgccaccttgggatcatcgggtaaatgagctggggagggggatcgctcgtacgttgctgatacagcacaagaagccggcaccgagggctctctggagaccactacaggaagggtgttcacgcttgcgtctgcactgagggtcctttctttggatggtcctattatcaagctagatagcctgttttcaaacaagtcctctgtcttcaaattgcccctcgtgccgaattcgccacccaggcc

SEQ ID NO: 257501 - DNA, 1091 bp, Homo Sapiens
gctaagacaagtctttgaaggacagaatcgtattcatcttgaaatcaagcagctgaaccggcagttagatatgattcttgatgaacagagaagatatgtctcttccttaacagaggaaatctctaaaagaggagcaggaatgcctgtgcagcatgggcagattactcaacaagaactggatactgttgtgaaaactcagcatgagattctgagacaagtaaatgaaatgaaaaattccttgagtgtaaccgtccgaatggttcgtggaatgcagcaccctggctctgctggaggcgtctatgagacaacacagcacttcattgacatccaagagcacctgcacatagtaaagagggacatagattacttagtgcagcgaaatatgccctccaatgaaaagccgaaatgcccagaactaccaccatttccatcatgtttgtctacggtccacttcattatatttgttgtggtgcaaactgtattattcattggttatatcatgtataggtctcagcaagaagcagctgccaaaaaattcttttgactaccattttcctgtgtacttcatctatttgtgtacaaaatgatgtcgttttgagggaatttaagtatttaaattgcttcatagtctaaattattaattttcttaataaaataactgtttaaacattgatttgcagttaagaataaaccttaaagcaaagacaaccacattttaatttgttcacagtatgtaaatctgtctaaatttcagtgaatttctggtcagtatgatgcagcctctgagcagaatattgaccagtaagagggtaaataaagtgggggcaacccctggatatgaatgttaccccctaagtctccaatattgcaggtttccctgtataacgtaaacacacttgccctcatgcctcccagaatatgaggtctaattaagaagtcccatcaggtttattttgtaaccaaagtcttttttagaagtcagacttcctaatcaaaggcctgggcctgcaagtcctttcatcttaatgcaacttcctttgaaaacaaagaatatattgtctgagagctttaaggaactggtaatagacttc

SEQ ID NO: 257502 - DNA, 660 bp, Homo Sapiens
  misc_feature (610)..(610): n is a, c, g, or t
gcatgacggaggagcagttggtgaggttgcggtccggggagctgtcacagaagctctgcagtgtgaagccaaagcagatgaggcaggagctgatggtgaggctgaacttgagcaggaagcagagcaggaagtagtgctgggtctgcgggaacaaggccagtcactcctggggcgcacagcccctctgacggctgctcctagctcttccacgtattcaacgggctcttagtaaatggtcaggcctggggggatagggagctcaagccccagcaagggtctttcccagctctgtgccactacctcctctttgatctgggggaagactaagaaccaagtgccggagttctgctggaatcccccatacagagccttccagattagccactctctcctcccccaatcctcagacccttccatgctcacttgcaaggctcacagggtctggtttgcttacctgcttgggaatggactggaggtttattccccgttgccatagacatgatggagctatgggggggctttcccagcagagagatgctcgaaaagcagagatcaagtagagggatggtgaaaatgaccctctgtccttcattttcatagagggaacctntagggagtcttgcgcgtgaggtcgagtctcgtgaggggatggaataaaac

SEQ ID NO: 257503 - DNA, 912 bp, Homo Sapiens
  misc_feature (749)..(750): n is a, c, g, or t
  misc_feature (752)..(753): n is a, c, g, or t
ggggagacaggtggggtactcgggaagctggagcgggccggcggtgcagtcacgggggagcgaggcctgctgggcttggcaacgagggactcggcctcggaggcgacccagaccacacagacactgggtcaaggagtaagcagaggataaacaactggaaggagagcaagcacaaagtcatcatggcttcagcgtctgctcgtggaaaccaagataaagatgcccattttccaccaccaagcaagcagagcctgttgttttgtccaaaatcaaaactgcacatccacagagcagagatctcaaagattatgcgagaatgtcaggaagaaagtttctggaagagagctctgcctttttctcttgtaagcatgcttgtcacccagggactagtctaccaaggttatttggcagctaattctagatttggatcattgcccaaagttgcacttgctggtctcttgggatttggccttggaaaggtatcatacataggagtatgccagagtaaattccatttttttgaagatcagctccgtggggctggttttggtccacagcataacaggcactgcctccttacctgtgaggaatgcaaaataaagcatggattaagtgagaagggagactctcagccttcagcttcctaaattctgtgtctgtgactttcgaagttttttaaacctctgaatttgtacacatttaaaatttcaagtgtactttaaaataaaatacttcctaatgggggcctnncnnccacggagcgggcacccgagaagaagaaaattgggggggccgccttcgggcccttcaaaaaaacttttcctaaaaccatttctttttgtggggccgcgggggcccccggtaagggagaaaggggaaaccagggggtcaaaaacccgggtttttcctaaa

SEQ ID NO: 257504 - DNA, 1149 bp, Homo Sapiens
  misc_feature (31)..(31): n is a, c, g, or t
  misc_feature (1074)..(1075): n is a, c, g, or t
  misc_feature (1079)..(1079): n is a, c, g, or t
  misc_feature (1094)..(1095): n is a, c, g, or t
  misc_feature (1099)..(1099): n is a, c, g, or t
  misc_feature (1106)..(1106): n is a, c, g, or t
  misc_feature (1110)..(1110): n is a, c, g, or t
  misc_feature (1114)..(1114): n is a, c, g, or t
  misc_feature (1116)..(1116): n is a, c, g, or t
  misc_feature (1122)..(1122): n is a, c, g, or t
  misc_feature (1124)..(1124): n is a, c, g, or t
  misc_feature (1129)..(1129): n is a, c, g, or t
gcctgggtggcgaattcggcacgagggttgnaccaccaaccagcttcctcaaccagatgttttcccattgttcaaggacaaaggtggcccagaattttccagtgccctgaaaaatagtcacaaggcacttaaagcattgttgaggtcattggtaggtcttcaggaagagttgcttttccagtacccagacactagatatctagtagatgggacaaagcccaatgcgggaagtgaggagatttctagtgaagatgatgagctggtagaagagaagaagcagcaacgaagaagggtccctgcaaagaggaagctggagatggaggactatcccagcttcatggcaaagcgctttgccgactttacagtctacaggaaccgcacacttcagaaatggcacgataagaccaaactggcttctggaaaactggggaagggttttggtgcctttgaacgctcaatcttgactcagatcgaccatattctgatggacaaagagagattacttcgaaggacacagaccaagcgctctgtctatcgagttcttggcaaacctgagccagcagctcagcctgtcccagagagtttgccaggggaaccggagatccttcctcaagcccctgctaatgctcatctgaaggacttggatgaagaaatctttgatgatgatgacttttaccaccagctccttcgagaactcatagaacggaagaccagctccttggatcccaacgatcaggtggccatgggaaggcagtggcttgcaatccagaagttacgaagcaaaatccacaaaaaagtagataggaaagccagcaaaggcaggaaacttcggtttcatgtccttagcaagctactgagtttcatggcacctattgaccatactacaatgaatgatgatgccaggacagaactgtaccgctctctcttttgggccagctccaccctcccgacgaaaggccacggggatttgacatcgcccacctccgaagacccagtgggcgccttggctggtgcggctgctggtccagatggaggaaaccagtgactttatggggctgagctagtagggaagcnnaagnaaagatgctgcgtanngaanatgtgcntaanacangnaagggngntgtcncgccaaaccccgcatttaaa

SEQ ID NO: 257505 - DNA, 488 bp, Homo Sapiens
  misc_feature (25)..(25): n is a, c, g, or t
  misc_feature (42)..(42): n is a, c, g, or t
ccctatgaaattttcccctaccccnactttgtacccaaaagntcccaatgatcagttctgggagtttgttaaactcactgaatgtgttccctctccctaggttaaaaagttactaatgttgctgcctgttgcttcctgctttatttaggtttcatgtccttagcaagctactgagtttcatggcacctattgaccatactacaatgaatgatgatgccaggacagaactgtaccgctctctttttggccagctccaccctcccgacgaaggccacggggattgacatcgcccacctccgacacccagtgggcgccttggctggtgcggctgctggtccagatggaggaaaccagtgactttatggggctgagctagtagggaagcccctggaaagatgctgcgttccgaacctgtgcctaatacacgcaaggcgctgtcccgcccaaccccgcctttaaacgccacaaataaagagcattgttaccgc

SEQ ID NO: 257506 - DNA, 479 bp, Homo Sapiens
  misc_feature (15)..(15): n is a, c, g, or t
  misc_feature (77)..(77): n is a, c, g, or t
agcccaaaagagacnggtacagttctgtccctaaaagacaaacacagcaaaacgggttaaacacactggttcaccantccaaggttaaaagggaaacgcagaaagctggaaaatacccccatcctgtttccttctgttgaaaacacagcccatgtaattaaaaatgcacccccacagctcttactcacaaatacaacagaaggaagaaacccaatcaaacagtaaaatatgtaaatggtccagtgcggctggacacccgtctcccagggaatgagtgttctgtaagtttgccctttgcagacaggctcttcaagtaagaaaacaagattgaatattttaataggatgtaggagaccgccatccgatgaggaggattcaatcagacatgggatgtagggggatataatttagttttcatacattttcttggacttggcagtacttgaaaaacaatgaaaatgagccagcaacacgattcc

SEQ ID NO: 257507 - DNA, 447 bp, Homo Sapiens
  misc_feature (18)..(18): n is a, c, g, or t
ccttctgttgtaattgtnagtaaaaactgtggggtgccatttttaaattacatggcctgtgttttccaaacagaagaaaacagaaatggggtattttcccagcttctgcgttccctttttaaccttgaatagtgaacccagtgtgttaacccagtttgctgtgtttgtcttttaggacagaactgtaccgctctctttttggctagctccaccctcccgacgaaggccacggggattgacatcgcccacctccgacacccagtgggcgccttggctggtgcggctgctggtccagatggaggaaaccagtgactttatggggctgagctagtagggaagcccctggaaagatgctgcgttccgaacctgtgcctaatacacgcaaggcgctgtcccgcccaaccccgcctttaaacgccacaaataaagagcattgttaccgcgagc

SEQ ID NO: 257508 - DNA, 340 bp, Homo Sapiens
  misc_feature (15)..(15): n is a, c, g, or t
  misc_feature (22)..(22): n is a, c, g, or t
ccactggttgtcggnaggtggnccgatgtcaaatcccccgtggcccttcgtcgggagggtggagctggcccaaaaagagagcggtacagttctgccctggcatcatcattcattgtagtatggtcaataggtgcccatgaaactcagtagcttgctaaggacatgaaacctaaataaagcaggaagcaacaggcagcaacattagtaactattaacctaggagaggaaacacattcagtgagttaacaaactccagaactgatcactggaacatctgggtacaaagtgggatagggaaaaattcataggcacttaccactgtcattgggatgaccaacta

SEQ ID NO: 257509 - DNA, 1202 bp, Homo Sapiens
  misc_feature (785)..(785): n is a, c, g, or t
  misc_feature (857)..(857): n is a, c, g, or t
  misc_feature (938)..(938): n is a, c, g, or t
  misc_feature (1014)..(1014): n is a, c, g, or t
cggagggtgtgtgttgggcaaagccggaggcagaggaggacgattgttttacggatcccgtgatcggcccgccttctcccctttccccccctccctaccgcccctgtcccgccggggagcggcggcggccttggactttgctgtctttcctcgcggagacagatttcaacactacacttgcacaatgtctttgaaaccaagagtagtagattttgatgaaacatggaacaaacttttgacgacaataaaagccgtggtcatgttggaatacgtcgaaagagcaacatggaatgaccgtttctcagatatctatgctttatgtgtggcctatcctgaaccccttggagaaagactttatacagaaactaagatttttttggaaaatcatgttcggcatttgcataagagagttttggagtcagaagaacaagtacttgttatgtatcataggtactgggaagaatacagcaagggtgcagactatatggactgcttatataggtatctcaacacccagtttattaaaaagaataaattaacagaagcggaccttcagtatggctatggtggtgtagatatgaatgaaccacttatggaaataagagagctagcattggatatgtggaggaaaatgatggttgaaccacttcaagccatccttatccgaatgctgctccgagaaatcaaaaatgatcgtggtggagaagacccaaaccagaaagtaatccatggggttattaactcctttgttcatgttgaacagtataagaaaaaattccccttanagttttatcaggaaatttttgagtctccctttctgactgaaacaggagagtattacaaacaagaagcttcanatttattacaagaatcaaactgctcacagtatatggaaaaggttctaggtagattaaaagatgaagaaattcgatgtcganaatacctacatccaagttcatatactaaggtgattcatgaatgtcaacaacgaatggtagcagaccacttacagtntttacctgcagaatgtcataatataattcgacaaggagaaaaaaatgacatggcaaatatgtaccgtcttactccgtgctgtgtcccctgggttaccctcatatgattccgggagcttgcaaaaccaccatcccatgatgaagggcctttcggagccaaacacgcaaaccctttacttccaggaaaac

SEQ ID NO: 257510 - DNA, 833 bp, Homo Sapiens; identical to SEQ ID NO: 175816

SEQ ID NO: 257511 - DNA, 867 bp, Homo Sapiens
gaataagccactgaggtcagtcctattattatccccatcttatagatgaagaaaatgaggcaccaggaagtcaaataacttgtcaaaggtcacaagactaggaaatacacaagtagaaatgtttacaattaaggcccaggctgggtttgccctcagttctgctatgcctcgcattatgccccaggaaactttttcccttgtgaaagccaagcttaaaaaaagaaaagccacatttgtaacgtgctctgttcccctgcctatggtgaggatcttcaaacagttatacatggacccagtccccctgccttctccttaatttcttaagtcatttgaaacagatggctgtcatggaaatagaatccagacatgttggtcagagttaaaagatcaactaatcccatcaaaaatagctcggcatgaaaagggaactattcctctggcttaagtccatggatgaagactttcaattgcctataaagtggttccctttattagacaatgttacccagggaaacaacaggggtttgtttgacttctggggcccacaagtcaacaagagagccccatctaccaaggagcatgtccctgactacccctcagccagcagcaagacatggaccccagtcagggcaggagcagggtttcgcggcgcccagcacaagacattgcccctagagtctcagcccctaccctcgagtaatagatctgcctacctgagactgttgtttgcccaagagctgggtctcagcctgatgggaaccatataaaaaggttcactgacatactgcccacatgttgttctctttcattagatcttagcttccttgtctgctcttcattcttgcagtattcattcaacaaacattt

SEQ ID NO: 257512 - DNA, 666 bp, Homo Sapiens
ggatggaaggccttgagtcctaaatctttccattggtgggaagttcctttcagcagaggcacagttgtagtgctgggctcagtggggaaagtctgcagctctactccaacagtcaagcagtcctggtactcctgaagaatcttggagaaggggacttatttttcccccatccaccactgcagacatagctgagggttctcccatgggcactcaggatgggtgcacatatagacagcctttctggaacactttaaggtgactgcattcacacaggaggagcactcttcaggttcaggcttgcatgggagatagggtcacaattcctctctacttggaacatcaacatttctgcagatgaaaataggtgcctgtctggtctgaatagccagaactctgggtcaagagtgtgcctgggaagtagattgctttcctgctggcctggcagggaagctgaggtggcttccatcctccccatcaataagatctcagtgaatttaactgagagcttccctggccccttctgtgaggctgggatctctgcccaccattgtgtattggcgttattcaccttgctttagccaacacttgtttctaccaaggaacaccttccctacttgcctgaagatgaacttgtcaacccaggtaaataaatacctgggaaaaata

SEQ ID NO: 257513 - DNA, 854 bp, Homo Sapiens
  misc_feature (722)..(722): n is a, c, g, or t
  misc_feature (795)..(795): n is a, c, g, or t
taattgtagcgggggcggtgggggggagaagtccacgccatggatcaggcaaaattctttcagatgaggtgcaaggccgtgtacatagttatgtaaaaagagattgcttcatgagctaatggttcactatatgcaaaagggtaagatgaaagctatactttgtacaaatgtaaatagataaagtaacataatacattaatacttcttaaaatgtgctatttgcaaacttacttaatatcagtgaacacagtcggctaaagctgtgttcccatatattgttatagacagctaaacccttcaactatgcaatgaatgttcgggcttttcacaaaagcccgcctaactcaaaggagccttttcaaatccatttacagcatacttaaggtcatattttccctgaacaagcgcttacgtgatatgactctgttttccttgcttgttttttttcaaacggagaaacatcctgttttgcaaattggaccccaggctggaacttagcatctgaagttgccgcttgtgggctctgggggaaagtgtagccccggagaggtaactgaggacatgagcaaccagtgccagggagggtgggatttgccagatgccaaaatcaggggacgggtggtggtgtctgtcagacacacacaggtcgccagtgacttcacacacacctcatgtgagaaccatgccttttttagtgtgtcctatttcatacctgtacacanttcctcgtttttgtaatggagattttacttacacccaaacagattcctgaaagaaagctttcaagtttttctncagatggatgggatatgtttttcactgtatttcaattaactggacgggatgtaaaggtg

SEQ ID NO: 257514 - DNA, 722 bp, Homo Sapiens
  misc_feature (86)..(86): n is a, c, g, or t
  misc_feature (570)..(580): n is a, c, g, or t
ttgaccaggcactaataaaagcccctagaggagtgcaagatctctaatgatgtagctctgagacaaggacaggaagatactaaganccatggccctgaaaaccctggggtaagatgtccatgctggactgtggctgagttgtcactttgaaagggacaattcaaaagttgaacatgatcctgaggtttgcgcacgatcctgaagaaaggagtattctcaaacatagaccagatgaatttcacatcagccggaagagttgtgagcttagaagagattaactttgatttagagaaatataggaatataacatatcttacatcacaaaggtttctaaaaggttacacataatgcaaatagaagacatagaggtgactacttaaagaactaagtgaaaatgaactaaagggaaatgaaaatacaatttatcaaaatttatgggatgtgacaaaagcagtgtttacagagaaatttatagcattaaaatgcatatattgattaagatctaaaatcaataatctaagcttccactttaggaaactagaaaagaacaaattaaatccaaaataagcnnnnnnnnnnntacttaaaattagagcagagatcaatgaaattgaaagtaagaaaatgatagagaaaaaccagtgaaaccaaaagctggttctttaaatagatcaataaaaattaatagagtcaataaaatagatctataaaattaataaggc

SEQ ID NO: 257515 - DNA, 739 bp, Homo Sapiens
  misc_feature (250)..(259): n is a, c, g, or t
gtaggaccatttaataccttgtaatcctccagcttaatctgcacacactttctatgagggcaggtacaactattaagagattttgaacattaagtcagtccacaaatattcagtgggcatctactaggtgacagccactgtgctataattagagactttttactataagcatcaaaaacagataaggctcttcctggcagagtttacagcctggtgtacttgctaatgtctctttaattaggtgaagaannnnnnnnnnctatcgaaattactaatcagttggggaaaaaaatactatagcagacagcactaatgtcatcaacaaacattgttcttctccgtgtcctgggtacaacatcgaataatatttcttggcctcctttccgcttctcctctctgctgttcctctctacaagaacctggggggccaacgcctaaagatcataatatcacacaatggaaggaacctagattcctaaatgactgcataggacagatcccatctcctccacccaatacattattagactgaactgtgacctgaaatgagcaataaactctgtattaattcactgaaatgttggggttgcttgttatagtagtcggtccatcatgaccagtaaaacataaatcaaaagttaatgtaattgttatcccattatttagagcgaaataaatgttgaatatatggactttctcagattaggaaataccaattaaaaatataataaatagctaa

SEQ ID NO: 257516 - DNA, 499 bp, Homo Sapiens
gctgcaggaattcggcacgagcggcacgagacataacaagcaaggaagaaatacgcatagctacaactgccctcattaccatctgcatgaatgccatctatatcccagacattgagaaatgagtctcctacattcaaggagattatagtccagtgtgtgggcagacaagcaaatagacttgtgtgtaaaccatgcaatggacatgtgtatttcaagaggactacgtgaagctgtgctggaatacagcttctcagctgagatttgtcactgcagtgttgaggaactctggttttgggccagacagtctgggttacaaacctggttctaccacttagcaggtatgtcgtttaaataatcttgccttcactttgggaggctgagtcaagccgataccaaggtaagaagctggaaacagcctgaccaaatggtgaacttcgtctttactggaatacaaaattaacccggcggagggcccttaccttggaatccaattccaatt

SEQ ID NO: 257517 - DNA, 612 bp, Homo Sapiens
cccaaaaggaattggggcaaccaaaccaaaaatagggatgctcttctaaaatgagcgtgtaaacccaaacctctagaactgacttgttttaaatgcatgacttttaaattaaagtggaagaaaagaagctttacagttgatagttcaaactccctaaaataatgccaacaaggtaagcttgcatagaaaaaaaacttcaaattattactggctacatgctttaaaaaattagaaatgcaggtattataatcatagtgcaaaaccatggcagtttgtgatgtctattactgcctaaggttgagaaatagaccgtagtacctccagttatcacagtttctggtcttttaatcaattatttctgccaactagaagcaatgtgtatgtaaagatgggcagcacacatctgctgtgctattaattaacgaagtttgaggtcatcaccaccacctaaattggaaccaggactagggtcttgttgtcttcttgccagttactgccagcagctgtgaaactctcacctccatttcctcccgatgagacctgtctctatcttcaaattcgcgtgtccttctccgagcctcttcaaaggcctgttgtgctaatgcatcctcc

SEQ ID NO: 257518 - DNA, 1139 bp, Homo Sapiens
  misc_feature (858)..(859): n is a, c, g, or t
  misc_feature (866)..(876): n is a, c, g, or t
cccctccccacctcttcttcaacacatcatattctacccatccagaagcgcggactgggtggcgaattcggcacgaggcggcgctgctctgtggggctctggccgcgcctggcctggccgggaccatgtgcgcgtcccgggacgactggcgctgtgcgcgctccatgcacgagttttccgccaaggacatcgacgggcacatggttaacctggacaagtaccggggcttcgtgtgcatcgtcaccaacgtggcctcccagtgaggcaagaccgaagtaaactacactcagctcgtcgacctgcacgcccgatacgctgagtgtggtttgcggatcctggccttcccgtgtaaccagttcgggaagcaggagccagggagtaacgaagagatcaaagagttcgccgcgggctacaacgtcaaattcgatatgttcagcaagatctgcgtgaacggggacgacgcccacccgctgtggaagtggatgaagatccaacccaagggcaagggcatcctgggaaatgccatcaagtggaacttcaccaagttcctcatcgacaagaacggctgcgtggtgaagcgctacggacccatggaggagcccctggtgatagagaaggacctgccccactatttctagctccacaagtgtgtggccccgcccgagcccctgcccacgccctcggagccttccaccggcactcatgacggcctgcctgcaaacctgctggtggggcagacccgaaaatccagcgtgcaccccgccggaggaaggtcccatggcctgctgggcttggctcggcgcccccacccctggctaccttgtgggaataaacagacaaattagcctgctggaaaannaaaaaannnnnnnnnnnaactcgaaggcatctaatgtcggggggcggagaaaaaaagtgaatgaaaagggcacatgggccataggctggttttccctgaccccaacttttccttggaacaaaaatggggaaaaatactggccggggtcccccccttaaaaggggagtccggaattaaaattttccgaaaaaaggccaggggttaaaccctgccattttaaatgggaatccggggtgggccaaaaaaccccccggggaaaattttaaaccccggcccccta

SEQ ID NO: 257519 - DNA, 823 bp, Homo Sapiens; identical to SEQ ID NO: 97933
  misc_feature (622)..(622): n is a, c, g, or t
  misc_feature (714)..(764): n is a, c, g, or t

SEQ ID NO: 257520 - DNA, 815 bp, Homo Sapiens
gggccgggatgagagtacctcctatccactaatttgcttaaggataaagttctaagaacgggctagaaaaaacactagacctggccgattctatcaagaacaatggcaaactgaacagaggcagtcaggaggccaaatgtctgattctttgttctgtacctttcagtagtctgcaaattttctaccaaaaaaaatcccaagaatttatttgggaattattaaaaaggcaaacaatgaatgttattaggacaagaatatagcagtcaggaggccatgactacatcacagccaggcggcattccctgccacagtggcggcttgaatcatcaagaaatggataaatggggctttagtaaatcaggcttgcaggctcaaagctgcaatctgcccactctcaggtactgagactttgtgggcctcagacaccaggaagaaagctgggatacagtcatttgagttaaaaagggaatgacccctcagaaacccgcattagcagtgttactcttggaagtgcctttacttttaacgctctctgttctgaaaaagaggtgtttggttacgtgtgagccaacatcacgttttgttagctgtgatttacctttgtccgtttaaaagacttcacggagccattctgtatacaaggtgtgctctttccaatgtagaaggggttatggaaaagggtgcgatcctttgctgtaaactggagagaccagtcccaaacagaggggaattttaagcccttctcatcacccaattggatgtttttgcttatagcaaattcctgcaaaataaataaataaatatttgcaaaacta

SEQ ID NO: 257521 - DNA, 635 bp, Homo Sapiens
  misc_feature (29)..(29): n is a, c, g, or t
gctggccccctgcatgttagtaacaacangagtcggatctccttcaactaatgcacaggaaacgtcacccatttctgcccatgactgcactctaggtctagagggcactgcaagacataccgattcgtctgtcaatgtagagacacaatatctgatcatgctgggacttgtaaacgacatcaatacgtggatagactgggtcgcatacaactccaaaagacatgtcgtatgagacagcaaagaaccggactgactcctcgagcatcatgcaaacctcatgacacgcaaagcagggggtggaaggctgatcagctgtaatggcgaacgccagtcacacagagctgcatctggaccaacattagtcttctctgataaccagcgatgtactacaccagcggatttcataagggcagcaatatacgcctctatagagtcacagtgtctgcagagagttcacaacacaggaaaacactaaagtgtatgtacctggtcaaagaatacgcattgcgcatgcacaatcgcaagtagcatttcccggtactgctgggcacatattagatatgaatccattggtacaagaactaacagatcatggctaccctcaaattgagggaatgagtgaacctgcatccagg

SEQ ID NO: 257522 - DNA, 718 bp, Homo Sapiens
gttcctgtgatcagaggcaagatttgcccaggaacagaataaaggtgcttctttggatagctctcaatgttcgccctcccctgcctcccaggaagaccttgaatcagagatttcagaggattctgatcaggaagtggacattgagggcgataaaagctattttaatgctggatgatgaccactggcattggcatgttcagaaaactggatttaggaataatgttttgctacagaaaatcttcatagaagaactggaaggctatataagaaagggaatcaattctctggtattctggaaacctaaaaatatttggtgcactgctcaattaacaaacctacatggagaccttaattttgacttaacaaatagtttatgtactgctcttaggttgttttgataaagtgacattatagtgattaaattcttccccctttaaaaaaacagttagtggttttcactatttataaaaaattaattttgaactttttgttaaatttttaaagtatagctttaaaggttttaataggaccttcttgaacgacttttctgtaatctggttatctcccacttaatggaaaggcaaaggggtaccccaaatccagaggtgcctacatttcaagcagccttggagtattttaaaaggaaaacattctttacttttatatgacattcttatactgctgtctcaaatccaaaacatttcagagctcttgtctc

SEQ ID NO: 257523 - DNA, 672 bp, Homo Sapiens
attacagtagtaggaaccttctgtaaatagctatctgacgtttcatatggaaattgcagaactctaagtagatgtccaaaatagagaagaatttagaagactactgtatttcatggctgttgcagcaaatccttctgagtttaaattacagaaagaaagtgacaaccgaatggttgtgaaaaggatattctcaaaagctattgttgacaataaaaatttatccaaaggcaaaacagatcttctggtactctttttaatggatcatcagaaagatgtttttaagattcctggaactctacataaaattgtaagtgttaagcttatggccatacagaacggaagagatccaaatagagatgcaggatatatttattgccagagaattgatcaacgtgactattccaacaatacagagaagacaaccaaagatgagctgttgaatttactaaaaactcttgatgaggattcaaaactttctgccaaagagaagaaaaaattgctaggtcaattctataagtgtcacccagacatctttattgagcattttggagactgagtttttaatatctgtatataagttgtgtattttaagaataaattatgtatcctaaatatccaatcacatttgtaagcgtgcaagctctaaatttgaaactgtacttaataaaaatt

SEQ ID NO: 257524 - DNA, 537 bp, Homo Sapiens
  misc_feature (408)..(416): n is a, c, g, or t
aaagcactggtgctcttcttaagtgaaatgttaacacagggctcaatacataaaagagaaagtgaagttgttccatttggggggtcccataaagggccccatgtttcccaaggtgttaacccttcagacacaagcacagcctacaaacccatggaattaaaatattaacaatgaatgcataaagatttcactgacaaataaaaaccagggagtgcattcagtgaccacaactttctaagcttctgcttttccacatgcttttctttggttttatcactttagaaaactctttgaacataaattgtctgaatggcagctatattagtcagaagctgtaatgctacacctgggaatttatctacatgatagatgctgctgaataaaatccaacaagatcgattttgtttnnnnnnnnnctttgttaaggcagtctattgttcatactaacagaaataaaacatttatgaataaagtccaaagccaagataattcttagaaagatgaagcatccctgctgggcacagtggctcacacctg

SEQ ID NO: 257525 - DNA, 1533 bp, Homo Sapiens
tggaatcaacattttaattaccaagtctatatttagcaagacaatgtgggagagataaagaggaaggaaggggtaggtggggaggggttctcaaaggagctgacccattttctgcattggctgcagagccttgcagtcctggccaggagttcttggccttgtgcctttcagaagtgccgacaggcatcaaggaggtacttacgcagctacagctcagtggcagctgcaaaccccatctacgaaacatgtcatcaggactgtcctttaatagtcttcctcctctctgcagctgcgggaaagaggactggccaagaatttcaggtggggtcagtgtgactgcagggtcaccgcaacagctttggctgtggcgttgaggacggtggtgggaagccgagcagcagggagcatggcagggatgtctctggggaccctctggatgggcgggatgttggggccctccagtgtgtccaggatcccctctaccactttgtggtaggcaaaatgcagatagagcaggaagagcatgtgtagggcagccagggtgccacagaggagcagccgctgtgtggggcccacggtccgagacaccaacactgctaccatgcgcagtgtggacagtccacccaccaacagccagaagaggtagaagagggcgtggaggtggatattataggtgatgaacaggacaatgcaatgcccaaagaggccatagcccagcagtgccaacatctgcagccatggtgatctgggcgttgcacaggtaggcaaggaagtaaatgaaggatgagactcccagccagtagccgaagcaggtgccaatggctgtgcccatcagggtgccctcccggataatagtgtcagacgtcttcatcccatggagtaggatagcaaccagagtgaagaccagcatgagaggtccatagagttcacctgcaattttctgggggaagttgaccatcttgatagggatcatggactccaggagcctgcttcgcacctgagcaggctccacatcaaagtagggtctgaggatgtcgatgttggcgtacaagctgaaggccctggaggcttgtcttttcccagcctgccacatctgatctgccacctgccggctcagctgtcccttaaagcccttcatgcccaggaactctccatcctcctcttcagcagcagctgcatcagctgcatcagcgtctacttcttcctcgcgcaggcgctgatgcagctcacccatatcctcgaagctagagcctgaggtatcatccatgttctccatgtcaatcacagctgagcctccgccctggatgttttcttcgaaccctccccattccgggccagctccatttcgggcgccgcccgccggcgccgctgtagttgccatgtcccttgagggctcccgtcgctgaaacccgcgctagccccgcgcgcggagtgggcaagatgtgggcctccggaaggtagacgtccagggtcgaggagaggtgggatcggccggaacacaaaaaggagaagcccggatgtttggacaaaagc

SEQ ID NO: 257526 - DNA, 1062 bp, Homo Sapiens
gtagcgaggcctgggtggcgaattcggcacgaggctctcctcgaccctggacgtctaccttccggaggcccacatcttgcccactccgcgcgcggggctagcgcgggtttcagcgacgggagccctcaagggacatggcaactacagcggcgccggcgggcggcgcccgaaatggagctggcccggaatggggagggttcgaagaaaacatccagggcggaggctcagctgtgattgacatggagaacatggatgatacctcaggctctagcttcgaggatatgggtgagctgcatcagcgcctgcgcgaggaagaagtagacgctgatgcagctgatgcagctgctgctgaagaggaggatggagagttcctgggcatgaagggctttaagggacagctgagccggcaggtggcagatcagatgtggcaggctgggaaaagacaagcctccagggccttcagcttgtacgccaacatcgacatcctcagaccctactttggatgtggagcctgctcaggtgcgaagcaggctcctggagtccatgatccctatcaagatggtcaacttcccccagaaaattgcaggtgaactctatggacctctcatgctggtcttcactctggttgctatcctactccatgggatgaagacgtctgacactattatccgggagggcaccctgatgggcacagccattggcacctgcttcggctactgggctgggagtctcatccttcatttacttccttgcctacctgtgcaacgcccagatcacaatgcctgcagatgttggcactgcctgggctatgggctctttgggcattgcattgtccctgttcatcacctataatatccacctccacgccctcttctacctcttctgggttggttggtgggtgggactgtcccacactgcgcatggtaaacaatggttggtggtctccggaaccgggggccccccaaacagggggctggctccctctgtggggaacccctggctggcccctaaaaaatggctccttccctggggtcatatcgggcaatttttggcccaccccca

SEQ ID NO: 257527 - DNA, 872 bp, Homo Sapiens
gtagcgaggcctgggtggcgaattcggcacgaggcccacctctcctcgaccctggacgtctaccttccggaggcccacatcttgcccactccgcgcgcggggctagcgcgggtttcagcgacgggagccctcaagggacatggcaactacagcggcgccggcgggcggcgcccgaaatggagctggcccggaatggggagggttcgaagaaaacatccagggcggaggctcagctgtgattgacatggagaacatggatgatacctcaggctctagcttcgaggatatgggtgagctgcatcagcgcctgcgcgaggaagaagtagacgctgatgcagctgatgcagctgctgctgaagaggaggatggagagttcctgggcatgaagggctttaagggacagctgagccggcaggtggcagatcagatgtggcaggctgggaaaagacaagcctccagggccttcagcttgtacgccaacatcgacatcctcagaccctactttgatgtggagcctgctcaggtgcgaagcaggctcctggagtccatgatccctatcaagatggtcaacttcccccagaaaattgcaggtgaactctatggacctctcatgctggtcttcactctggttgctatcctactccatgggatgaagacgcctgacactattatccgggagggcaccctgatgggcacagccattggcacctgcttcggctactgggctgggagtctcatccttcatttacttccttgccctacctgggcaacgcccagatccccatgcctgcaaatgttggcactgctgggcctatgggcctctttgggggcattgcattggtccctgttcctcaccctattaaaatccaccc

SEQ ID NO: 257528 - DNA, 948 bp, Homo Sapiens
gggttcccatggcgcagggggggacagttcccgcccgccaatcaagccaaaaagaggtagaaaaagggcctgggagggggattattatagggtgaggaccagggccaatggcaagccccaaagaggcccatagccccagcagtgccaacattttccagcatggtgatttgggcgtttgcccaggtaggcaagggaagtaaaggaaggatgagactcccagccaggtacccgaagcaggtgccaatggctgtccccatcaggggtggccctccccggataattagtgtcagacgtctttcatcccatgggagtaggatagcaacccagagtgaagaccagcatgagaggtccatagagttcaccctgcaattttctgggggaagttgaccatcttgatagggatcatggactccaggagcctgcttcgcacctgagcaggctccacatcaaagtagggtctgaggatgtcgatgttggcgtacaagctgaaggccctggaggcttgtcttttcccagcctgccacatctgatctgccacctgccggctcagctgtcccttaaagcccttcatgcccaggaactctccatcctcctcttcagcagcagctgcatcagctgcatcagcgtctacttcttcctcgcgcaggcgctgatgcagctcacccatatcctcgaagctagagcctgaggtatcatccatgttctccatgtcaatcacagctgagcctccgccctggatgttttcttcgaaccctccccattccgggccagctccatttcgggcgccgcccgccggcgccgctgtagttgccatgtcccttgagggctcccgtcgctgaaacccgcgctagccccgcgcgcggagtgggcaagatgtgggcctccggaaggtagacgtccagggtcgaggagagcctcgtgccgaattcgccacccaggcctcggtgc

SEQ ID NO: 257529 - DNA, 423 bp, Homo Sapiens
  misc_feature (35)..(35): n is a, c, g, or t
  misc_feature (42)..(42): n is a, c, g, or t
  misc_feature (54)..(54): n is a, c, g, or t
atgtccctttaaaataatccttccctccctctctncaacctncgggaaaaaaangaactggcccaaaaaatttcaggtggggtccaatgtgaactgccagggtcaaccgcaaacacctttggctgtggcgttgaggacggtggtgggaaagccgagcaagcagggagcatggccagggatgtctctggggaccctctggatgggcgggatgttggggccctccagtgtgtccaggatcccctcctacactttgtggtaggcaaaatgcagatagagcaggaagagcatgtgtagggcagccagggtgccacagaggagcagccgctgtgtggggcccacggtccgagacaccaacactgctaccatgcgcagtgtggacagtccacccaccaacagccagaaaaggtagaagagggcgtggag

SEQ ID NO: 257530 - DNA, 1165 bp, Homo Sapiens
  misc_feature (54)..(54): n is a, c, g, or t
  misc_feature (57)..(57): n is a, c, g, or t
  misc_feature (59)..(59): n is a, c, g, or t
  misc_feature (71)..(71): n is a, c, g, or t
  misc_feature (79)..(79): n is a, c, g, or t
  misc_feature (94)..(94): n is a, c, g, or t
  misc_feature (142)..(142): n is a, c, g, or t
  misc_feature (1116)..(1116): n is a, c, g, or t
catgatctccgactttggcctctccaagatggaggacccgggcagtgtgctctncancncctgtggaactncgggatangtggcccctgaagtnctgggccagaagccctacagcaaggctgtggattgctggtccataggngtcatcgcctacatctggctctgcggtaaccatcccttctatgacgagaatgatgccaaactctttgaacagattctgaagcccgagtacgagtttaactctccttactgggacgacatctctgactctgccaaagatttcatccgccacgtgatgaggaaggacccagagaaaagattcacctgtgagcaggccttgcagcacccatggattgcaggagatacagctctagataagaatatccaccagtcggtgagtgagcagatcaagaagaactttgccaagagcaagtggaagcaagccttcaatgccacggctgtggtgccgcacatgaggaaactgcagctggccaccagccaggaggggcaggggcagacggcgagccatggggagctgctgacaccagtggctggggggccggcagctggctgttgctgtcgagactgctgcgtggagccgggcacagaactgtcccccacactgccccaccagctctagggccctggacctcgggtcatgatcctctgcgtgggagggcttgggggcagcctgctccccttccctccctgaaccgggagtttctctgccctgtcccctcctcacctgcttccctaccactcctcactgcattttccatacaaatgtttctattttattgttccttcttgtaataaagggaagataaaaccatccttagcgctgtctccctcaatatcccccaccccatcttgttgtgcaaactgactgcttgatttgggggtgcctggcctttgaggtagtcacagggaggcccctccccaacatgagactgggtggggatggggagagagaagtggggaatggaggggaaggtgcttaagggaatttctttgtcctgggtgccccatctagccttccggccctttggaaccctttctgcgctttgcttggtgggctcctgagcatggcggcgattgggcgcaggtccggcactngaacagcacctgtaaggagggtggagtcgcttgggcccagccagcataa

SEQ ID NO: 257531 - DNA, 659 bp, Homo Sapiens
gctatagtgtttgctattacatattaatatgaattatagttatgtttctatttatatatatagatacacatacatctaacatatgtgcgtgtgtgtgtgtaaatatataataaagccttgtagaggttttcggggggctttaggggaattaataaaataactcctgaatgaaaataacagaacaattgcaagaatcccactgcgcccctgccccatgacttgactctctcaaaagtcctttctcccctctcccttcaatgccttcaatgccagcaagccttcaatgccacggctgtggtgcggcacatgaggaaactgcagctgggcaccagccaggaggggcaggggcagacggcgagccatggggagctgctgacaccagtggctggggggccggcagctggctgttgctgtcgagactgctgcgtggagccgggcacagaactgtcccccacactgccccaccagctctagggccctggacctcgggtcatgatcctctgcgtgggagggcttgggggcagcctgctccccttccctccctgaaccgggagtttctctgccctgtcccctcctcacctgcttccctaccactcctcactgcattttccatacaaatgtttctattttattgttccttcttgtaataaagggaagat

SEQ ID NO: 257532 - DNA, 640 bp, Homo Sapiens
  misc_feature (477)..(477): n is a, c, g, or t
tccttccagttgttgtgggctcttggtggtatcctgagtgcgctatagtggagaccagattctaatacgcacaacacagatttatacatactttgtttataaaacccgaaatatggatatgaaacgtcttatcatggttttggctggagcttctgaatttgatcctcagtataataaagatgccacaagcagaccaacggataatattctaataccacagctaatcagagaaattggcagcattaatttaaagaagaatgagcctccacttacctgcccatatagcctgaaggccagagttctttaactgtctcatcttgctagaatgaaaattcctgagacccttgaagaagatcagcaattcatgctaaaaaagtgtcctgccctacttcaagaaatggttaatgtaatctgccaactaattagtaatggcccggaaccgtgaagaaagggagtttcgtgcttcaactttggcantcctagaaaactgcatgaagctttcttagatggccgttcagggacctcagcaatttaaggttccccttttgaagttccttatattgagaggacaattttagacgggtttttatttttaaggaggttaaattaaacctttcccggttttgggggctaaaaggat

SEQ ID NO: 257533 - DNA, 237 bp, Homo Sapiens
tatatatgtagggtaacaaaattattgtgataaaagccaataagtggttgccagggcttagggctgggaggagggtaggactctcaagaggaaggaaattgtttcttagtgttaatggatcagctctgtattctgattgtgatggcaattacaggaatctatacatgcaataaaatgtcaaagagctacatacacactctcaaaaattgtatatgtaaaaactagtgaaatctgaat

SEQ ID NO: 257534 - DNA, 1741 bp, Homo Sapiens
  misc_feature (1718)..(1718): n is a, c, g, or t
ggcagcagtactaccaggccctgagcagcagctccatcatgaacaaggaggggctcaacagcgtgattaaagccacacaatacaagcctgtgcccgacgaagaaccaaattgaacagacgtataggaaacgctggaacggataaagaacaacgacccaaaacttgaagaagttaacctcaataatatccggaatatccccatccccaccctcaaggcatatgcagaagccctgaaagaaaactcatatgtgaagaagttcagcatcgtggggacacggagtaatgaccccgtggcgtatgcccttgctgagatgctcaaggagaacaaggtgttgaagacactgaatgtggaatccaacttcatttctggagctgggattctgcgcctggtagaagccctcccatacaacacttctctggaggaaatgaaaattgacaaccagagccagcccctgggcaacaaagtggaaatggagattgtgagcatgttggaaaaaaacgcaacacttctcaaattcggctaccactttacccagcaaggaccccggcttcgggcatccaacgcaatgatgaacaacaatgaccttgtgaggaagaggaggcttgcggacctgactgggcccatcattcccaagtgccggagtggtgtctagtgtgtggcggtggagtccatgcctttgaactggatgtgttctattgatgacctgtgctctgcaggggaaaccagaaggcaaaatgctggcagcatgaaacccttttgtggttcagttctttatgcactaaggttttaggttgactagtggttgtagttgaaaattttataaaataccgttaatgtgaagtttttctttagtcacagaagttgaatctggttattatttaaaaactagaagcccccaaaccagcagatcttactgaagatgatgttccagcagcagcgacttagccccaggagcccagtttcaatggccttgctgtgtggtgtttcaagtgcatttaaaatgtgtgacacagaaacggcacactcttccacatgcttttgaagtattataaaacactttattacaaatttgtcttagctattagcaaataaaactgattatcattctttattaaccctccttggaattttgaaaacctcgattaaagttgccaaattgattactggatccagaacacaattttcccctcagaacagatagacagactgaagccactgaactctgccaggagtcaacatgagattccttttgctggatatgcagaaatgataggaaaaaaaccaatggtgaaatttcaagtttcaaaaaccaacctttcattaccaatcccaggcaacaaacatgtccctgagtgttctttaagaacatttgggatttatgtacaatttaatactggagttagaactttttccttattgaatgccaaccttatgatggatgtgaaaatctacggccaaatacttttgaaaacacctttctatattgcacagtgggcaaatggcttatgtgaggtaagacactagagggataaatttccagatcaacatggctatggtatttagtaatggcccagcttagagacttcagctactgatctcatcacttattagacaaattgctgctgaccttacggcctgtatatttaaggcctccgcaggatggccggtacaatgggtggaaggaaactgccaggattattcaagggattgggggaantcctggggccaaaccacccccaa

SEQ ID NO: 257535 - DNA, 487 bp, Homo Sapiens
gggtctgagttcaagataaaatctggtaaacagtttttaaattcaagttttcaaatggtaaatatcaatatccatagcatcttaagttaatgtgtttcccagtggggggattcttaaaggatcctaatttgattaatagattacaatgacttcccaattagtctggccagttagttgtgtgtaactatttcactagagggtacttgaaaataacttgcttttctaagtaaaaggccacctgagaatttatagatacacagactcctctacttccaactaagtgggctctggaagtctcttgtttctgagctagaggaacccagacatggaccgtgacttctccagtatctggatgtctgtgaccagagggactggttcttgcagtggacatagagggccacccatttcagcttgggccctcctcctcagcttggctctgaacttgagagagttgtttaccttctctcagcccagtctttttaactga

SEQ ID NO: 257536 - DNA, 660 bp, Homo Sapiens
  misc_feature (560)..(560): n is a, c, g, or t
ccactggggaaattctgaagccaggtgaagccacacacggggctccctcccacccgggctcctctgtagggcctccctctgagaaaccacaaaacaagctgctggaggtctgagtgcctgccctcccttcctgcacaaacggggccctttctaccctgaggatggcatctggtggtcaggaagatgcctggacagcaaatcctcactgggcctcgcttccccctcacagaaagggttagggggcctcttacggaatgcaggactagctacagaacgggcatacacaggcaatgcctattcccaagggagaagcaaatgtgagttttaacaccctatgcaaccatacaaggcagaaggctcagagtgtgagggtccctgacccaaagaaaaaccgtttctgtgggttctaaaccgtatacaattttggggggtccccattgaagaattctacacaactggaatcttccatttgcttcagggcttggaaatgggattgagccagtggaagaactggaccccaaagcttcattaagtgctgggccttccggtaaattgccaanctgccccaccgaatctcccttgggtaaacccccttaaatgtgctagcgctgggccatttttggcccttaaaaaggtgccattttaagagagccccggggg

SEQ ID NO: 257537 - DNA, 801 bp, Homo Sapiens
attaaagtatataatgtaaatatggtattgaaagtataaaaattaaaggcttctgaaaaactcaagaagggtcaaaaggctatacaagcaagtagtatacagattgtttccttaaaagataaattttaatatacagaataaaatccaagatgattttattatttttcactttccccaaaacttgtgagcatgaatgcttctaaatctgaccaatgaaagtttacattttggtccaatacattatgagactaacttgtatgatcaagtccagcttgattatcataaatcatagaagttaacaatttactctgagaatctgttgctaatatagatgatggatttccaattttttcttagctaagaatttactcaactttagctcagaaccagattcaaaatatcttctttaattagctggtcatcattttaggcttaatctaggcaaattatttaatactcaattgaagatcatataaaacctccaaaataaataaaaagtacacaaaattattagcttttgtgtacaatacagaaaatacaggtcagttctggaccaaaataattgcattaaaatacaaaaggtgatagggaagaattaaaagatttgcagtgactgcttttggtggtcagctacaacaagccaacaaccctcagctattttggaaagtgaaggtgagtcttaatttgcagataatgaatgtcttcggtagtttaaaaaaatataaactctaaaaaagctcgtgaatcatatacaaaagcagctatttgagaccaaggttgaacaccagaaattgtgttagc

SEQ ID NO: 257538 - DNA, 647 bp, Homo Sapiens
  misc_feature (199)..(213): n is a, c, g, or t
ttttcaattagcccttcagagttcagagtaatctttctaaagtcccatttcctctgctaggatccaaatgtacaagaaactcctggggctcaacgtggtaacccatttctacaaaataaaaggggatatctttcaaaatagcatgttaaagcaaggttccctgcaccatcgccccatactcacacgccctacatctgcnnnnnnnnnnnnnnncaagtaaaggcattaaatttgtagactatgccatacatacctatatccccaaaaagtttcagagaaggaggaattaataatgagacaaattaaactaagaaatattcctccaaaatgaactaaagtaagaatgtaccccaaatcattcaaaagtatatatcaaacaaagaaatacaaagtaacttgtctttacccaaggaaaggaacctatttggatagaaatttactgcactatcctaaaagcaaagaaaataagactagcctgagtcccaactgaactacagagtttcaatttttatcttgggactgtgctcttgccctaatcccagttacagttagagacactctgggatgaagtgtggagttgtttatacacagtctgctacaatacccctcaaatcatctccaaaaattttaaatgaaatgcaaattat

SEQ ID NO: 257539 - DNA, 576 bp, Homo Sapiens
  misc_feature (23)..(23): n is a, c, g, or t
  misc_feature (75)..(75): n is a, c, g, or t
  misc_feature (107)..(107): n is a, c, g, or t
gctcaagccccacggtatctttnaagggtggattggtgccgatggacccataattgccaggagactgtctcatcncatccatattccaccgggttctggagattagnctccatggaaagtggggagggggcatttttcaaaatcctgccctacccacaggcaataactgcccatctcagctgtaggtggaatttttaccccagaaaagataggccctagaagcctcatttcttttctccatggaaaaggacagccctctgctgcagcgttcaacttgtgtgtttactgacagagtgaactacagaaatagcttttcttcctaaaggggattgttctacattttgaagttattttttaataaaattgaattatgttgtgtattgtgcttcttaataggaaatgcattattggactgtttttgtaacatcctgtttattgcaaatagctagtatcgttcaaaaactgtataaaatacttttgtacatattagcaatgtctaatttgtatacacttcagttaaatttccctaaaacttgaaaggggaccttgtagaaattaaaatatatacttagtcta

SEQ ID NO: 257540 - DNA, 462 bp, Homo Sapiens
  misc_feature (33)..(33): n is a, c, g, or t
  misc_feature (67)..(67): n is a, c, g, or t
  misc_feature (75)..(75): n is a, c, g, or t
  misc_feature (96)..(96): n is a, c, g, or t
  misc_feature (137)..(137): n is a, c, g, or t
  misc_feature (199)..(199): n is a, c, g, or t
gggggggccatttccaaattctgccctaccacnggccattaactgccccatctcagctgtaggtggnaatttttncccggaaaaggatagcccctngaagcctcatttcctttcctccatggaaaaggacagccctntgctgcagcgttcaacttgtgtgtttactgacagagtgaacctacagaaatagcttttcctnccctaaaggggattgttcctacattttgaagttattttttaataaaattgaattatgttgtgtattgtgcttcttaataggaaatgcattattggactgtttttgtaacatcctgtttattgcaaatagctagtatcgttcaaaaactgtataaaatacttttgtacatattagcaatgtctaatttgtatacacttcagttaaatttccctaaaacttgaaaggggaccttgtagaaattaaaatatatacttagtctaaaa

SEQ ID NO: 257541 - DNA, 2057 bp, Homo Sapiens
agatacttgcacggtttacagaaattcggtccctgggtcgtgtcaggaaactggaaaaaaggtcataagcatgaagcgcagttcagtttccagcggtggtgctggccgcctctccatgcaggagttaagatcccaggatgtaaataaacaaggcctctatacccctcaaaccaaagagaaaccaacctttggaaagttgagtataaacaaaccgacatctgaaagaaaagtctcgctatttggcaaaagaactagtggacatggatcccggaatagtcaacttggtatattttccagttctgagaaaatcaaggacccgagaccacttaatgacaaagcattcattcagcagtgtattcgacaactctgtgagtttcttacagaaaatggtaatgcacataatgtgtccatgaaatctctacaagctccctctgttaaagactttcctgaagatcttcacatttctttatggcttcctgtgcccctcatacgaacttcctgacacaaagtttgaagaagaggttccaagaatctttaaagaccttgggtatccttttgcactatccaaaagctccatgtacacagtgggggctcctcatacatggcctcacattgtggcagccttagtttggctaatagactgcatcaagatacatactgccatgaaagaaagctcacctttatttgatgatgggcagccttggggagaagaaactgaagatggaattatgcataataagttgtttttggactacaccataaaatgctatgagagttttatgagtggtgccgacagctttgatgagatgaatgcagagctgcagtcaaaactgaaggatttatttaatgtggatgcttttaagctggaatcattagaagcaaaaaacagagcattgaatgaacagattgcaagattggaacaagaaagagaaaaagaaccgaatcgtctagagtcgttgagaaaactgaaggcttccttacaaggagatgttcaaaagtatcaggcatacatgagcaatttggagtctcattcagccattcttgaccagaaattaaatggtctcaatgaggaaattgctagagtagaactagaatgtgaaacaataaaacaggagaacactcgactacagaatatcattgacaaccagaagtactcagttgcagacattgagcgaataaatcatgaaagaaatgaattgcagcagactattaataaattaaccaaggacctggaagctgaacaacagaagttgtggaatgaggagttaaaatatgccagaggcaaagaagcgattgaaacacaattagcagagtatcacaaattggctagaaaattaaaacttattcctaaaggtgctgagaattccaaaggttatgactttgaaattaagtttaatcccgaggctggtgccaactgccttgtcaaatacagggctcaagtttatgtacctcttaaggaactcctgaatgaaactgaagaagaaattaataaagccctaaataaaaaaatgggtttggaggatactttagaacaattgaatgcaatgataacagaaagcaagagaagtgtgagaactctgaaagaagaagttcaaaagctggatgatctttaccaacaaaaaattaaggaagcagaggaagaggatgaaaaatgtgccagtgagcttgagtccttggagaaacacaagcacctgctagaaagtactgttaaccaggggctcagtgaagctatgaatgaattagatgctgttcagcgggaataccaactagttgtgcaaaccacgactgaagaaagacgaaaagtgggaaataacttgcaacgtctgttagagatggttgctacacatgttgggtctgtagagaaacatcttgaggagcagattcctaaagttgatagagaatatgaagaatgcatgtcagaagatctctcggaaaatattaaagagattagagataagtatgagaagaaagctactctaattaagtcttctgaagaatgaagataaaatgttgatcatgtatatatatccatagtgaataaaattgtctcccccaaa

SEQ ID NO: 257542 - DNA, 1625 bp, Homo Sapiens
cgctgggctgcagggactgcggcgcctgagggagtcgctgacgggcacgctgactggaggctggcggacaggcgacagcgacctgcggcaggaccagaggagcgagagcagcaagaaccacacccagcagcaatgtcagcggaagtggaaacctcagagggggtagacgagtcagaaaaaaagaactctggggccctagaaaaggagaaccaaatgagaatggctgacctctcggagctcctgaaggaagggaccaaggaagcacacgaccgggcagaaaacacccagtttgtcaaggacttcttgaaaggcaacattaagaaggagctgtttaagctggccaccacggcactttacttcacatactcagccctcgaggaggaaatggagcgcaacaaggaccatccagcctttgcccctttgtacttccccatggagctgcaccggaaggaggcgctgaccaaggacatggagtatttctttggtgaaaactgggaggagcaggtgcagtgccccaaggctgcccagaagtacgtggagcggatccactacatagggcagaacgagccggagctactggtggcccatgcatacacccgctacatgggggatctctcggggggccaggtgctgaagaaggtggcccagcgagcactgaaactccccagcacaggggaagggacccagttctacctgtttgagaatgtggacaatgcccagcagttcaagcagctctaccgggccaggatgaacgccctggacctgaacatgaagaccaaagagaggatcgtggaggaggccaacaaggcttttgagtataacatgcagatattcaatgaactggaccaggccggctccacactggccagagagaccttggaggatgggttccctgtacacgatgggaaaggagacatgcgtaaatgccctttctacgctgctgaacaagacaaaggtgccctggagggcagcagctgtcccttccgaacagctatggctgtgctgaggaagcccagcctccagttcatcctggccgctggtgtggccctagctgctggactcttggcctggtactacatgtgaagcacccatcatgccacaccggtaccctcctcccgactgaccactggcctacccctttctccagccctgactaaactaccacctcaggtgacttttttaaataaaatgctgggtttaagaaaagcaaccaataaaagccagatgctagagcctctgcctgacagcatcctctctatgggccatattccgcactgggcacaggccgtcaccctgggagcagtcggcacagtgcagcaagcctggcccccgacccagctctactccaggcttccacacttctgggccctaggctgcttccggtagtccctgtttttgcagtacatgggtgactatctcccctgttggaggtgagtggcctgtaagtccaagctgtgcgagggggccttgctggatgctgctgtacaacttctgggcctctcttggaccctgggagtgagggtgggtgtgggtggaagcctcagaggccttgggagctcatccctctcacccagaatccctctaaccccttgggtgcggtttgctcagccccagcttatctcctc

SEQ ID NO: 257543 - DNA, 585 bp, Homo Sapiens
  misc_feature (42)..(42): n is a, c, g, or t
gctgtgttccaaacacattccaacatatggtatgatatttantgtgcaaaataaatccgtaagcaaggaattcttaacctatttttgcagataagaaacttgaggcttaaagttgttcaaggtcaaagtcacgatgtccatcatgctgtagctcaatgaatgagtctcacattgtttcatgttgttttatttctactttctcaatccatgtacaagatagatttacaaactactgttttatgttggttgtatgaatttcaatacatttactgttagaaataacaaaaggtcttagactgccagatgctgttcccatcaactctacttaattcataatatagctgaactctgtcataaatctaataacgatgtggacattagccagaagtatgatgtggctgaacctcaccactgaacacaaaatgagaattcacctcatcttttcatttgaatttatttctactaaaatatatgtattatttttcttgatttctaaccaggccccttctgaagaaaactggttaactctaaattgttactaaattttgaatcttcctgtatttagcaataaaagttactgctaat

SEQ ID NO: 257544 - DNA, 380 bp, Homo Sapiens
ttggaggaactttggatgctatgtgttccagaaggtataactaaagatgaaagagatttatgcaaaccacactgaactttatatggttaagaaaaacatctcttattttgccaagccatcaagatttagaaatttgaaaatcaatttggagatttgaggattaatgtggtatcacttcatagaccatcttatcttaactaatataaaggtatgaaacatttaaactaatacctgtaacagaggttattcaaaaatgggcttggttctttggtaataataaaaaacagagggctctaataaaagcaaaaacacatagataaaatagaggtggtcaggggtattccttgaataaaataaccaataaaacaaaagggccacag

SEQ ID NO: 257545 - DNA, 487 bp, Homo Sapiens
  misc_feature (33)..(33): n is a, c, g, or t
  misc_feature (35)..(35): n is a, c, g, or t
  misc_feature (60)..(60): n is a, c, g, or t
  misc_feature (64)..(65): n is a, c, g, or t
  misc_feature (69)..(69): n is a, c, g, or t
  misc_feature (71)..(71): n is a, c, g, or t
  misc_feature (82)..(82): n is a, c, g, or t
  misc_feature (86)..(86): n is a, c, g, or t
  misc_feature (91)..(92): n is a, c, g, or t
  misc_feature (96)..(96): n is a, c, g, or t
  misc_feature (118)..(118): n is a, c, g, or t
  misc_feature (139)..(139): n is a, c, g, or t
  misc_feature (145)..(145): n is a, c, g, or t
  misc_feature (153)..(216): n is a, c, g, or t
  misc_feature (322)..(371): n is a, c, g, or t
  misc_feature (378)..(378): n is a, c, g, or t
  misc_feature (387)..(387): n is a, c, g, or t
  misc_feature (438)..(438): n is a, c, g, or t
tgtttattagggtggtttgaggactggagaggngnaaaggggggtaattggaagatttgntaanngggntnaagcaattctnatgntgagnnttangagtaggtgggaatacaggggncttgttaggaaggatggagtngatttnatgatctnnnnnnnnnnnnnnnnnnnnnnnnnnnnnnnnnnnnnnnnnnnnnnnnnnnnnnnnnnnnnnnncactctcagaagaaatattactgaggttagcataagttttttgttttaaaaaataagatgtcctattacttaaaccaatcccaaaaggtattagcatgtataagannnnnnnnnnnnnnnnnnnnnnnnnnnnnnnnnnnnnnnnnnnnnnnnnnctgctgntattttggnaaactgaagaaattattaaagaaagaaccgttggcattattaaaatctagncaattttattactaattgctatggaactctaggggagtccctcatcata

SEQ ID NO: 257546 - DNA, 603 bp, Homo Sapiens
  misc_feature (53)..(53): n is a, c, g, or t
tactcaggttcatgcccagagatggttctcattttcaatctgtctctatctcnacctgatgcccagagattgttcatgcccagagatagttcactttctttaagtgtatctctagctctctctctctttatcatgtcctacttccagatgatacaaatttgcagctaaggctgagaaacgctgatctagatgagaatgtaccaagcagaaagattaagtgaattattaatgcccacaaagtcatttcaaatgtgtatttatttattcaattgatttgactgaaaactagttctcagcattctaacagattttcctctaaagatgtaagccattggctgactgacttgactgaaaactagttctcagcattttaacagattttccactaaagatgtagacagagtttgcattttgagacaaggacacagggtaacatttaatcaatctgattaacagcaagaaataaatgggtattacccactagattgtgatcctcattaaaaaaggacgaatgcctattttgaaagctttacaaacatatttgaatgattgaataaataaatacacatttgattttgtacatcccagattcagtacattgca

SEQ ID NO: 257547 - DNA, 1639 bp, Homo Sapiens
  misc_feature (693)..(726): n is a, c, g, or t
ggcacgagacaaattcagcaagcatctaaagttgagaaggtgttttttaccactgcagtaccagtagccagtagcccagggagctctgtccagcagattggcctcagtgttcctgtgatcatcatcaaacaagaagaggcatgtcagtgtcagtgtgcatgccgggactctgcaaaggagcgggcatccagcaggagaaagggctgctcctccccaccccctccagagcagagcccccaggctcctgatgggcccagcctgcagctcccagcgcagactttctcttcagcccctgttcccgggtcatcatcctctaccttgccctcctcctgtgagcaaagccgacaagcagagactccttcagaccctcagacagaaacattaagtgccatggatgtgtcagagtttctatccctccagagcctggacaccccgtccaatctgattcccattgaagcactactgcagggggaggaggagatgggcctcaccagcagcttctccaagtgaagggcccatgtgtgctcacctctgggaaaagcgggtgagcaggaggcatgaggtacaatgcctgccatcatgggtcagaaatttgaaggatgaagaaatctactgtttgaaatcctcacctttcagacgtattttctttattcacatcccaggagcatccattttaaggaactattctttggnnnnnnnnnnnnnnnnnnnnnnnnnnnnnnnnnngctaagttataagtgaactgtttggctgcactgtatgtcacttttgcttgttgtcatgtgaacttggaaactaaggttactcgtgtgcataaaaattctaaatgaaagggtgtggtttccatcaatctgatgctgcccatcgcttgcactggggtctttgtggatcgggcaggagttttcagtgtgttgggtgttgctccttcctatgtgtcttttgaatctgaggctgacatttgcttggaaggccagacccttgctccatcagagagggcagtggcaaaggccagtgaggcagctgtggagttggacagggttcaggtgagatggtgttgtcatttgtgcttagtgttggtggtgctcagggtggataacacgggtcgttctgcagcccgcttcagcacaaataggcagcttaaggcctggctcacaggctgtggggttgatctggctctgcagaggccctaggcagcttgttgactgctgtctgttgatgacgtgtgtgcaaagcaggctctagcaacatgatcactgtccttgccttcctggttctttctctcggttggttgccagggcttgcagatcgcagtgaattttccttggggaacatcgctgttttgtcctagagtgaacttgtggcttatggccagtgctgtttggtggtctgccttctttttaatggtattttcttcctcagagcagaagggctgcattttgcttatcagaagaaggtgcagatttaagggaattcatatgaggtggcatgtaattggcaggccaggtgtcctggttccaggttccagccaggctttgggttgccccctccatctctgcccccctctggattttgcatacagcctcatacagtgcaaacaaggatgtgacttgctcagcttagtcatgtgatttattttaa

SEQ ID NO: 257548 - DNA, 414 bp, Homo Sapiens
  misc_feature (66)..(179): n is a, c, g, or t
  misc_feature (247)..(366): n is a, c, g, or t
  misc_feature (389)..(389): n is a, c, g, or t
agacagggtttcactctgtcacccaggctgcccaggctgtggcacagtcacagttcactgcagcannnnnnnnnnnnnnnnnnnnnnnnnnnnnnnnnnnnnnnnnnnnnnnnnnnnnnnnnnnnnnnnnnnnnnnnnnnnnnnnnnnnnnnnnnnnnnnnnnnnnnnnnnnnnnnnnnattatgttgcccaggctaggaatcccaacattcaacataaagctgtatttataaaaacataatttgtnnnnnnnnnnnnnnnnnnnnnnnnnnnnnnnnnnnnnnnnnnnnnnnnnnnnnnnnnnnnnnnnnnnnnnnnnnnnnnnnnnnnnnnnnnnnnnnnnnnnnnnnnnnnnnnnnnnnnnnnggtctttgaactgctgacctcgntgatctgcccatctcagcctcccaa

SEQ ID NO: 257549 - DNA, 625 bp, Homo Sapiens
gaaatatctttgactccttaaaggaaaaattccatacccctagttagccctggaaagtaaatgagcgattttgataagcaaaaaagacaaaaagtagctttaaacaaatagctaaagcagttagcatcacaagatgttttgttccctatagaaattaaagataacattttaacctctcttcctgagttggtttacagaaatccaaactcccaccaaacggatcccattggcacatagaactcagataaggggcaattgaggactgaactccgatcaccattcttcgttctaaatttcttcccgagggaggcagttaaacccatgagctaaagctaacattcttttctgctgatcccaaattttagacaaagctttgcttcttaaccaatcacaattcagaaagtctttgaatctacctatgacctagaggccctgcttcaagatgtcccacatttttagtcaaaccaatgtatagcctcaatgtattgatttatgactttttctgtaacctctgcctccccatctttataaactcctacctttaaaccatctcagagttcaggtcttaaacatgagctgcctgaatcttcttgctcagtaccctacaataaagaccacaagttct

SEQ ID NO: 257550 - DNA, 618 bp, Homo Sapiens
  misc_feature (351)..(540): n is a, c, g, or t
aaaaagcatagggaatcctctaaccagtatatatgtatacagtatccagtataagaatgaaaatgtaatgtagttattaaaacattatgtgtgtgcttccacaagcctgtcctcctttctaccttccagaagtaacttctctcttgaatttggtgttcgtcattctggtgcatgcttttacagttttacaaaatacacacgcattcccaaacataaataatactgtttcacaacataaattgtattatggtacatgttttaaaacacgatatacattgtatctgttgcaagtcaggttccaagggaaatggaactcagaagattaaggctgggggccaccagtgcctcatnnnnnnnnnnnnnnnnnnnnnnnnnnnnnnnnnnnnnnnnnnnnnnnnnnnnnnnnnnnnnnnnnnnnnnnnnnnnnnnnnnnnnnnnnnnnnnnnnnnnnnnnnnnnnnnnnnnnnnnnnnnnnnnnnnnnnnnnnnnnnnnnnnnnnnnnnnnnnnnnnnnnnnnnnnnnnnnnnnnnnnnnnnnnnnagtgcaggatacagttaagctagttcaagtgagctgcctaaatattcgtggtcagtaccctacaatgaatacctcatt

SEQ ID NO: 257551 - DNA, 482 bp, Homo Sapiens
gagtcagtctttgagtcactgaaagtgatacaagcagacagcagctggcttactgtgtgatgagagaggaaggtcccagcaccaccacgatggcatccctgccctcgaaaatggagactgagtagagccggtctagctccaatgatccgattataataactgcagggctgaaaacacgagttggtacactacacagcaaagcaaaccaccaaatccagagtgtgagaccttctacatggaaaatgatgcatttctccaataaagcagcaacaaagaaaaaaacagagaggagtcagggaccgtctcagagggagagagattgaagaggtagatggtcaaatgcagttggtgggctttgggcgctgctaagaaaccaactgcagaaaggcacctctgagacaatcagggaaatttgaacaggggctggtatcagattatatatttataattaaaatgttcatttaggaattaaagttgataat

SEQ ID NO: 257552 - DNA, 591 bp, Homo Sapiens
agaatatttaatggcatggaatgatatgtacactgtaggttcaatatgttttcaaaacatacctagcacctatggctgcctgtgcctagtaaatagaaaaggtataacagaataatttttacaatttacaaagtttaatacaattgagaaaggtttctataaacattgttaaaatatttcagagggcaaatgcttactttgcatagcaatgcttcagttacctggaatgccctcccttctttcttccaagcaattttatgcagcacgaagctcagtggctctactccaagtgccaacaaggtgaacaacccagttcctgctctcatggaactcacattctggtggaatttgtttttgcaacatacttgctgacaatatcaaattaataagccattagtattgaaaagtaatttacacactctccagtctggtccttattttgatatatgtcttcctatgagatggatgcaaactcacagcaaaaactatgtgtatacatacagccacatgccgcatgatgttcagtcaaggatggaccacgtatatggcagtggttccacaatactgtatttttgctacgccttttctatg

SEQ ID NO: 257553 - DNA, 469 bp, Homo Sapiens
  misc_feature (161)..(176): n is a, c, g, or t
gaaagacagaagacaaacagcataaagatgcccagatgccctaaagataaatacatttcaaagattctcattaaaatgaatctgtagtatttttttcctgcaagcaaaatacctttctttaaataaaattaaaaaaatcagtattctgaattgcaaatgcnnnnnnnnnnnnnnnngcagaaaatctgccatgattatttttttaatgaataaggattttccacaaaacaggcttgctctacatgctagatttttaaacagttcagtgacacaatatgctaactacatacacaacagataatatagtaagaaaacactcaacctgatgaaaagttaaaatcttcattaatacactgaaaattgacataactcatgcctttaaaatcaaaaatacaaaaattaaatgttttcctaaaaagatttccttattttaaggattcatttgaaaatgaagctgcatgtaatttcc

SEQ ID NO: 257554 - DNA, 593 bp, Homo Sapiens
  misc_feature (64)..(64): n is a, c, g, or t
tccagaaagattttacttctgtgcctccctgcatgccctcctttcccaccttggctactcaatntcatctgtaagtgccacttagaaggcttaatctaacaccctgaacctggaacataaccttaaatgctccttatcatcacccctttaattgctacttgtttaaagttgttagactttaagttccatcaaagtagaaacttgatctgccttgctcacctctcaatcacttccccttcccaacattcagtgactggaacagaggagatgcatattagtatttgctgaattaaaaataaattttgaaatacaaattagttgccgttttccaattatcaaattgtcaaagtgttctttattatgataggtaacattggtagagatctttcattcactgatgatgaaagtataaatatttcaatggcaattaagtagtaagcataaaatctttaaaaatgtatatagtcttaagacttatgtatatagtcttaagactataaagtcttaagttattctttttagaataacaagaaaaaaattgacaagagataaaacaaagaaatattcaccacagctttgttttagtaaagtcc

SEQ ID NO: 257555 - DNA, 430 bp, Homo Sapiens
  misc_feature (245)..(257): n is a, c, g, or t
aattagatttcatttcaaaagtgtttgctttttagtagtaaaactacttttcagtaaaaaaaagtaaaggagctgtacctttacttttgtgcatttttcctatttttatatgtcaataaagtttaattaatgactcttacctatgcatatatatacacatggctaaaataagttagtattaaaaatatgaaagcctgccatactttggatggtgaacatctgttctgtatcattactgaaaatgnnnnnnnnnnnnnctatgtttaaaattccacttatagatcttgaaattgaaatgtagaagtatgtccagttgatgataagtatcattgtgaagaattgctaacaaggctatagaccacttattttggggggcaggtggcaagcatgtaatcatagggttagactgaaaattattgatgaaaatgta

SEQ ID NO: 257556 - DNA, 481 bp, Homo Sapiens
  misc_feature (285)..(285): n is a, c, g, or t
  misc_feature (294)..(294): n is a, c, g, or t
  misc_feature (331)..(331): n is a, c, g, or t
caagaatagccaaacacacaggtttgctgagcagagccatacggccagaagataagcgggggtcccaagcccaaatgggggatagtccatcctcagagctggccttcctccacccgttctcctaccgggccgggatgcagcgctgcccctggcccctctgcagctcagcagggagccccatgcccttccacgtgtggagagcagcctgcgtgtcactcgatgccgccagatcttacagaagactccagaggacaactaacgtcgcctgcgctgactattggcttnctgcatgcngagagtagggaggggggagctttgggtgaaatccaanagggcttcactcccatcctgaaccccataggaccaacaccctccttgtcctgggtatggaaggattaccctgtttggggttcgggattacaatctcttgcccccaaggatctgaatccaagggtgggttagcaccccaaggttgtggggc

SEQ ID NO: 257557 - DNA, 532 bp, Homo Sapiens
  misc_feature (72)..(179): n is a, c, g, or t
  misc_feature (429)..(429): n is a, c, g, or t
  misc_feature (475)..(475): n is a, c, g, or t
  misc_feature (483)..(483): n is a, c, g, or t
gctcaggtaattctgagcctcccgagtagctgggattataggcgcacaccaccacacatggctaatttttgnnnnnnnnnnnnnnnnnnnnnnnnnnnnnnnnnnnnnnnnnnnnnnnnnnnnnnnnnnnnnnnnnnnnnnnnnnnnnnnnnnnnnnnnnnnnnnnnnnnnnnnnnnnngcgtgacaacccgcgcctggaccctcagttttttcatcagcctaaagaagctttatttgtttaccatcctactgaacatccgctgtgtgcctggcacctttctaggttccgggaacataacccaaagaagacagataaggttacgactctcaggggttcacgttctcatgcgtgtaggtggggagtgggagacattaacaaggaaacaagtaaatgaacccaataatttccagattgtgggcagaggctntgaaggaaaaccgtgcaggctgggggcagcagggtggggctttctncagggggntccaggggttccacaggggccttcccctagagggagacttttttgagct

SEQ ID NO: 257558 - DNA, 519 bp, Homo Sapiens
cattatatgtaaatataagtgaaaagtaaaatgtttaacattttctcgtttaaaagccattcctagggagtagtgactgtgttaatcaaatatcagggaaacttaaactgggaaaagaagtcctagctactttggaaggtcattgggatagtgaagtttttattactgataaaaagactgataattcagaggttttctggaatccaacacctgacattaagcaatggagattaataaggcacactgtaaaatttgaagaacagggagattttgaatcagagaagtaagtatactgttttacagctaacttcatgaggatcagagagtagtttttcaattccttaatgatatggtcattttgtcaccttctgtcatatcttaattcagcaaaatagtttatcatttgtggaagtgacagtattctgtttttgtgtatatgaatgtcaaatataatataaatcgtcttgcttttctgtagctcaaaactactcatttttttctttctcaattgttccagca

SEQ ID NO: 257559 - DNA, 1467 bp, Homo Sapiens
cgcggctcggactccagcatggcgaccgcggtgcgcgctgtgggctgcctccccgtgctgtgtagcgggacggcaggtcatttattggggaggcagtgttccctaaacaccttaccagcagcttccattttggcatggaagagtgttctcggcaatggccatttgtcatcactgggaaccagagacacccatccctacgccagcttgagccgtgcactgcagacacaatgctgtatttcttctcccagtcacctgatgagccagcagtatagaccatatagtttcttcactaaattgactgcagatgagctgtggaaaggcgctttagcagagactggtgctggagcaaaaaaaggaagaggcaaaagaactaaaaagaagaaaagaaaggatctgaacaggggtcagatcattggtgaagggcgttatggttttctatggcccggactgaatgtccctcttatgaaaaatggagcagtgcagaccattgcccaaagaagcaaggaagagcaggagaaggtggaggcagacatgatccagcagagagaagagtgggaccgaaagaagaagatgaaggttaaacgggagcgaggatggagtggaaactcatggggaggcatcagtcttggcccccctgaccctggtccctgtggagaaacatatgaggattttgataccaggatacttgaggtaagaaacgttttcactatgactgcgaaagagggaagaaagaaatcgatccgtgtcttggtggctgtggggaacggaaaaggagctgcaggtttttctattgggaaagctactgatcggatggatgctttcaggaaagcaaagaacagagcagttcaccatttgcattatatagaacgatatgaagaccatacaatattccatgatatttcattaagatttaaaaggacgcatatcaagatgaagaaacaacccaaaggttacggcctccgctgccacagggccatcatcaccatctgccggctcattggcatcaaagacatgtatgccaaggtctctgggtccattaatatgctcagcctcacccagggcctcttccgtgggctctccagacaggaaacccatcaacagctggctgataagaagggcctccatgttgtggaaatccgggaggaatgtggccctctgcccattgtggttgcgtccccccgggggcccttgaggaaggatccagagccagaagatgaggttccagacgtcaaactggactgggaagatgtgaagactgcacagggaatgaagcgctctgtgtggtctaatttgaagagagccgccacgtaacctctctggccttgtgcagccagttcctgtgctgccctgcacctaggagagactcagcccctcacagcttgggatgttaccttgccttttgtttgttttgagggaagtttaatctttaaactctttggaaataaataattatagctttcaaaaaaa

SEQ ID NO: 257560 - DNA, 711 bp, Homo Sapiens
gtgcagtcttcacatcttcccagtccagtttgacgtctggaacctcatcttctggctctggatccttcctcaagggcccccggggggacgcaaccacaatgggcagagggccacattcctcccggatttccacaacatggaggcccttcttatcagccagctgttgatgggtttcctgtctggagagcccacggaagaggccctgggtgaggctgagcatattaatggacccagagaccttggcatacatgtctttgatgccaatgagccggcagatggtgatgatggccctgtggcagcggaggccgtaacctttgggttgtttcttcatcttgatatgcgtccttttaaatcttaatgaaatatcatggaatattgtatggtcttcatatcgttctatataatgcaaatggtgaactgctctgttctttgctttcctgaaagcatccatccgatcagtagctttcccaatagaaaaacctcaagtatcctggtatcaaaatcctcatatgtttctgtagggagaaaagaaacagggatacagatgaaatgtgtgtacacaattaacatgaaagcattttcaacacaggcaccatcacagacctttcggggagaaagaatctcagatcttttggtcccactctcaaggccatgccccagtcacccctcatcactagagactgctccaccagttaagttcataaactcagt

SEQ ID NO: 257561 - DNA, 646 bp, Homo Sapiens
catgtaagcaacatcaaaaactattttttaaagcaggttttgtacaggttatttcaacaagaattcaatttttcttgataaaaaaatgaaaatttaaaatgccacggaaatttttgtgttttcattatatcctttccatatcctccaatgcaaatgttataaatcagcctataagtggaggtctattcttaaactaacatctcatttgtttgagctaaaagccaaatactttaactcatttacccatgaaaatttttgtttcacatgtaaagtaaaacaaacacaggggcaaacctttataacatttattatagaggagaaagagagtaggatagttaagaatatatttcttctgagagagatttcatctgtgtagtttttagaccagtcaactgctgcataaagtttccaaatatgccagtgcttctcaaagtccccagtctcagtgaaggcaacataggttcacatatggggcagtcccatggtcagtccctgatttggccaggaagtggcataatgggagctagttctccattaactagttctaacttcaccttttatcacaactgagcccccacgacccaaagaacagcctggatgagaagtatgtgatagtttcttcttaaagaatatattccccttagac

SEQ ID NO: 257562 - DNA, 374 bp, Homo Sapiens
ctatgcaaaagtcagatgcttctatccattgctttcttgtgattagggcggcccctgcagcatatctcacacaagacacagtgttcataacaaaaaaaggttgtgccgggcaccggtggctcacacctgtaatcacagccctttggaggctaagttgggtgtatcacttaaggtcaggagtccaagaccattctggccacaatggtaaaaccccatctctcctaaaaatccgaaaattacctgggtgtaatggcgcatgcctgtaatcccagctccttgggaggctaagcaagaaaaatcccttaaacccggaaaataaaggttccagtaagttaagataagtgtaaatgactcccgcttgggtgccagaagta

SEQ ID NO: 257563 - DNA, 1198 bp, Homo Sapiens
  misc_feature (609)..(697): n is a, c, g, or t
cagccacctacaagccaagaggagaagcctcacaatcaaactctcgctgctggcgagagtcttggactctgtcttggacttccagcctccagactgtgagaaacaaatttctgttgtttcagcttctcagtctctggtgttttgttattgcagcctgagaacacagctgtacgattatttgtcaaacagaaaacactgatacttaacaatgctaatgcaattatttatttgcttttcagtctctacaaaacgttctaaaacactaatctaaatattaacagtaaaatatttgcataactaatggaaactaagaaatcatatgaccaatatttcacttattggtaatcttactctactgatttccccccagactgtgatttttgaacttccttgcctttctcctgtctttctgtgtttattcatggaattccagttatctgggcttgaaattgcaggctctcctaacttaagcaaaatctgacagatcagcaaaatgagataaatgtttcttttttctttctgactgcattaaatcagatacaactcagcattaaaaagctatctttgtaaatgttgttactaataaattagtcttataagatccctggnnnnnnnnnnnnnnnnnnnnnnnnnnnnnnnnnnnnnnnnnnnnnnnnnnnnnnnnnnnnnnnnnnnnnnnnnnnnnnnnnnnnnnnnnccattcctttgaacaccgaacccaactaagtaaatgaacatgggccatacctgtttcctaggaaaccccgggccattgactaagggcttggaatccctcaccaaataaaaaacccccccggggggcaaccgtggggggcctggaaccaaacccaaaaagagagttcttgaaggtcatctcctgggagtcgtccgccccggaattccaaggagagcctccgagctccaatttacccccccgacccatgccacctcatccgcaagcaactgtgtggtaccttcactacccccttaactacccgccccccgggagagccccctgccacgctcttcatgaaaccaaaccctcgaatgcgcccttgccgggatctcccctccctccttgttccaacccttcgcgggcacccacatattttgtgccccctgtgttagtaaaaaaacgcgggggcctgcacgaaaagatttggccaacatattagggaaaatgagtctataacacccc

SEQ ID NO: 257564 - DNA, 352 bp, Homo Sapiens
  misc_feature (50)..(50): n is a, c, g, or t
  misc_feature (67)..(67): n is a, c, g, or t
  misc_feature (74)..(74): n is a, c, g, or t
  misc_feature (117)..(117): n is a, c, g, or t
  misc_feature (161)..(161): n is a, c, g, or t
ttcctgactgcattaaatcagatacaactcagcatttaaaaagcctaacnttgtaaatgttgttacnaataaantagtcctataagaaccctggactttggagttgttgcaatgtcnttgagagtaaatctttaaaagtctaatttcgactggttgtatcnctttatgatttattgccccactaacaacatttgaaacaatataatattttaaaatgtataaataattatgaatttttgtttagaacaaagaggattactgatatttgtttccctatgaatggcaaaaggtttagcttactactgcatttctgttttaaataaaaagttgagagtttgtgtctcattaaact

SEQ ID NO: 257565 - DNA, 558 bp, Homo Sapiens
  misc_feature (246)..(246): n is a, c, g, or t
tgcaagtattaggacagtatggaacattcccaccctgcagacagttctgtggtgcagtgtccatctagatgattctacaaatggaagatttaggggaagaggacaagtaagtagtgaggtgtacctaattgcttctataagttttagtacaaagaacccttcctttaaaatattgatatttggtgaaacattcagatatcacgttttaaagtgatttcatggacactaatcaacagagcaacaacnatagatatatcattgactacaaggatggatcaatacttgttctacctgtttcataacttagaggattatagggcactctataacacagcaccttaagtatcagaaaaataaaggctgcaggtgtttgaatgaattgttggatgttctgtttttataaacatgtggtcttctcatatttacaccccatttggtttgggatgaatctccattctgagtcccttaaatgttagggaagcttaagatgagaccctttggattctacacaccaatctaatttcggacccaatttgaagctgaaaaaggcttactatg

SEQ ID NO: 257566 - DNA, 357 bp, Homo Sapiens
tgagccaccgcgcccagccccaaatttttaacttatgaaagtttttcataaaaccattttagcaaaaatactagcccagaaacagcatctctcttcacctcttataagagaccaaagagtcattcttactatctaaggtaaatacatctcaatttaagagatctattacttgatctaaaagaccatttgcttttgaatcatttagtagtatgtactgactattactggacttagctaagttgtaacacataccaataagtggctggatttcacatcacccctgccacaataaatgacaacttttcatcaatttaaaaacttgaaatttcaagtcaaaataaagaaatgattcttttt

SEQ ID NO: 257567 - DNA, 592 bp, Homo Sapiens
  misc_feature (32)..(32): n is a, c, g, or t
  misc_feature (330)..(330): n is a, c, g, or t
  misc_feature (389)..(439): n is a, c, g, or t
  misc_feature (504)..(504): n is a, c, g, or t
  misc_feature (552)..(552): n is a, c, g, or t
  misc_feature (565)..(565): n is a, c, g, or t
tcatcataactcagattctcaatgaagatganccagggttctattatgtctaaaaaggaatttttgtattataagggaggggtaggcagagaagaaaagagaagcagttggataagttagtactacgatcaaatttccaactcaagatccacagacttcctctcttcccttaaataagccaataaagtttccacatagcccctttgctaatgcatttaaatagtgtttcaaaaataaagtcatttatgagtaaatgcagaatcattcaaatagcacttagcactgtgcagtctttagagttaaacagaaaagctggcccaggcacaaggngtacgcctataatctcagcacttttgggaggacaaggcaagaagacttcttgagcctannnnnnnnnnnnnnnnnnnnnnnnnnnnnnnnnnnnnnnnnnnnnnnnnnnattagctgggcatggtggtacatgcctttggcccagctatatgggagactgaggcaggaggagtntttgagcccaggaggttgaggcttgcagtgagctgtgttggtgccacntgtagtacagccntgtgtaacagagcaagacccgtttctc

SEQ ID NO: 257568 - DNA, 306 bp, Homo Sapiens
aagtaaatatagttcaaaattgaaaacttcaattctaaggcttttaccaaaactgacctcattaatttttagttatacatcaaaaatttttatacccataaagaccaacacatcttaaccccaatgaagttctaaatgatgtgagccccttttacgttaacgcatttttgaaagatgaggctttatcaatactaagtatattcagaggaatgtgtacatgctgtttcataatgcaaattttaaaaataactttaaacaatggaaatactgtaacaacaaatgtacagttttccaaagtgactgcat

SEQ ID NO: 257569 - DNA, 874 bp, Homo Sapiens
  misc_feature (427)..(427): n is a, c, g, or t
cttgccctggatcgaaggctccaaaccatcctaaggacagtggaggggtgcatagtggcccatggacagcagagtgtcatagtcgacggccccagtggaacagtcggccccagactctggcccaggctaacttgacaagctaagggctggcagagtcccagtttcagaaaatacccctggagccagagcagtcgactcgagtgccgaccctgcgtcctcactcccacctgttactgctgggagtcaagtcagctaggaaggaagcaggacattttctcaaacagcaagtggggcccatggaactgaatctttactccttggtgcaccgcttctgtcgtgcgttgccttgctccgtttttcccaaaaagcactggcttcatcaaggccaccgacgatctcctgagtgcactgggaaatctgggtatanggctcagttggcagccttgatcccaggagagtactaatggtaacaagtcaaataaaaggacatcaagtggatacctgacttctcaggatccttattctagctacaagtcaaagataactcctggtccagacaaaacacctggcctatcacaagctgactaaaaatctgcactttgggccagcgcaggcaacagtaactctgacaggttcaaattagacctcacgactttctactcatattctagtcactggacccatctgaatcagtaatccctactgcccggtcctggagtaacttcttagagatattataacaagtggcaaaaataaaagagggatttgctaagaatatcagaaaaggagtgttccaatttgaagagtattacaattgaaataacatcaaatatgtcacactaagcagccagtaacagaataaataattacaacg

SEQ ID NO: 257570 - DNA, 580 bp, Homo Sapiens
  misc_feature (465)..(465): n is a, c, g, or t
  misc_feature (516)..(516): n is a, c, g, or t
  misc_feature (521)..(521): n is a, c, g, or t
  misc_feature (559)..(559): n is a, c, g, or t
tttcggcacagaaatatggaccggcaccattatgagatgttcaccaagttcggggatgatgggttccttattcaccttgacaacgccagagggttcggacgacactcccatgatgaaatctccatcctctcgcctctctcccagtgctgcatgataaaaaagaaaacacttttgcacctgcagctgctggcccaagctgactacagactcagcgatgtgatgcgagaatcactgctggaagaccagctcagccctgtcctcactgaaccccacctccttgccctggatcgaaggctccaaaccatcctaaggacagtggaggggtgcatagtggcccatggacagcagagtgttcatagttcgacgggcccagtgggaacagttcgggccccagactttgggccagggttaacttgaacaaggttaaggggttgggcagagttccagttttcaggaaaataacgnctggggacccagaggcagttcgaattcgagttgccgacctggcgttccttnatttnccactgtttattgttggggattcaagttcagttagggngggaaggcaggaatttttttt

SEQ ID NO: 257571 - DNA, 591 bp, Homo Sapiens
  misc_feature (13)..(13): n is a, c, g, or t
  misc_feature (37)..(37): n is a, c, g, or t
gtgaaatgatacnatttccaaactttagctaaaatanctaagaaaaatacagagaagactcaaaatcagaaatgagaggagacacgacaactgataacatacaagtacaaaggatcataagagctacattcctttgtgttacattgttttctctttacattctgattgtctctcgcttgctcgctgtcttcttttaaagttttgtttcagaagaactaaaaaaatctaggtttaaaatgtacagatatcctttgtaacttagcattaggcaaaattgtcttagagaactcaattacttttcaagtaaaaaatgataaattgaatttcatcaaaattaaagattaactcagtttgttaaacattaggaaaacaggcaaaccatgactaggagaaaaatatttgcaaatattggcctgcatctgtcaaaggatacataggatacagaaacaactgctataagccagcaataaaaagacagaactgggaagggatggccagggaccaaaggagaagaaacgaaacacaggatagaccaccttcagtgtccttggtcaggaattcccattccttaatgttgtgggctaaatagtg

SEQ ID NO: 257572 - DNA, 462 bp, Homo Sapiens
  misc_feature (370)..(380): n is a, c, g, or t
tggagtataatatggaagtgtatagagtgaaatgggttgcttttcttccatcttttttccccctttacatttgcttttgcttgagtggttggtccctgaagaggcagtaactatgggcatacatatgtgtatgtatgtccctgcaacatttaaagtgtgtaaatgagaagaccttgcctaaacctgaataagagtttacatgattaacctaactaaaccctctctttccttatgtttccacaggagtctccccaggacagtgctatcacccgggatattaaccgaacattcccagcccatgactactttaaggacacaggaggagatggacaagattccttatataaaatatgcaaggtatttcatgtcnnnnnnnnnnnggactcaattctgagtggtggttctactttgaaattacataagaaacaactacaaagtgtaatttgtatttgatgttcaaga

SEQ ID NO: 257573 - DNA, 602 bp, Homo Sapiens
aaatgtaagctctatgagggcaaggactcttgtcttgtttactgctgtgttcttctagcataaacacacacacccccttagaacaattctggatacacaatagaaattcagcaaatgtttgggtgaatgaaatggccctaaaatactattttaaaacttgttttctttccaggttatattttcttatttaatgtgtgtaaaaatgtggtggtatgaagttttttggttttaaaaccttcaatagtgagtttttgtgggcacattgtattcataagagctgttaattctagccataactttaaataaatgtattggttgcttgtgtacatgactatctgtaagtaaaatgaaggtctcttagaagttaatacagtttaaccttaaaatctgttctaaaattatttgacatttttctccctgaataagaatgagaaggaggaagcatagtgtagaaaagtagcgtgcagggtagagtggtactggattgtaattatgtaagttaaggaaataacatgctttgcctattccttgtcaccctttttttctgccttatagacaagggaaaaaaaagattgaataaaagagttttaatttttaaaaaa

SEQ ID NO: 257574 - DNA, 713 bp, Homo Sapiens
aaaatcatgaaggaaaaatatcacttgtgaaaatcgtggaagttagctttatgaagacacagtggcctctgtggggacatgggatatgcagaaagagatggctagtacagttgttctgtcgtctgcagttcagtcagggacaaattgagagaggaaagtttaagcagggtacattagaaattgataaccagcccagcattcttagaacagatgggtttagagaacacgagttgtagttccttggcagaatgccatggtgaatataagaaactgtgaaatgtgttgaaattgagcttgagcagaaaatgagaatactaaaaatgtgaagttcagagggtatgcattagatcatttctaatggtccccaaataatgatcattgcctgcctgactatataagactcctgttgggagcttaagaatagattcctgagcttagccctttggagactctggcatgctgtgtctaggagggagtctgtaaaacaatttttaatgaagaaatttaaaaattacacaaaactagaatagtgcattggtactcaacatccagatctgacacttatcactatcttaccatgtttgcttcatttgtcatttttttgtttgcttaagtatcttaaaatcccatacattgtgttatttcactgctgtgaacactttgggtagataccacgatatcacacctaacagaggcagcagcagtccttcggc

SEQ ID NO: 257575 - DNA, 400 bp, Homo Sapiens
  misc_feature (83)..(265): n is a, c, g, or t
ctgacacggacacccactcgggagcgcaggctcacgacctttgttacatgctcacttcaccgcacccttcgactcgcaggttnnnnnnnnnnnnnnnnnnnnnnnnnnnnnnnnnnnnnnnnnnnnnnnnnnnnnnnnnnnnnnnnnnnnnnnnnnnnnnnnnnnnnnnnnnnnnnnnnnnnnnnnnnnnnnnnnnnnnnnnnnnnnnnnnnnnnnnnnnnnnnnnnnnnnnnnnnnnnnnnnnnnnnnnnnnnnnnnnnnnnnntgagctgccacgcccagcctctgtcctgcttttaagcaaacagagagaaagcagagaactctcctgcatcttaattgtctttagctcaaccatcttttatattttggagagttatatcctggtctctcacaccat

SEQ ID NO: 257576 - DNA, 148 bp, Homo Sapiens
caagaataccaaagagacattaagaaaggggaaaggatttctataatagaaaaaatcaaacagacctttacttgaaaaccagctgtcccctttactaactatatgatgttactagaagtctctgaggctaggcgttggtggctcacac

SEQ ID NO: 257577 - DNA, 637 bp, Homo Sapiens
cattattaggtttggggaataatgtaactaatttaaaacataaaattccctgccttggggataaaagcatcggattaatcatttgaaagcggggcgcacttcctattgctgcgtggcctcccggtaaaatggagcctgtcgctccaggagcacgagacctttacggagttcggtgccgtcaaggcccacttgtccacagccaccggagcatgttgggaacaccgggagccgctggaacgtgtctggaacaccaggctcttccattcgggacactgagtcataaatcatcccatgtgtctcacgcaagaattcttccctgcagaaatttcatgaaacttagtctttgctaagggtaaagaggatttaattctctttgttctcagtggtgtgcaggcttaatgctcatgggtgttgactggtggccggcacatcagtggctcgtgggtgttgacttgtggctcctggcattgctttgcattaaaggatagccggcctctttacaccatgacttagaaaattccagccaggcacagtggcttacacctgtaatctcagtgctatgggaggattgcgtgaggccagaagtttgagttcagcctgggcaacatagcaagaccctatctctaccaaacaaaaa

SEQ ID NO: 257578 - DNA, 316 bp, Homo Sapiens
tggcaattgcaagcagtaagatgtgctgtacctgacaacttcaagtaaatatagaagctctgacatatttgaagaaagctgttgtctaaaaagtcatttgtcaatcacttacacaagaagtagttattgaactcctatttgccaagccttgctagtcattaacagaaatacaaaaaacaaaacacagcaatagcaatagtattgtaatagacaacatctatcccctttaaggatatagtctggttggggaaatgacaatatggagacctacagcaattagcaagcattataaaataatgtaaagtcctaattatat

SEQ ID NO: 257579 - DNA, 1001 bp, Homo Sapiens
aggctggaccggtccggattcccgggatcgcggcgcggacggtagttgctgtggtttccgttctgagctcgcagcttaggagctgaagatcgcggacttagcgttgccgcgtccgagtccggccatcagtggctgcagatccggaggccaggagctcaaccacccttcttcggaacagggccggcctgctgctgtgccctcgacgctcggtgcctgtatctactccggggcctaggtcggctccgggggcggcttaggagaaggccgccggcgagatgttcaaaaacacgttccagagcggcttcctctccatcctctacagcatcggcagcaagcctctgcaaatctgggacaaaaaggtacggaatggccacatcaaaagaatcactgataatgacatccagtccctggtgctagagattgaagggacaaatgtaagcaccacatatatcacatgccctgcagaccccaagaagacgctgggaattaaacttcctttccttgtcatgattatcaaaaacctgaagaagtattttaccttcgaagtgcaggtactagatgacaagaatgtgcgtcgtcgctttcgggcaagtaactaccagagcaccacccgggtcaaacccttcatctgcaccatgcccatgcggctggatgacggctggaaccagattcagttcaacttgctagacttcacacggcgagcatacggcaccaattacatcgagaccctcagagtgcagatccatgcaaattgtcgcatccgacgggtttacttctcagacagactctactcagaagatgagctgccggcagagttcaaactgtatctcccagttcagaaccagggcaaagcaataactgggaatggtgactccagggatagaccccctgaatgggactcttccttttaaaaggaaactatgtggaggacgatgcaaaaactatttaatcctaatttgccccggcgaagatccggtatttaaacttgggggttgcctggc

SEQ ID NO: 257580 - DNA, 579 bp, Homo Sapiens
ggaattacatcgagaccctcagagtgcagatccatgcaaattgtcgcatccgacgggtttacttctcagacagactctactcagaagatgagctgccggcagagttcaaactgtatctcccagttcagaacaaggcaaagcaataactggaattgtgactcgagggatagacccctggatgtgactcttctttttaaaaggaaactatgtggaggacgatgcaaaaacatatttatcttagtttgctctgctgtagttctgttatttatacttggtgttgcttgtcatggacaccggtgaacatgcccgtaactctgtgactgcattgtaagtgcagtgggggtaagcagtcctgtgagtggcgcatgaacgctggagcttattccgccgcctgccccagtgtggggggagatacctttaccatgaacttacagaattaaagatggcccataaggaattccagaccaatatttcttcctgcggtttattctatgttttatatattatctaaatatatgtatatgctgtgtcatactcataatctggaaatgaataaagtgatatattcctggtttggaa

SEQ ID NO: 257581 - DNA, 595 bp, Homo Sapiens
tggtgtacatatatatgcctatatagacgtacatagatagtcatctcaaaaacatactacaaagagaaaggcccctgaaaccagcaagagaaaagcaaataacattatatacttccaatttgtttgttaacagacttctgatcagaaattgtacataccaggagggagtgaagtgacataaagtgctaaaggaaaaaagttaaccaacaatactgtacccacaaaagatttccttgaaagattgagagataacatcgtttacaaaaagaaaaggaaacatggtgagaattcatcactagactcgtcattcaagaaatgctaagttctttatcctgaagaaaattatgctaacgtccaaagagaaaaagtttgacattacaaaactcagtggccaatgcaaatacataggcaaatgcagaataaattaatacgcttgttttgtgtaagcctcttatatccataatacgaggagtaagatgcaagtctatgaaaagtaactatagcagcatcataaaatatagccaatttaaaaatagacatgagaaagtcaaaatgtgggggaattgaattaaagcataaaattgaaaaaaaggaa

SEQ ID NO: 257582 - DNA, 191 bp, Homo Sapiens
ttcaggggattctttgggaagcaaagatctccaaaattcagtctccgttatgtctgcagaatgcacttagtacatgtttggtcaattcaacgttcgttggtgaaattggccagcaaagcttgcagaaacagagaatgtgaatgcacagtgcataaagatgtagtagacctctgcaatctgccacattattt

SEQ ID NO: 257583 - DNA, 231 bp, Homo Sapiens
atgagccaccgcgcccagtctcactttaaaggagagagttaaagcgacatctaaagatatgcatcccaataggattggggtgattttcaacattcatataaaaaatgagtttatcaacactcaaaatagatttatttggtatttctagcttgtttgtttaaaatgccaacaaaacataacatactatggctatcttcctccatttgaaaagacaagtaatgtggtaaatat

SEQ ID NO: 257584 - DNA, 291 bp, Homo Sapiens
aaagaaaatatgctattttgaagaaaatatgtatgatgacatgttactatatgatgtatatggtgatatgttactatgtgaggtaatatgtatagtaatatgttactatgtgaggtattgtgtgtggtgatatgttactatgtgaagtagtatgttactatgatgtgaggtagtacattaattagctagatttagtcattccacagtgaatatatacttcaaagcatcatattgtacaggataaatctctacaagttaaatctatttaaatctaaaaagataaatctattt

SEQ ID NO: 257585 - DNA, 518 bp, Homo Sapiens
ccacagccacccggccatgctagacacctgcgtaccctctgccttttagttaattgagtactccttgttggttctagtaaattctgtgcttacctatgctaaataatacttatttttagataggacagtatacccatagcatcaagtgtacacctgcggagtgtcagcttacgtgagtgggaattttccccaaatttctcagcctctgcagtgctaccctcatccatgactttatcctcccttccccagagcagggcttctggacaagggaaggtaacttttcttcacataccaaaataagcagatcttgatagagcttcaaaagagagggaaccagtttctcttttaaaaggaaaagtgggctggtctaaacggtgtcatacaagtcaatggaattaacaatacacaatacacagagccgggtgcagtggcacgcacctgtagtccctgctacttgggaggttcagctgagcccggaagttcaagtgcagcctaggcaacagagcaagacctgcctc

SEQ ID NO: 257586 - DNA, 329 bp, Homo Sapiens
cctctgattggacatgtgagaaatgaaggcataaaggatccttagaaagggaagtcaatgcaggacatcagagcatgttttttaagattacacatctagagacagggacttcctagccttgagggctatcttttgtaaagtgaagctaatcttaaatgaatcctttgcccaggaagattaactggactggaccgattaggatcagaattactaaagtaggcctttaactgtaggttaagcatctggcacacagggacaaaaaggagcatagataaattcattttttaagtgatgtaagaaatctgagatgagccgggtacggtggctca

SEQ ID NO: 257587 - DNA, 1163 bp, Homo Sapiens
tcctgaacttccatactattaactagacacagaactgcacagcaggatgcctgctgtgtgcattccagatatagtacatagctcagctctcaaatcagcaacaaagaagataagcacaccaggtccacatagcagagaacttcacattatcaagtttctatccaaagcttcaaagaagcaaataatattttgaaagactatgtgataaaaggatcaatttttagaaagtttcatgatctgtcatggatcaatagtttataaaggacactgaaacttggatgttgaggcaatgtcaaattgccccaagtttctaaatgcttactcttcatttctgtacttaatgtggacttggatcaaatagggcatgaaccagcattggtccgtggactgcattttgactagtattggtttaaagaagttgttcgtttactcctcgaggtagtctcagatctaattttctcttggattaatatgacaactaatacttgaagcactttagcttactactagagaattctatctactgagttatgctttatgtacttagcttttatcaaatatataagtatttgataaaaaactcacgtaagttacaggaaacatttccgcatatgttgtataatcaaggtcactgtctactttgtaattcagtgactattaagttcccaatgagaaaatgaaagaattgctgggttcctactttctgataagaacagttccttgatttccccttttttcttggttgtcaggaagctccacagaaaagtctgtctaatcacagcaaccgtaataattatcatggcttagaaattcatttcttcattctaagatcataattttctattttcattttataaaccagattgttatttgaagcagcttcaaatctgtttgaaaaagagctgctaagatgatgcaatgtctgtgctgaaccaaaaagatattaactaaattttacaaagcaagcttttactgaataccagctaagtgatatataaataaaacaaataaaaagattaaccttgaacttgccaatctagtcatctttttaaaaaactactttgtagcattagactcctgtgactgattaaatatggcctttgcagctcttctcatcaagagatggaatctcctttcttatcccttgagtctgtgctgtcctt

SEQ ID NO: 257588 - DNA, 232 bp, Homo Sapiens
gtccttggaagaataagttcaggagatctgttgtataacagggtgattataatgaatgacaatgtatacttgaaaattgctaagagaataggttttaaaatattactgccccacacacacccaaatggtaagtacgggaggtgatggatgtgttaattagcttgattgagtcattccacaatatattttgaaacataatgttgtatgccatgaatgtgtacaatttttattt

SEQ ID NO: 257589 - DNA, 462 bp, Homo Sapiens
  misc_feature (352)..(366): n is a, c, g, or t
aagtgttctctcatagtacaaagtaatctctggtacccacaaaagccaaagcgatcgggtaatgtaatacaaaagagagcagagttttagacctgagatgaatctgtccatgactttagactcctcaggaagacagaaaaggcagaagagaggtgagtggtgccttttttgtgtgttccttaaggggtttgagtcattagacgtcctctgtagatcctttcatgtgtactttaaaaggcaaagaggaagaaagagtagagataaatagaattaatgggaaaacaattcataaaacaaggaagcaaacagagggaccaaacacgtaattttaaaaatgttatttgggcacctnnnnnnnnnnnnnnntccccaaaacaggatccaaaaagagaagaagcagaaagtccattaaatacatatattgaaaactagcttttaattaagctgacttctgactgtaga

SEQ ID NO: 257590 - DNA, 604 bp, Homo Sapiens
  misc_feature (41)..(41): n is a, c, g, or t
  misc_feature (82)..(82): n is a, c, g, or t
tgaaataagccccggcacagaaagaccaaacatccacatgntccttgccttatttgtgtgagataaaaataaaaacaattgnactcatagacatagagagagaaggatgattacccagaggctgagaagggtattgggtgcttcaggggaagtgggaatagttaatggggggaaaaaaggaagttggaaagaatgaataagatctactatttgatagcacaacaggatgactatagtcaataataacttaattcatttttaaataactaaaaaagtataattggattgtttgtaatcacaaagaataaacgcttgagggacagataccccatgctgcataatgtgattattaatatccagtatttgataacacaacagggtgctgtagtcaaaataatttaattgtacattttaaaataactaaaggagtataactggattgtttgtaacacaaaggataaatgactgagaagatggataccccattctccatgacaagataattacacattgcatacctatatcagaacatctcatacaccccataaatatatccatctactatgtagccacaaaaattaaaaataaaacattttaaaataga

SEQ ID NO: 257591 - DNA, 606 bp, Homo Sapiens
ttggtttgcatgatgaaggaggtaagaagtttcaggttatgtaaacttattcaacatcagttttacaatctgtaaggtggaaagtcatgggtgtttaacttctcaatttaaaagctggaatcaagggctaacggaacttacatacctaaaaccatgtatcccatgccccatttcatagatgaggaagtagagatgccagcagacagcacaacttccttacgcctgttaatggcaaagctggcacttgaacccacatctccactttccccacttttccatacccctaagcactcaatacatgctgagaatcatgaggctgaagaaatgatcttgttcagcatcctttttaaaacttctccgatatgtattgcccacagtaaaaattacactttatgctgtgactcagaacatacagtcacatacatgaaaaaagtttcaaaaaacaactttttctgtacaagacaagattattttccactcttatcaagtttattttattttatgaaagctgcacatgagccactgaatggatctgatgggtcaggaactactaatagatcagaggccgcagtgataaacactttttttaaaagcaaagatcttttt

SEQ ID NO: 257592 - DNA, 699 bp, Homo Sapiens
tttttgtgttccaataaaactttatttacaaaaacaaatggccagcccaaaggcctggtttgcaactcttgctctggagcagagcagaaggtatactctgaactgcaacaaagtttctgctgcaaaagcagcacctatgctggccgtcccctcctctctgtacactggctctggacgtccatgtgaacaggcttgccaagaaggacaaagtgggcaggtaaagctggggggggcggccacaatcaagatcccaacacccctatctttaagaggcagtgccaagcgaatcccatttcaggggacccactctacctcgctgcctacgatgaattcccatcttacagcctctcgattactatgcagttaccaagctggctaccaccttactaagattcttgccattttctcattctagtcaaaaaagtaagtcatcggtttagtggagggggcagctaaagcccaagtttgtatttgagaaagatgtacaacaggttctttaaaaaaataaattacataaaattttctggacacaaaactcctatccagaccactagtcatggagaagaccagaagccaaaaaatacaatcctcatggagaaccagcctattcgctgtgtgcactctgcaactggtaagcctttcctgggggtcttaccctcagaactctggcttgttggacgtaactggtaattcctgcaa

SEQ ID NO: 257593 - DNA, 497 bp, Homo Sapiens
tggagaggaaaggaggtgagccagatggcgtgggacatggggctgtgctccaggcccagcccccagtgcgggatttagccaggcttggtggagccaggctcctgagtcatgtgagcccagcccaggatggtgccagggcaccagccccagaggctggaggcatctagaactgtcatcaccagcagcatggctggggctggtcttttgcctccaactcagctccaagaagtagcagaagagtggcccagtgtcaccctcaacctggtgaaagctagagcagggcacaaattcctccagcttctacaccaaagccaggtggaggagatttctagagtagtccgtatggccctaggtgctgtccagccgtggttctcagccctgcaggttagatcactggagaggctttaaaaaaagatgccgtatacaaaattagccaggtgtggtggtacatgcctgtaatcccagctactcaagaggctgagacacacaaatcgcct

SEQ ID NO: 257594 - DNA, 604 bp, Homo Sapiens
aaaggaatgaggtatattcctccagcttataaattattacagaaataacctgcaatgtggaaaagcatatcacaacaaaagtataagaaacaagttaaatatccaatattagagaaatgcacataaaacagaatattttccaggaaatacaaatgaagtttagaaaaataacacaggaaagggtttataacacaatgttaagcaaagaaggaggcactacaaaaaagatacaagttataaattataatttcaacaatgcaaaaaattacagaagataaatgcttgaataaaatttttaaaaaatggtaacaaaaatggcctctggataatgcaatggtgtttttttggtcactcttctttatattttatgtactttaaaatatttatcaggagtgtacattacgtttcaacagaaaagatctttaattataaaatgaaaccattatgaacatacagaattatataaatgggaaatcatagataaatgttatttggatgattaaaacatttaaatctttggttaggaaacatcaatacagtaataaaggtcacaagcattcatgattaatttattgagaggatactatgaaaccataaaaatctg

SEQ ID NO: 257595 - DNA, 600 bp, Homo Sapiens
gcatgggcaagagagaagccacccttagtgaaaaaactcataggtgtgagtttggcagaggtaaaaagggactagtttggctgcagacagcctgagaaagagataagcagagggatggagaatcctagggcctgggagatgaggttagatatctgctcctttctgacaacattgccctaaaagtcggcacttttcaacaacatataatatctcataatttgtgtggaccagaatctggacacagttcagctggctacctctgccttcaggtcttttatgagactgggggctgtggtcttaactgaagctggactgggaaagcatgagcctttaagctgactcatgtgaaaattgacagggtttagtgtggacagagagcctgactttccttctctctactcgtctgagcaccgcctcaccctttgttatgtgggtctctacatggagcatctcatagcattggagcttgcttcctgtgtttgaggaatacaatagacagaattagacaaaaaggtttacccaaaaagagacagagagaaagatggagggcgcaaacgagaaaaacccagtaggagaaaaattagagcttttaaaaaaagc

SEQ ID NO: 257596 - DNA, 514 bp, Homo Sapiens
aaatttaatactaagaaattatggcttatagtatctataaattaacaagaagtatgcgggtgcaaaaaagtgggggaacaaatcccaacacccacccaaaatggaaaaagaacgggaaattctgaatagaattgcactcaggaacttatattaaaaaatcccatttggttaatgacattaaatttggtacatttcaaaacttctaggtcctccaaagattgaaagcttaataatctcctacctaaaaagataaaattaattgcaatctaccatatcttaagtataggaaatttggtgtccaacctggagatgattatatatttgaaatatttcctagagaatagtaaccaggttttgtttttaactttaaaacctaattacttttgtgcctctcagccgttgattgtaactttaaagtcccatggttttggagtgttattaatagattttgttatcggtgggcatgcactgcaagaattaagtatctcagactgaaataaaaccgttcataatt

SEQ ID NO: 257597 - DNA, 887 bp, Homo Sapiens
  misc_feature (720)..(730): n is a, c, g, or t
gggggaagtgggttgacgtagcccggaaggggaatacttccaagttgtagtgttgttgttttcagcctgctgctgctgctgctgttgcggctaggggaaccgtcgtggggaaggatggtgtgcgaaaaatgtgaaaagaaacttggtactgttatcactccagatacatggaaagatggtgctaggaataccacagaaagtggtggaagaaagctgaatgaaaataaagctttgacttcaaaaaaagcaagatttgatccatatggaaagaataagttctccacttgtagaatttgtaaaagttctgtgcaccaaccaggttctcattactgccagggctgtgcctacaaaaaaggcatctgtgcgatgtgtggaaaaaaggttttggataccaaaaactacaagcaaacatctgtctagatgtattgatggaatttctggctttctaaatgattttactttctgccttgaattttcaaggcatagatgtcaacttacagaataacatgttttaagataattaagtttaaaccagagaatttgattgttactcattttgctctcatgttctaaacagcaacagtgtaactagtccttttgctgtaaaatgtttattttccttataagaattttaagaactaagtgcgaaacttccatgaaaatatttccctccccctctggatgcccctttttcatttaccctttattccttattaattnnnnnnnnnnnaccatttttatttttatagaatacctcgcaacacggggggaaaacggccaacccatcgcgtatccctttgcctcctgcaaactttcggcgcatctcaaaagaggttaaatgttgttcccccaccctccaccccccctctggagtggggtggacaacc

SEQ ID NO: 257598 - DNA, 370 bp, Homo Sapiens
ggcaagagatattctatgactcagcccacagctgtgttgtacttgggaatgacagaattctgcacagagtgacacatctttctgagaaattccttataatcctcttggctgttggggaagtggctgattcatcttaccagtctgggtttaactttcttttctttttcttctgcagtactctggtttccagcagtcggctgacaggtgttttctttgtggacatctgatcatggacatggtgagtaggtcagccaaagaagagaacagcatctcaggtggaggaggaggtgttcagagaaaaaagaaattaataattgaggacagtgtttcttatcttgatttgtggttacagctgggcgcagtggctcat

SEQ ID NO: 257599 - DNA, 587 bp, Homo Sapiens
  misc_feature (16)..(16): n is a, c, g, or t
ctctagactctcatcnagtttctagatctgatgagtagtttattagaatttaaagatataggggaacattgttaattcaccacaggagcacaagtagcaaaaatccacactgaaattctataagacaaatgatctaaggaaaaaaaatttttaaggaaagaagggcaggaaaacctgtagagtaaaatgaatttaaagatatttatcggtttaattgcaatgtatagaccttgtttggatcctaatttgatcaaagctaaccacaaacacatttatgagacaattggagaaattttaaaactgactgaatattagaagttaaagaattgtttttgaaaatggtattgtggttatagtttttaaaaatcttttggtatatgcatactaaataatttactaatgaatgatatgatcggactttgcttcatactttaatccatgggggatgggaagcatatatgggagtacacaggaaagaagcttgtcttagtgttggtattgatgatgggtgatgggtagatgggtttttttattctgttctacttttgtgtatatttagaatgttccataataaaaactcaaaaaca

SEQ ID NO: 257600 - DNA, 1080 bp, Homo Sapiens
cagagcacactgtccccaccgcctcccctttctctctggaaagttgaagtatctccaaaggccttggaaatggcacaaaggtgataaggagcaggtgctttgctgcagtctcccttgcaaatgtataattaaggcctttcttcccaccccaagtccaagaacaaatgccagccacgtcctctgccacttggagagatgagaacccagtggggttcacgtaaaggaattgcaggtcggtgagaggacaagagggactcccatgttctaaggcacctgttcctggccaggctctaggccaggctctctaagcacatttctcctttcattccccctaaaaacagagtgacctggaagtagatgttctttgctccttgtcagagttgaagaggctgagacttggcccactgctaagcggcagaggcagggccagccatcctgtcgcaagcccgtgctggggctgccctttctgttccaagtccagttacggacttcccggcccgccactgggccctgccggtcaccaggccactgtgcaagtgggcgcagagcatggtcaggagtggcctgcccgtactcctccacccagatgagggccctccagagcctgcaggcatctgtggggaatcccagcctgcaggttcttggagaagcaggtgaacctaaggatgaaagcaaaggagggccttgaggaagcagcccccaggcctggcagccacgcagcggctgagctcatgaacttggttcgcagcctgccttgcccctggaggccacgccaggtgctcacccctgagcccacagcccctgcttgggctgcctggcaccctcagggtggcccggcctcctcctgccactctgagcacatgtccgggggttgccaccagagacggctttgttctcccagctaaggccgtggagctgctgtgtgactgtgtcaggcctggacaaggaagacccttagggatgacgtccccgctgcatatttattcaaggtgactcttgtacttggcaagggaagtccactgtgtgatagtctgtattcttaatataatttgttaaataaacgtttgttttaacctcttt

SEQ ID NO: 257601 - DNA, 590 bp, Homo Sapiens
acaaaagatcccctagttggaaaaatgctttgcacatttatgctctcaaaggaggacagcataatgataacagagtaactgaggaatgtagagacataggcatgtgacagatccttgaggactgtggacatgtcaagaagtttggaatcctggcaagtcgccgatgtgatttaaaggaggtctttgccctgtgcataactttgagccatgcatggaagttactgctttcattcttctcagggcttcggattcaaattcattcacctggcttcaaggagaaggggaagggagaaggggtacagagagactgcttttgcaaagaagtatgtcagcagatgctgaagggaccctttgtttcatcaagttagttttccctttgattccccaatacctctaattctgcatgtcaccaggaaataggtgtgctgcagctcggtgacagccttctccagtgtctatggcaacctggggctggggccatttttccttcaatgaatgggctggcttcccgaagacaagtaaagcccaattgttattctcaactgttacagagggagggtgcacaggggtaataaagaaacaactgaata

SEQ ID NO: 257602 - DNA, 596 bp, Homo Sapiens
cctaaacacagactagtgctaagcatgtactaagaacttagcacttggttgtggaaatgaattaaacttcagttcaccaaagttctgagcattccatgaagtattcagcctcatccaatcaattcttggatacacaacccatgaaaccattcagtgtttttaaagaaacattaacaaataatattaaagaataagtcccctgagaaagtgtatgcatataaaataattctaactttattcttgtaccatcattgaatacttaatcagcaagccaattttcttttgacaccaagactggaaaatcatcaccaatatacagtctggcacaggagacagggactagaatttcacaagagagaggagggctagctctattctcactagaaacaagacctaaagcaagtcacttaccctctgtcagcccttatctctaaaataaaaatagttgtacttttcccagtgaccccatagtgctattgtgaggatgatttttttaaaatttgtacaattgctttcttgaatataaagcacctaaatggtataatggctttatgggacaccctgaactttttaaaagaaggcctattatactattg

SEQ ID NO: 257603 - DNA, 547 bp, Homo Sapiens
tggggataaaatagagaacactgaaatggtaaaaccaccataatattgacaaataggatagttatattagacaaaaacatgttccttgagtctggaaattgttagtgtcaagttacactatgtattaaggcaccgtaacatattgtggcactgacttttaggcacatatatttgtatatctttctaatttttttcaaaagtggatttttctgccatttatatttgccatcgtataaataaaatttttatgttttgatgttcaacagccattttatactaataggagctctaactgtgacaatcaaataaattaatgtttttatacatgtctttatcggacttaaatctgtgttcacaccagataacaactcaagactgtgactatgctattggctatgaggagtgttgctttaattgcagcgaagttaatctgtagaatttaacaattatgttgccatctatcttaagggtttataactctggtatagaataagcaaatagcataaaacacttgtacctgtgtgtactcctcagagttttattggta

SEQ ID NO: 257604 - DNA, 480 bp, Homo Sapiens
cagctactgctctcttcacctaatatccttggtgacgggcttggccttttgcatacccacctaggtacacaagctttttgtcctctccacccaccagctctgttcctgctcctggctgtcatttctcactttgggaatgtttctgtcaaactatgtcttacctatttttcaaattatttcttaactgaacattctttggctaattactcttgtgtttatccaccacagtagttccccaaaccctcaggatgtttacagtgtttgtgcgctctcatgttgtatttactgtcctgtttcccctattaagtttcaagtcaatcaaccaggaattacttagtactgactgtgcatattttctattggtagggggaagtaacagagaaatagaatacatgtccttcacctcagggggctcaatgcagtgttgtgcattggaagcggggcagggaggatgtcaataaaatagtgattaaaaagtgc

SEQ ID NO: 257605 - DNA, 337 bp, Homo Sapiens
  misc_feature (275)..(275): n is a, c, g, or t
  misc_feature (280)..(281): n is a, c, g, or t
  misc_feature (313)..(313): n is a, c, g, or t
tgagccactgtgcccgaccaccaattacaggcatttttaccgttcttttaccaatgcctcaaatggcataacaacttcaattgctcaaacattttgcccactttaagaatgggcttccttcttaataactgaggcatatgagttcttcaaatattctacataaaagtcctctgacaaatacatgtctggcaaatattttctcttattctatagcttgcccttttattttcaaaacagtttttgaaaagaaccaagattttaaattttgatgaaantcaanntaattgatttttctcttataagctatgctggnttgggtgctacttatgaaatcttt

SEQ ID NO: 257606 - DNA, 422 bp, Homo Sapiens
taatgggggtggctatggcttctgctgaggctcttcacactcagaactgcagcttatggtgggaaaaaggaaggccaaaaagtagagagcagagaggatacactgagtgtaaaaaaggaaggtgcaggtagctatttaagatccaaggtattttattgtataaactaaaataagaagaaaatagtcttagaaaagaattcctgacagaaaaatttggaaagccaccgtactaaaaatttaagtagacttaaccagacatctgaagccctaatatttataagcacatcattgcattctaatatcttaataaaataattctcttgatacctatgttgtctctcaaatctaaaatgaaaacaacttgtgtaaaaacccatctacctagaacactggtttgaaattagttctttactacttaaata

SEQ ID NO: 257607 - DNA, 421 bp, Homo Sapiens
gttctacagtaatggttggacatttcaataccccatttttaatcatggatagaaccagatagaagatcaataagaaaatagaggccatgaacaacactataaaccaattagtcctaacaaacacatatggaacaccccacttagcagcatacacattcttctcaatgcatatggaacagtctccaatattcaaacaagtctgaataaatttaaaaatattaaagccatatgaaatattttttctgattaggatggaatgaaactataaatcaataaatgaaagctgcaaaatccacaaatatatggaaaataataagttctcaaatagccaatgggctaaagaaatcacagggggaattaggcaataaaaatataataaaccaaagcttatgggatgggataaacatagtgctaaaaagtt

SEQ ID NO: 257608 - DNA, 603 bp, Homo Sapiens
tgaagggattagactaaatgatttttcacggccttcagttctgtaatgaaaattctctaactccgtatcatcagcaagagtctttacatccaacgtgttgctataactaccccctaaagagctaccaacccgtgttccattcctaggtaacaaaccttggcctggccaaggatgagtcacagcattcacggctgcatttttggtactcacgggatgcctctctgaaaagctgtcccaagtgcctgctacagaggaggatataccatgatagcaaaggaaggttactgctgtaaaagtggaaactgcatggatcaaagggcaggcctactggggtaaggaactctccctgcagctctgaggatacttaaatctaggatcctagtcttagtctcccccaactcctttgaggttcctttcaaaagtccttctcccacagattgaagctgaatatagtcttccttgggacaaatgcatttgtccataggactctttcccgagattgttttaggcccatttctgtacctctcccctcagactgttagccacagacccttagtcattgcaaagttactgcataattccctgtctgctcaaatagctgtc

SEQ ID NO: 257609 - DNA, 458 bp, Homo Sapiens
cttcacagtatttagtcctaattaaaaacccttctttattccatacccttatttaataacttaaattttttcgcaattgtataaattagtaattcagtcccagtccgggatctctgtagtgttttgacaaaataaactgatattctttaaatgtgacccggtaagaaaaaactatggtggggtgtatggtgcttttagcctgttttccactattaattagcatttaccagtaagggtccttttgacccaagttatttatgtattaaaagcctgtaaatattccagtcctttttagattatattggtcaaaaaatgcatttcccaataaccctgttaacctgttcccatgtataccctattaaaatcctgggctggggcccatctaacttgtcacatttggtccttttttctagatgcaatgtttcccaataaaaaccttgtccagggccagaaagaac

SEQ ID NO: 257610 - DNA, 593 bp, Homo Sapiens
ttggtgaattcttactcatctttcaagggctagtttgcttcagtgtcactcacccctgttaaaaactttcctaagctctacttagattagggctatttcctctatgttcttgttcatattgccaacatagcaatctaaggttatttttccaattttataaagctatataaaaatacacggtaatacactggatcgtatctaattcatggtacttaacttctcacatttgctaaataaaaaacatttatgtaagaaatggagtagggaaaacaaggataacaaacccaaacctaaaccaacgaaaaccaatctatattcttatttttcatctaaagatataatcactgactcagacccacactgtatacatataaacaacattctgagcacagcataccagctgatgattaaattagccactttaaattacctggtttatccaatgtttgccctatattttaattaaatgaggccccagtataagcacttacaggaattatttgagattttctaaatctctttgtgtcacagtggcagataatctagccatccctgattaattcaatttagcacttgagatattttgagatgag

SEQ ID NO: 257611 - DNA, 263 bp, Homo Sapiens
tgcttaagcccaggaatttaaggttacagtggcaatgatggaaccactgcactccagtctaggtgatggagtgaaaccctgtctgaaaaaggagtactggattttgttttttatccattgaggagttattgaccatcctttttccctactctgtccccagtaatcacaacagtagcctacagaatttttctttgaaaggttcctgtcatataagagagctttaaaaaataataatttgctagaaaattttaaattatggttgg

SEQ ID NO: 257612 - DNA, 549 bp, Homo Sapiens
taattttgtcttaccaggtacttcataactatttcaattagtgaagtacaaacaataaaagtccttcataaattacttattttttcaatatggcattcatcctaaattggaataatagtaaaaaagaactattaagatgttaataatctgtatagctttgtattaatttgattaaagagattacaaattcaaaataaaaataatgagtatgtttcatctgatttaattttgtaaaattcagcacatatgataacactcttaaaaagtctgttttagattaggaaatgcacaggatgtcttagtttctttttatctttaatgtttcctaaaaagttgaaatccactggttttatagaaaacaaaagaaaaaagatacatattttctagcattcccacaaccactatcactatcaggaatataaactaatgctttagcaaatattatttcccagaaagttaacaagtaacttgttttttggaaatggttaatagtcacttcagcaatgtgtggagttaaaatactaagtggctgagtccattgctatactc

SEQ ID NO: 257613 - DNA, 676 bp, Homo Sapiens
tgaacttatacggtaacacataatatgggcgaatctgatgaatgccaaacctgttaggtgatctttgtatcactgacagggatgcgcattgatcccgcgagggacagaaaggctatcccatcattcaggggcataggcgaggcactctaactatatgcagcacccaaagtgtctgagaccatggcctagatggcgaagacagggactctttgaggagccttggattgacaaaaacaaggagcagagacatgctgcaatcccttcactctgacttacacgagacccaggactataatatccatggcagctatcccaagatgacaagggtgcttgaacccacaagtgcataactcacgatgtgccaaatgttgactgctatgaacctccttctcacagagatatgatctattggttggatcgagaaagataaccaacaaaagttgttggacgtgcgcatcacaggattctagaattgcacagatgcagggctggtatcattgttagtggctttattatgtcccatttgtcctttttcgccgattactgtgacggggcccacatgtcgttgtggctgcgggtagactatcttctgcaccagggtttttattggcattccatgggtatcaaaaaaggtaaccacttttgcttaaggctttttggaatggaacacgattag

SEQ ID NO: 257614 - DNA, 490 bp, Homo Sapiens
actggatttgtcatttttgataatttaaatattgctgctgctttgtagatgatgagaagaaatgttaaagtgctttctaaaaggaaattttttcacctttggaggagaatatattagagttgtgggtaatttttcacagccacctatgtacatactaattacccattggatacttatatctaaaagtctcatgctgaagtatagtttttgggaaagaatgattttaaataaagagattgtaaaagtaaaaaactgtaaatgtatatgtatgatagaattgtttcctctaagtgtagtttttctttcaactaaaattcagtttatgtgtaaaataattcagtcattaatagaaatggagtgatttcacagtgtgtactgttttgccacatacttctaaagaacacaattttatataattttgaaatcatgtatgtttaaattagaaaaccaaaaatcatgaacattctaagagaaaataaatatagaattt

SEQ ID NO: 257615 - DNA, 589 bp, Homo Sapiens
gagatgaaacccttgttcttaggatcacagaatactaaagcacctcaaaaaaacagggtatcatgtgaaacatgtggtggccaaaagtggagcgaggatgatttcactaggcatttggcaattcttagagacatttccggttgtcacaattggagggatactagtaacatgaattgggtagaggccagggatgttgctaaatagattataatacacaaggaaagcagcctcaaagaattacccctcccaaaatgtcagaagtgctgaggctgagaaaccctgatgtaaagatcagtcccagttataaactgaaaacagctatttacaaagcagtaaatgcaagaaagaaaaggaagtcgcaaagagaaagtgatgtaatgcaaattgaggattttacaagatcagatactgctgctttaagtcaagggtgaataatctcaacaaacagcaaatagcaatcactttaccagctgcatattgcacccacataggtaactcttcattttaggaacaaactgaatttgaacactgagccttttgaactcagccatctctatatattctttccttaaaattcatgattttgggc

SEQ ID NO: 257616 - DNA, 491 bp, Homo Sapiens
aagcagaatgggaaagaaagtaggatacaggaatttgccaagggaaaatacataaggagctgagaatccaagccaacactggaggcaacacacatttaggagctgaggagaagattctgaaagatagagaatttcaccaaactaaaatctttaacatcaagaacaacatttcttcatttaggaagcctcctgtgtttggcatctcttacacgatggatgagtgaacggaggaaacgagaaaggtggtgtggctctaatggacaagaaagttcagaagccaagttgagtaggaaatgggtgtcacattgggattgaggaaaggcataataacaggtgagatggctttacccagtgtgatctactgaaggaaggactataaaagtgaatggcctccatgaggaagtcatattgtaaggttttctgattaggattaggatgatttttaaataatagaatggaatacaccaagtagagaaataaatggaacaatc

SEQ ID NO: 257617 - DNA, 1186 bp, Homo Sapiens
tgagacgccatctggtcctgtaaatccagagagtgggcacatccacccaaagaaactgcattgcctgtggtcactgtttcttccaagtacacactgactctgctactttaggataaatatattttactcagaactctgaatttcacagtatacttactaaactaagtaaaaatgatacttaaaatacttattttactttctagacctaggctagatgttttaagctacagctctagttcattgtgatatttataatttgaaagctatgagaatagatgtgtgggtgaagccatagaacatatttgcttgaaattcttgagcagggatcttataaagggccagaaataagatgtgtggttcacatagatagtgagcgtaacatctgtattaaacataggagagaagtttataaagggcattggcaataaactctttgttgcagctgttttccaagcagtgtaaatactttttcctgtgattatgtatagccttggaatggcaccttttaactaacccatatgtgtttggtttcaatggttttttatattcagatgtatatatggtgctcactttaggatcagcagtgttgaccatttatgctgcatagctgtattatagccttattagttgtgtggttgacccttggggtatacaaatgtcagtctgagtggtgtcttactcctttgtttataagtgaatgattgtgcatgttttgtatgtcatagtatgtcgtcacataaaagggagggagcgaaaaaccattacattaagataatattggaccaaactacttacttgctctaaacagttacttgtaccccttaacctgtcttcaaaagttgcatatagttacagtagtgtataaattaaatattgtggaaaaacagtcttgtatttttctgtatgtggggatatatatataattatgtaccttcctggcaattctatctgtatttaaagatgtgacaatcttgacaccaattttaagaatagctgtgagaccgaattaaagataatccctaccaagtgaaaattgatgtgtgttaagagggtacagaattatcaactgatttggtcagttgcttccaatgctggttgatttccctcattgtgtaaacattgacaggtatgtgacaaatgggaaaaaaaatccaaataataaagtgacatattggtgttcagcaat

SEQ ID NO: 257618 - DNA, 1250 bp, Homo Sapiens
  misc_feature (45)..(57): n is a, c, g, or t
ccaccagtgcacacgcttgtctgctgctcttccacgtgggctctnnnnnnnnnnnnncctcagggttttgcatccactcgagaaacttcttctttgtcctgagcacaggcactgcgtatttctctccattcttaaaatacttcaacgtaggaaactctgagatgtggaatctttctgccagggccttgttgacagtggcatcgacagctgcaaggacaccagagctatctgcttctccatggagggcttctgctgccttctcaaactccggcttcattttcttacagtggccacaccatggggcgtggaacatgacgaggacagaggagtgttccttcacaaactggtcaaagtcttcatcggtcaggtgataaacggagccgccctcatctgcccagggagtctcagggacctggggctgtggcggctgcggattcttcagccactccacaatgtcctcagctgtggacccatagttgtcatactggaacaagaaccgtcctttctcaaaatagcagatggtggggaagccgcgcacgctggactcctccttgatgttttcaaattcagaggagtagacattcatcccggccagcacggcgtggcctcgcagctgagtcgcagccttctggaaatgcggcatcatcctcttgcacatgctgcaccagggggcataaaacatgatacaggagcggcttctcttccttcttcaggagccgtctgaagtccttttcactgtcaaggtggacaacatctttggctccaggatcttcctcccacagtgggggcccttttggatccttcaaaaaggccactatggacttaaatgtcacagctcggttatattcagtatgaaatgcaccatcctggtaatggaataattcaacctttttgtccttcgggctcaggtcaactttcatcttcttgcacaattttctactctctgcatcaccacagtccacccagcagatggtcccttgtcctttcaccgcctgggccactgtggacagtaacctgagatgattttcagctgccacctcagatttggagtaaagcaccagtacattattccgggttctgagcagttttttcaagtccttggggtcagagattctctcaatgagcgaggagacctttgcagaggacagccatgatggcaggaccacccagattgccagcagcagccacgccggcccggcccgcgccatcccagcagcgctgcccaccgctggctcctttctccatcccgg

SEQ ID NO: 257619 - DNA, 1006 bp, Homo Sapiens
  misc_feature (19)..(19): n is a, c, g, or t
aaaggacggttcttgttcngtatgacaactatgggtccacagctgaggacattgtggagtggctgaagaatccgcagccgccacagccccaggcccctgagactccctgggcagatgagggcggctccgtttatcacctgaccgatgaagactttgaccagtttgtgaaggaacactcctctgtcctcgtcatgttccacgccccatggtgtggccactgtaagaaaatgaagccggagtttgagaaggcagcagaagccctccatggagaagcggatagctctggtgtccttgcagctgtcgatgccactgtcaacaaggccctggcagaaagattccacatctcagagtttcctacgttgaagtattttaagaatggagagaaatacgcagtgcctgtgctcaggacaaagaagaagtttctcgagtggatgcaaaaccctgaggcccccccgcccccagagcccacgtgggaagagcagcagacaagcgtgttgcacctggtgggggacaacttccgggagaccctgaagaagaagaaacacaccttggtcatgttctacgccccttggtgcccacactgtaagaaggtcattccgcactttactgctactgctgatgcctttcaaagatgaccgaaagattgcctgtgcccgctgttgactgtgtcaaagacaagaaccaagacctgtgcccagcaggaggcggtcaagggctaccccactttccactactacccactatgggaagttcgcagaaaagtatgacagcgaccgcacagaattgggatttaccaattatattccgagcctccgggagggagaccatgaaagactagggaaaaagaaggaagagttataattcctgcctcagaaaaagcttttccattacactgtgaatgatacctgttttgttgtttctgaatttccacatgttctgaagacaaattttttatagccgcttatggccattttgtacaattttgaaataaaattaaaccatttaa

SEQ ID NO: 257620 - DNA, 351 bp, Homo Sapiens
catatgcgtcacacatattgccctatattggactaattccattctctcattactctgagcccttgcagattctgtgccctttacttggacagttcctgtttttctccccatcaaaccagtacacacccaagaatcaacgaccgcattcacagacaaattttcctaactctcttttccttccaggactggcctttgtatatgcatccctagcactctctaataatttggagatttcttaactgtcttttcctactaaactcaaatccttgagagtagtaaccattcatctttttttctccagccctaactcagaactgagtatctaatagatccacactaatatttactatg

SEQ ID NO: 257621 - DNA, 243 bp, Homo Sapiens
aatgagagagagccagtgagcctggcctcggtttctatttttgattgaattattgatcagtatgcagaagattgacatcattatgatactaagtctccccttccataaacagtaaatctctcaacatatgtaagtcttctattatgcttttcagtcaattataacaattttcaacataaaggtgatacacattaaggttaaatttctaagtaccttacatctttgttaaagctacaaatgaaa

SEQ ID NO: 257622 - DNA, 526 bp, Homo Sapiens
ttttgggcagggtttagtccagccctttgtccctctcccagatccccaatttttagtaaaggaccgggtcataagaaataaggctgccaaagaatcacaccagcttcgggcttagtaaattacctgaatacaccccttttcctaaaggaaatcccacatcttcgtaggagatctggtgtaatgctcttgggccctctctctaaagaatgagctagtatccctgggtcctagtaagtttcagcaaatataatagagacagacctgtcttctttttcagaaaagaaccagagaaaattgtttaaccaatggttttgtgcccttaaagtctgtgttagtcccttagcaccccccctaaaattttgctaaaagggacgttttgtgtgttgggcttccctaaaggaagcccctgaaagtgttcaaaaatagggaaaatgagaaactgttccacctgaaaatacgggcaagggggaatcattgaaaaagccagaatattgaagtgttcaaatgaataaagaagctaatgcct

SEQ ID NO: 257623 - DNA, 589 bp, Homo Sapiens
  misc_feature (40)..(40): n is a, c, g, or t
aaaaaaccagtagctatgagagagagaatttgatctcagnaagtaatcaaccagtatcatcatctggaatttctgaatcatcccattttatcccgtatgttcgacaaaatgagatctattaccttgatcccgatgcaccattgtctggggccttcaacccaggaccctcagtacaaaaattcacaagactgtggcaaaaaacgacagctatttgattctgactgtgtcagggatccacttcttaatccaacatggtgaaaaatagggatcgacagcaagcaatccttaagggactttcagaactgagacagggccttctccagaagcaaaaggagttggaaagtagtctcctgcctttagctgaaaatcaagaagaaagttttggttcttcattttaaatgtagaaaatcaaatccttcacatttgatttgtgtcttccaaattataaaatgtgctcactggctcaactgtatttttcaaatagcctagatttacttatttttttaaatgctcattaaaaacttgtatactatgtagtaaaatgctgtacttgttctatacaataaaacagatacttcttttgtaaaag

SEQ ID NO: 257624 - DNA, 460 bp, Homo Sapiens
  misc_feature (215)..(215): n is a, c, g, or t
aaacccttgtggagggcagtgttggctgcaggtttcatcatattgcagtttgaggtcaccactatttggggaacaagcttgcgtcctgctgaggggcaggattttcagcagagcgtcggtggggctgggcccgtccgtggaggtggccccaccggagtcatatggcccatacctcagacacaccttgtgtggcctgcctcagagctggatgccancctttaggcaatgtttagagtctattttctaaagttttaagtattttaagaggtattgagactaatgaatataatagttcagtaatttaaatgcttatttattttcagtggaaggatttttattaaaaagaagctaattgacatggaaatgtcagtgaaatttcttacctgcaaggaaagtgaacattttgtatttaagtaaactataatgtgcacattttaataaagaaatctgacatttggaa

SEQ ID NO: 257625 - DNA, 650 bp, Homo Sapiens
  misc_feature (354)..(367): n is a, c, g, or t
tgacattgtcaaagaaaggcatgcctggaaaagggaatcaagtgcctctgctgtgtccacgccagctagcatgttacctagcacgtattaagggctcaaaaaatatttgttgattcactctttggccatgtaacactttctggggtggggagagagatgacagggaatgagcaggaatacaaagaaaaaaattgcaaaatttagaactagaagcaaatggcggaaccacctagtagggactctcagaaggccagaatactgcagttgttactgactacagtgggttgaggctgcagtgagctatgatcattcgtgctgtactccagcctgggaacagagtgagaccttgtctcnnnnnnnnnnnnnngttctataaatggagtcactggctaaaaatcatcccctaactggttaggaaggttaatgcttcagactagggactaatcacatcagctcggctagctggtttcagccatcttctgtaatatgtcttctggaaacttaagaacaaatcctttgggattcttaataggggaatcgccagcttcatatgctactgacttgtttcttaatagccattcatttacttagatatataataagaacttaattcaggcttagtgacactttggtcagtacaaatcccctag

SEQ ID NO: 257626 - DNA, 506 bp, Homo Sapiens
tagaacatcaagactgatctttaaacaggcctcccagattgcttcctgaaaagactgtactgactcaggaaaagggccggaagcacatcctcttaaaagcacctttcagactgaccaagcaatgtgacagaacagaaagatacaggttctagtcccaggctggccccaaactgtcccttcaggtcactcagcctcctgcacatctcagatgaatctatgaagtaagcttcaacctggcttctaaagtataacaatgctgccgagagagcagtgctgacaacatctaaactatcagacaatcccaaaatgtcctctgggaatttttttggcagctaagacctttcaaggaaacccggaattctgataacacataaatacatcaacatactagaaagcgaaggaatatggtagtggtatgatgtagaatcttgcttctttcctctttttctttcttcccaatctggaaccaggtgaaatacaaagtacataaaggaatatttaaggat

SEQ ID NO: 257627 - DNA, 506 bp, Homo Sapiens
aaaggtatgaattctactcaggaactgacaaattgtgtttgctctttatcctatttatgctatttttcataacagtgaaaatctgactatgaagaaattaagatagtataagaagaaaaactaaagtggatattagctacctgtttgttcattgggtgaaatagttgacgccacacagtcttacttcattgttccgtaaatattgcatatatcctaatatcatcccccaattaaattgtgattttcattagggaaagtatccaataccataatgtcttaatatgtttttattataggtctttcttagcaaaaaattgtgttaatttgtatgaatgcagaatagagttcactgtggcataaggtataagtcataatttctgaaacagatacaaatggtttccaattctttatttaccatatattttcttgggaattgatatatggtgctttgtataaacactcaacaatatttgtatgataatataacaaataaactttcttggtag

SEQ ID NO: 257628 - DNA, 473 bp, Homo Sapiens
aaatttggtgacctttgtaatgtggaacagtattcttcattttaaataaaatttagagtgattaaaaaaatgattatttacctggggcattaaaccaagtctgatgaggtttttagcttcatttgtgatgtaaaacccatagttaaaattaaaagtagttccttaagtatgcaaaccctgtgaaaaatatttctagtttcaaaatccttcctaagggaaatgcccatgctatggaaatccctatgattagccttaattgttatgcttcttgggtccccctgcaaaaaaaccaaacttgtaaaaaccaacctcttttttttgccccgtaaaggtcataacaacaaacattgtcttaaaatggaaaaggaaaatggtctcttgactgatttaaatggtaaaatgtaataaaaaacaattatattggatgggtgaaatgggagggaaccttcattaagttacatttctttcatatt

SEQ ID NO: 257629 - DNA, 440 bp, Homo Sapiens
  misc_feature (13)..(13): n is a, c, g, or t
  misc_feature (76)..(288): n is a, c, g, or t
agtgctctgtccnatggaaagatgggggttttatctctaaagtccctgactggggctgctggcttttttcagagannnnnnnnnnnnnnnnnnnnnnnnnnnnnnnnnnnnnnnnnnnnnnnnnnnnnnnnnnnnnnnnnnnnnnnnnnnnnnnnnnnnnnnnnnnnnnnnnnnnnnnnnnnnnnnnnnnnnnnnnnnnnnnnnnnnnnnnnnnnnnnnnnnnnnnnnnnnnnnnnnnnnnnnnnnnnnnnnnnnnnnnnnnnnnnnnnnnnnnnnnnnnnnnnnnnnaatttcaagtcagtggatcttagcttgctgggctccgtgggggtgggacccaccaagccagactacttggctccctgtcttcagccccttttccagggtggtgaatggttctgtttctctggcgttccaggtgccactggggtatgaaaaaa

SEQ ID NO: 257630 - DNA, 626 bp, Homo Sapiens
  misc_feature (68)..(172): n is a, c, g, or t
taaagggcaaggcctcttcccggagcctccagcagaacccagccccgctgccacctcgactgcagaannnnnnnnnnnnnnnnnnnnnnnnnnnnnnnnnnnnnnnnnnnnnnnnnnnnnnnnnnnnnnnnnnnnnnnnnnnnnnnnnnnnnnnnnnnnnnnnnnnnnnnnngtacgggggttaaagaggacctgctgacctctgagctcacactgaagcctcctggaatgctgtgggttgtgagctgggatgagaacgcagcatggagatgaaagacgcatccacccaggaaggcccactggcatcgcaatctcagggaagattcccaggctgaaaaaagagaaagtggctagggtggcactgaatgccccacgtcaaagaaatggcacccaagccgtccgtcagtccctcacctgccacacagacagcaccttggacccagcaagatgtcactcaccacattgatgctgtccacaggcatcgccttgcttttgcagctctgtgtgagatttgtcagcttggtttgggtctggggctgtattagacctgtcagcctaggagcctaccctagttttgtgtctgcactatttccaaagcattggaataaaaggcattttaaccaaca

SEQ ID NO: 257631 - DNA, 339 bp, Homo Sapiens
gtgttagccactgcgcccggtcaaaatcagctcttctaggagtctaacgcaactcacacataaacaaacacacacgcattcttctaaataaaaaatctctcattcctcatcatgttccctttaattctaacatctacaaaagtcctgaaaatgaacttaaaaatagttaagaagtcaattttacctctttgccaagaggtaaaatcagacggctcaaacagctgcattgcatggcaggttccacaagatgcaatgcaccgtatataaaacaccacacccaagtacatgactccacccataagaattctacaagataacccctatacatcattgttggtt

SEQ ID NO: 257632 - DNA, 639 bp, Homo Sapiens
ggggctaaagcacgagcctcatctgtaaatgcagctcccacttcatttctttaatgaaatattagttggaagacttcacaaagactgctgataactatctgtgattgataggaaattttttttcttgatttctctgtgagaaatgtaatgctgacttttataaagcctggacttctactttatttaataaatcaatgtttgcaatggtaaatgaaacatttccttggacatgtatttgaaagtcattaaatacaaaagttttggaaattcaggaaagttagcaattatgtacggatattatacagaggaaagtagttatatttttaaatgctattattgcagaggatcatcaaaaaaaaggtaatctacgtaatttcctattctaatgtctttttccaaataaaaaacttcaacattctatagggcgccacgacggagcacgcccaaaaaacatgtcggcccggcctcggcccctcgaaaaagtttcctagaaccatttccgtttgcgcgccccggggccccccgtaaggggtagaggggaaacatggggccccataaccttgtttttccctaagcgagaaaccccctgggttccaacggacctcacacggcccttgcgaaattttctccaccctaatt

SEQ ID NO: 257633 - DNA, 666 bp, Homo Sapiens
aaattctttaattttcaaacctgaaaccaatttcaaattcaatttttttcattccaaggaattaaccttagcccagttttatcctgattacttaaaaacttttgtaccggggttatatgcttaaaattaaaggacaaaactatgaaactggtaagtctgattattaaatatctctgtaatcagtaacatgtataaagtatttgtaatgtttggtcataatttatttatgaagacagcaaaagactgatttcatgatggggaaaacaattagccaaagtttaatttcttacactgtggttgtcaagaatactgatttactataatgatatatacatgcaagatatttaacttaatatcttagacaagagttctgggtacaattttgggatctagttcccctggaaaagctgctgtatttttaatttttaatggaatgtagcttttaaaatcctgtcactggcatcaacaaaaggaattataccatgagaccttatagctgtacttaaaagccattcagttcagctattgggagttcatgatgaattagcatacgccaaaaaggttgctaacgcttaacatctgagagcagtaacaatgattttatctgctgtaagagactttgggcattttactttgaaataaagatttttttccccactgaaaaaa

SEQ ID NO: 257634 - DNA, 574 bp, Homo Sapiens
tttcttttaaatccagtcaaagtcgccttaaatttccaggagttgttcttccccctgttaaggaaaagattctagctgttaagccccctcatgagatccccaaagagaaatgattctgataggaagaaattaaggaaagtgaagtttcagtaattctgcccaaaaggcaaaagctttagtaattcaggatctgtcccctttggagaacatcgactccaaagtccttgaccgtgaaaaatgctactttagaattgattgagtacatcagtgactgcctggcttccacaggaaaatgtctctgtattcaggatgtttccttcagattctttctcatgaactttgtgtgttttcctgaatgtactacccaacaatattactggaagtgtaatgataaaggatttggccagtctttgatgatgtattccaataaatgatgatgatccataataataaggttcatgtttgatgacattggctgaaaatataattatgatgaggaattaataatgctgacagaaattattccctctaataactctctagaagttattaaaaatgttatttttggaaagcc

SEQ ID NO: 257635 - DNA, 302 bp, Homo Sapiens
gggtgagccaccgcacccagccagaaatcatttctatctccatttcatatagaacaaaagatggggaaggaaggtttcacttttaatttcagggtctgaaacaggaggagggctgctcataccaaggtaaaaagcaagggactggtatgtcacttaacacctttccaaagggtaacctaaatgatctttaagggggagacaacaaaagctacaggacagggctgggaaattaagtttatttggcctaattaacagaaaaaaatttaagcttacataaaaaaatttgggtactggtatcccgt

SEQ ID NO: 257636 - DNA, 772 bp, Homo Sapiens
  misc_feature (756)..(756): n is a, c, g, or t
ggtggctccaggcgtcaggaagcccaaaggctagggcgggtgcttcgagctaaaaaaaggatgggtgcagaaagagtacaaagcctttttctactcactggtatcccaggacacacagaaaatggcttactcaaccaagcgcaagagattcttggtagatcaaggttatagcttcaaggtgatcacgaaactcgctggcatggaggaggaagacttggcgttttcgacaaaagaagagcaacagcagctcttacagaaagtcctggcagccactgacctggatgccgaggaggaggtggtggctggggaatttggctccagatccagccaggcatctcggcgctttggcaccatgagttctatgtctggggccgacgacactgtgtacatggagtaccactcatcgcggagcaaggcgcccagcaaacatgtacacccgctcttcaagcgctttaggaaatgatgcttaggcagggtacttcgttcaagaccggcgcttggcacccttgttggaaagggattttcagcataacattttccttccacctctttgaccttccctccagcgttggccaaattgtgctgaggaagatgcatcaagggcttggctgtgccttcataggtcatctagggttttataaaggaggaggagacaatattttttcaaactttttggggagtggggtcatttctgtatataaaaaatgttaatatttaaggtgtatttatgttaccgttctgaataaacagaatggnaccattggaaaaaaat

SEQ ID NO: 257637 - DNA, 1205 bp, Homo Sapiens
  misc_feature (809)..(809): n is a, c, g, or t
gggtaccggtccggaattacgggatatcgtcgacccacgcgtccggcaaaatccattactgcagatcccaagaaagagctggaaaatttggcaacatcattggaacattacaaatttattgttgattactgtgaaaagcatcctgaggccgcccaggaaatagaagttgagctagaacttagtaaagagatggttagtcctctcccaacaaaaatggagagattcagaaccaagatggccctgacttaatccttgtttttaaagaaaggaaatgtgcaatattgaagtgatctttttccctagtcagacaggcccaattccattgtgatgtttacctttatagccaggtgagtgcagtttgaacttgagatacagtcaactgagtgtttgctaggatcctaaggaacataaagttaattaaaaacttacacctaattatgtaaattgccttgttaaagacatgtgatttgtattttagatgcttgtttcctattaaaatacagacatttctaccctcagtttctaaatgtagactatttgttggctagtacttgatagattccttgtaagaaaaaatgctgggtaatgtacctggtaacaagcctgttaatatattaagattgaaaaagtaacttctatagttactccttctaaaatatttgacttcctaaattccccccacccaaaatctttcccttttgaaaatactaaaaactaagttatgttattataaagtgtaaaatggtttgtcttaattataggagaaaaaggccttgttagaaataaaataaactgacttatttcactantgaaaaaaatctacaatgttaacccagcatgctgttggcaattgttgtaaacaaacaagttaaaggcaaaaattcttgccaagagaattaatgtgcgtatcgagcacattccgcaatatattatccaaaatatctttctgacacgcgtgcccgaaagtgatcagaaaaggaactaagccttttcacaaaggaacctggggttcaactaaaggggccgggcctgctcccccctaaaaaaaagcccccctgtgttgacaaaccaagtgtataagaaacctgcacgcagggggggacccagatgcccctatgggggttcctgggccataaggggggtgcttaagcgaagcctaaaattaatggaattttcgggccccctcccgttggaaattttttatg

SEQ ID NO: 257638 - DNA, 591 bp, Homo Sapiens
  misc_feature (13)..(13): n is a, c, g, or t
  misc_feature (323)..(535): n is a, c, g, or t
aaaaatgagagcncaaatcccccctacttatgggggtcctgggcctgggcttgtgggtgttgggggttccagagctcctcccctttcctgcctgtcagtgcaggatgcttctaaaatgtggactcagcagacattgttttgagtgcttgctacatgtcagattctgtgctaagtgcactcacagccagcatctctgtaagacctctagctgtcctgtaaggtgggtatcagtttcacattctcagatgggcggagagaagcccaagaggttagtggacttttctctagtaaaaagttgtacaggccgggcgcagtggctcatnnnnnnnnnnnnnnnnnnnnnnnnnnnnnnnnnnnnnnnnnnnnnnnnnnnnnnnnnnnnnnnnnnnnnnnnnnnnnnnnnnnnnnnnnnnnnnnnnnnnnnnnnnnnnnnnnnnnnnnnnnnnnnnnnnnnnnnnnnnnnnnnnnnnnnnnnnnnnnnnnnnnnnnnnnnnnnnnnnnnnnnnnnnnnnnnnnnnnnnnnnnnnnnnnnnnnctcatgccactcactacactaccagcctgggcgaaggagtgacactgtctcaggtc

SEQ ID NO: 257639 - DNA, 511 bp, Homo Sapiens
gggcacaaattttattagagtcttctttaatttggggagaaagcttttccaaagctctaaatctctaaatcgaaattattaaagtacctgggccttcactttctctcctaggaataagagtttacctgatgatgctttttgcaggcgagacggaaaaacctagttttccttggtaatgtttcatattaactctgagctgacttcaagaaatcccgaaacatgccagcattcaatttcatcccacggcctttgtggtggcaactgccaatcagaagctgccctgtctttgggaatagggtcaaatgagttgattctctgttggctttctgctgctattttttatgaactgaattccaagtgaaatcattctctgaacaagtggtcattttaaaagcctgctcccaaccctgtgcctgaaattcacacatctcagtgaaggccaaaaaaatgctttctgaaagaaccaggctctctttcgatagaaataattttaaaaaccttttttttaaaa

SEQ ID NO: 257640 - DNA, 609 bp, Homo Sapiens
cagaagacatctgttcttgattcagaagggtaaaaaaagcctaggacgtgctcattcacccatttctatgcttgcttctgaaaagatgtactatccaaacaatgatacattcttaaactctgacatataaaaatgctcaagtttaattcattttttgctttgtagttacagactttgcaaattaataaaaatgtgtcataaattgggttccttgggaagcaaattctgagatggagatggaaatttaaagaattgggaagtgattttgggaaaacctttgtggaagagcaggagtgggcagagagagaagctgacttatcaaagagtttcaacaagacctcagccaaaaccatgggcaactctggagctaggaaggcccttcagaactgaccaagctggggccaaggagcagactttgtaactctgcaaatatcagtcactggatggtggcagccctaagaagacaggagtttgggcaaggcagctctcctagcagccaaaggcagatctgggccacgtaccacaatccaccaatataccatctacaaaaaggagggcctcctaaatttaaacatcctgttcctttcctttacattttgttctctgaag

SEQ ID NO: 257641 - DNA, 468 bp, Homo Sapiens
accatgatgatcctgttttaaataagaaaataccatttcgcaggctccagatgttctggcatcctccctgtggatttcccagtgcctgcagctcacaggacaacaggggctgtggtagagtcacctatgagatcctggagtagtggatggaggagatggaacagtgaagacggaaactgagctcagtatccgggtgccaggagacaaaggccctttgctttttttcatttaatattctgatctacccctgttgacacatgttaagtatagttcattttgactgctatgtattatgttccattgtgtgaacatactgaaattgtacacttcaatactatactggatctccttgggtgtatttaagaggttttgtttttctaagtagttggttatatacaactaaaacctcaagagaactatctaaagcaatttcagcaaggtgatttggtacagcattaataaacagaa

SEQ ID NO: 257642 - DNA, 1449 bp, Homo Sapiens
  misc_feature (1407)..(1407): n is a, c, g, or t
  misc_feature (1409)..(1409): n is a, c, g, or t
  misc_feature (1422)..(1422): n is a, c, g, or t
aacaatgccagagctgtacgaccttgttaacagctataaacctgatctgatctggtctgatggggagtgggaatgtcctgatacttactggaactccacaaattttctttcatggctctacaatgacagccctgtcaaggatgaggtggtagtaaatgaccgatggggtcagaactgttcctgtcaccatggaggatactataactgtgaagataaattcaagccacggagcttgccagatcacaagtgggagatgtgcaccagcattgacaagttttcctggggctatcgtcgtgacatggcattgtctgatgttacagaagaatctgaaatcatttcggaactggttcagacagtaagtttgggaggcaactatcttctgaacattggaccaactaaagatggactgattgttcccatcttccaagaaaggcttcttgctgttgggaaatggctgagcatccaatggggaggctatctatgcctccaaaccatggcgggtgcaatgggaaaagaacacaacatctgtatggtatacctcaaagggatcggctgtttatgccatttttctgcactggccagaaaatggagtcttaaaccttgaatcccccataactacctcaactacaaagataacaatgctgggaattcaaggagatctgaagtggtccacagatccagataaaggtctcttcatctctctaccccagttgccaccctctgctgtccccgcagagtttgcttggactataaagctgacaggagtgaagtaatcatttgagtgcaagaagaaagaggcgctgctcactgttttcctgcttcagtttttctcttatagtaccatcactataatcaacgaacttctcttctccacccagagatggcttttccaacacattttaattaaaggaactgagtacattaccctgatgtctaaatggaccaaagatctgagatccattgtgattatatctgtatcaggtcagcagaagaaggaactgagcagttgaactctgagttcatcaattgtaatatttggaaattatctacaatggaatcttccctctgttctctgataacctacttgcttactcaatgcctttaagccaagtcaccctgttgcctatgggaggaggtggaaggatttggcaagctcaaccacatgctatttagttagcatcagttgtcaccaacagtctttctgcaaagggcaggagagctttgggggaaaggaaaaggcttaccaggctgctatggtcaactcttcagaaattttcagagcaatctaaaagcgccaaaattcgctatgtttacagtgatactattaagaaaatgaatgtgattctgctctgtctttttaagcatgatcaaataaaaaatgtggacatcacagtcattttctacccntntcaactctgcagnctttccctgccctccggaattccggtc

SEQ ID NO: 257643 - DNA, 523 bp, Homo Sapiens
aaaaacggagtaccattacccctgatgtcctaaaatggacccaaagaacctgagatcccattgtgaattaaaatcctgtaaacaggtccagccagaagaaggaaactgaagcagttgaaactcctgagttccatcaattggtaatatttggaaattatctacaatggaatcttccctctgttctctgataacctacttgcttactcaatgcctttaagccaagtcaccctgttgcctatgggaggaggtggaaggatttggcaagctcaaccacatgctatttagttagcatcagttgtcaccaacagtctttctgcaaagggcaggagagctttgggggaaaggaaaaggcttaccaggctgctatggtcaactcttcagaaattttcagagcaatctaaaagcgccaaaattcgctatgtttacagtgatactattaagaaaatgaatgtgattctgctctgtctttttaagtatgatcaaataaaaaatttgtacatcacaatcatttcctgtgccgaat

SEQ ID NO: 257644 - DNA, 206 bp, Homo Sapiens
  misc_feature (96)..(97): n is a, c, g, or t
  misc_feature (100)..(101): n is a, c, g, or t
  misc_feature (103)..(103): n is a, c, g, or t
  misc_feature (135)..(135): n is a, c, g, or t
gaaaggcaaactatttagtttttcggcagagcagggtcatgagtggtgggaggatgggaagactaaagagaacgcaagttttaaagagaaaagggnnttnncntataaacaaatattaactgtgcacaaaagganaacagcaataaaagcaacctgtagagcagtcacttctcgaaaggatgcctatttggtagttccaaaaccat

SEQ ID NO: 257645 - DNA, 701 bp, Homo Sapiens
gagatggagtctcgctctgtggcctaggctggagtgcagtagccagtcatagcttactccagcctcaagctcctgggctcaagcaattcccccacctcagcctcccaaatcaccagtattataggtaggaaccaccatatccagccgaaaatttttaaatctcacaagtttccagataaacaaaactatgtgaccaaaaacatttctgagcaagttatcccattaagttatacactctcaaataatctggaattatagcatcatatactttaaaacaacaggaataaaaagccaaattaaatacaggggaaataatttaaaagctctgtctacacattatatttcctctaaaaaggctagtaaattacagtatcatgtcaaatttggctattgatacctgggaagagctatctatactactcaaacacataatgattacttctttgaaagcaaatatatgcagttcataatttagaaaatacggcaataatgatgcaatgtataaaaaatggctaaactcataaaaaattaaggattactttatgtaagtcagttctactcatacctatgcgagatcccaacttctaaatactaattttttctgtgaaaagactgtctaaaataaaaacaaaatatttctatattaattatagcttttaagtataaaatttgaaatctaccatttcagtctttcttatttg

SEQ ID NO: 257646 - DNA, 304 bp, Homo Sapiens
  misc_feature (82)..(92): n is a, c, g, or t
tgagctaccgcacccggcctatattcctttctataatagaaaggtatttggctattttagttgatttaacagaaaaatagannnnnnnnnnnaaccaaaggacaaattaaagaaacagcaaacttacctggcaacagcctcaagactattactgtagatattgattcgcccaacaaatctgtaaaaagaacaaaattgcaaatgtgttttctacatccaggtgaaatccatgtaccagaaatatgagaatgaatgaaaatacaaataataaaacagagattgataaaactgtgaatgaactaca

SEQ ID NO: 257647 - DNA, 735 bp, Homo Sapiens
  misc_feature (11)..(11): n is a, c, g, or t
  misc_feature (30)..(30): n is a, c, g, or t
acccgccttgnctcccaaagtgttgggatnacaggtgtgagccaccgtgcctggcctgaaggtcatttttataaagatctctccacgtcttagatttgattcttcctttaaatatttttctcattgacatttgaaagcacctgaccttatataaaatgaacaattttcataactccataaaaggagaattatggcatcatctatttctttctcttgtctcataaatctaaaccatcaacctgcttatttttgtatactgtcacactgtgtattccctgcattgaatgcctgtctgttgacattgtctgtaaaaattgtgggaagttttctgcaccctgaaatttctgttatgcggattaaatatccactatccatgtttttccaagtcttacagtagaaagggtaaatgcagccgtcacagcagcctgttgttcgtcctgcaaatgtgtttccatcacattacacaaagcctctttgtcttcgtggttctaccctactaataagtttttaaaaaaattatgtaatgtgtgtatatacaaatacctatatgtatgtgtgtacacatacagctgatatctgctgagattatgtatgcatgaactatagaattaacttgtaattttaagaaaataaattattttgtaaagataaatctcatgtttaagaagaggaattacagttgaatcatttagggatgcctcagcctaaacataatatggaaaaagccataaccaa

SEQ ID NO: 257648 - DNA, 539 bp, Homo Sapiens
  misc_feature (502)..(502): n is a, c, g, or t
taggagagacagggtttccccatgctgcccaggcattctctctttaaataatgccttagcccactctatctctcatcgactttcaggattcatatgtatatgtacatacatattagaacttctcactgtatcttgtattgaacttaccttctcctatattttcctctttcctgtttactctgaacattcccttttgacttacctttcagttagggaattctttcctctgcggggtctaatttgctgctaaatccatctacaaaggtcctaattagaggggttgtatttttcacttctagaatatccaattttctttctcataagtcggaactttctacaaaattcttaatcaggtcaaaattctcaacatagctattttaaatctgataactagaatatctagagttaccgtgggcctgtttctattctctattgtgtcacatatcttgtcatgagcctattttgtgtgcagaacataaaatttgcaaaatcgtctgacaanacatttttacatgtagaaactggtaattctccagaga

SEQ ID NO: 257649 - DNA, 840 bp, Homo Sapiens
cttgcttgttgtataccagttgtcaaggacattataaggactcccaaaagcattttgaaggatggcaatatcaaataagtgtatgtcctctcaaatgaggcatttttaattgttaaaatctatttggacgctcaggttatgatatgtttatgaaaaataagcttcattatttttatagctacatcctattattcccttttagaaacaagaataacaataagttttaatagttgccatacttagcatttatcaggtctaatgaaaccaatattgaatctctgataaatattttctgatgttactagctatgggaaattagaactggcacaaccctgacattactaagtggaaatgttaggatttttcggcatcgcatgttagaatctctaaaatttaaacattcctgttaaatgactaaggtttgcttttatcaatatgaattctgaaggccaatatcataccattaactatgaaagcttttaattcctaaaaatagttttagagatattcaagcaatgctctcctaatatccatacgcaagtgtgtttatgacacaaattcactagtctgtttaaaaatgaattctttatattgactggtgttccacatatttcagtaatttctgttatgagaggacttgaaatagcaaattgccacacagttaactggatagaccacgtacgtggtgatcataaccacttggtactacacccagaaactcaaaattgtctttctcctgatgagatatgggtgtccttttgtacgtctaggcctaggtaaccagtggagtgattatattagcaaatgtgtttgtatccagagtcttcctgtcattgtaat

SEQ ID NO: 257650 - DNA, 316 bp, Homo Sapiens
gcaaaagggtgaacaagggacacaaggcaagtcaagtgagcagcctctgtaaacaagcagaaccagtccatggtcagtggtctcttatcaggagaccactaacttgttgatagctactgaaatagctctcttgtccagtcaaagctgtagttacggcttgtggaacaggaatcagtaggttagcatttggtggtgaatgagctgcaactgttttcaatattgcttatctcaaggccagtgcttattcaataactgctagagaaaaagaaaaatggccaggcacggtggctcatgccatgatattttgaggtgggtt

SEQ ID NO: 257651 - DNA, 471 bp, Homo Sapiens
gtgcagagtcttatcccagaaattaaggcagctgaccatactcaacttataccacagttaaaggaacaccattccttcaagatgaaaaagaatcaacaagaaatctggcaattcaaaaagtaagaatgtacctgaaccttcaaatgggtgcatttgagctctccagcgatggttcttaaccacattggaatgacctaaaatgacagacaggcaattcagaatctggatggcaagaaagcctcattgagattcaggaaagtgctgaaacacaatttaaggaattcaataattcccagtagaatgatccaaaagctgaaagacataatagccattaaaaaaacactacttctggaattaaaaaaaatactacatggatttgataatacatccagacctttagcaacagaacataccaaagagagaaaagaatctcagagcttaaaaaccagtttttataatcaactccatcag

SEQ ID NO: 257652 - DNA, 596 bp, Homo Sapiens
acatatatccacatatgggttagtagtagtatttgttgaacacaatttttggttttcacacaaatgcaccttttcaaaaatcaattgttccttctcccaacataccccaggctggcaaatgacaaatgaaaataaaatccctgctggaaatagtggtataaaaagcattttccattttatgtgcacttttcaacccagagaaaataagaaatttgttttatttttgtgcagtagtttctaaaatataatcggagagatgctagtaaacatttaactttagattagctttctcaaaacttttaagcgctggaatgaaagatttgcttacattctgaagctggtgcagggtatcttttttaagccttctttggcatctcattttcacgcaccatctgagatgacttggaaaacaccagaaaataacaacactacttccacaaaacaactgcctggacagtgcctatttctacagccatcatttatagaactctttttctggggagaagttttattttaagtgtcaatactaaaagatggtatatttggagttggctgcttcaatcagtaaatgtagtcagcaccgactcagaaacagc

SEQ ID NO: 257653 - DNA, 834 bp, Homo Sapiens
  misc_feature (166)..(166): n is a, c, g, or t
  misc_feature (206)..(206): n is a, c, g, or t
acagaaagatgtgagttcagccttcctgggcgtcctgggacctgatgggggtgggtgatctccttgtatctgctcttccttccctgaatcgattgctcaactagcaaaggtcagttgattgcgggctggttggcacgcttagggaacaaaggtcagtcccgcagtnagggacaaggctgtcccccatctcatcctgggtgccttanatctgatgaaacctcccgtatgtggttcttagaatgcagagaggtctctgtagagtgcagggcagttccctcgcggatgtgttacggtatcccttgattgatcgtgtcgagaatagaaagacggtgagcacaggcagcatccctggtatctgaagagagcctgggagacagaactaagctagctcatttccataatttccaaaactcatggtcctcttatactaaattgactccatttctgttttctgtcttgggacatttacaccattgctggtatattttggatctcctgggacaacagaaagtgctagtggttgtgtttggccttgttgatgggaagaagccaggagagcctggataggactccccggtccttctgcctgggagggaggagcaacaggtcttgggcagggcctggtgtaagcgtggtggcaaaggtgaatgaccctccagtctggccttccttgaggtcatatggagcaggcagtgctctgaggcagggagtttcagaacccgggttcagatgtcacagctctcattcctggcttgggacatctagctgggcacataaacttcttgtgcttcccctggaaagaggggtcatgatacccttaaaaagcaaaaagaa

SEQ ID NO: 257654 - DNA, 332 bp, Homo Sapiens
  misc_feature (241)..(241): n is a, c, g, or t
ggggaacataaagcattgaaaattccggtgcttgggcttcggcttcagagtaacgtcagtggcttagggttaaacggccattttattcaaatgcttgctatacaatctgaaaacacactggcaggtgatcctctccttggcaattcattgagtatccagagttctacgatgtttaactgaagaattggctaatgttttgatcctccagtgtgactgttgtttttgtttgggggtgggtttnggggttttttgcttttttattcctgaagcttaccagatatgaatggctaatactccattgttctgcttgttgtaatggtgaatgctttaag

SEQ ID NO: 257655 - DNA, 217 bp, Homo Sapiens
ccccagggaaaactagtgtatttttttatgagcaatatcaatttggagtgaccaaaagatacttaaaaatgggtttattttgatttctcatctgaaataatcatgttctggtattatatctatctatatttaataaatatatacattttaatttattatgtgtactcacatactatagaaagatattagtatgcatttaataaaacatattcacttg

SEQ ID NO: 257656 - DNA, 479 bp, Homo Sapiens
actgtgcccagccacttttaactttgcaatatatattcactaaatactgcatgctagtaatctaatagcagaatcttacgtactaaaaacttatggaaaatatggcttattgattctttgagatgtaagaatattcctattatttaattccagcagcagatatcatctttggttaagggttctctgagaatgcactttgaaaacaactagtgtagaaaatctctcaagtccttcccaccaacaaaaggattcacgaaacgagctctagaaaatacttataaaacttctatctctccattaagtccacaagcatatgtttttgaaaagtttgttagaagtataaaaagcatgaaagtataaaagatacaaacatactggattttttaaaagagggtttacactctttttcgataaattaattttataatgtctataataaaagattcaaatggatgattacgtttgcactaaaatctttc

SEQ ID NO: 257657 - DNA, 581 bp, Homo Sapiens
  misc_feature (18)..(18): n is a, c, g, or t
  misc_feature (21)..(21): n is a, c, g, or t
tctgagtgaaaagtgagnatnttaatgaagtaacccctaaactcagccagtcccatgtttttttaacacttggaatatctaattccatttacactgcattcttcaaatgtaattttcaaagatgccttttgcctcatccctggcttttaagtattattatagacttttggagactcacgaaacaagcaatccctaaattctcgcccaggaaagtatcttggattaaatggtttttgagaaccttgagagtgtatattctatgaaatggaagaaacaagaactagacagagtcacaaatgctgttgatcacagacaatctctgccatccataaggtaaatgtaatacatctggcgacctgctgagtgtgaacttgcagcaggtgaggaaggaactctgaactctcacaatcttgtttcttcatttcccagagagaaactcggcaaagagaaaaaggacatttccctccaggttatctgaaagaatttcaatgcttacctttaatcatgtgacattgtttatcttggattaaaagaaaagaaaatgtatttattttgtgcatattttcaataaaatatataaa

SEQ ID NO: 257658 - DNA, 847 bp, Homo Sapiens
ccgaactccgaagagtgtgagaagaggggtggcccccgttgatgatgggcgaattctaggaaccccagactaccttgcacctgagctgttactaggcagggccatggtcctgcggtagactggtgggcacttggagtttgcttgtttgaatttctaacaggaattccccctttcaatgatgaaacaccacaacaagtattccagaatattctgaaaagagatatcccttggccagaaggtgaagaaaagttatctgataatgctcaaagtgcagtagaaatacttttaaccattgatgatacaaagagagctggaattgaaagagctaaaacgtcatcctctctttcagtgatgtggactgggaaaatctgcagcatcagactatgcctttcatcccccagccagatgatgaaacagatacctcctattttgaagccaggaatactgctcagcacctgaccgtatctggatttagtctgtagcacaaaaattttccttttagtctagcctcgtgttatagaatgaacttgcataattatatactccttaatactagattgatctaagggggaaagatcattatttaacctagttcaatgtgcttttaatgtacgttacagctttcacagagttaaaaggctgaaaggaatatagtcagtaatttatcttaacctcaaaactgtatataaatcttcaaagcttttttcatctatttattttgtttattgcactttatgaaaactgaagcatcaataaaattagaggacactattgagagtgagccactagcttgattttctttctcctctgatttcagttcactgttcagtttagcattaaaataata

SEQ ID NO: 257659 - DNA, 935 bp, Homo Sapiens
atcgaacacgtgaattctgttagaagtggcccttgagatcagagagcgaaactagaaaaaaatggaagatacgactcattcagaaagaacacactgaaagtgaaagattcattaacaacgcgtctttaattctcagacggtgcaagggaagaggagcaggcgcacagatggaagctgaggaaggctgggctgacggggtcactgtgggtgcagccagggtgtaaggtgtgctggaaactcatcagagtcatttgagcaacctcggtcatggttgtggacatcaggcttccaaaactacaatttttcaaaatcagatcagagtctgaaaggtgctggtagttagggactgtgccttaggtactgaccctgaaaggtggagctgccttgaaggaggcctggtgaggtgacttcaaaatgcataccggccagcgggggaaggacccagagcccacctattaaatgagtctaacagtcatttaataaattgggaaattgggattctgaaagctgatgtgtgactcgctgaaagtccaaagctactcagagcagcaaagctaagcagaggctgagacttagattcaaacctcctgaccccaagaattgagagttcagcagtcttctatgtgaaactcaaaagcatccactgatgctagcatctgtcagagagaggcaggacaaggccaaggccacatggctgtgagctagcatcaccagcctctgctctgtcatcaggaggcatggcattggtacagatccctggaaccctgccaagtgctccaggctttgagggcagcctcttcagcagtgaaagaaatcagggaaagacaggaaagcccctccaaggtcagcgggctaggatgcaaaccacccagatggccccccaggcttgcatatcccttggggcttttcatccgccttgggtctttctaggtgtt

SEQ ID NO: 257660 - DNA, 462 bp, Homo Sapiens
cagatggggtttcaccgcgtaggccaggaaggtgaattatattttctaattgacacaaaagatgtgaaaataagtaacatacaatgataatggatgggaagctttcacgattggaaagatgtcaatgttccacaaaataagtgatacatttcatgtaatttccatccaaataccagtggaattttttttatgtgataaaagtagcctaagattaactttgaaaattaaatgaaaattgtgtaaaagaataatgagaaaagatttgctatgctgtatcattataaaaatattatgccaaggttcaacaactaaatctacagaatttgtacgaaaataaatccacagagaaaccaaaaacttgaacacagattctaatatagataagaatttcaaatatgataaagatgatgtttcaaatcagttaaataaatggagctgggacatttggattaacatctgatt

SEQ ID NO: 257661 - DNA, 848 bp, Homo Sapiens
gaaatcttttagaaatttttatttaaccataaactataaaatggggagaatgtaattcagctaacagtatcactatgagattatattagcaagatttcttagataactgtcattgtaaaccagccatgtgttttgattaacaggtagcagcatgtctaccagaaaaatggtttgaaaattctgccatgaggacatctattccacagctagaaaacttcattcagtttttatcgcagtctgcacataaattatctagaagtgaattcaggtaatgcatattttattttcacttctatacaagagagttcatcgattctgtatgctctcaacaacttttagaaagatttgtatttttactgtacttttaaaaatttgttaaaactttgtagagttagtagatatttttatggttacctttgggatggcttatgcatatccatattttaaaatgtaaatctcccccaaattaagcaaattcaaaaaactatagcacaggggaatatagaattaaaactataaatcaaaaacattttattaagcactttttaaatgtgtttttaattttcctgtccatttttagagactcaacagttgttaagtacaggtctccagcttggtatttatccagcagtagctagctctctgttctgaatgtttcgttcacagcaccagctgtttgggggcttaaatacagtggtattcctgttaacttcctctccaaaaaaaatttttaagcccagatttggccgggcatggtcgtcacgcctgtaatgttagcactttggcatgagccacggcaaccggccagtgaatttatgttttgttttaaacaatttatttggaaatat

SEQ ID NO: 257662 - DNA, 531 bp, Homo Sapiens
gcttgtgcttattaaatagcaagggtgtttactcaggatttggggatcagttgtagccatgttgaatttggcaaactgagctgtgtgccctgaaagccctctttttatttcttcatttccatattgtctgacttacttcacctaggaatacctgagttatccagtccagtgttccctgatgagagtggaagattttcctggagaggcagctgtgcatggccaggtcatctgtcaggatgttgtggtggtgtgtgatcagagcagagggcctttcttttcctgtactgtgctctacttccttatgcatgcttggtttcaaagatgaccgccactttaaaagaaagatttcctcacagctctccagagaactatcatactaaggtgataggaaaggcttctcggatacaagccaacaagtcagtcttctgattacagaaactcctctcacaggttatgtttggaaaggctgttctccattccacttataaattgaaagtgataagctactgtcttgtgatcttgcagggccag

SEQ ID NO: 257663 - DNA, 471 bp, Homo Sapiens
catgcctttttagatgtgcgaatgtttcattaagcgtatgaatatttgaagagatgtatgacactttaaaaactgtttcctctactgtgttggtggccaggtattaagactgttaataataacaatttagctctccaaatatcctgcatcacaggtgttaaagaggactggaaacaccttagttcttgtattcttgaggatgatttgccatattgtgtctagtatcacggcaaaactccaagtagcattttaaatagtatttatttgggttggaattatttctatgcattgactcatcttcctgggtttcattagctgtacgcattgtactttcttccttaccactatttatctcgaattcttgagattaaagtacagatgaaatctaaactttatctggtaaagttattagttcttacaagtagcaagcaaacggtaaactaaataggatgacctaattgtaccagattt

SEQ ID NO: 257664 - DNA, 501 bp, Homo Sapiens
  misc_feature (306)..(320): n is a, c, g, or t
ttgtagtatccagaaattacctggagtcagtatttttattcgccttctagaacttgggatccacacatcacccatttatattagtggtaaaattatctgctaaaatctaattgtaagaaaggcttaccttctgtcatcaagtgattgtatcatcctggatcgtcatttccaaggaactagcctttcttttcctaagcgtctgtatgtgttctaaaacttccagtatatatttatagaacttagaaaaaatgttacattattcagagtagcaagtcttactggagtacctatgtttgttttcttggnnnnnnnnnnnnnnnaagtttaaaagtagtaattaaacctatattttgtgattgtttcctggtctgtgtttttaaattcctttccttcagttttcctcatgaagatgtttcagatactgaatttgtttagacattgaatgactttggtaaaggcacaattaatcacattggttgtactctgaagacagacttcttt

SEQ ID NO: 257665 - DNA, 863 bp, Homo Sapiens
  misc_feature (673)..(686): n is a, c, g, or t
tgagtatgtaaaatgtcaaaaaaattagcagaggtctaggtctgcatatcagcagacagttttgtccgtgtattttgtagccttgaagttctcagtgacaagttttttctgatgcgaagttctaattccagtgttttagtcctttgcatctttaatgttaagacttgcctctttaaaattgcttttgttttctgcagtactatctgtggttaacaaaatagattatttctctgctttaatatttgatatcttacatctaaaataaattctctccacatataaaacccatagcctttggagatatggaaaatggtatctttcagatttctagaagttcaagtgtcatacaacaaaacaggaaccccctttactcttatggacctcatttcaatatactgtttacagtttgatggaattgtataatttaatatttctcttgtactgtagtttatatttatttacagatttttttgtactgtgtgatttgaactttttgttccttgctatgatcaatgtttatgtagtagagcacttatgatcacaaattaagttttttggtttgattgcactacattaaattttttaatgcagttctgatttttgactggactaaaactgtgtcttaatgtatgtgatgagtacttaaaattttaatccatgtggtccccccccnnnnnnnnnnnnnngcattgtatgtcaaaagcgcttgttctttcgtgcatgtgtaagatttaatggttccattgtattatttgaccatgacattttggagaaacattcccagctgtaatgttgtgtatggtagttctcactggatgctagagttttcaaaaccactattcttctaataaattttgttgtga

SEQ ID NO: 257666 - DNA, 497 bp, Homo Sapiens
cacagtgagttgatggtgttgctgggttataagcagcttcaaagaggaaggcattttgaatgaaggtggaaacataatggccaggagaacaacaaaaggactaggaaacagtgaacttcatcttggcctcaagttcctgaggtgcatatgaataaacagtctctaacccagagggtttcaagaaaagcagagtcctcaaaatccaaaggtagagtttccccacattgatattatactaattacacgtataacagtactttggaaaagcacaggtctctggtcacctctaaaaggcaaggttggtaaggaggtcagggtgtcacctgttggtagtcttaactaaatggtctcttcaagggatctaaggatggaaaggggatatataatggttggattaaaggctcatcattgattagcaaattgtcccttttgtttcttaaacccaatttgtacagggaaagttatgcccctgtaagatatttttaaatggggaaaaa

SEQ ID NO: 257667 - DNA, 605 bp, Homo Sapiens
tttgcaacaatgcaccctttcgaaggggctatcagtgaagaggtttcacttgtagctgtgtaagtatttctacagtgatggagggtctggggtcagtgctgagtcttcccagttcactgagattgggttgtacaattgggaccagctgtagttagtccattggttgtacttgcatgacactggagtttatgtaaatagctaagtgaagtattatggccagtgactccacttggattcttagcactattgaattttgtctccatgccttccccaggaccatgatgaagaagtgtcggattttggattaatatatttaaataagatgttttgtagaaatattttaaatatatcatttaaatgaagcccatgttttagaagtaaaaatattcaaaatatccaaagcagtttttactaaaaagtatggaaacaaagattagttttttaaataccaaaaattggagtattctattggcacaattacaagaaagaagcagagacagaaagactaaataagttagacccaattttgaaatgttttcccttcttcttaaaggagaaaaattcactggacttaacatgagatgtaaaactgtacttctagccag

SEQ ID NO: 257668 - DNA, 608 bp, Homo Sapiens
  misc_feature (163)..(238): n is a, c, g, or t
gagcagctgtcattcttaggtagaatctcctttctttgtgtactctattaacttctcttccatctcagagtaattgattcctcagcattttattgatgatatggaacagcttttgaaataatttcttcagttttctgtgcgaaatcactttttttccccccannnnnnnnnnnnnnnnnnnnnnnnnnnnnnnnnnnnnnnnnnnnnnnnnnnnnnnnnnnnnnnnnnnnnnnnnnnngagtgagtccctgtctcaaaaaataaaatgagctccttaccaactatataaatatacaggtcacctttgtatgccttttaaaatatcaccttcctcagaaatcaattgtaaaatgaggtcatttggtggtgtggatagggcagtgacttcctgctttatttacaatcaacaggagggacagctaggctaattcaaattccattaacaatccatcttccccttggtgatatttccctagctgggttcctcagcatgttatttaacatgatgaagttccatacagtcatgtttatttgcttcagggaagaatgatggtcaccattagtaaccccatctaaaaaccgaactaagagtcccagttttttacctt

SEQ ID NO: 257669 - DNA, 555 bp, Homo Sapiens
  misc_feature (157)..(243): n is a, c, g, or t
  misc_feature (479)..(479): n is a, c, g, or t
tgggataaagtgatcctcccacttcagcctcagcctctcgagtagctaggactacaggtgcacacaaccacaagcagctgattaacacaaattttttttgtagagatggagttttattatgttgcctagactggtctggaactcccagactccagcnnnnnnnnnnnnnnnnnnnnnnnnnnnnnnnnnnnnnnnnnnnnnnnnnnnnnnnnnnnnnnnnnnnnnnnnnnnnnnnnnnnnnnntctgtcttgctcactctctctgcatatatctggggaagtcttactgatacataagttattttctgtctctcacttaccagttaagcttcagaagggaagatatgtatgtatgtgatatttttttccccactggatttattccgttacctagaagaatgcctgtcgcatagtaggtactcaataaatattcgttaatcacctcatcaaatcaaagttctgacaagagaaacactaanattttcttcaaaacaatattatttgtgttctctccttgtgtctgttaaaagatttcacgtaagggagatgaagaat

SEQ ID NO: 257670 - DNA, 1286 bp, Homo Sapiens
ttctaagaaagtaaacgttcctccagaaaaagcaatgatgcatataaattttcaccgaccgccagcgaagccgaagcctcagaaggtgaaggaaattgagtaccagaacctcagatttccagtagatttatcgaatccatttgctgtggcaactgttttaaaccaagaaccaggaaaattgaagattaaagaattaagagaagttttggaccagggcactgaaatttcaaaaacgagacagatgaaggaggcactctttgaacagaaagtcagacaggacattcacgaagagatggaaaatcatcttaagtggcaggtgcaccttggtaaagatcctatgtcttttaaacttaaaaaagagcttactgaagagtggcaaaaagcatgtgccaaatataagctagacagaggagatcctattttggatgaggaatttcagcgacttaaaacagaagttagccataaacgggtcgttcgcaatcaagaagagaaaatcaaggaatttcatcctacttttgatccactcattaataacacttggctcagcaggtccagggcacaaaaacggtttcaacaagtagcacgcaaggtcatgattcagggacgattattcaatatgctgagtgctgttcgtgaaatggacaaagagagtatactgagaaagattggccaagcaaaacaatcgatagcacaagaggcgaatttcttcaaattcttcctgaggcggatcagtcaggatgattataccagccggttctctgtgtcgcccaagaaggtgctgcccttcgctttcccagactgcagcccaccccaggactccaacaagttggctcctaatggccttggactggtcccaattaagtcttcagaagttcaaatcaagcagagttattccttcttcaatatgcaggttcctcaactgtacaaaattaagagatatcagccattctctgtccacaagtcttcaacaagttacagacctcaaaagcttgcccgagccctaaagcaaggagctgaggatgaagtccccaccatcacagcccttccgaaacaggactccacaactcagctctttggcaaaacatcaatcttgagcatgaaaccacctgaggccttagccatgtctctagattatgatcctctgtatgtttttgtaagtgacaactggcaaaagccttgttttctgtgttcctttatttcagcaattactctataggaaacagagccctcattgggaatattttttctctttggaatttcaagtgttaaacaatatctgacctttt

SEQ ID NO: 257671 - DNA, 505 bp, Homo Sapiens
aaagatatttacccagatatgtggatttaactttattatattaggtcaatgaaaccagaatttatgtattagtggaagctgaacttccagtatcgcctagactgaaggtccccctccatatgggaagctgccctcttcaccaaatacacaatgagtaaaggagaaaccacaagcagaaatggaagaagcagatattcactagccaggctggtcaacctaattaaccctagtaggcagtgggacagcagttgtgttaaccagacaaagaactcttctggaagactggaatagaccctagataaacactaacttttttctagattaacttcgaataaattttatttgcattagtaaaattatcccaccatcatagttattttattcaactatattttccacattctttaatctttcaaagtgtatataaagatgtcttaggagatataaaggccacaaagttaagatgaaattcagataaaatttagtaacctagtcaataaaagtc

SEQ ID NO: 257672 - DNA, 706 bp, Homo Sapiens
  misc_feature (457)..(576): n is a, c, g, or t
  misc_feature (585)..(598): n is a, c, g, or t
atttagtaaaagttattgtgcaagaaataaaagcaaaaatgcaatattaggatttgtatctattctataaaagagagccttaggacatttctccctacctctgaatgacatgctttttaattatagtacccaaattaggttttatctttaagaggctgcatttcttctctaattctaggtgccaatgggtcatgtttggttagaaggtgacaatctacagaattctacagattccaggtgctatggacctattccatatggactaataagaggacgaatcttctttaagatttggcctctgagtgattttggatttttacgtgccagccctaatggccacagattttctgatgattagtaagcatttattcttttgacttgattattgtctccttttcatgtgaatttattactcccgttgaaaccgtgtacttaccaataaactatttgctattcnnnnnnnnnnnnnnnnnnnnnnnnnnnnnnnnnnnnnnnnnnnnnnnnnnnnnnnnnnnnnnnnnnnnnnnnnnnnnnnnnnnnnnnnnnnnnnnnnnnnnnnnnnnnnnnnnnnnnnnnttggggggnnnnnnnnnnnnnnaaaaattttttaaaccctttgtttggggcccgggcccaaaaaggaaagggaactgggccttcccgtttcccaaaaaaaccggggcaaggaatagggttggattccccc

SEQ ID NO: 257673 - DNA, 748 bp, Homo Sapiens
ccaagtcgaccagaactgaccattctcagccctacttcagaaaacaacaagaagcttttcaatgatctgtttaaaaataatgcaaaccgtgctgaaaatacagagagaaagcaaaatcagaattattttatggaggtgatgactgtagaaggagtctatgattacctgatgtatgtaggacgggtagttttccaggttcctgactggcttcatcatctcttaatgggaactcgaatcctctttaaaaacaccctggaaatgtatactgattactatcttcagtgtaaactagaacagctatttcaggagcaccgtttggtctcactcataacacttctcagagatgctatattctgtgaaaacactgaacctcgctctctccaagataagcaaaaaggagcaaaacagacttttgaagaaatgatgaattacattccagatctgttagtcaagtgtattggtgaagaaaccaagtatgaaagcatcagacttctgtttgatggcttacagcaaccagtactcaacaagcagctgacttatgttttattggacattgtgatacaggaactgtttccagagctcaataaggtacaaaaggaagttacctctgtgacatcttggatgtaaacacttggatttggtatagaataacccattgaaatttctgctgtgcgagggtggtagaaatttacttttttgggtatattcttatatatattatgtacgtcgctgtctgaaattttagtta

SEQ ID NO: 257674 - DNA, 292 bp, Homo Sapiens
gagaatgtactctaagaccatagaaaaaagaataaagataaaagcaaaagcagaatttaatgaactaggaaagagacacagagtaatacagggcaataatgcctacatgtctgcttcttgtaagaccaatgaacctaatgagcttttaccaagacaaggaaaaacgggagaaggtacaagtaaacaacaaacactaggaatgaaaaagcagacataattacagatgttgcaaatgtataaactataacatgaacaactttatgctagtcagacaaaatggacaaattcctag

SEQ ID NO: 257675 - DNA, 249 bp, Homo Sapiens
agaatgtaataacccagtggcttactgtttttcttaatctcttttaaaaaaactttagaagaatcttttaggaactaatatctcttgttctgaagaaacatttatctgacgttcagcagttcctacagttttacttcagtttatttttcttctgtaaaatgcaagaaaatttaatattttgactaacatgtcttttctgtttgtatcatttaaaggcaaataaacttggtacgtatttcatatctattt

SEQ ID NO: 257676 - DNA, 1006 bp, Homo Sapiens
  misc_feature (43)..(89): n is a, c, g, or t
  misc_feature (507)..(524): n is a, c, g, or t
  misc_feature (533)..(572): n is a, c, g, or t
  misc_feature (618)..(691): n is a, c, g, or t
gctgggtggcgaattcggcacgagggacttgtatatttgtacnnnnnnnnnnnnnnnnnnnnnnnnnnnnnnnnnnnnnnnnnnnnnnntttaaagggtgtacttatatccacactgcacactgcctagcccaaaacgtcttattttgtggtaggatcagccctcattttgttgcttttgtgaactttttgtaggggacgagaaagatcattgaaattctgagaaaacttcttttaaacctcacctttgtggggtttttggagaaggttatcaaaaatttcatggaaggaccacattttatatttattgtgcttcgagtgactgaccccagtggtatcctgtgacatgtaacagccaggagtgttaagcgttcagtgatgtggggtgaaaagttactacctgtcaaggtttgtgttaccctcctgtaaatggtgtacataatgtattgttggtaattattttggtacttttatgatgtatatttattaaacagatttttacaaatgnnnnnnnnnnnnnnnnnnctcgaggcnnnnnnnnnnnnnnnnnnnnnnnnnnnnnnnnnnnnnnnncatggtcatagctgtttcctgacccagctttcttgtacaaagtggnnnnnnnnnnnnnnnnnnnnnnnnnnnnnnnnnnnnnnnnnnnnnnnnnnnnnnnnnnnnnnnnnnnnnnnnnntgccgtacccgggaatttaccccgcctaaggaccgggcttttttttgggatccccacgatcctccttgagaaccctttcttcccgcacatactctgcctgcttgccaaacaaaaaagcccaccgcctacagtcgtggggtttccctcgccgcctcctgaagcccccattcccttcttttccggagggaagtcggctttccccagcaacgcccatattcccccccgatttgctccactatagcccggagccccccatccgcggacccctcccctttctcaaataccccggtgcctatctgcgccctccccgcccca

SEQ ID NO: 257677 - DNA, 1776 bp, Homo Sapiens
  misc_feature (1591)..(1591): n is a, c, g, or t
  misc_feature (1645)..(1645): n is a, c, g, or t
  misc_feature (1686)..(1686): n is a, c, g, or t
  misc_feature (1700)..(1700): n is a, c, g, or t
  misc_feature (1718)..(1718): n is a, c, g, or t
aaggtagcgaggcctgggtggcgctcagatcctggaccacctaacgatgatcgacaacaaaaacgagtctgagctggaggcccatctctgccggatgatgaagcacagtatggaccagactgggagcaagtctgataaggaaacagaaaagggagcatctcgaatagatgaaaaatcatcaaaggccaaagtgaatgatttcttagctgagatttttaagaagattggctctaaagaaaacactaaagagggactagcagagttatatgaatataagaagaaatactcagatgctgacattgaaccatttctgaaaaattcctcacagttcttccagagctatgtcgaaagaggccttcgggtgattgagatggagagggagggcaaaggtcgtatttccacttcaacaggcatctcccctcagatggaagtcacatgtgtgcccacgcccacaagcacagtgtcctccataggtaacacaaatggggaagaagtggggccatctgtctacttggaaaggctaaagatcctccgacagcgatgtggtctggacaacacaaagcaagatgaccgacctcctttgacctctttgctctccaaaccagcagttcctactgtcgcctcttccacagacatgctccacagcaaactctctcagctccgggagtcacgggagcagcaccagcattcagacctggattctaaccagactcactcttcaggaactgtgacctcctcctcctccacagctaacatagacgacttgaaaaaaagactggagagaataaagagcagtcgcaaatgaagctgccccactcccccggcaccctgcagctttagtttactaaactagaagtcctcatagtttaaaatggcctcagcaggcctagtgtatacaaactggttgtatgtatcatgccgtggagctagggggaggagtcattgtggcacaagtatttgtacatactctgcttctctctgtcagcgtcctgctgctctagaagactgtccgtggatgagtttagtgtacagacttgtaaacagctgccccctctctgctcagtctagttcccagatccttttctttttaattgctcatttgtaaaattgtcctaatctttcctagctttttaatagttaatattagaaactctttaatagttttcctttcagtttgtgagctcttctctgtcgccctgaagggtcactgtattctgtatgaatgcatggcatgatacaactaatttaagagtcttttataaataaagtttgcattaactatacctgactcccaagatgctccatatcatggagtgttgggcagcaattttttaactcttggtaccagctgggtattcagccagttagagaaaggttaattactgcttacagagcttccctttttcttggctcacagacttggagctgtcttttattcctttggaatggaaggaactctccttccctgctctccacaaacagctcctagggagcagaaaaatctcatccttccttgttttgagattttggtcatgatttccctccaattatcaccagtcgtttcaagaagctcttgagcatcctaccactntgctgaccaaaagcacacaagattgcgcccagagattggctgggcttcagaggntctcacactacaactaagattgtgttcatttgacctaaggnagttgggaaatctntaagggttgctgcttggnttgataaagccccttttgtccccagcttacaattgctttacattcaatccgagtaggg

SEQ ID NO: 257678 - DNA, 603 bp, Homo Sapiens
taggattcaacaagatttatttattagattaagtgaatatattaacattccatgggcaaaattacagaagacatggttaggaataaaatttcctcatctccttgatgtcttcgtccctcatattaagtccttaatttgcagagttagcaacattcttaattccttgtgcaataaattttcttgtggaaaatagttttacctgttagtctccacacgtatgtctgatctttgtgatacggtatcaggcatcccctgacctgttggtttgtcatcttttccattttatcttttcatctattttgcaaactcatcaagatgacttccactttccagcttctccattatgtacctaagggttgtccttaaatttttgtccaacctaaaaaataacaatcactaaatgatagaactctataataactaaacgatagaatgatagaaataatttccatcattcctgtcggagtgatagaaatctcctagcctactttgaagcaaatcaaaagcaactgtgaagttaatttaatgaaattattttctctttttgaggcccactggtgcaactttccttatctccaagctagtagaaaaagctgttgcttt

SEQ ID NO: 257679 - DNA, 603 bp, Homo Sapiens
aaaacattcccatacattgcgtgtgggagtatacatcggtgcaggcttcctggatgacagttgggtgatacgtgtcatgtggcctaaaagcctccatgtcatttgacctacgaattctatctttgggaatttatcctaagaaaatacttaaggatttagttagtgataagatgttcatcccagcattgcaatggagaaaaatgggaagcaatggtttggttgggaatttattccttttctgctgtaacgaaagtttgcaataggggattgcttaagtaaattattgtatctccatccagatggtggagtaccgcgcagacattaaaagtcatgtaaaagaacatctgactgaaagaaaaatgctccttgaatattaaaaggttgtaaaaatagtgcatgttatgtgatttcaattttgttttttaaaatatgggtgtatgcttgtatacgtagagcagataaaaaagacggaaggcatactaaaaaatgttgagtggttatctttgtatggtggaacaaagtcactgtaattttcatctttggtttttctgtaatttccaaattttccacattttgtatttcatataataaatataatttaag

SEQ ID NO: 257680 - DNA, 823 bp, Homo Sapiens
  misc_feature (682)..(683): n is a, c, g, or t
  misc_feature (686)..(686): n is a, c, g, or t
  misc_feature (777)..(777): n is a, c, g, or t
gaccatttctttaagcatcaggcagatatgcttctgcacggaatcaaagttgtatcctacggggacttgttttgaccactttccagaatatgtgcaagaccctgccactcagatctgcaaaaagcaaagcccagatgctgatcgcgtggacagcaccacattattgggtaatgcatgccaggactgtgcaaagaggaagttagaagagaatggaattgaagtttcaaaaaaacgccacacaatcagatactgatgatgctgaagggtcttgaaatctttacaagtaaaacctgcaacttgaaaactagccttctgtaaccacagtgcccaaacgaagaggaatgtatggagaactccacgtggatctctgattgcgaaaccgtcacatacaccaagagagccacatgggcatgtggccctcaaggctgggtgagagggctcccctgtgtgttgaactatgcaggagggtgacgcggacacatttcaggtggactttgcaaggactgatggatagctacctcagggaccagaatccgtgggaagggatggacctggtgttcccgttcccatctgacaggctctcttttgtcaaggtggtatttttcgtaataaaagggggaagagtaaaagactgttccaagccaacagtagcctgcccaaggaaccccaataacaaaaaaannaanaacaaaaaacattggcgggccggccttcggcccctcgaagaaagctttctctaaaacccatttccgtttggggccggccgggggcccccgnaaaggggaaaagggggaaacagggggcccaaataagctggtttttc

SEQ ID NO: 257681 - DNA, 433 bp, Homo Sapiens
  misc_feature (397)..(397): n is a, c, g, or t
  misc_feature (405)..(405): n is a, c, g, or t
  misc_feature (419)..(419): n is a, c, g, or t
gtgtgagccactatgcccagcctacactttattttttaattaacagcactgataaccatattcactgatttgtgaagcctctcactaggattcttagagactaagcgccatcaatgaccaatataaagaattcttaaaatatctcatgctaccttaaaaagaaatttgtctctaaactcacattgctgaacaacagctgttttctatcggttgcacaagcaatgacaatgtaaaaagtgctaagagtagtttgggtttgtgtgtaaaatgggaattaggtcctagggctgaataattataaacatattttaacaaatgaatgtctaggtgaggatatcctaaagttgtgctgggacatatggggacatctaggtatgcctgggcccctggactacanggtggccnggctacactttccnatttatttggggca

SEQ ID NO: 257682 - DNA, 811 bp, Homo Sapiens
  misc_feature (320)..(336): n is a, c, g, or t
  misc_feature (701)..(701): n is a, c, g, or t
  misc_feature (703)..(735): n is a, c, g, or t
  misc_feature (737)..(738): n is a, c, g, or t
  misc_feature (745)..(745): n is a, c, g, or t
ggagttacccaagggatgtcagttttttatccctctgcatgggttggattttccaaaatcataatttgcagaaggaaggccagcatttacgatgcaatatgtaattatatatagggtggccacactaggccggggtccttcccccctcacagctttggcccctttcagagattagaaactgggttagaggattgcagaagacgagtgggggaagggcaggaaagatgcctgtcgggtttttagcacagttcatttcactgggattttgaagcatttctgtctgaacacaaagcctgttctagtcctggcggaacacactnnnnnnnnnnnnnnnnnaagatgcggtaatgaaaccggttagtcaattttgtcttaatattgttgacaattctgtaaagttcctttttatgaatatttctgtttaagctatttcacctttcttttgaaatccttcccttttaaggagaaaatgtgacacttgtgaaaaagcttgtaagaaagcccctcccttttttctttaaacctttaaatgacaaatctaggtaattaaggttgtgaatttttatttttgctttgtttttaatgaacatttgtctttcagaataggattgtgtgataatgtttaaatggcaaaaacaaaacatgattttgtgcaattaacaaagctactgcaagaaaaataaaacacttctttggtaacncnnnnnnnnnnnnnnnnnnnnnnnnnnnnnnnnncnntgtcggnccgcctcgggccctccaagaaagcttttctaagacccatttcggttttggccgcgcggggccccaa

SEQ ID NO: 257683 - DNA, 227 bp, Homo Sapiens
tttgccttaaatacaaaaaagtttaatcccaaagggtgaaagcaaagggggctaaacagtccaaaaagcctaatttgcattaaacattttaaaaagctacctgggcccactaaaattttagcaagaaaacaaagtttatcagttttccatataacaagaagtacatgcctagaaaactccttttttccaatactccaatggaaaaaaacctactcaatataaaaaaa

SEQ ID NO: 257684 - DNA, 760 bp, Homo Sapiens
  misc_feature (201)..(352): n is a, c, g, or t
  misc_feature (361)..(375): n is a, c, g, or t
  misc_feature (399)..(409): n is a, c, g, or t
  misc_feature (450)..(579): n is a, c, g, or t
  misc_feature (594)..(603): n is a, c, g, or t
atgcctgcaaataatcaaaagtaaaactggagtagcctaattttctgggagcaggtggagaactttccctcctacacagtgaggacagtcccagtctgctgggataagtgagaaagcccagggtgtaggaaggccctttttacatactcttttctcatgagagctcactattttaacaataaacaataaacgttgtttctnnnnnnnnnnnnnnnnnnnnnnnnnnnnnnnnnnnnnnnnnnnnnnnnnnnnnnnnnnnnnnnnnnnnnnnnnnnnnnnnnnnnnnnnnnnnnnnnnnnnnnnnnnnnnnnnnnnnnnnnnnnnnnnnnnnnnnnnnnnnnnnnnnnnnnnnctttgcggnnnnnnnnnnnnnnnaaaaatttttaaaaacattttttnnnnnnnnnnnccccaaaaggaaaggaaaaggggccaaagtttttcccaagnnnnnnnnnnnnnnnnnnnnnnnnnnnnnnnnnnnnnnnnnnnnnnnnnnnnnnnnnnnnnnnnnnnnnnnnnnnnnnnnnnnnnnnnnnnnnnnnnnnnnnnnnnnnnnnnnnnnnnnnnnnnnnnnnnctcaaataaaaatannnnnnnnnngggcaatttatggggaaagggggggaaatttctttagaatttcccgccgcagggggaaccccctccccaacggggttgggaagaaacctaaaattcccccgggggggattagagaaccccttggcggcccctgtggggaaataataattctcgcccc

SEQ ID NO: 257685 - DNA, 170 bp, Homo Sapiens
tgccatgttgctgggtcacgtgtgtgtacaactttctgttttccagagtagactgtcatctccacaaggacagaaactgtatcttgtatgatcttccccattgccacacagcatcacatttaggattctatacagacagaagaatgagcaaacattcattgtgaccaagc

SEQ ID NO: 257686 - DNA, 490 bp, Homo Sapiens
gattcattagatccttaaaaggaatggaaagctttgactccagaataaaagacatttatttcctttggagtcttattcttttaagtacttcttaaaacataaccatcaccatcaccagaattttttaaacatgagaataagacagacagaacttttctttggtagtgttaacacaaaaggtgtctgatcttcatacaagcaatctttgctcacatacatcaaaaatggaatgacacaaggaaagaaccattttgcaaaaggaaacaagacaagctgccgtcagctagatacgtttcgattgttcaggaaagtctgtacaggaactttgattggcatcctgcttgtctaccttctttcctactttaaagtggtagctctgatcattgttgtcagtgttttctgacccctcagatctggtctttgcctatcatgtctgatgtaggcacttggttcgattaccttgatttgcaggtgaattggtcctcaatcc

SEQ ID NO: 257687 - DNA, 667 bp, Homo Sapiens
  misc_feature (12)..(12): n is a, c, g, or t
  misc_feature (102)..(117): n is a, c, g, or t
  misc_feature (527)..(554): n is a, c, g, or t
tttcggcacggngaaataatgtctcaaggactaaaggagcaattcaataggtttagacattgtagctctctacatcttgaattggaagctggaataaagagnnnnnnnnnnnnnnnnaccctcatcgaatgctgcttactttgtcaaaagactggctatgaccaaggtgaggatatttctggaaaactgggcaaaaagggaaagcccacagtattcttccttggcagtcaaccacaggtttactttacaatgatgtattaaaaacttgcagcttgaaaaatggaatgcaaataaaaggttctctttgggtttgtcttaatggagttaaactggagcagcctataaaacatttttagggtgatgtcctctgggtccttctgttctgcacacccactcagtcttctctcccagccccttgactgcacacacccctctttgcctgaagatctcctgacttgtcgccagccatagaggctcgaaagctctggttgtgaagcataacgcaatgcatagacctgtcagccatnnnnnnnnnnnnnnnnnnnnnnnnnnnngcgacttggataacttgtatgccttcttttgtatcaatgtaccaattgtaaataatgctgatcaacctttgtagagaatagtttatacagcatattctattattgctgattct

SEQ ID NO: 257688 - DNA, 1086 bp, Homo Sapiens
  misc_feature (321)..(336): n is a, c, g, or t
  misc_feature (850)..(850): n is a, c, g, or t
ttctcccggcactggctcccatttctaggcaccctgtaaggctctggtatacccagaatgagcaatcctaatccaatactggaatatctaaagaagcagaagtcttttctggggaggtcagcaccatccctcactgaaccatacacacactgaccacaaaggctgcaactcttacatggagtatctaatgaaatattgtgtttataatgaaaatataatgtaaaaatgtattcataaaaaggatttcaaggcacataaagatactgacagatggacatagaaggacatgtgtaaaaataaaaataaagtacttgtcaggannnnnnnnnnnnnnnncctccctcctgttttcacaaactatctttattgatgttatattgtctatacagaaaaaaagaacagtttactgacagctgctagctggaaggctttttcattctatacagctgaaatgaatctgagggttctattcatctgggaaaaaggaaaaataacatttattttgctcctgtggtgggtggatttgtagctggggtggatttgcttggctgccaattactggtaacagttatctgattgttatacattttataaatgtgtctagcagtgttctgtctggaaatgcatacggtgtagaaaataactaacataacttaatctccctttccatgggatgtggaaaactgaccctggttaacttagtggtgtggcccacacctgactatgcacagtgtatgctttggtaagtcccaggaaagtctggtctgatactgttctccagggaataatgctactgcggcaaattatcctaagattgaaaaaccaggttttgttgcagtttcattgtgtncttaggaaagcaaatcacggttgaacaaaaatgttaactcaagtgccaaccagtccaggcagagggcagcttctagtggagagtcagtaacactggcactaaggtgggatgggagggtgcatgtatcactgctgatgggagtgtagactggttcaagagttctggagcattatttgtcaaaatttataaaaatgttcaaagtgcacccagcaatcctcctctaggaatcgtttcta

SEQ ID NO: 257689 - DNA, 376 bp, Homo Sapiens
tcgtgggatcattaatgcccactgtttggcatcagttcactatcagagtctatgctgttgagttcttttctgggccactcctagcacataccgtgcttttgcgtgaattgaaaaaagatgcccgtccttcaggcaaatgcagcgccatccagggcacgtgacttggccaagatgctctgtacaattaagtgtgttgttggacatttttccactactgatgatggatgagtgtcagtaacccacattctcttcctcaatgccatgaatcccgtggtaaataatttgaagcaatggttagatgtgattagcatctaagcctaggaggagacaatcactgagactgttgataataacaatattaataaaaactgagtga

SEQ ID NO: 257690 - DNA, 693 bp, Homo Sapiens
  misc_feature (31)..(31): n is a, c, g, or t
  misc_feature (120)..(120): n is a, c, g, or t
  misc_feature (409)..(446): n is a, c, g, or t
cccaagaaggagcctccaaggacaagaagancgaaccaagccatgcagaagcccgccaccaaatcactacagtggtactgccacgctgcccgtggtcgtgtcttgatcgtggtgttgtgnacgtggccacgcgccccacaatcacgaagtgagccccgcagccggccgcggaccccatcgcaaggaaaagaaggcgcggaagggggacgcaaacaaaaaatggctttcatattcagagatgttcatgttgctgagctgtaagcaggagcaccctgtcttctctggtctttgacttgattaaagtatctccgctttcttgggagggaataggggatgttttatcagtgaatgtgccatacaccttatggtccacttcatgtgcctttcagacttcaaagcgcgcgcgcannnnnnnnnnnnnnnnnnnnnnnnnnnnnnnnnnnnnncgtgagcttctttttctctcctaaaaatcgataagtagctccacctgaagagggatggaacctctgggtcaggaaacagctggaatccacactcacctcattcccattgtttggatcatgcctctttccaacacgtgttcacaatctccaaagggactgtatttcttctctgtgcttaatgtgatttgaaatatgttgaatcaaagtgaaatatttattttttgaataaaggagataatagccttaa

SEQ ID NO: 257691 - DNA, 468 bp, Homo Sapiens
  misc_feature (424)..(424): n is a, c, g, or t
  misc_feature (453)..(453): n is a, c, g, or t
atttcggcacaggaaaatggactgggatagaggacagactgatagtttctttctttcatatcacatgtatagagaaataattatatcagaaactcacaaacctagacatggaaaaacagattactgtctattgtcagcatcattttcatctgtaagtcactactggaatatatttttcttttaatttccagtgactttagaatacacacagtttttccgacttttcaaaaatttgattaaatggttttatagtataatattgggaccccataccgttagcccttgtatgtataccaacactgccaaagtaaaacattaggtcagggcatggtgggctcaggcctggtaatcccaggcattttggggaggcttgagggcaagtgggataaactttgagggtccatgagtttcggaaacccagccngggcccaaaacagtggaaaccccgtcttntactaaaattacatt

SEQ ID NO: 257692 - DNA, 463 bp, Homo Sapiens
atttgggtaatgcatgataaaaaattaacgtcatcattcaaatccattattgggaatgaagaatttagtatttcctgactgcctaattgggcactttgaggaatttcctctgcacgctgagccccaaaatgcactattttctagaccaaaaatgaaaacatgcgtatatacaagtgagctgaaaagttacaacacaagatgatcattttggtgaaaaataatccccccaaataagcagcatgtcatgtccttagaatatgttacactagaaagctagtaaaaattcaggctaaggaggcaatttagagttcaagttttatcacatatcagcaaagttttagccttcccttaaaaacagacaccttcaaagtgaaatcttgccagaagggttgatttttaattatgtgtatatacaaacttctctattttaacattcaacatattcaggattaattctagaaag

SEQ ID NO: 257693 - DNA, 609 bp, Homo Sapiens
agacagcagcaagacacattgtgacagaaaaccaagggtatcctgtgtcacagtgaaatgtaatgagggcacctctcctttcaagagacgaagattgaatacatgggaagcacactctccgctgtgtgttgtctaggagaggtgcaccctgtatggaaatatttgggaaggttaagattaagacagggtaaaataaagcaaaggcaaatcacaaagcaagggctaatgttaatatgaaaagtgcagaattcaaggaaaaagcatggggacaaagaagatttttcctctttttggttgctgttcatgtgtagcctacaacagaactataagacctatagacatttatatgaatatttatttgaaaacgtataatatcaaacaatgtaaaagccaatagaaatctcagataattgaatgtatagaaactagcagtttgaaagtgattagttcattatttgctgatcaagcagaaaaataagcatatgaaagatatttaaaatgggattaataaagttgatttaacagatcctattccatgtcctttgaatatttatagaaattaaatggaacaaattagggcatcaggaaaactatacaaaagtctttacc

SEQ ID NO: 257694 - DNA, 605 bp, Homo Sapiens
  misc_feature (28)..(28): n is a, c, g, or t
  misc_feature (94)..(103): n is a, c, g, or t
  misc_feature (116)..(116): n is a, c, g, or t
aattcggcacgaggcctgttggtgaggnaagtcagagcccaagggcgccacgaagcagcccttggaataccccactccgctccgccctgcccgnnnnnnnnnnaccagtcctgccnccgcatggagcccccgtgattagtagcccgtatgatcacgtagacccacccaacacactcctgcacactggccccggcccacggcacagcaatcccctgcgcgtggatttcacctcaccctttgtaccagatgttgagtgaccagctctgtggccctgtgtcgtcagaggcttgtgattaactgtggcggcagacacagcttgtccacagcttgggccaggcttcccctgtcctcccaccggtcggctgcttggcaaggctgttcaggacgtgcacttccccaagtcggcactgagtggcccagcaccgcctagccctgccaccccactgccctcctgggccttctgctggatgggcacctggggggttctggtttttacttttttaatgtaagtctcagtctttgtaattaattattgaattgtgagaacatttttgaacaatttacctgtcaataaagcagaagacggcagttttaaagttaaaaaa

SEQ ID NO: 257695 - DNA, 1252 bp, Homo Sapiens
  misc_feature (23)..(23): n is a, c, g, or t
  misc_feature (35)..(35): n is a, c, g, or t
  misc_feature (85)..(85): n is a, c, g, or t
  misc_feature (91)..(91): n is a, c, g, or t
  misc_feature (115)..(115): n is a, c, g, or t
  misc_feature (192)..(243): n is a, c, g, or t
  misc_feature (898)..(898): n is a, c, g, or t
acaatttaatcaaaaaccctctnacgaacacaagncccacagagctggtcactcaaacatctggtacaaagggtgaaggtgaaancccacncgcaggggattgctgtgccgtggnccggggcccagtgtgcaggagtgtgttgggtgggtctacgtgatcatacgggctactaatcacgggggctccatgcnnnnnnnnnnnnnnnnnnnnnnnnnnnnnnnnnnnnnnnnnnnnnnnnnnnnatcccagtggctgcttcgtggcgccctggggctctgacttccctcagccccacaagccacagggcctgcctgcaccacgacactcgctggttttatggcaggaggcagaagccgtggaagcgaatggaaaacagcacagctgacttcacagtagtagatactggtgacacttcatggctgcgacccagaatgaacttaacgcacacagggacgcagggtgtcactggtcctgggcctttgtccatgactaggtggtcagcaggacttctgcagctgactgtgcaatggctaaatgaaaaaaaggccacagactaacctccactttcctgtcttcaaaattctagtgacactgggaatgctataggacctcctactattctcttaaggtcctaggaaagtttcaggaactagggaaaagactgggtactgaggctgtgtccccagatgtctgcttccgaagcagccgcgtcatgacgggtttctgctgaggaagtggtgttggcagggccccatatgcctctcgggttgtcaggggtgggagacaggctgtatgggggtccttcatgtgcagatggaacagcatcgcctcacagctgtgcagacgaacagatgtggtctactgccacgaacaatgcggcataaaactgatcaatantaataataaagatttgtcttcttcatctcccatatctacaaagtgattctacatttccttggacaacactggagggcccgctcagtcttggcactgacgctggaggccatctccagctccctggcccctgtggcgagctggcggcttcaggtgtcacaggccggctgctccaggccttcgagggggagctggctcctgtggggggagttggggctcggtgggccgctggggttggagctattcgatggagttgagtgtttggtggagtccgaatcaggctgtgaacaggaagagggcagggtgagcacccgctgccctagcctgggcgagacgcgtgcccagctggatgcaaat

SEQ ID NO: 257696 - DNA, 506 bp, Homo Sapiens
  misc_feature (28)..(28): n is a, c, g, or t
  misc_feature (41)..(41): n is a, c, g, or t
  misc_feature (52)..(52): n is a, c, g, or t
tgcccccgcaaggaacccccgtgaatantaacccgtatgancacgtaaaccnacccaaaaaaatccctgcaaaactggccccggccccaaggcaaaaacaaaacccccgcgccgtggaatttcaacctcacccctttgtacccagatgttgaagtgaccaagctctgtggccctgtgtcgtcagaggcttgtgattaactgtggcggcagacacggcttgtcccacagcttgggcccaggcttcccctgtcctcccaccggtcggctgcttggcaaggctgttcaggacgtgcacttccccaagtcggcactgagtggcccagcaccgcctagccctgccaccccaactccctcctgggccttctgctggatgggcacctggggggttctggtttttacttttttaatgtaagtctcagtctttgtaattaattattgaattgtgagaacatttttgaacaatttacctgtcaataaagcagaagacggcagttttaaagttaaaa

SEQ ID NO: 257697 - DNA, 662 bp, Homo Sapiens
cggggtgaaaaactatcaaatgtattaaaaccatctaaagccaaatataatataactgaatatataatttagaaacaggtttaagtgcattttctttgtacaactgactatcacatgtaaaaactggcaattaattaaaatgcaattaaatacagatttgcaagccttctggccattatgtaaacatttaaaaattaactgaattgccaattgaaaaataagagcttacatacgtatcttaaaaaagcacaaatggtgaaagatgcactataaaattgtgtgacaaaacatatgcataccaacaaagatctttttaggcacttgcattcagaaacattccttttataaataagcacttataacagttccactccaaaaaataaacctgattttcccaaattgcacctattagttgagactatatcatatattagggatgcattcaaatggaccatttggtggggaaagtcaactgaactttaaaaaatacgaatccacctatcttattcacaactttaaaaatacagaatttaaagataattccagtgaggcacaaatgtgaccctatcaaaacattctaccattcagtattaccaacagaggataaatacaacaaccggacgcgtgggtcgacgatatcccgagattccggaccggtacca

SEQ ID NO: 257698 - DNA, 693 bp, Homo Sapiens
agaaatggttctccgtgtggtgggaggaggaggttcgggtgctgggtaagtgccatgtcagtgtggacagaggcatttgactaagccaacctcctctcacagcctctgtatctctgcaggccatactggttccattgttctgtataatactgaataaaaaaatttacttttacatgatcgtataagtttctagataagataaacaaattttgtttaaatttttttaataaaaatcttaaaacactttttttctaacctagactgagaaattcatgtttacttttctaggtgtatgatactttgtaaagttgatactttcctaagaatttaacatgtccatatttttgaaatagatttaagtgtgcttcttattgctaaaaatactaaatgtcatgggtcatagtatctgatatcaatatcgttgataacatatccacaggtaacacccatgatgtaggcataaatggaaaacaaaaaccctactatttcaaatatattggacttttttatttctgtaagccaactgtgtgccattttcactggacttttaaatctagactttagtgatgtctacattgtaaatgatcttttgtggatatttgtcacttggtttcagaaagttcacaaatgtagcaacagctcacatgactgagtaggtagaaaatgtgaaataaatctcatatatatagtttt

SEQ ID NO: 257699 - DNA, 707 bp, Homo Sapiens
atggcacttatgcctggggcaaaactatttcagagctgctgcaagactgctcctctcgtctcaaaatgacccacccagctagagcactgtacacccccagtggagagccaattcagtcctgggacgacatagagcgagatatggtcatctgtgtgtctatgggacatggtttcaaaaccccaaaagagttaaaacaactgatggagatcagagcaaattatgccagaatccgaaggcagcagggccctcaagccacagacattgtggtgtcaccatccacgaagctgctgtctctggcacatctccacaattaactcctatcagaaccatcggattttctgctgtatttttctggaaagaaaactttctttacccacttataaacagaagactgtgacaagaaggccaattatttccatcgctgaagactctaaatttggcaaatcttctaaataacaatcctgcatagtttattaaaaaaaattagtcgtaaaatttatccttcaaaaatctgcattttaaataaaccctgacagtgatttctcaagactgtaaagatattagtctgagaatgcaactctaacagactgctctgggcatcttttctctttgccttggccaggcctctcagaattgagtgagcgtgtgactccatttgcacagtgggacagatgagtacaactgaaataaaaagtggaggcctctgc

SEQ ID NO: 257700 - DNA, 230 bp, Homo Sapiens
cagcctaatgctgtttcaaaattgtactaaagtgtggttcagtctgaacattcctttgtacaaatgtggaaacacggggctgtagatgctgttaactactgaaggcaaaagtgtgacttcatggtataggtgtgattgattaaattattggctattggtgaccagctcaatcttcagtccctctccactctgggaaaattggaggcaaaactcaaaccctctaatcctgc

SEQ ID NO: 257701 - DNA, 472 bp, Homo Sapiens
atttccgccacgcagatataaagcaacagaatattgctacccaacctagtattccaacgcagataccttgtcccagtcaccattccctttaggccgtttaacaaaactaagacatttgtctgtgttaataggaagccactaagtggccaatgaagaaatgaagaccaaagacaaactaagaagaaatacatcatatgaatcaaagtcttgaagaaggcatgagtggaaagaatcagataaattctacatcattgacaaggtttagtcttagaaaaaaagaaatttctcttaccgcaagtcagagaaaagagaagagacgacaaattcattcaacctatcatttaacaaagatttcttaagcccctattaattggcagtactgtagaaagcactagagagagattttaaagaggaaaataaactgtactcgggctctcctgctagatggacttaatcgcttcgaaaaaggagg

SEQ ID NO: 257702 - DNA, 576 bp, Homo Sapiens
ggttttattaacttggaaaataaaaaatcaataaaacattcaaattgggaagataaaaatgaataattcttcctgaaagcagatcagaaacatagacgaaaaatagaaaagataaaaaatattagagcatcaacctgggtgtaggggagggtccaacattgaaataataaggggtccagaaagaaagaatgtaaataatcacaagaaaatttaagaaatttcccatgaaagcccagcacaaggtttaacacccgggatacaacaccatcatgacagttcagaacaccaagaataaagagatcttaaatgtttccaagaaggggggataaaaaaacctaagtcacatataaaggtacgggaatcaaaatggcatcagaaatctcaaccagcacgcttgggaagggctaggggagggtattattttccaactgtcattctatgctcagccacatttcttgttaaggccagaatacaaacatctttaagtcatgcaaaaatctcaaaatatttacaaccatatttacttcccatgttctcttcctcaggaaggtatttaaaaaatgtgccacaccaaaa

SEQ ID NO: 257703 - DNA, 146 bp, Homo Sapiens
ttctgattcatctaataattgtaagatgtattcctctgtcattttcttctcttggccatcgtgggtggaaaatgaaaatttttgaattcttaggtggagtcagtgaaagctaacattagactacgaagatggtattctagtctttc

SEQ ID NO: 257704 - DNA, 603 bp, Homo Sapiens
  misc_feature (153)..(168): n is a, c, g, or t
ggaagttgtgtgatagttaggagataccaacatgcatttttaaccttttccttagatgaaagagatggcttttgccagtgtgttctaaccagaaagaaaggatttgtattactctccaaatctactgtactgtcagcttcactccacctgagnnnnnnnnnnnnnnnnttgatagctcaaatgcatgtaattcataaacactgcaaaggagagccacttggtgtctgcagtcctcatattaacagtctgtcacagaatgcagttaaagtattgattggcatatggtaatagagcaaccatagccttaacttacagacctgtgaaataaagggcattttgacctaatacaattaattttctggataactcttaaagagaagtcattttaactgtttttgctactccatatattgtcattcaaaatatattttaacccaaaataagttaaataatttgtgcatgtttgtgtgtgtatatatgcatacacttttttatattaaaattttgaggctatacagccactgtgccctgtggaataaagccatatatataaatgttttatatgtatatgttttatacataaataaaacatttcatctaata

SEQ ID NO: 257705 - DNA, 598 bp, Homo Sapiens
  misc_feature (574)..(574): n is a, c, g, or t
gaagcaaaagcagctggtcatcaataactcgcacttgctgcttgcctgcagctattacttgtctgatattggtaaagttctctatatttaaaggtgtctgaaaacactggcttatttataaactttgaaaggcagtaggtaaaatggactttggtatattctgttcctcaaagctgcatttacccctcaaacgcttaagccctatgagtttaatctctactgagattttagttgtatcaaccttgaatagactagactcctttaaaaggaaaagaaataatcaagtcattggaataaccttgatccctagacgccgccatttccctcaagtgagtgattcttattgtcacactaattaagtaaagacataaaggctttcccaatgcttttcacaagagatctttcctcgcagatttcattttatgaaatctgtaaaatgctaggaggcgtattaattaactgcagagatgctaaacatatatggaatacataattaattaccacatgatacacttaatactggaatactaaagagccagttctcagaaatttgtctagaaagggaagtccttgnttctcaagaaagacaacatagact

SEQ ID NO: 257706 - DNA, 340 bp, Homo Sapiens
gtgtgagccaccgcacccagccttattcttcccttttaaatacttaaagcacattcagattagttgaaaattcacgtgtttttggaggccaggcaggtggccttctgcagagacagcagcagctcagctcttgctgaccaaggccttggaggactgtgagccacaatcacatatgtccatctttcaaaagaagctaaatatccagatttcctccatgggccaactaaaaggtgattgtggactatacaggctgccagtttaatcctttatcagagtctctgtggataatgtacctttgtgcctaatactttatctgtctaccaaaactcagtccagatct

SEQ ID NO: 257707 - DNA, 575 bp, Homo Sapiens
atggtgtttgacccaaaatgactttatacccatttctacataaaaatatagaagatctatctttttttgtacctttcagatgttcactaaataactcagtttttaagcaaaagttttcagggcattaaatatatgttgtgtatgaagtatcctcaaacgggaacataaatttagtgatcaaactgccattcacagtgtaaggcagcacttaaatttcgaacctaaagtttagatgcattgtataaaaaaacctaaaagcagtatctgttatttagctgtaaaccaagttggaagctattcggataatttcttaaatattgatgaactttggagtactgtttcttccttcaaactgaatgtaattaattcatgaataaatgcaccttatatgtttaaacaatctttgtatacttttgggatttttggtgcttatatgctaaatcacattcagcatgtgtattttgacatttaaaatacttccctcaattctgtaaattaaaagaatagttattttacagttccagggattgtgaaataaatgttgcagttttttaaaataatgaaaataaatactc

SEQ ID NO: 257708 - DNA, 313 bp, Homo Sapiens
atgtggcaccgtgtccagccttagctccagaatttctgtctgatttttaaaaattattttaatctctttgttacatttatctgatagggttttaaattctttctctgtgttatctgggatttcactgagcttccccagaatagctgttttgaattatctaagatatcacatatctctgtatctctagaactgggccctggtgacttatttagtgagatcacgttttcctgaatggtcttgatgcttttggatgttcatcagtgtctgggcattgaagaattaagtatttattgtagtcttcaaagtctgaaca

SEQ ID NO: 257709 - DNA, 469 bp, Homo Sapiens
atatccaaattaaagcaaaaagtagtttcctctcaaatgccctttttggctgaccattaccatttttctttccccagggtttgaaagaaaagggccttttttggatttaactatattctgtctgcattctattcttcatgcgtaggtttctactagaacctgtggaggggggacaccaaatttagattgagtcagtccatgctgataagaagcgtgaggaccttgttggacacagagcttctagatctttccacctgtagcctctaccctgttcctgcactttacctgaaactgtgcctctggtctttagaccagctgttggaacatatcactcacccactcctctgttatagcaaagggccagctgggatggtacacgctgtgtaatcagacaccttctcgacaagtacagctgatgtttctcactgttgccttaccattctctgagccatctttgatgttgatttgt

SEQ ID NO: 257710 - DNA, 510 bp, Homo Sapiens
tagagaagcactctttcttggactgcttcatggcatttggaagcgggaagttccagtgtcctgcaagaaaaccaaacaggaaagagcagcatgaacccccagacttcttcagaaattgtagcttgcaaagtgaagagtctcattatagcagacagtctcacattaaactatacgatttaaatggaggaataagacggagggttttcagtgtggaggaaaacttctttgagtgagcacctctgaaagttgatgatcttagggatgtgcttgctatacctgtcccctggaacacacaccaaaaccaacaagcttgattttccttggttctaattcctgcaagaggatgcctgatttgctgtgtcattgtgcaaattgatatggcttaaactccagtgtaaaacaacagccctgatctttggcaagattaatctgcttataaaggcatgcttggataagaagagagtgtaataaaaggaaggctgcaattcttgagaagttaaaatgaaaaaa

SEQ ID NO: 257711 - DNA, 587 bp, Homo Sapiens
  misc_feature (20)..(20): n is a, c, g, or t
ttcaggctggagtcagaganaatcatggctcactgtaacctcaaactcctgagctcaagcattcctcccgcctcagctttccaaattgttggggctacagtcacatgtcaccacacccagctaaatgtaaaatatttagtctttttctattaggtataaaatacatatttaaaacattttaatcagctttcttcttgaaatctggcacaagtttctagattaaaacattaatatgatttcacaatgataaagtaaaaatgaaagcccattttcaagctcatttaaccactgcctcatcagcagatggtactatgggttatttgttaataaattctgcctgttctttcggatgaggggctttgagaggagtcagcttttacccccttatcagttaacaccggggaacctcatggtaaagccagagagacctattcaggtcagctctgcctcgtgttgccacaaacagcaaccttggaaacctcactatgctcaagtgactcatctacaaaataaaacgacctacccatcccacagcgttattatgagtatttaagaaaaaaatgtctctaaagcacccagcatacgga

SEQ ID NO: 257712 - DNA, 197 bp, Homo Sapiens
actgatataaatacaaaatttacaaagatctcatcagaaaatgtatagttactaaaaatttactaaccacaacaatgaggcaggcaaggagaataaagagtactcattgtgttgtaatgtaaatgccttgaatatgtaggtactggaaagtctttattaaaatgaactaagaattggctgggtgcggtggctcacac

SEQ ID NO: 257713 - DNA, 593 bp, Homo Sapiens
  misc_feature (212)..(220): n is a, c, g, or t
ccttaaaattgttttttaaattaacatcccaaatatatatcctgttatatgttctgtgaagaaagctgcatatatataatatttttacagtagcgtcctcttggattaattcaccaaaacataccatctagttgaacaaaattccttaggaagtgtaaccaagcgtacttggttgaaatgaagaggaaatttatgaaactatcttagaatgnnnnnnnnntagacatcagaaaactgttgcctttttaaagcatcatttcccccccgtaatccaaaattccttttctgctttctgctccacaatcccatgggccactgagcggccggcaggagccataatcacgggcagcacaagccagacacagggtcaggacaaatgtgaggccggcaccagccaatggaggggctggaccctctcctgggaggagctgccctccgcagtgaagatcagcagagacttggcatgaaggccagatccttgtgagagaagtggatgtcaaggaaaaagctcaaagggacatggaaatagaaacctttgctgccattgctttttatttaaatagtaaatactcaaaaaattgaaaacaaaccaa

SEQ ID NO: 257714 - DNA, 603 bp, Homo Sapiens
atgattctcaagcagccagtattccggtgccttctttctccttcttttgtctcaactgcacaggccaacccttatgtaagcccagattctctgctaagtggtttcaaggttttcaatcacactgaattggcaggaccaagaaaaattgttcagagaagtatgggatgatagttgaagggagatgaagaggctgcttctctatagagatgagattccagataagtcagtctcttgggaagtgtgtttagaagggttcaagactttgtgagtaagcatgaccttaaaattctaggggatttctggtaggacagtgagtggtgaattctgaagttttggagaggaaagtggaggagccagcaagctagctagccagttttctaaaagccaactttgcacagcacactcttctgggccctaaggagtcccacagaatggggaaagtgggagccctggagttcttgggagtcttggagcctaaagagaaaacgaggtgcaaattcatttcacagtgactgacccttgagcttaaacagaatcagcaaatgaaagaatctgacaaataaggaaaggcacaagcctgcccgactactggacaataaactc

SEQ ID NO: 257715 - DNA, 2213 bp, Homo Sapiens
tcccgggattattaaggcgccggcgatcgcggcctgaggctgctcccggacaagggcaacgagcgtttcgtttggacttctcgacttgagtgcccgcctccttcgccgccgcctctgcagtcctcagcgcagtctttccacaggagccagcatacttcctgaacatggagagtgttgttcgccgctgcccattcttatcccgagtcccccaggcctttctgcagaaagcaggcaaatctctgttgttctatgcccaaaactgccccaagatgatggaagttggggccaagccagcccctcgggcattgtccactgcagcagtacactaccaacagatcaaagaaacccctccggccagtgagaaagacaaaactgctaaggccaaggtccaacagactcctgatggatcccagcagagtccagatggcacacagcttccgtctggacaccccttgcctgccacaagccagggcactgcaagcaaatgccctttcctggcagcacagatgaatcagagaggcagcagtgtcttctgcaaagccagtcttgagcttcaggaggatgtgcaggaaatgaatgccgtgaggaaagaggttgctgaaacctcagcaggccccagtgtggttagtgtgaaaaccgatggaggggatcccagtggactgctgaagaacttccaggacatcatgcaaaagcaaagaccagaaagagtgtctcatcttcttcaagataacttgccaaaatctgtttccacttttcagtatgatcgtttctttgagaaaaaaattgatgagaaaaagaatgaccacacctatcgagtttttaaaactgtgaaccggcgagcacacatcttccccatggcagatgactattcagactccctcatcaccaaaaagcaagtgtcagtctggtgcagtaatgactacctaggaatgagtcgccacccacgggtgtgtggggcagttatggacactttgaaacaacatggtgctggggcaggtggtactagaaatatttctggaactagtaaattccatgtggacttagagcgggagctggcagacctccatgggaaagatgccgcactcttgttttcctcgtgctttgtggccaatgactcaaccctcttcaccctggctaagatgatgccaggctgtgagatttactctgattctgggaaccatgcctccatgatccaagggattcgaaacagccgagtgccaaagtacatcttccgccacaatgatgtcagccacctcagagaactgctgcaaagatctgacccctcagtccccaagattgtggcatttgaaactgtccattcaatggatggggcggtgtgcccactggaagagctgtgtgatgtggcccatgagtttggagcaatcaccttcgtggatgaggtccacgcagtggggctttatggggctcgaggcggagggattggggatcgggatggagtcatgccaaaaatggacatcatttctggaacacttggcaaagcctttggttgtgttggagggtacatcgccagcacgagttctctgattgacaccgtacggtcctatgctgctggcttcatcttcaccacctctctgccacccatgctgctggctggagccctggagtctgtgcggatcctgaagagcgctgagggacgggtgttcgccgccagcaccagcgcaacgtcaaactcatgagacagatgctaatggatgccggcctccctgttgtccactgccccagccacatcatccctgtgcgggttgcagatgctgctaaaaacacagaagtctgtgatgaactaatgagcagacataacatctacgtgcaagcaatcaattaccctacggtgccccggggagaagagctcctacggattgcccccacccctcaccacacaccccagatgatgaactacttccttgagaatctgctagtcacatggaagcaagtggggctggaactgaagcctcattcctcagctgagtgcaacttctgcaggaggccactgcattttgaagtgatgagtgaaagagagaagtcctatttctcaggcttgagcaagttggtatctgctcaggcctgagcatgacctcaattatttcacttaaccccaggccattatcatatccagatggtcttcagagttgtctttatatgtgaattaagttatattaaattttaatctatagtaaaaacatagtcctggaaat

SEQ ID NO: 257716 - DNA, 387 bp, Homo Sapiens
  misc_feature (282)..(282): n is a, c, g, or t
  misc_feature (318)..(318): n is a, c, g, or t
  misc_feature (362)..(362): n is a, c, g, or t
gctgaaagatctttcaggactctacctcatatcagtttgctagcagaaatctagaagactgtcagcttccaaacattaatgcaatggttaacatcttctgtctttataatctactccttgtaaagactgtagaagaaagagcaacaatccatctctcaagtagtgtatcacagtagtagcctccaggtttccttaagggacaacatccttaagtcaaaagagagaagaggcaccacttaaaagatcgcagtttgcctggtgcagtggcttcacacctgtaantcccaacattttgggggaacccaaggtggggtaggntcacgaggttcaagaggttccaagaccataggttgacccaaccntaggttggaaacccccttcttttta

SEQ ID NO: 257717 - DNA, 364 bp, Homo Sapiens
atcatgcctagccacattggttattttctattgctaacccttcgagttcactaatctcttcttctgcaaggtctaatctgccatcaatcttttccagcataattttcatctcagacactgtggtccttatctctaaaagtcccctttggtcttttataaaaaatcttccatgtctctaattaagatgttcaatctttcttctaactttttgaacacttggaatatagttataataactactgcaatgtccttgtctgttaattctaacatcttctggttcaagttttattggtatttatcttcattgcgaggtatatttccctgcttctttgcataactgaacatttttgattggatgccagac

SEQ ID NO: 257718 - DNA, 798 bp, Homo Sapiens
  misc_feature (137)..(187): n is a, c, g, or t
  misc_feature (633)..(633): n is a, c, g, or t
  misc_feature (639)..(639): n is a, c, g, or t
ggatactaagaggtgttacagagtccagctcaaaggacagaaaaaaggaggaacttcagataacaatttttaaaatacttattaacagccaattatgagtcaggtactttacaaggtgttcaatggacattatctannnnnnnnnnnnnnnnnnnnnnnnnnnnnnnnnnnnnnnnnnnnnnnnnnncattttacattatctattttaatcctcacaatatccctgtaaggtaggtatattaccttcagtttccagatcaagaaactgaagtgcacagaagtttgaagtaacttactcaaaccacttcactaataaccagggtaggcaggactcaaatacagacagtttgcctccaaaatacatggtcctaatcacctccctatgttgggtccatgcagtcacgagtttggcatgaggagagctgaagggaagagcccaggagacagtgaagaggaagcaagaggctgtatatgtagccagctgggtttgggggcacctcatgagtatcccatagcacaaacgggcaaactctgttactggcacattaactaaaagacaaaactccacataaacctgagtcccttccaacaaacccgggagacttacccaaaatctaatctaaataaccaccngggggnacgggaggaaaagaagaaaaaaacctgtcggcccccttcggccctcgaaaaagttttctaaaaccatttggtttgggcgcgcggggccccagaagggtaaggggaacaggggccatagctggtttccccaaggagatcccggggcaaggaactaggggt

SEQ ID NO: 257719 - DNA, 538 bp, Homo Sapiens
cccttaaaaatttcatattttgtgacatcgccattattttcagtattcctgatgggcgtgttattcataagtcatattaacattctccccgtgaaatcatggtacagtcactgcccaaaggtactgaggaaaaagcaatatgggttcggcaaatggtggtggtaaaatgaatcttaaggagtgtggtaaatatgtgctccgcttttgttgcatcactatgtgaagtactgtgttgcaaaagtggcaaaagcgcttatttttaaaaatgcaaaatatttgtccaatgtaactttatgcttccaaataataatgtatgttagccagcaagaaatgaatcctttaaaaagtgatatatgttggagttataaagaaatcccctaaggagaggtagtaaatgtgacccttgttgcagtgtataaggtggaagcctaaagaaatctccccgaaacttactgctgaatgattacattctcccttaagcagaaaactttggatgtgccatgcaatggggtctgtgtaattattttgctctttgatt

SEQ ID NO: 257720 - DNA, 498 bp, Homo Sapiens
ttatttacattccagcctgtaatgtaattcaaaacaaacaagtcagagacatcgctcaaatgacagaaccaacaaatacagatgctttgcatcaaggaaatgaatctactgaagaaatgcaactgaggagcagcagcccctccagggcctggagctgagcttctggtggaacggcgaggcccccttctgggcagaggcacacagtgcgcccagagggctgtgcaaagctgccctgtagtcatggaggtgaactggggacttcctgctgtggataccctttccagtgttgtgttcaaaattttacattttagattttaaatttattatatggattataaaagaaataaccatttgtttcagattaaattgatcattctatttttcagtcagcattctcaccaccaaatggcacctatcccctttaccctgtgttccttttgctttttgccataactcttattgtcctccaataaactgtgtaatctatcatatccatct

SEQ ID NO: 257721 - DNA, 319 bp, Homo Sapiens
gataagttgggaataagcgctgagaggtgacacttcttaactgttgggaaaaggggctagcacacttcagatctggatagttgagactgaccatgaaatactacagcaaagttcagaggcaaaaaaactgaaaaaggtggatgtgttagccctatagttcattggagaagtgcctaaaataattggattaactggcttctctaagaaatttctcacctttctacatctccgtgttttgtgcaggcatccccatccataattcagggttagacagagctcagttaagaaatgaacacgtgaggccggccgtggtggctca

SEQ ID NO: 257722 - DNA, 1551 bp, Homo Sapiens
  misc_feature (636)..(636): n is a, c, g, or t
  misc_feature (894)..(894): n is a, c, g, or t
ggtactttgacgagccagtggagttaaggagcagttctttctctagctgggatgacagttcagattcctattggaaaaaagagaccagcaaagatactgaaacagttctgaaaaccacaggctattcagacagacctactgctcgccgcaagccagattatgagccagttgaaaatacagatgaggcccagaagaagtttggcaatgtcaaggccatttcatcagatatgtatttgggaagacaatcccaggctgattatgagaccagggcccgcctagagaggctgtcagcaagttcctccataagctcggctgatctgttcgaggagccgaggaagcagccagcagggaactacagcctgtccagcgtgctgcccaacgcccccgacatggcgcagttcaagcagggagtgagatcggttgctggaaaactctccgtctttgctaatggagtcgtgacttcaattcaggatcgctacggttcttaatactgaagtcatgatgtgtatttcctggagaaattcctctttaaatgaacaagtaaccacatctcaggcggcagtgaagtccagatagttttgcagattgttttgctactttttcatatggtatatgtttctgattattaatatttcnttttgagaaattctgagttctgatgtaggagcttccccgtgatttctggttcacgttccctcctgtcacaccctcctttggcgtctctgtgtatatccttgctttattttcttggaacctttggtttcaacactgagggcctggagacctcggctcctcctgctcctgaaccaggaggcttcatgtgggggaggaggagaggtctccatgtgacacatgggctcagggctgccagaatcagcggatgctggaatgggncctgcagaaacaacactcaccacacacacttccttcaaaagaccaaaagtgactggtgtctcgtgtgacagatgcttcatttatgtttctacatagtaaggtgactgccaaataatatttgaagtcatctgtctctttgtaaattattttatatgacctataaatttaaaaatgtttttcagtgagtgcttttaacaaacttaagcttctgccctgccaagggaattaatgttatcttgtgaaaggtgttgctgtttgaattgatgagaaatggaagatgagaactccctaagagttctcataataaatcatctcatcacaaatcaatacggtatacagagttaaagtggaatgaggtaagaagatacagctacagaaaatagttgcgtgtatgggagaacagtcattgtaattgggtagttttgttaataaatatttttaaatcttgcttttcagaaattaccgaatgtgtataaacaaataaagaaaaataatttagctgtgttttagacagcattagaatatattgttcagcacagtaaaatatatttgaaatttgataagccaaaaatgtggttttgaatgaatattttgtgaatctttcttaaaagctcaaatttgtagacttctaaatagaataaacacttgcagcagatg

SEQ ID NO: 257723 - DNA, 294 bp, Homo Sapiens
tgagccactgctcctggcctgttatatatgtcttaagtacccttctgcatgcagtcagaaatgttcttttcaagaggacatttcctttaaaaagttcaagtttcttatcttacgataaagagatattccctatacttattgccctaaaattctatttggccactcttacctcttttgtgaaaggccacatcttgctaaagtagcagctactgaactgaccagaaacaaactcaaacactgaatttgacaaaccaacctgctgaatataagcaactttttctaagatgaaatgta

SEQ ID NO: 257724 - DNA, 605 bp, Homo Sapiens
  misc_feature (202)..(202): n is a, c, g, or t
  misc_feature (229)..(229): n is a, c, g, or t
  misc_feature (245)..(245): n is a, c, g, or t
  misc_feature (482)..(558): n is a, c, g, or t
tcatgcagaaaagtcagtactgagcctggaggatccttgagctcttcatcttaaccttctccttgaagtgccaaaattgctggccagcccctcagagcaggagcagccatccttgtcctgacagtccacccagggcagcagtgagcctccctgtgtggaatgggaccaaggctcctgtctgattcccaaccctatccagccnccctctctcaagcccttcccacctgtnttgcctctacccgcgntcagagttctgacagtctaactctctcccacactactgctctggaccttgacgcagcaaagcagtcacagtcgtcaacccactggaggacacatagcctggagcccaggtgaggcttgcagactcagtagcttggagctatcagatggccatcctgcattactgcaagccctgcccagaggctgagtgaaggccatcaggctgaccgagccacagctctgaaagaatgccgcagctnnnnnnnnnnnnnnnnnnnnnnnnnnnnnnnnnnnnnnnnnnnnnnnnnnnnnnnnnnnnnnnnnnnnnnnnnnnnntaccagtgaaatcagaatatctcagggtgggagtcaggcagcagtcg

SEQ ID NO: 257725 - DNA, 572 bp, Homo Sapiens
  misc_feature (508)..(508): n is a, c, g, or t
  misc_feature (543)..(543): n is a, c, g, or t
  misc_feature (556)..(556): n is a, c, g, or t
tcatgcagaaaagtcagtactgagcctggaggatccttgagctcttcatcttaaccttctccttgaagtgccaaaattgctggccagcccctcagagcaggagcagccatccttgtcctgacagtccacccagggcagcagtgagcctccctgtgtgggatgggaccaaggcttctgtctgattcccaaccctatccagccccctctctccagcccttcccacctgtttgcctctacccgcgtcagagttctgacagtctaactctctcccacactactgctctgggaccttgacgcagcaaagcagtcacagtcgtcaacccactggagggacacatagcctgggagcccaggtgaggcttgcagacttcagttagcttgggagctaatcagatgggccattcctggcatttattgcaaggccctgcccagaggttgagttgaagggccatcaagttgaaccgaggcacagttttgaaaggattgccgcagttcagttggttccagnttttgcggaacttaaaattaacttggggagttttnaaatttccagtgnctgggttgaaaaccta

SEQ ID NO: 257726 - DNA, 500 bp, Homo Sapiens
  misc_feature (145)..(272): n is a, c, g, or t
aaaatgctgcctatttctttgctgctcccaagctggctggactttgcataggagcaaactacagatgcatagttgaagagaaaggcctgactgattctaggatagaggtggcaccacgagcacgaaccaccatgctgaagtaacnnnnnnnnnnnnnnnnnnnnnnnnnnnnnnnnnnnnnnnnnnnnnnnnnnnnnnnnnnnnnnnnnnnnnnnnnnnnnnnnnnnnnnnnnnnnnnnnnnnnnnnnnnnnnnnnnnnnnnnnnnnnnnnngacaataaaggtattttttttaattagcagatcaaattattgctgatgagtcagttagcacacctaaatacttgggtaaaccttcttgaaaggctcctaaaacaactgtaaagtaaaagactactgaacagaaacacacaaaataaacagagaaaaatcctggaaaatattgatcctaaagccctcctcagcaatcccctttgtatttgtgaagatttgccgaaaaat

SEQ ID NO: 257727 - DNA, 503 bp, Homo Sapiens
aatatttgtgttaaagtagacatagctgaactcacatggaatcctggagttttgttatcagcagctttgcagtttgggaaacaaagaaaccaaagctgagtgttttaaagaatgaacatatctggaaatccttgctctcaaaacaaaacaatataatctatcaaaggtgttttactcagtgttctaatttttaaaaaattttatctgcatatttgcatcaaatatttatgtgtaaaatgtatgttttacctccttaaaatgcctaaaagttagttaatagttactttggtttaacctatacacaatgattaagtgcatttaatatgggtaatttaaggaaaaccattccttgcccaatggatgtataaatttttgaaagaataagcagaattatataatatgaaatgctatgtaaagttttctatgtaaaaatattatgtataatactattaaaatatcccatgctttgatcaggtggtacatcaataaaattttaaaaagta

SEQ ID NO: 257728 - DNA, 688 bp, Homo Sapiens
  misc_feature (193)..(430): n is a, c, g, or t
  misc_feature (489)..(489): n is a, c, g, or t
atacatattaaatttatgaaaattataaaatacaacacttacaaggttatagggagaagtatacagtgacagtgtaaattagtacatttgctggaacattgtctgataatctgtaataataatcataaaatcgtcatattcttttatctaaaaattccaattctgacagtttcttaaaaacaaaacaaaacannnnnnnnnnnnnnnnnnnnnnnnnnnnnnnnnnnnnnnnnnnnnnnnnnnnnnnnnnnnnnnnnnnnnnnnnnnnnnnnnnnnnnnnnnnnnnnnnnnnnnnnnnnnnnnnnnnnnnnnnnnnnnnnnnnnnnnnnnnnnnnnnnnnnnnnnnnnnnnnnnnnnnnnnnnnnnnnnnnnnnnnnnnnnnnnnnnnnnnnnnnnnnnnnnnnnnnnnnnnnnnnnnnnnnnnnnnnnnacaaatctatttttaagccaaaacagtacaggttgtttgaagtgtttgtagagcaatgntacaaaggggttaaaagaatataccccaaacaagcaaggctaatggccacagtttatcaattttcatgcatattatagaggtatttaaatgattaatcttggaaaagccgacataaaaactggtgtgctaacaatttacaggcgtattaaatatatttccacttaatgttgtgcggataagctggaatgaatttttaat

SEQ ID NO: 257729 - DNA, 357 bp, Homo Sapiens
  misc_feature (169)..(200): n is a, c, g, or t
cctgttatttaaatgggcaagagatctggtttaaactcttctgactttagagttttactctggaaaagataagatggttaaataatacatattctacaaaaatcttgaattatttaaagaatctataaaaattattcctggtaagaatttattattcctactgataatnnnnnnnnnnnnnnnnnnnnnnnnnnnnnnnngtaggttttacatggacttaaacattctacttcaagtgaaaaacctgatattttaggaaggaaaaggtattaattcaagttggtagagtcactatataaaattctgttgacaagacttactgtactcataatttgctttcctcccttagaaagattc

SEQ ID NO: 257730 - DNA, 529 bp, Homo Sapiens
  misc_feature (72)..(123): n is a, c, g, or t
  misc_feature (147)..(177): n is a, c, g, or t
cttggtgtggtgccctctgcctatagccccagctacttggaggcttaaggtgggaggatcgcttgagcccannnnnnnnnnnnnnnnnnnnnnnnnnnnnnnnnnnnnnnnnnnnnnnnnnnnggatacagtgagaccttgtctttnnnnnnnnnnnnnnnnnnnnnnnnnnnnnnntagccataatttgccatctttggagagattatggagataatctccttgtctattagccactagcatggctaattgatcattgattggacctcattacataagggggctgtggacgtctttggaatttgttaggggaaggctatgtggtaagctctactaaatgtatctgtacaaggatgaagaaaaacaaaataactactacttttggaggaaacttggaacaagaagagtacatagtttgatccattcctacggtcgagtctaatcaattccatttcttagtgtatgcatctaatgaggcttacaacttgctaaccccaaaagaagcaataaatgttaagcaattttagta

SEQ ID NO: 257731 - DNA, 514 bp, Homo Sapiens
  misc_feature (414)..(414): n is a, c, g, or t
  misc_feature (487)..(487): n is a, c, g, or t
  misc_feature (497)..(497): n is a, c, g, or t
cacttactgataagatattgaggcaagctgcaccagctgctcctgggtacgcactcggtgaatgtcacgcaaaacccctgcatttatccctttgtgatagtttaagcccctgcacctggaactgtttatttgttttgtaactgcttttgtaaccaattaattttttaactttttgccagctctgcttctgtaaaaattgcttcagctaaactcccccctcccctatttagaccacagtataaaaacaaaaccagccccttcctcggggccaagagaattttgagcattacttgcctctcggttgccagctaataaaggactccttaatttgtctcaaagtgtggcgtttctctataactcgcttggtcacaacactgtaggtcatcatcaatgactattcggcagctccacagncacccacagcggtggctttcaccccagccctgggttccaagtgctcctatggacagccgaggcaatcggtttnccaaatgctnggcttacgtttcacagt

SEQ ID NO: 257732 - DNA, 598 bp, Homo Sapiens
gtcagcagctttgggaaacagcaaacattcaaggatggctagaaatgagctccgtgtaccaggctgactttcctttgaagaaaccttttagtcaatatttgatgtcttgtagatttggggaagaaagataaataaatgtgtttgcagttgttcctggctgagagaagctgagtttacctaagtttccataataaattaattacaaccaaaggaaatgaaacaaaagcctaggggatgaagatcataggtgaatgaagatccctctgcaaattgacatgggttctaggtttgacttctttgtagtggaaataaaatgcagctgaatgagctctcatttttgctgaatataagataccttcaaatttaataaatgggaaaatgatgtgtactgagaagcttggacattctctgatgaccttttgtgttatttcagttcatttaaggtcacaaaagtcctacaaatgccctgttggatcagattaaagaactgctcatcctagtttctgcagacttcagagaatatattttagacaaagtcattcttagaatttctagctatacttcttcttttttgagagacagagcctgggcaataaga

SEQ ID NO: 257733 - DNA, 474 bp, Homo Sapiens
ccaagtcagctcgctctgtccgtgcccagcgccacaccgacatgcccaagacccagaagtatcagcccccatctaccaacaagaacacgaagtctcagagaaggaaaggttggccaaagacacatccaggaggggaacagaaggaggggacagaagcaagtctgcagatcagaggaaagaagaaagagcagaggagggagattggaagtagaaatgctgaatgcagaggcaaaaaaggaaaatgaaggacaggaggattaaacagacagaggcaaggatgatgagagaggagcagacagcaagaatgaaaagcagaaaatacaatagaggaaatgaagaaaagtaggcctgctggagctagatgatgatgtgatggaaatagaagtaaccttttagagaatctcgctaagaaacatggagaaaacggaaaagaaaaatgtaatgccctagaaagcgcaaagaaagacagtggca

SEQ ID NO: 257734 - DNA, 887 bp, Homo Sapiens
tctatagaacattattgataaaagatcaacagcaatctaccaactccaggaccatttttgcaaggtgcaaatcactcctaaagacaatgttggaatgtttacttgtgtatttcattgggggaaacgcccatcttttaaatgttatcaaacttattttttggtaggtgttccaaagtttaacaggtaactcgtgcagagcaaaggatcctgcggtggcatgtcactcttcactcctcaggagggtcttcctacatcctgtagttcttgtttcctgcactccctctacttgcgttcttcaaatgtacttccttctgggtcttgggcatgtcggtgtggcgctgggcacggacagagcgagctgacttggcaggcttgaggggtgcgcaatacatctccagcctccttagatcacagctccggaagcagcactcatccacgatgcctgtctgaggcgccctccgactgctggagccataccctgtgggcttgttgaaataaaagcccctgtctccacacacgaactgaagagcatccaccagctcagccccgcagagcgtctccggtccagccgtggcagagctggtgaaggtgagcaggcacagcgccaggtagaagagatgcgaggaggacatggtgtgcatcttcaccttcaagaaatcacaaaagcagcacttaaataattgggttggaagactgctgatttttcccattgcttctgaagtacaaagtctgaaaatgaattggttagcaggaataatgaagcaaaaagaaatccagagagatgggagatgttgagagcaatgtcacatttcaattttgaggactttattccattgcgcaggctctatctgctctgaatttagcagtgacagtgagatttagcaaac

SEQ ID NO: 257735 - DNA, 888 bp, Homo Sapiens
  misc_feature (15)..(15): n is a, c, g, or t
ggcacctgctctagnaggtatggatggccactaagtgcactaagtgcactctgtgcaggacaaagcccaatcactgtagggcttgtttgtttgtttgggctaagcctagtgttgggagatccctttagctgagctccacatgcaggagaaatgatagcttcccctgtggcagggctttacctttccctcacacaccacacacttttcctccaaataaatactaaacaataaggaaagaacattggtttgaaggggctattcttgctcccacatcttacactgacctttcatttttgcatttgtttccccacattttatgaatatcttgtattaagatattattttgttgcccattcaatccaattcaaatgtataccacaggtaataaacttcttttcctgggcttatgtacctgacccagtttccctgcatctagtgggtccttagccatcttgtctatagcttcacaatttattccaagaaagtaaatttatatttacatgaaacatatttacaacaaattggtggctgatttggggtgaaagcagcacttttcagctcctaaattaaagataccagaagatttttcctcctcctgatttaattcagttttgtactttcctcccttccctactccaaatatgtttatagttttcctggctcaacatagccttaaccatattttgtcactcattgcaataggctcatcaggaaagggaaaaggcacatgagatctgtttttctcgtctgacatattaacaaaattcttctttatttactccacataatcaggcttttcagcccaagactctgctagatttgtggcaataaggtcattggtagcctccttcttaatcaattgaatatatgttttcagttgtcatcctc

SEQ ID NO: 257736 - DNA, 466 bp, Homo Sapiens
aaataagatatgtaaacttgcatcaacattaaactcaactttatcaaagcccaggaaagaagtgcctggactgatctacccacaggagtaactgcttcaagctgccaccatgggaatagactgctcctcctctgcctttcttggcctaaaccctgaaccaggaaacatccagcaacaaaacatggatttgctttttacaatgtggcacccaaaactgaactgagtctcttcaaaatgatgatgtaaccactccaaagtctgactcattcccactctcactcattgatccaatcagtgggtatttattgggcatcatcaactggcacagtcctctgcttcatgccatgggaagcaaaggacatagcagctgagataccaccttccaggagtctttgctggagatgtctaagtagcaaatgaatgggaaaaatatgttttaataaatcttgacaatcacaagtgaaga

SEQ ID NO: 257737 - DNA, 550 bp, Homo Sapiens
tctgacttccctggggtgagtgtgctggccggcttcacttaaccttgcctagtgtatcttatccctgcactgtgttgagtatgtcacccaagagtggtagaagggaacaaccagcccaatcacgagatacacatgggagggcatttgccattgtgatggaagacagagaagaaaagcagatggcaattgagtagctgataagctgaaaattcactggatatgaaaatagttaatccatgagaaatcaactgattcaatcttcctattttgtcagcgaagggaatgagactctgggaagttaaatgactggcctggcattatgctatgagtttgtgcctttgctgaggacactagaacctggcttgcctcccttataagcagaaacaatttctgccacaaccactagtctctttaatagtattgacttggtaaagggcatttacacacgtaactggatccagtgaatgtcttatgctctgcatttgcccctggtgatcttaaaattcgtttgcctttttaaagctatattaaaaatgtattgttgaatcaa

SEQ ID NO: 257738 - DNA, 695 bp, Homo Sapiens
  misc_feature (307)..(422): n is a, c, g, or t
  misc_feature (425)..(425): n is a, c, g, or t
  misc_feature (429)..(490): n is a, c, g, or t
aagtgccagagtttgggactcagaataaatgagttcttaacaatttaacaaaaatgagtttaaccaagaactgtgtacaactgttcaacataagacatgtatcttttattcatctgatgttcatagtggttgctggctggcatatgccaggcatgcagtaaatagtgaaggagaagcaggcagggagtgttagagaaaaccaggcgggccacaagcaagggctagaggattccatgctgtccttcctctcatcctcattagtaatgggtttttaaaaggtcgtaaaggccaggcacagtggctcatnnnnnnnnnnnnnnnnnnnnnnnnnnnnnnnnnnnnnnnnnnnnnnnnnnnnnnnnnnnnnnnnnnnnnnnnnnnnnnnnnnnnnnnnnnnnnnnnnnnnnnnnnnnnnnnnnnnntgnagannnnnnnnnnnnnnnnnnnnnnnnnnnnnnnnnnnnnnnnnnnnnnnnnnnnnnnnnnnnnntaaacccaggaagttgtggctgcagtgagctaagactgcaccactacactacaacctggctatagagccagaccctgtctcaaaaaacaacaaaaatgttcgtcagcatatggtgactcaaaaagcctggttgttcttggtaagaatcttcaaggaaagatgcgaaagagacgtgttgggagttctgagctgttttcttccagtc

SEQ ID NO: 257739 - DNA, 1889 bp, Homo Sapiens
  misc_feature (1308)..(1316): n is a, c, g, or t
tggcatcgagcttttcaaggaagaaaagaaagaaacctgcaacttgtaaacaagagcttccaaaacttatggatcttcatgggaaaggccccacaggggagaaaccttttaaatgtcaggaatgtgggaaaaccttcagagttagctctgaccttattaaacaccaaagaattcacactgaagagaaaccctataaatgtcaacagtgtgataagaggtttagatggagttcagatcttaataagcacttaacaacacaccaaggaataaaaccatataaatgttcatggtgtgggaaaagcttcagtcaaaatacaaatttacatacacaccaaagaactcacacaggagaaaagcccttcaaatgtgatgaatgtggaaaaagattcattcagaactcccaccttattaaacaccagagaactcacacaggtgagcagccttatacgtgtagcttatgcaagagaaactttagtaggcgatcgagccttcttagacaccagaaactccacagaagaagggaagcatgtctagtgtctccaaactgaggaaagttaccatgtagagcttgactttagaagtggtgaaagaatacaaaattatgaggcacccaatgataggaatctgtgattaataaaacatttgggaagggtacatgttacacttcacaaaaaggaatctaagctgtctgttttattcagcattgcatcttctgtgcctagcacaagagttgatacataaggagtactttataaataaaaaaatgaaagtgtagtgatgagattcctttagctatctatctatatgtatatatctggttattcaaagcttccccacccccagtcatctaaatttttcaggtatcaagtgctcaacagacatatgatagtcaaggctcttagtctcattttttactctttgtcaagagaaatggaaaataagagtacttgggccctcttaagggagctcagagagaattactaaattagggacagtttcaatagttatcattctgtctacatgaacaatcaagaccaggactcagggaactttactctgtaacagaaagagaggattcagtgtttgccctgggagaattgtcccattcttgttgcttctctcctgagtacccactaccacaatgtcttctgtcaaggaattacaagtagcaagggaaggtctgaatgtaaggacaggcctagggaccttgcaagcacttgatatctctcctcttgctgactttgtcaacatagacatatagtgaaatgatgagggaggcagtcttggccctcattccaggtatctggnnnnnnnnngtagaaagcacagataagtggtaaatggtctttttctgactttcattatgtggactggatggaggctttcaaactggtaccatactgctgcaggacctaaagggagccccatctttatggctgatcaactacaaccctatatgcctgaatactctgcaagaaggcctggagattttgcaaaactgatttattgagaatggcaaggagagccttgtgaacttttagctttggtgcacagctgataccaggagggaacatcctgaagtgtcagagcaaagtaaggcatatggctcagagtgatgatgccagtcagagccaggccagatggaaattgttttctgatgttactggttttcttttccctattagccaaagtgactatctcttaagagaagataatgtgacgtcaagggaagttggaaggcatggatttatatctatgtcagatcctggtttataatgttggccaaggcttatttatatatgtttatttagtattccataaaattgtattcgtaatgaaaatgacacattttatcttaaatttagacaataaacaaaactttgttaccg

SEQ ID NO: 257740 - DNA, 580 bp, Homo Sapiens
cataaatgttttttgcaaatggaatctgtaagaggaaataaacattatgctaaaataacaagagatccaactctaaatcatctcggaaagtcttgaacttgtgttttctctgagcgtggtatgcctgttcccttctgaagaaaacaggaggaagaagggtggggtttgtgaagaaccggaccctccaaatctttaaaagtcaaagcttgaaacgagttttatgaccaccatgaaaaacttgtcaccggcatatgtgaaagatcagcctagtccaccctcaagttttgacaagaacaagtaggcctcatgagggatggatattggccattggtagaagagattttattctagaaaaacatcttgctattgtttcaggttggttgtcctgaagtgtttaagacactgtcaagcttaagatgatgcaggggaaaagttaaactgtgaaataaaacattttaaataatttctgacataaaatgaaaatacactccttggaaagtcttgtccaaacatttttaagatgataaaaaattagaataaaatgaaagctgtaataaaacatcaacaaactcaaacgtaa

SEQ ID NO: 257741 - DNA, 814 bp, Homo Sapiens
attatgctaatattggaaaaactttaagtgaaagagctattaatagagcacccatgaatggacattgtcatctgtggtatgcagttttgtgtggctatgtatctgagtttgagggtttacaaaacaaaatcaactatgggcacctcttcaaggaacatctagatatagcaatcaaacttttaccagaggaaccctttctatattacctcaaagggagatactgctatactgtctcaaaactgagctggattgagaaaaaaatggctgctactctgtttggaaaaataccatcttcaactgtacaggaagctttacacaatttccttaaggctgaagaactatgccctggttattctaatcccaattacatgtacttagcaaagtgttatactgatcttgaggaaaaccagaatgctttgaagttctgtaatttggctttattgcttcctactgttaccaaagaggataaagaggcacagaaagagatgcaaaaaataatgacttccttgaagaggtaaataaacgaatttactcttcaacaaatcagatgtggtctaccaaaatttaaatgaatcaaagttgtgcttttattatccttcatttttgatgtaagggtattgtgcttagatttgaaggtaaagccatgtttctgcagaatgcattccactagtagcactacaaaattaattatgttatttggagaatctatatactataatgtcaatacataatctataaacatgtatgctttatatttttcttatcaataaactgcagccttaagaatatttctttaaataaaatatttaaatcc

SEQ ID NO: 257742 - DNA, 201 bp, Homo Sapiens
gctctgcagtttctgtctctccagatcaccctgggagaggcagaagggaccacagcatggcacagattgtgtagctaaaaatttggaggcctctggcaggggttccagatacctacatgtgaaatagaaaaatagtattgcaaaagcaatgggttccaggcttcgttggtggctggagggtatgagaggagggagagaaag

SEQ ID NO: 257743 - DNA, 650 bp, Homo Sapiens
  misc_feature (43)..(138): n is a, c, g, or t
gccaatgtttgtgaaaagctaccttggctcctagattcttcannnnnnnnnnnnnnnnnnnnnnnnnnnnnnnnnnnnnnnnnnnnnnnnnnnnnnnnnnnnnnnnnnnnnnnnnnnnnnnnnnnnnnnnnnnnnnnngactcaggtttgccttcagtctctgaccaagggtttgaaaagccaggagcaagcctgagaactgtggctccagagggtgttctttcagccactccgctctatgcttctcactctgggtgggcacaaccatgttctcctttggtgatgcctctaacttaccgtgaaaatgtacctttcccttcgctattggcttcccttccctcctagtcagccgagattcttttgaaaactttcctccgcttgcctgcacaaaaggcgatggaaattcaggaactgaaacatctgctctggggaatgcgtatttccacatttccaccgcctgtgtctgctgtcttatcttgaagacaggtgctccagggcttccgaggttattttgtctgttaatggacaccttgcaaagtaccacttaaggaatgagaattacaaacttttaattatattgtagggggaaaaaagtaggctgtaatcctgataggtctagccattcattcaataaaccatattgatatgaa

SEQ ID NO: 257744 - DNA, 987 bp, Homo Sapiens
tctggatgttatcagatcacagaccatggtctcagggttttgactctgggaggagggctgccttatttggagcaccttaatctctctggttgtcttactataactggtgcaggcctgcaggatttggtttcagcatgtccttctctgaatgatgaatacttttactactgtgacaacattaacggtcctcatgctgataccgccagtggatgccagaatttgcagtgtggttttcgagcctgctgccgctctggcgaatgacccttgacttctgatctttgtctacttcatttaggctgagcaggctttctttcatgcactttacttcataggcacatttcttgtgttaaccattccctttttgagcgtgacttgttttgggccccatttcttacaacttcagaaatcttaatttaccagtgaattgtaatgttgtttctcttgcaaattatacttttggtttagaaagggattaggtcttttcaaaagggtgagaacagtcttacatttttcttttaaatgaaatgctttaaagaatgttggtaatgccatgtcatttaaagtatttccatagataattttgagttttaaagtcccatgggaggtgattggttcccctttacacattaacactgtacccaagctttgcagatcttttccgacacacatgtctgaagaccttattttcaaagacagcacatttttggaaactaatctcttttccgtaatatttcctttatttcaatgattctcagaaggccaattcaaacaaacccacatttaaggttctttaggattatagaataaattggcttctgagtgttagctcagtgagctaggaaagcaccaatcgatatttgtttcctttagggatactttgttctcaccactgtccctatgtcatcaaatttgggagagattttttaaaataccacaatcatttgaagaaatgtataaataaaatctactttgaggactttaccaagt

SEQ ID NO: 257745 - DNA, 405 bp, Homo Sapiens
caacattacaattccactggtaaattaagatttctgaagttgtaagaaatggggcccaaaacaagtcacgcctcaaaaagggatggttaacacaagaaatgtgcctatgagtaaagtgcatgaaagaaagcctgctcagctaaatgaagtagacaaagatcagaagtcaagggtcattcgccagagcggcagcaggctcgaaaaccacactgcaaattctggcatccactggcggtatcagcatgaggacctgtatgaaaacagaaaaatgtgaaaggaggaatttcttagagatcacataaaaataattttgcttatgaaggagttaaacattcattggttttactagcagtacttatatgatagaagtaaatctcatgataagtgtataagaaattattcaga

SEQ ID NO: 257746 - DNA, 681 bp, Homo Sapiens
ggagtttgctacacccgccatcacactgttcgtgggggggaaagtgtgctagtaaggcagagaaaaacaaacatacccattagaaagattgcatctgaagatgacattccatattgctgttctaggtatttaggcatgaaggagatcatgttaacgaatgcattgaactgtatcacacttacaagtatgaaaagcatataaattggattgcaggaaagacttttcatgaaaggtagaaaatctgaaatgaaagaatgacaactgtgtcaaacgaacttggctttgcattttgtgactggcttttcctgaaacatccacctcctcaacaaattatgttttttactattttgtaatatgtattgtttgctaattctttttcccccttgaaagctgaagtcatagcaatgttttggtggcttctggaagtcagtgatgtagctgactgggtagggatcagaacacaacagttttgcccacaataagtcactgttgagtcttaaagatcagtaagcaaaactacaaagtgcccaaaattttgtctacgcccccagcattttattaccacccttttgttcttcaaaaaaaatattcttttttccacagctcattaaaatgaaagatgcttgttctgttcttaaagtggggaggaaaatcgagttgataaagaacctttcccaccaa

SEQ ID NO: 257747 - DNA, 1765 bp, Homo Sapiens
  misc_feature (1200)..(1200): n is a, c, g, or t
  misc_feature (1293)..(1293): n is a, c, g, or t
  misc_feature (1300)..(1300): n is a, c, g, or t
  misc_feature (1304)..(1304): n is a, c, g, or t
  misc_feature (1348)..(1348): n is a, c, g, or t
  misc_feature (1495)..(1503): n is a, c, g, or t
  misc_feature (1698)..(1718): n is a, c, g, or t
gattcgtaggacagcccctgacgccattcccttttgcccttctttctgcgggcctttccggtacttgagcggtgtccagagcgtggccagttctcgtctatctggctgcctttagggagcggtgcctagcgttggccaatagttggctgtcgaaagtgccggcccccgcgccggcgcctgcagcagccgggtgggaaggctcaagatggcgtgcttgttggagaccccaatccgcatgagcgtcctttcgagacatgaaaaatgctgtaattggaaacaacaagcagaaagccaatctcattgttttaggagctgttccaagattgttgtacttgcttcagcaagaaacctcaagcacagagctgaaaactgaatgtgcagtggtgttgggaagtcttgctatgggtactgaaaacaatgtcaagtctctactggactgccatattatccctgccttattgcaaggactactttccccagacctgaagtttattgaagcttgcctccgatgcctgcgtaccatcttcaccagtcctgtcactccagaggagctactgtatacagatgccacagtgataccacacctcatggcactgcttagcaggtcccgctatacccaggagtacatctgtcagatcttctcacactgctgtaaagggccagatcatcaaacaattttatttaaccacggtgcagttcagaatattgctcacctactaacctcactgtcctacaaagttcgaatgcaagcactgaaatgtttctcagttttagcttttgaaaacccccaggtatcgatgaccctgggtaaatgttttggttgatggagaattgttaccacagatttttgtgaagatgttacagagggataagcctattggagatgcagctcacatcagccaaatgtttaacttacatgtgtagagctggagcaattcggacagatgataactgtattgtattaaagacattaccttgtttggttcgaatgtgcagtaaggagagattactagaggagagagttgaaggagctgagacacttgcctatctgattgaaccagatgttgagctacagagaatcgctagcataactgatcacctcattgccatgcttgctgattatttcaagtatcccagctcagtgagtgccatcactgatattaaaaggcttgatcatgatttaaaacatgctcacgaacnccgccaggctgcattcaagctctatgcctctcttggagcaaatgatgaagacatccggaagaaggtgagtctgggagaggggcgtcccccagncctgacngccngcaggcagggagtgacgtcaacctgaaagtcgtggtgaagagcnctaacagtgactgtttgaatataataaagcagagtgactaaaggcataattgaagaatgaatgggacccggatttggggggttgtttgtttgtttttagaacatagagtggcatggccgtgctggaatgacaaataactggcgtgcnnnnnnnnngtgtcattaatatgaattattatgttgcacatttttgcatgtgttctgataaaaatcaattctagcactgtgaagcttcagacaccttgaaagtcctaacattagaattgtaaatgttatttatggaaataccttccaatgctattgagaaattcaaatctctattgtatattgttctttgatatgtggcttagnnnnnnnnnnnnnnnnnnnnngctactgtgcaagtttaatgtgaataaaatctttgtggaatgatgaa

SEQ ID NO: 257748 - DNA, 302 bp, Homo Sapiens
accctcaggtttctcttaatatagttctccagtcactgaccttgaattgacttacataaactactgccaatgtttaaattgcccttatgtttatatttattatgtcaagccaattcgtacatacaatttggaatcaagtgtcataagaatttattatataaatttatcaagaataaaaatgcctctccagccttaagtatttacatgctcccaggtcattgtcagtttatggtattatgttgttttatttaaagcattgaattgatagaaaaatttgctctgtaataaaaatctactttcac

SEQ ID NO: 257749 - DNA, 619 bp, Homo Sapiens
  misc_feature (565)..(577): n is a, c, g, or t
acaaagaaacattttacgctagattaaaatatcctttcatcaatgggattttctagtttcctgccttcagagtatctaatcctttaatgatctggtggtctcctcgtcaatccatcagcaatgcttctctcatagtgtcatagacttgggaaacccaaccagtaggatatttctacaaggtgttcattttgtcacaagctgtagataacagcaagagatgggggtgtattggaattgcaatacattgttcaggtgaataataaaatcaaaaacttttgcaatcttaagcagagataaataaaagatagcaatatgagacacaggtggacgtagagttggcctttttacaggcaaagaggcgaattgtagaattgttagatggcaatagtcattaaaaacatagaaaaatgatgtctttaagtggagaattgtggaaggattgtaacatggaccatccaaatttatggccgtatcaaatggtagctgaaaaaactatatttgagcactggtctctcttggaattagatgtttatatcaaatgagcatctcaaatgttttctgcagnnnnnnnnnnnnngattctaataaaatgtattctcttgtgtgccaggagaggttc

SEQ ID NO: 257750 - DNA, 668 bp, Homo Sapiens
  misc_feature (524)..(535): n is a, c, g, or t
agatataatttttttatcatcttatatcctgttggagttgctggtgaacttcttacaatatacgctgccttgccgcatgtaaagaaaacaagaatgttttcaaaaagactttcctaacaaatacaaatgtctcttttgactactattattttcttctaataacccatggcatcatatatacctttgtttccacaactctattttcatatgttacgtcaaagaagaaaggtgcttcatggagaggtgattgtagaaaaggatgattaaatgatctctgcaaacaaggtgctttttccagaataaccaagattacctgagtccaagttttaataacaagaataaacaactttgtgaaatatcatggattgtatggtttcttaaaatataacttgagacacgtggtatttgccagtatttgtgttcctcttgtgccagatctattttttacaagaactgtgcaaatatcagtaacttttgggtaggtattgattattaggaaaataattaggtgtattatctggggnnnnnnnnnnnncttttgctaagttttttttgaaacatgctcaaagctttttaaatcaatatttagaaattagtttaacgatttactattatacctgctagtgatatttatgtgatatttataaatgaaaataaatgcaaaatta

SEQ ID NO: 257751 - DNA, 597 bp, Homo Sapiens
tgttggatagcaggattggagaggcagagattctaaggccagcagattagaacaagattacagtaagcaattctcaaaactctcagtctctggggaggcaaggagaggactggttgtcccgagccggcaggctttgctcatttctcagaatcactgggacaacagctctggttggcagagggccacgtcgtccttcagccaaagtacacatagcatgtggtcctccccatctgtaactctagagtctagatcaactgaacaaaaggtgattttgtaatgtcacccttcatcaatcagaacattagaaaatgtgattatcagtgggagtttttggctgacgttttcttgtaggcaaaccaagagaaggaaaccatttctgcacatggataagaatatgttgttgaagcactttcatcgaaatcagcactaattagaaattcttaggacagaacatcacatcagtttatagtcatccaacatatagatgaggaaaccgaggcccagagttgttaaataactcggctgtggtgtagtgagataatgtagaactggttctagttctacattagaaccagctgagttatttagaactcagct

SEQ ID NO: 257752 - DNA, 355 bp, Homo Sapiens
  misc_feature (57)..(57): n is a, c, g, or t
  misc_feature (61)..(215): n is a, c, g, or t
ggtggcacttggaactttgggagttcccctgggtgcagcccacatcactcccatganctgnnnnnnnnnnnnnnnnnnnnnnnnnnnnnnnnnnnnnnnnnnnnnnnnnnnnnnnnnnnnnnnnnnnnnnnnnnnnnnnnnnnnnnnnnnnnnnnnnnnnnnnnnnnnnnnnnnnnnnnnnnnnnnnnnnnnnnnnnnnnnnnnnnnnnnnnnnncatgatttttgcaaaggcacctttaggtctttgttgttctgtgttagtatcttctgcttatgtcctttcgtggccattgttatgggtgaaactatgtcccctgaaaaagacattgaataaaaatctgacatagttggctc

SEQ ID NO: 257753 - DNA, 298 bp, Homo Sapiens
attcatctgacatatctctttacttgtcatattgtataacagatacgtcagatatgtatttatattagcttgctggaaggtagatgcccacataggttattcttctgggaagtcatttcacaataagatggttctttagctggggtcatgagaatgacaacatgggaagacccagattttgtaaatgagctgttatcctctatgttcattcaaatggttccaactttccattccctgttgtcatttcctaaattctttgatgcaaatatacaatcaccagattaacaaactttataag

SEQ ID NO: 257754 - DNA, 732 bp, Homo Sapiens
caacagtgagatttccactactaacattgctctgtattcactgaatcagggcaaatttcttcccattggtcccttttgaatgtggtggaattcattttagattgtaaaccaaataggagaaagaaatgaattaggtgtgttagcctgtaatataaaattgctttttgtttaccaagtttggtttgagtgttctgaaagctgattaatgaattagagcaaaatgttaacttctcttgttaatggaaagaaacttgatgagtcattttccctggttaactgggactaggagcgatggagaagatcagagattgtggtaaatgtgtgtgtgtgactcattcctccgggaattcaagcccagactttggacttacacagtcaatagatctattaacagtgcctcaattctatctctgatgaacaaagtcagagatgacagcttctcttgttaacaaattaggcccttggaaaatactcagcgggtgaactttctttagtatttgaatcactgcaataggttcaaagtacatctagtatattacagttgatgaatagagataaataataggactttttttccctgattaaaaaaccctgagtgcaaagtgaaaaagactcacgttccaacagtaagtctaaaggaagaagggctttattgttatttacctttgattatttctttttaaaaataaataatgctacattattttttatgatttaaaaataaatcatgct

SEQ ID NO: 257755 - DNA, 601 bp, Homo Sapiens
cacaaactacagaaaatgggttaagagtatacgcatttcatcaaacacatataggggaaaaaatccttcaatttagagttaaataactcagctttgtatagtagagttagcgctccagtatctaacaatctcagaatcatctctgaaaactggtaactatgcttccatttttaattttgtcctaaatatcagatgtctttgatgtaagggtagggaatggagaaatattttcaattgtgtatttgtattacaaagaacttgaaatttactttcttagttgattatattaaatgatgtatatattatatgtggtttataagctcaacactggccatttttttagttttattgttaaatggtatttttctatgtttaattataatagatctggctttttctggatagcataaagatcactgaactatatatatataagaaacaagagttctattttagcacaaaggcattttatattatttattgaatccataagtttgttttcgtcaaaaacattccatattatttctgctcctttttatttgtatagtttgttatttaaagaaatggcagtccttcctgttcttaatacaataaaattgaa

SEQ ID NO: 257756 - DNA, 217 bp, Homo Sapiens
tgagccaccgcccctggcctccagacatatgttccagcctggtgccctgtgaaggcagagctcatttgcctgagtggagggagaagagaactgggagagaggtcgaggctcctagagggtgtcatcctgagcacagggtttgtagtcagctgcacccagctctgactcccatacctgcccctggctagctgcagtggccttgggtaattttcttagt

SEQ ID NO: 257757 - DNA, 379 bp, Homo Sapiens
tttctatggcaactggaaagtatttactatgggattcatttatgtctgtctttctatcataaagaattgatcaatatgtaaatatgtgatttgaaccatggttgacttacaagtgtcactacagctttttagaaaacatagccctaatatatgttaagcaggacccgggtgagccagtgggcttgcgctttatgtagagctggaagaaggccgtccatcctgtctcttgggcggacagtgtactttcctaatagggaagggaagcacaatggaaatacccctgaaccgttttattgcagtaatttttttcatatctgaaactattatttaatattttgaataagattttaaaaaataaatggcaaagatataaatctaa

SEQ ID NO: 257758 - DNA, 621 bp, Homo Sapiens
  misc_feature (103)..(103): n is a, c, g, or t
ttaccttgatcatcacttcccactttacttggctcatgccttcttagtgccacaatttctttttatctcactgagacttagaacccattgaccctattatctntgcactgttcctcaccatactctctccttatgtccttacccttctctttattcagtttaatttctgttgttggtcatgattgttcagttgcaaatgttctcagtacacttgccctcacttgcttcattgcttaatagagaaaccccagtttctctattaagaaccgcagttggttaaatccaactgtgcctactctacacttgtactttttaaaaatgtggtttagaaaaatggatatcaactgggcacggtggctcatgcctgtaatcccagcactttgggaaggcccagacaggaggattacttgaacccaggagtttgagatcggagtgggacaacatagtgaaacactgtgtctgcaaaaaaattaaaaagttatttgggcatggtggcatatgcccgtagttccagctacttgggaggctaaagtgggaggatcacttgagcctgatgaggtttaggttgcagtgagctgtcattgcaccactgtactccagtgggtgactgagcctgaccct

SEQ ID NO: 257759 - DNA, 403 bp, Homo Sapiens
  misc_feature (45)..(67): n is a, c, g, or t
tgttcatttcaatctcctgcaaatctctgcaagttaattgctttnnnnnnnnnnnnnnnnnnnnnnnctgctccaatggtgttctgtgtaaaagtgctttaaaatctatgctaagacccaggatttatgaagtaattaagtgatctgactgatgcgctagctccaataatacctcctgtcagattgaacgtggcttaggtaattagttttaaagccatttttaaaggttgagtagcacatcagtcatccattttcctcttcagttcccaggccaaggatctgggtcctcccaggatcactctcttccaggaggcaatttaggaatggaatcgagtgtgaatcctgctttgcagtcttgcagcatttgcagatactaacagctcttcatttattcctgcacacc

SEQ ID NO: 257760 - DNA, 482 bp, Homo Sapiens
ttccattgagcaagtagaaaagagagttccagaactctaactatagaattatctcatttctgttaaaaaatatgtatttatatggacatagatgaaaggctggaatgatatatactctaccctgttgaccatggttacccctggagagtgagtctctagatgtggatgaaaccataggaggcaggagcttcacttctcactgtatactattcatactggaggaaaaaataatttttgacaaatatgttgacacaaaatattttcaacttaacgtgaattaattttagcaagaagggcaaaggtagttggacaagaaccgtagcttcgtgtagtcacctgtcaaaatgtagggcctctgcttggctgaatctcagtgagaggatatcacagaccctaacaagagcatggacagtgctcagtgcaggttttctgatcatcattaacctacagactgactaggctgcttaagagctctgcatttc

SEQ ID NO: 257761 - DNA, 588 bp, Homo Sapiens
  misc_feature (490)..(499): n is a, c, g, or t
atatatatattcattgggtgtttgtagtaggaaaaggagaagagcaaccatttattagaaattagagacatcaagaatcagtcttagtgtaattggaatggctagtggtgatgattactaggattttaagattttggaagtggaagagttaccagctgtgtgatcctggacgtttatattctctgagcctcactttgtagttaacaatactatatgcctcacaaggctgttaggaaaatgaaacgaaatggaataggtataggcataaggcagtcttgtgaaattattttcaggaattcaagacttctgcaaatcaattcacacattctacatatgcactcccttgtaatggagttagcccttgatgattacttattattagaataaaaaaattgactaaatcattactttgaaaagatagtaggatatctgatagaacatggaaattaaactatttaagaagaaatcagagtactcccacaaatccatnnnnnnnnnncctttaaaactctggaaaattgggtaaagggtatgacaaacagattgtagtcaaagaaatacaatggatcttaaaatatgtaataataa

SEQ ID NO: 257762 - DNA, 484 bp, Homo Sapiens
aagagattaaattagattgcacagtggtgcaatcgcagcttactgaagcctcaatctcccaggctcaagggatccttccatctcagcctcctgagtagctaggactataggtgcatgccatcacactcaactaatttctgcatttttttgtggagacaaggtttcactacattggctgttacattctcaaagtgttggaattacaggcctaagcgactgtgtctggcattatatactttcaaatacaatgtaggaagcacagtaatttttacattaaataatgcacaaaaatatgagaattttattaactttttcattaaacattttgaaatttgttaaattgttgtaaattatgaaaaaaacacaaagaatattaaattcagttcgtgtagcattgatacttaatttattctaagatgtcagcgtttgtttattaacaaatcctggaaaaagtctgtaaatcaaatttcctttatgtccagaa

SEQ ID NO: 257763 - DNA, 572 bp, Homo Sapiens
  misc_feature (429)..(429): n is a, c, g, or t
ttcctctgcccagtcctgccctcactccccagtgaatcctcaattttctgtctcgttgtctgtccagataattgattctaagacatgttaggtatataaggagtgtagataaggcttcagccatgagtcaccccccagtaagccccagagtatattgaatagaaattctgccatgtgtggggagaatggaccaaggacttaggaaaaagtccctcatcaaagaaccagcttttttgggacaagctttacatgggtggggagggaaaatgtgaaacacattagcaataagttaaacctcatcttgtactaaaggaggacacactcagggagaagacctctgtgggcagggcttgtgggtggagcttcatcccgatgtcactcctcaactgacttaggaggacagtcttgctaccccaagtcactacctcnactcacctctgagggattttcaggaaatgtcttgactcccccatgtactctgtatgtgagcgaagatggcagtaactgttaaataagcattcttttctacttcttggaatcagatgaaataaaaaagcaggctttatttaagt

SEQ ID NO: 257764 - DNA, 481 bp, Homo Sapiens
  misc_feature (52)..(52): n is a, c, g, or t
  misc_feature (74)..(92): n is a, c, g, or t
  misc_feature (139)..(139): n is a, c, g, or t
  misc_feature (228)..(239): n is a, c, g, or t
  misc_feature (312)..(312): n is a, c, g, or t
acaggcacttcaatcacactatcagtattcatgcagatttctctctagaaanatggtttagaatggtaagaggnnnnnnnnnnnnnnnnnnntttccctcaaaacctccttttcttccctcctgggtggttcttttagnaatgcccccaccctgtctgtccttataaaatgcagctctgtaaacatttgtctaatttcacaagctcagggaggtgcccccatcagttnnnnnnnnnnnntctcctagtgcctgatgcctgtttgaaattcctaaagtggaacttaaatgctttcgcggaaggatttggattncgggcaaactgccagatacctctgggagtagaagcaggatctgtcatttacactttagtctgaatgggtgcctgaacctgggagaaaacagctttgtctttccctggtctgccttggatgtcagaggcttcttaaagacagcgttattgaggggcatggtggctcatac

SEQ ID NO: 257765 - DNA, 477 bp, Homo Sapiens
cttttaagttcaggggtacatgtgcaggtttgttaataatgtcatatctgcaccaatatatatgaatctgcatacaagcaaaggcaggtgtactttctgctgttagctgaaatagaggtagttcaattcccacatagattccatttctagctaagctaaaaagtacggcccctcataatctgcctaagcttccagcagggcatgtgcatttccttcaccaaaaaaccaaggcttattgcagaaaaataaaggcaagccttgttaattatgacctagagaatgtgaaattcctaagtaagtcaacttcagctggcttgaaatttggaaatgaatttgctgagtaaattaacaatcaaacacaattggaggagagatgtttgaagacttaagggaacaaatgatttttcaagcacttgggaagcattatttacatacagctaattactatgtgaaaagagctgtggtacctggaaagag

SEQ ID NO: 257766 - DNA, 521 bp, Homo Sapiens
aagctatgattctataggcagcaggtactatagggacaaaaaacaggttggagggaaaggaaggcaatgacattccatatcgcagcgctgtttaatctcagtagtaggaggactttcagaggtgctacacaggcaatagtgttgtacaagtgagccattctccacttattctcagttcttaaaatgtgacctgaggactgctgatagactacaagagtcttccataggcaatccatcttggcccttaaatttaatgtttataatatgaacacacaatactactttccagcaagaaaacatcctagcaacatttaataaacagttttcactttatgggaatctcattaaagtggtcccagtctttccatgaattccagggattgcatgttctttttagagggtcaatttttgaaatagtaaatacactatgggagatggtttgttgcatttgcaaactgaaaaatgtttaaactgctaaccttctgggatctggtacatctttacaatgcttcaccctacag

SEQ ID NO: 257767 - DNA, 597 bp, Homo Sapiens
atttgagatacaaggtaagccatataaatgctggttaactctcccattcatttggggagctccctcaagagaaatatggtactacagttgatggctatgtagatccaagaattaggtccctgtaacccctgtataagtgagaagctacattatccattaatttattatttttttgaaaaaacagaactgaagttaaatagcagcatatctattcccttatgatttctactaacacatgattcaccaacatgagatatgtaaataaaaaccattataaaaaagaagcatcttactcactaaacttaacttcttcaaagaaggcttaattaagaaaaaagttaacttacctttaggctgtcccagtatatttcctaaatgacaactacctgagttggcaacttatgaagtaaaattattacttttctctttgacatcattcatttttcctttgaacttattctactgaagtcgcttcatatgcatggaccatacttagttaataaaattgagagtctttccccatggtgttctctattttctaatgaatgaaatctctaaaacagatgcacaatgccagactcacttattgaattcctt

SEQ ID NO: 257768 - DNA, 645 bp, Homo Sapiens
  misc_feature (362)..(377): n is a, c, g, or t
  misc_feature (494)..(532): n is a, c, g, or t
aaagatgacttataagaaccctgaaatttatataggtgagacaatagaaataaaaagatcttcagccaggcctttctgaaggagttattctgctaaaaatggtcttagttgtctgaaaagccagctcttgaacctcttcacaacagtatcaacactggcttctcccggttcattttatgcgtgcgagaagtcagtggtaactgctgcagggcttaatacattagtggtaactggtttaaaaaacaaagactgtaagcctgtgtgtgccactgtttgcttcaacagtatatcctaataagcctcacctatttaatccaatgagttttaaatctaaatctcattcccttcttctttccctaccnnnnnnnnnnnnnnnncttaaaaaaatattttgtgttattaacagaaattcatatttggtgtggcttaacggtatttcagaaggtcatcagattgtgagactgcttccttgaaacatttttgtgctattgttnnnnnnnnnnnnnnnnnnnnnnnnnnnnnnnnnnnnnnntgtcaatgtgaaactgatgtcctgattcactttattctctttctttgataagaaactaaaaactttcctatcattcagtaggcttatgcaaagttatactatcataggatttt

SEQ ID NO: 257769 - DNA, 917 bp, Homo Sapiens
actacactattacacttccacactatttatttggggatgggctgggagtgacagtagcctagtagttcagctacctgattactgccccattcttttagaagcacatgtctgccaaggagtggtttgtactgctgtgtttggtacatctagtcttttttctgctataagttttccttacctgtcctttagtgtagattttattcatcacaggacagaataatcaaggacaaccaaaatccttttgttagtttcagtacctcagctatcaacatttctgagctaccattcaatgttcctctgtgtcatggagtgaaattcttgttttgtgggtattaggagtgtgggaatgtgataacctaaacaacctttgctctgaaattccatttttccctctttccctgagttgtattgacctacagagctaatttccctttgtatttttttaagaaaatattaaaaatcaacggtcgcaaacaaaaacaaaaaggcgagaggcccaaccctgtcgggccgcctcggcccctcaagaagccttttctagaccctttcctttgggcggcgcggccccccactcagcgtaaggggaacactggtcccttagctggttctccctaggggagaatcctgggggacatgaccttaaatgcctttggctatcttcccccaccaataaaaaaagaacgtgcccggggcgggctaaacccggaggggggttctgggagacaaacctcccaaaaatgggcgagggttctctgaagaggcccctgtaaggctgtgggaaccctctttcccaagcgcgggaggagccgccacaacccctgggaggccaccccatattaactctcacacaatttaaaaacccgcccctcgggggccccccgcggccccccactttccacttttgggggccggaaaaa

SEQ ID NO: 257770 - DNA, 692 bp, Homo Sapiens
  misc_feature (7)..(7): n is a, c, g, or t
  misc_feature (53)..(53): n is a, c, g, or t
  misc_feature (55)..(55): n is a, c, g, or t
  misc_feature (58)..(58): n is a, c, g, or t
  misc_feature (76)..(76): n is a, c, g, or t
  misc_feature (86)..(86): n is a, c, g, or t
  misc_feature (94)..(99): n is a, c, g, or t
  misc_feature (101)..(101): n is a, c, g, or t
  misc_feature (104)..(106): n is a, c, g, or t
  misc_feature (109)..(110): n is a, c, g, or t
  misc_feature (115)..(115): n is a, c, g, or t
  misc_feature (118)..(118): n is a, c, g, or t
  misc_feature (131)..(131): n is a, c, g, or t
  misc_feature (133)..(133): n is a, c, g, or t
  misc_feature (137)..(137): n is a, c, g, or t
  misc_feature (139)..(139): n is a, c, g, or t
  misc_feature (147)..(148): n is a, c, g, or t
  misc_feature (155)..(155): n is a, c, g, or t
  misc_feature (169)..(169): n is a, c, g, or t
  misc_feature (173)..(173): n is a, c, g, or t
  misc_feature (187)..(187): n is a, c, g, or t
  misc_feature (189)..(189): n is a, c, g, or t
  misc_feature (196)..(196): n is a, c, g, or t
  misc_feature (200)..(200): n is a, c, g, or t
  misc_feature (221)..(221): n is a, c, g, or t
  misc_feature (225)..(226): n is a, c, g, or t
  misc_feature (228)..(228): n is a, c, g, or t
  misc_feature (232)..(232): n is a, c, g, or t
  misc_feature (236)..(236): n is a, c, g, or t
  misc_feature (245)..(245): n is a, c, g, or t
  misc_feature (247)..(247): n is a, c, g, or t
  misc_feature (253)..(253): n is a, c, g, or t
  misc_feature (255)..(255): n is a, c, g, or t
  misc_feature (298)..(298): n is a, c, g, or t
ccatccnttctttccccatctcacttatcccccccattcctcccttcccctcntnccntttccctttcccaccccntcctcaatcnccaacacnnnnnnanaannncannaccancanctctaaccattcntntctnanccattatnntcctgtnaccgccaccccggntgcnacacctgtgccgantngtgggcntganccgtgaaggatggcggcgggncacnncngggngggngaacgagcngnacggtnanaagcatgccctccatcgctactccgcaccgggccacccgcggntctcgggcctgagcccgccatgcccttcagcctgcctcactgctgggccagggtcatgcctatataagttggcatggcagggacaatggtgggcagttgctcttacatgagctaagtttggagacctgaggcccctttgtcctcgctgggtgggccaaggtctgggacctgtcttggactgtgggagactcaccctcaaccttgccaggcctctcccctgcaggactggcattgcactagtctgaggtggccactgcctttgatcaacctttgtgtgcgagggtctaagtagggtcgaacacagaagtgggaaggagaggggtgggccaggggctaatggtgtcactgtgtaaagtttttgacatactagctctataaatatatgaatatggac

SEQ ID NO: 257771 - DNA, 710 bp, Homo Sapiens
tcgatcctcagtacaaatggcagtggtatgctgggtagctaatgatgacagttattaccgttactactattattatcaatatcctgttttgcagaggaggaaaccaaaaccaagaaggattgttcctttccccaaatcccaagctagcaagatttcccgatcctccctccatgccctttcctaacgtctctgtgatttgggagcttctgagctggagttctgtaaattcccaaggaatgggcagttcagaaaaataccaaaaattctaacattattagactttaaagagatttattgattccttttgaatggcagcagatggaacattctggactggggaaggacagtctgtgatgtgaaacccttccccaaggtagacaacaaaagcgttttttaaatgaacacttagtagaacaatctagaagaggaaaaacctcataagtaggaagcctagctgggcggttgggagaaggagtataagtgatttattacagcttatgaagagactgtgtgtgggctgccagggtcccagctctttctcagccccaactgagaaagggtggggtggtttgcctctgcctttgctgtgggtcacaaaccttcagtggcccaaaaggtgcaagcctgacagatgacctggaaaaatcaaggatatcaatgttttaaatgcttttattcataagcagggtattggtggtgggtctgctgaa

SEQ ID NO: 257772 - DNA, 904 bp, Homo Sapiens
  misc_feature (611)..(611): n is a, c, g, or t
  misc_feature (637)..(681): n is a, c, g, or t
  misc_feature (705)..(717): n is a, c, g, or t
ggtaataagattcaaattaatgcaaagttgcaagaatgtagtaactctgatcagctacaaggaaaggaggaaagagtaaatgaagaaagtcatctaactgaaaaggaatatatagaacattgtaacacccctacaactgattctgattcatctatagcagttaaagcactacaaatagatagctttggtttagttacatgctttcaacaagagtctcttgatgttcctcaaatgatacttggaaaatctcagcaacctgagtcaaaaatgcaatctgaatttataaaagaaaaaagtgctacttgttcaaatgaggaaaaagataacttaaacgagtcagtaataactgaagagaaagaaacagatggagatcacctatcttcattactgaacaaaactacggttcacaatatacctggattcgacagcataaaagaaaccaatatgcaggatggtagtgtgcaggtcattaaagatcatgtgaccaattgtgcattcagttttcagaattctttgctatatgatttggattaattctatataattttggacttttaaatattaaggttaaaaaatacctgtatctaaaattgattctgttaactgttgtnctaaaaactaaaggtattaaagtatnnnnnnnnnnnnnnnnnnnnnnnnnnnnnnnnnnnnnnnnnnnnnctcatgggggaaattggagataannnnnnnnnnnnngcctctggagtttaaagtttccttatggagataagttttgtgattcctgtaatagatgtgtatgttttctatttgagagttaaaacatttgagagttaaaacatttagttttaatacaacctatgtatatatacttctgtaataaattttgctttgtcattaataaaatttaaaaatattcaaaaaa

SEQ ID NO: 257773 - DNA, 622 bp, Homo Sapiens
aaaagtgtgctgtcctgagctgctggtggaaacgagagccatcaggcaatatctactgtaatttaaaatacttaataccctttgacacagatattttagtctttgggactctagcccatgaaaataaaagcagtaatgtgtgaagataggcacataaggatgtttgttttggtattgtttgtgtggtttaaaaaaaatccagaaagagagagggcaaatgccatcaaatggggcaatgtgtgaataaattatatttagccatggaatggaatgttctgcatgcagcttttaaaaaaatctgttagagctgtaccaagtgactcagaaggatttttgtgaagtataattaagtgagaaaaacaagataaaagtatgcataatacaatgccacttgtataaaacaaacaatggcaaaatctttgtatgactctgtttgcactcacccatgtctacagaggattgtatgagtgtgcagaaacaaatgcaacaaccactcgggtgtccgtatggggaggatgggcaaagagactgatatgggtggagaacagagcagggctggatgagccaagcaaaaaaagttaaaacacagctgtgagccaccgcacccggcccggatagtgcc

SEQ ID NO: 257774 - DNA, 593 bp, Homo Sapiens
caggttgaaattttgattttatttcaaattgtttaataaaccgaggcatagttctgaccaggtactatgtctgcagggcttttgaaattaaagaaacagtccaggagggctccagtcagacccagaatgacaccagccacacttgtgactggcagagataacctctttgatcttcagcaattttaaaagttcttcatcctaatttctgagtatcataaaaagtaaaaagtactttcattttatttttcctttgaaaatgtttttaggggcaaacaggactacttgtttgccttacttcatttttataagcatagtagttatatgtcaatttacttaaaattagagagggaaaccccagagacctgagtggcactgcccatccactgaaggcccacataaataggtactcatgttcatgttatcacgtctacaaatagcaataaaatgatgtccgtaaatcggaagtacagcagtagcagttcatacatatctgatatgctttcacaccaggattcagtaaacaacaataaatataatttcccctcttcaaaacaaaaaatggatttatacggaaaaagggttaattcacttgg

SEQ ID NO: 257775 - DNA, 455 bp, Homo Sapiens
gcaccaagactaattctaagcaacattctttgcagagactgactttccccttagaggagtctgccatccctgttggtctagctcttccctcttaagtgctaactggcaaatgccagctcgtctgtcatcactcctggtcctgaacttttatgatgcatcttatctctttctacatggctgatgaacttacagcagtggtttccaaacttgtttagttcatggagccttaactgtctcattaattttttcggagagtccctagaccagaaatattatctaacagttcccatttttagtagtcagggtcaacaacttagtagcagcatggtgtccaacagatggatgttgttgtgtctccttcaaattttagagtgttctgtaagttctcttagttctctctggtagctcagggtttcttagcagttttgggtattacaaccttagcgtgtttttct

SEQ ID NO: 257776 - DNA, 1572 bp, Homo Sapiens
  misc_feature (453)..(509): n is a, c, g, or t
  misc_feature (553)..(561): n is a, c, g, or t
  misc_feature (1446)..(1507): n is a, c, g, or t
ggtacggccggacgttcgggatatcgtcgacccacgcgtccgcttttttgaaagagaatatatggacagattattagtacaatttgggcactgtggttttaagaatatctgagtaaaataacaatatgaaataataaacagaagctctaacgtcaggtaacaaatagacagcaagaaaggttttgcaccatcctcttacggcctagagagttgacaagttgcttgtagttttaaaaaaataataaagtatacccttctggtatatcatcaagagcttaagaatcttggctttcatatttaaaatgcttttggggagacatatattaaaattttagccaagatgatagacatgtctcaattatatatgtgtgtgtatgtttttaaagctaaaaacattacttttagatccctagaatgaaaatttttttctcatctatgcaattcccatatggnnnnnnnnnnnnnnnnnnnnnnnnnnnnnnnnnnnnnnnnnnnnnnnnnnnnnnnnnctcataatttgaacagagacagttctcatacatgatcagatgcnnnnnnnnncttcttaccatcatttatgcatgacataggtaatgtgactaatttctccagttgattcaagaaactcattactttgcctcaaattatatgtaaaatatttgttttacttaggttacagttatcagaaaggtagtttttttcttctattaaaatataacattgtgaaagaaaataaaatttatgctattctttgctttgtttttataaatgaatttttcatagaatttacagtatattcaaaggaagaaagataaaattattggtcatcatttgtaccttagaagtacaagaatttaagtaaaagaaatgttcatttttgttttaaaatttgttttccatgtgaagtttttattgagccaactttcatacatatcttgctagcctaaagtctaaatatttgtgttggcatcagaaaaacaaatgaggcagaattgctatgtgtggttgatcttcagataaactgactgatcacagttatttttgtatcagtctatgttattaggaaaaattgtttagttgttttctcccctgattaatggtgatattcaagtatgatacaaaaagaattgtaccaccaaatatttttgtgaggtctgctgttttccatattcattttatgctactgcctttaagaaaagaactagtgtatcccttgaaatagcaccaaaaatgtttttaaaaattcataattgcaaaacaaatctgtgactaacttaatgtcttcagatctaaagggtgtaaaaatattgatacttcaatatttcacttgctgccaggaaaaacaaaattctcaatcttttgtaaatgggaggaggacttttgcatacatttttactctttaaataacgacaacgacacttatactgtcataataccaattatgtnnnnnnnnnnnnnnnnnnnnnnnnnnnnnnnnnnnnnnnnnnnnnnnnnnnnnnnnnnnnnngcagataaatatttgtgcataaaatgtgacaatagtaaaatgagaaaaataaaactattatacag

SEQ ID NO: 257777 - DNA, 555 bp, Homo Sapiens
  misc_feature (46)..(46): n is a, c, g, or t
  misc_feature (111)..(111): n is a, c, g, or t
cgccctatgccaaaggaagggaccctccggtgtaagctatgtctcntacagtcgggcagtcagtaggcgcaatgttcaatatatgtccaatggtcagagccatgctctcgngtgccatgtagcctcgtcacccgtctttggaccggtaggaatcatagtcctatttgaaggatagggtaagagatgcatctttcagccctcttatgcgtagcgcctcctggagccacctagtgcatatggtccataaggagtaacagatctaagcacgtatgagtctgctagcggttataatccataatatgaaatgagtagagtttcaccgtagcactagcgctggattcgtagattaacctttatgatgttatttccagataaactggtatgcccactcctacaaaagatcaagccgggatatacaagcctattagaaagaacatgccgaccatcagtgattcagaaaagaggtaatgcagctttatacacatcattgaaaagggagcgctgctttcaacttgtaatgcgaaacagctattacaaaaaagagcattcagtcta

SEQ ID NO: 257778 - DNA, 946 bp, Homo Sapiens
ttgcatgaactttaggaaatcattttggtcggttttatacaatgtgtaagttaatgtctggaaagatgttttgaacaggatgcaggacttagaaggcacagaaatgataatataaaaatttagatcatatatgaattttttctaaatgttcaagctaattgctttcattagtcatcctgaactgctgcaggtttcatttcccaccaggacagctgtgccttttaaagtaaaaatagtcatttgtattaactataaggaaaaagtggcttcagctggaagaacttaccaaccgaaacactcttgagcttatagaaataactttggtaagtggcctctcttaaaaaggctgctgaaagctctaaaatataaggataaaacatacggtttcagactgtacactttgctgctacaaactacatcttgatgggattaagaggctacattgattcttgggtttattgcaccaacaatccatctctgacctacccatggctgcatctgaaacaaggtaaactccaagaagaaatgaaaacagtgggtccctaaagcactcttcccaacaagcaattcttacatgttttatgtcaaacagtcactgctaaagccactggagctgaagatggcacaatgtggctttctttgcttttaccttgtcttaaaaagcaaactgtgacctggaatccaaagtctgtattctgattgttgtctcagaatagcaaaatatgttttctccagtttggggagctcatgcttaaacttggaagcagtttcctactggaatattatgtacactgctgaccaccccgctcaagtcacttgtctttattctgcccaaacagcacaaggcaatctgttgcaacagcttagtgtttagtgcttatgtttcctcctaccaaaaaggtcagtttctttgttgattcatgggtaacaaatggcctaaagtgtt

SEQ ID NO: 257779 - DNA, 1505 bp, Homo Sapiens
ctttcagtgaaacactacatacacgaagaaaaggaacaaggtttaactatttaagaaccatttgctgccgcatagtgccattggatagggaagaacttcagaaatctgtggtactcttggccttgtctttgtcttccctgaacgtgtctccactctgtgaagccagcatctaggggctaaagatgcaaaggaaagcagcatgcattgtctgtacaaatgtgcagcgaaataccccaaagcttttcctactgtacagatctctcgagtctgctttaagtgatttcttttcttcttgattattttcttatatttctatatgtatagtgtaatagccttttgttaactaattttcttttttccttttagtaattaagcacgatcatgtccctttttaagccttacctgagaggaacaatgccttaaaataaaaaagcattaatgagatgaaagtatgcacagaataactttcctctacttattctgtactttgccctcatgagttccaatgttgtgtgaagacaggcagatgctgcacagtgaattgcagatgatattacagaagtgatgtctgtaggtcacattaaatactgacttgagcagtgggtgacacaacacagtgtttgtcttccacagggaagcttaaaacaaaagatatttttaacccactgacagaacaacaaggttaagcttcatctgcttggtgtcccacagaacttgcacaagcagttgttattgggaaagtacagtctcaaaaccagcaacagcagcagtacctacagccctttttttggagagaagtttaaatgctttactgttggggcagtccatttctaatcctgacttggtgacagtatcatgtgtatttataaaacaaggctagccatatttaggacaactgaagaaaagctggaaaaaaaaccaagcaaacttgaacactgaagcaccctcaagcatctctttattttgatgatatatttttgtaaggaaaatattcagatgatcaggaatgtatataactgaaatcaagaaaaagaacagtatgcatttaaaaagacagaattatgaaattatatgagtgcttagaatggggctaagggaagtgctgaaatagagccaaaggatggaagataatatagactaccacccactgtaaatgtttgcaagtggctgtgttttaaatgggattattacagttgatctctatgaatgtcagagccctaactttcaggctttgcattttgtatatgggaagaaatatgacaatcctaggtaattaaaccatagacccaaagcccttacgtttgatgcaatttatttttaaaataggccttgtttttcagcttcatctgcagttctatgtgaagattgataaatcagtttttacttgttttattaataaaacgtaatttggatatcttgagttgatggttttgtgatttagctgggtaaactatctttgtaacagataagttatttataaaaattaaaaaacttatattctaaat

SEQ ID NO: 257780 - DNA, 1098 bp, Homo Sapiens
tgacaatggcagatgtaaagttattcttgaagtcagattgaggctgggagacagccgtagtagatgttctactttgttctgctgttctctagaaagaatatttggttttcctgtataggaatgagattaattcctttccaggtattttataattctgggaagcaaaacccatgcctccccctagccatttttactgttatcctatttagatggccatgaagaggatgctgtgaaattcccaacaaacattgatgctgaccagtaatgcagtctgggagtggggaagtgatcttttgttcccatcctcttcttttagcagtaaaatagctgagggaaaagggagggaaaaggaagttatgggaatacctgtggtggttgtgatccctaggtcttgggagctcttggaggtgtctgtatcagtggatttcccatcccctgtgggaaattagtaggctcatttactgttttaggtctagcctatgtggattttttcctaacatacctaagcaaacccagtgtcaggatggtaattcttattctttcgttcagttaagtttttcccttcatctgggcactgaagggatatgtgaaacaatgttaacatttttggtagtcttcaaccagggattgtttctgtttaacttcttataggaaagcttgagtaaaataaatattgtctttttgtatgtcacccaaatgttttcctttggtcttattttggggaaatggtgggaggtagagaaaattggagttaaaagaagaaacattatgaaaaaattccaagccagctattttatcttataatcattcatcatgagtttctttgatgttctggctgttccggtgtgcctatgttttctgataagggcataaatacacttagtttaatattaatttagcctttgtaagcagcacttgaagggacttaagtattcaataaattgtagttatgataattaatggaaatggagggttggtcctttctaatattaagctaaagtggaatgcaatatgattaatgatatacatgatgtgcaatgtctagtcacaacggaatatattagcacgttagattagagaccaagaaagtcagttttt

SEQ ID NO: 257781 - DNA, 1149 bp, Homo Sapiens
ggttggcaaaagggtgtatttaatagaatttgcaggcagatttcctatctgcctgccctgccctaccctccccctttgggggtgtttgaggtttcattccacaaataagcagcagataaaatactttacaaggtacagcacagttgtattgaagaaaaaaaggacccaactcttactttaggagtattaggcctggacttcccctgccccatgcaataaagcaagttttatatacactccccatatttttttctaacattttcttatataaatttaaatattttacaaaaaaaggcttttttcctccaaacatataaatctgagtgaaacatagattccccacccgagaacttgtttcttcactaaaatataaatgttgtctgatattaagggtaaatgtcttttgaccactggagatcactgaagtctgaattgcaccgtggagaaggcacttgtgttttctgaggtctccagcaagtatctcagtgagcactcatagaattgctgtctgtcctccagaacccgtgccaaggcctccgagtgcccagttactgaggcagctggggaaaaacgttgagtaaacatgattctacaattacggagataaaaaataaaaacagcatggactggttctaccctagaatcaaactacaacaaaatccaaagtgttcattcatgtagattcaaaatgacttcattctgtcataaattataaaatacaaaggtggctgttttaatgacaaaactcaaaacagtactaaaaggggtttgtgtcaatggacaaaagtcagtccctctaggtagggccccaaggagcatcacccaggttgaagggtggttttcctactgctgggccagaagtgctgtactattggccttcatcttctccagccgcttggccaggtggctgtaggtcatctccatctcctcaatcttgtccagtgctgtacgtaactctcgttgtagcttccgtttttctgctttcaattcatcttcaactttctcagcattctcagcagcagttttatatctcagaacctgtccctcaagccggctaatactttgctccaaggtagttatatcctgttctgcttttgaaagcttaaatttgtattcgctaatttgtctattggcatctctctgcatttc

SEQ ID NO: 257782 - DNA, 359 bp, Homo Sapiens
tggttaagccatctttcactttgcctctctctatctccgcctatcatctggtgccagttgcatgccacagacctaggcagaagatgaaagcagagagctacgagggattctatggtagttaaagtttgagcaaccaacaaacaaaatgaagaaatagaaaaaatagaaaatatcagaagtatatcagtgaggctccttgcgggaaacaaatgcacgttaggcacattgaggggagtttaataacaggaccatttataatgggaaaccccagggccagaggagagaattgctgtcacaatttggaagcttagtgcaaatggcagcctaagtaagagaagtcaacagtgactcccagaagc

SEQ ID NO: 257783 - DNA, 462 bp, Homo Sapiens
gtgctgggggcggggcagggggtgagaattttaacagaatattggagagacaaaatttttctaccgtttatatatatatatctagttgaattatttcaagatttcaaggtcagtattgtccccattttataggtgaagaaataggcctagaggtactaaactttacaacttcaggtgagcaggagataaacaggtaggattcaaggcttaccagtctgattcctgttagaagaaaaacttcagctgaactaaatttaaaggagttaaactgagcagtgaatgactgggcagcccccagaatcacagcagattcagagagactccagggatgcctcctggtcagaacaaatttatagacaaaaagagggaagtgacgtacagaaatcagcagtgagatacagaaacagctgcattggttacaggggggcgtttgccttatttgaacacagtttgaacaatcag

SEQ ID NO: 257784 - DNA, 476 bp, Homo Sapiens
  misc_feature (410)..(410): n is a, c, g, or t
  misc_feature (435)..(435): n is a, c, g, or t
  misc_feature (453)..(453): n is a, c, g, or t
atgtgatcaatgtttaatattctgaggaataagtaacaaaatcaagacagattttttacttagctgggttaatttcctctgaattcttctaagagttaaaaatgaactatcacattgattgatttagaaccatcagattttacttctggaaaatctattacctttcaaaaagttataattttaatgttagcacgaaaattacttcctaacatttcattaaaattttgcagccaaagattcctatttttgaattacagtactgcaaggcacatacagaactcacctccttcaaaaccacagaagatatactccctgaaatagaattttaaaatccttgaacaattagaaatactataaagttagcattttttaggtaaaaatgttgctcctacaggatcatgcaactttcnttaaaatcaattcagcacatatggnataaaggatcccttttanaaaccattggacctggaattccg

SEQ ID NO: 257785 - DNA, 477 bp, Homo Sapiens
  misc_feature (281)..(306): n is a, c, g, or t
tatggcacctctactagccaaagtttatgtaaaatggaaataatatggtctctgtgcacatttacattaagaaaaaagagccctaaggtcgacctgcaaactacagagttcctaagtactatttttctctattttttcttttctgcctgctctaaatctgctgttatatttccattaagataaaaaccactgtttagacccaagaagttctttttgcaagctggtaaatttgtatttatctcatggctaaaagttctgaagtaaaagctgtaggaacttcnnnnnnnnnnnnnnnnnnnnnnnnnnatatatttaaaaggcctttataaattatataatccaaactttttctctctgcatcttaccatgtaaattttgctatttgactttcacatgaacagcttcctttaatatgcaaatttaggctatttagctgacaaccgcccagggtggtaaaacaggttatcaagaatctga

SEQ ID NO: 257786 - DNA, 889 bp, Homo Sapiens
cggaaccagggccaggcgaggaccaactccacctccgcacagaaaaatgagagagagtctatcagacagaagttggcacttggaagcttctttgatgatggcccaggaatttataccagctgtagcaaaagtgggaagccaagcctttcctcccggcttgaatgaagagttggtccagctgcttctcatccgagatgagctgcacacagagcaggatgccatgctggtggacattgaagacttgaccagacatgctgaaagtcagcagaagcacatggcagagaaaatgcctgcaaagtgaaaagaagccattcaaccagagaacaagctagaatttattttgcttctgtggttgtaaaaatgctgttgctaaaggtggcgcagaaacaaatatcagtgttagtcattgataatgtctgaagcttaatgtccagtgattggcctttgcttcttaatttattttaattttttacttgtgccacttaatatcaggcattttaataaaatattgttacaaaaaatgtacagtactgacaccaccacaaatcatggttaataaaagagagtagttttaactttatttttatttgtttagagattttaagttggaacagtattttcccattgactacttttcattcttcactgtagttttaaagaagaactgtaaatgacggtgctatacaagtcaaaaaatacatgcctgcctcgtagtgaagttgtagctctccgtaatatgtatattttactcagttttcaacattttgtgaatgttgactacctgaagttcctttttagatgtgctattaacattctgttggattcagagggttccttgaaagttttatgtataaatatgtaaaataaaaattaaaactttgtttcaaaa

SEQ ID NO: 257787 - DNA, 594 bp, Homo Sapiens
cagcaccgctctaaaaagggtcttctccatttctccaatagccgcgtggaatcacagtgaggatttctaagtgaccatccctaatagacccctttcacatgaatgcctataacctaaaccttaaaataacctgtaaagtgtgtaaaaatgtgttttaaccgagtaatatataaatatctctatatatatgaggaccttgtgtttttaaaatggtggccaggtagaggacctaaaaaagagtttttgttgcttgttttctgaccttctgtgttattgcccctaagaaactaaaatagtaattttcctaaacctaccctgccccatgttagtaataaccagatctgccttaaagaaaagaaaattttagaaagaaatattgttgctcagtgttgttaatatagctcaagaattgagtttatatttgcagtatgctataaatgatacccccctaccacacccacacacacagtttttgtctaatgaaaatgttgctgtgattatttataattggtagtatttcttccagaagaagctaaaataagactggcacttaccctgaagtgcattaataaaaccacactttaaaattaaaaa

SEQ ID NO: 257788 - DNA, 1557 bp, Homo Sapiens
  misc_feature (16)..(16): n is a, c, g, or t
  misc_feature (497)..(515): n is a, c, g, or t
  misc_feature (882)..(893): n is a, c, g, or t
  misc_feature (973)..(973): n is a, c, g, or t
  misc_feature (1050)..(1058): n is a, c, g, or t
  misc_feature (1115)..(1115): n is a, c, g, or t
  misc_feature (1117)..(1117): n is a, c, g, or t
  misc_feature (1122)..(1158): n is a, c, g, or t
  misc_feature (1187)..(1211): n is a, c, g, or t
  misc_feature (1232)..(1240): n is a, c, g, or t
  misc_feature (1275)..(1384): n is a, c, g, or t
  misc_feature (1439)..(1477): n is a, c, g, or t
  misc_feature (1480)..(1489): n is a, c, g, or t
taaagggctgcacaangatgtcaagggataactcggccatgagaaaacatctgcacacccacggtcccagagtccacgtctgtgcagaatgtggcaaagcttttgttgagagttcaaaactaaaacgacaccaactggttcatactggagagaagccctttcagtgcacgttcgaaggctgtgggaaacgcttttcactggacttcaatttgcgcacacatgtgcgaatccataccggagacaggccctatgtgtgccccttcgatggttgtaataagaagtttgctcagtcaactaacctgaaatctcacatcttaacacatgctaaggccaaaaacaaccagtgaaaagaagagagaagacccttctcgaccacgggaagcatcttccagaagtgtgattgggaataaatatgcctctcctttgtatattatttctaggaagaattttaaaaatgaatcctacacacctaagggacatgttttgataaagtagtnnnnnnnnnnnnnnnnnnncttgactaagatgacatggctaagatgctctatcttgctctgtaatctcgtttcaaaaacacagtgtttttgtaaagtgtggtcccaacaggaggacaattcatgaacttcgcatcaaaagacaattctttatacaacagtgctaaaaatgggacttcttttcacattcttataaatatgaagctcacctgttgcttacaatttttttaattttgtattttccaagtgtgcatattgtacacttttttaggggatatgcttagtaatgctacgtgtgatttttctggaggttgataactttgcttgcagtagattttctttaaaagaatgggcagttacatgcatacttcaaaagtattttcctgtnnnnnnnnnnnngttatataggttttgtttgctatcttaattttggttgtattctttgatgttaacacattttgtataattgtatcgtatangctgtattgaatcatgtagtatcaaatattagatgtgatttaatagtgttaatcaatttaaacccattttagtcacnnnnnnnnnccaaaaaaatactgccagatgctgatgttcagtgtaatttctttgccctggtccagntnacccnnnnnnnnnnnnnnnnnnnnnnnnnnnnnnnnnnnnnggattgtgtccccctcttttacacccccnnnnnnnnnnnnnnnnnnnnnnnnntcgccgtgaaaaaaaacaaannnnnnnnncgggccgcaaacaaaaattatcttcccttttcctnnnnnnnnnnnnnnnnnnnnnnnnnnnnnnnnnnnnnnnnnnnnnnnnnnnnnnnnnnnnnnnnnnnnnnnnnnnnnnnnnnnnnnnnnnnnnnnnnnnnnnnnnnnnnngcattttccactcgccccttaaacaccatcccgcttatccactccgccatccgtnnnnnnnnnnnnnnnnnnnnnnnnnnnnnnnnnnnnnnntcnnnnnnnnnncctttccacaccccttttattccgcctttccatctcgccaactttttacccccctgtttcccaattcc

SEQ ID NO: 257789 - DNA, 1730 bp, Homo Sapiens
  misc_feature (195)..(195): n is a, c, g, or t
  misc_feature (1057)..(1102): n is a, c, g, or t
  misc_feature (1152)..(1237): n is a, c, g, or t
  misc_feature (1249)..(1259): n is a, c, g, or t
  misc_feature (1268)..(1268): n is a, c, g, or t
  misc_feature (1273)..(1273): n is a, c, g, or t
  misc_feature (1286)..(1287): n is a, c, g, or t
gcacagaaccacgtcgtgaaactaaaacaggaaatcagtttgctccaggcgcaggtctccaacttccagcgagagaatgaagccctgcgctgcggccagggtgccagcctgaccgtggtgaagcagaacgccgacgtggccctgcagaacctccgggtggtcatgaacagtgcacaggcttccatcaagcaactnggtttccggagctgagacactgaatcttgttgccgaaatccttaaatctatagacagaatttctgaagttaaagacgaggaggaagactcttgaggacccctgggtgttctcagcatgaagctccgtgtataccctgaggtcaccaccgctcgatctaaatgtgcagttgtgtccttaaatatgcagtcttcacccagagtaaagtgttgatcgcaagagtccagtgtcgtgccctcagccagttcttggccaccacaatgggagcagccctggccgagttgtctctgtggtttctatgcagcccttcttggcgaaattcctgcgatcttatagattctaatgagctcttggaagacattgtcataaaagccagtgattttaagaaaaagagtggttctggaatcaatgttttccagtcccatcccagaacatcagttgtaagataagtacaattggttgtccttgatttcataagtagaacaaacactaaatgtgcctctgagatggccaccccgggcagggacctgtgccttccgccgatgctcagggctccctctggctcccgggtcactcttgtggccccagtgggtggtccctgcagtcatggcctgagtgcgcaggggccaccgcgtggctgctgctgtcctcctccgggacccacggggaccaaggtcaaacgttccgtgctgtgaagctgtccagatgtgcctctttggctgggggttctggtggacgtttcaagtggcattttgtacaatgcaggttagaattcaggaatttcaagtatgtgcccgggtctgtcaggtcccagttgcctttctgacggcccccctcagagggacggcgatgagcactaaatgnnnnnnnnnnnnnnnnnnnnnnnnnnnnnnnnnnnnnnnnnnnnnncctcctgttccaattgatagctttcttatttaataaattctgtagttcannnnnnnnnnnnnnnnnnnnnnnnnnnnnnnnnnnnnnnnnnnnnnnnnnnnnnnnnnnnnnnnnnnnnnnnnnnnnnnnnnnnnnaaacctagaacnnnnnnnnnnnttaataaanatttntttttgaaacccnnccccaaaaaggaaagggaacttggctatttctgttgccaccagaacctgggacaggactagggtttgaattctaacaataaaaaaacccccggcggaacccgtggtttttaaacaatgcaaatatgaagccggagggggtatcctggatctataaaccggaggcccattgcaagctccaattttggattgcccccgccccttgccgctaaacgggggggcggtttgatatacatttacggccttccgcgaacgggaaacccattcccaatgggggaatgttgaaatcgtgaaacgggcaaggggaactccgcaccccgtgggccccttggcaaataaacttttggcccatggcgaaaaaccggggggggaaaaaacatgtgctgtttccggccccggtttaaaatcgcgcccgggggaacaccccccccggggtatgggctct

SEQ ID NO: 257790 - DNA, 603 bp, Homo Sapiens
  misc_feature (432)..(432): n is a, c, g, or t
  misc_feature (582)..(582): n is a, c, g, or t
atttttccttccggaataaatctactcgtcactccagcacatatgtttctctgtgtgaaagcaacaaatatttaatgtgtatgtgtgtatgtatacacacatacacacaacaattatgtatacataactatgtatatggacatgcactgcatatatcgaatataattgtatgttatgcacattaaattgataataaatactgaataataggaacaacattactttctactgagcactttatctcatttaatgcttctagtaaccttatgaagaaaaatatttgctttctccctttgcagtttaattgccaaggatcagagagattgagcaacctgtccaggctcacacagcataaatagctacagagcctggatttacgtcatacatttcagaaaactccaagtctgggagctttttgagagcaggaatctntgtttcattagtatctattctctctcaccaaatatagacaaatgctcaaaaatgtattatatcagttttaagaacaaatgtgtattttcatgtggtgaagaaaaagaattcatgtgggaaatgaaagtgattattgggatgcatgttaangatgtggattaataagcccta

SEQ ID NO: 257791 - DNA, 495 bp, Homo Sapiens
ctctgatatttacactaagatgttcagtggggggaaaaatcagtcttaacgctcagagataaataaccacattcatgacaatgagattatgtaattgttttttattcacaaatattttctggcacacacattaattcacagaaagaaagaacagtagtcacgtgggcacaatatttaaccctttcagatactgaggtttatcaccgcttgatttcttagttggaaatgttgcagtttggtttcaggcaggatttccaggctatcacagcctgctccgatggcatgattattaggagctcatctgcatcactggtgaatttctttggtcacttctggacagtttttaaacataagtccatgcccttctttgttctgctgatgaggcacgtcataaaataaatgtccagcaatgtcttcccgtcttgttctcaggcctcaggctctcggactccttcccccaaccctgcccccatgttaactttctattgctgctgt

SEQ ID NO: 257792 - DNA, 1440 bp, Homo Sapiens
atttgaaaactactttagcaataattaattccatgattatcacattctgccattaagggatattagtaccgtaatactgaagaaattttattaagtctgaacttctggggtaggcagcttctttgtttcttttctatccacccttgtcggttgaggtatttgtttcttgactaataaaccctttgatacttttagccagaaatcagtctcataaagctatttttgagtatagtttgtgtaaaataaaaatgtttagctttggtaataacttccaagctgaactccctctagcaagatatttttcagtgcttttatttactatgcacttagactatgcactttttctgaaatatttttgtaacacttttttgtatttttgccatttgaaaaggttgtggtgtagttggtctgtaattaagttgcagatttaaaactgctgttagctttgtaaatcaaaatataggtgttttttgtcctggtatatcgtcattccatctgcagctggagctggaatcccattgatcttctagctaccattcattttcttcactgttcacaaaagaagagtgtgaaattcagtgaatgctgttactaatcctgttacgagatgaatctcatttcaccaaaattaaattatgtttttccgctaaaatgatgatacaagttgaagacacatcactctgaaattggaagacctcaccacttaaggctccacagtggcttactcagctgaactctaggttactactctttactttgttcacccattggggggtgcagtttgttttaaaatgttgggagatggccattctaactactgttgaatgtctctgttttgggaaggtataacaagaaataaaaaagaatatatatgaagggagagactggttatctcctcccatatggatgtgcttatcctcttatggcttacaaatgaatatttggaggtttgctttcacaatgatttcccatcaacaaatatttttagtaggatttttcctgcttctgctagtccttgcagtactcataaatgttttaagctgagcatactgtaatagtcataagtttaatttcattataataaaaataatcaaacaaaaggactttagaacccaagacaatgagctagctttccctaaagcttgctgaactattaaggaatatgttcttatagcttttgactacaatgagtcatgcgaattctaaaaagggatggcctagacatttttagctcagttaaaattcagcatttaccgcacgtggagttcctggggtcggttttccacctaatctgggaacagtctggttcctgacctcaaactgggattaaagcattattttagggtttctcctcttttccccactctcccacgcccgttataacaccatgccacaatcaaacatggtggacggacattctaatattggaagctacaagtc

SEQ ID NO: 257793 - DNA, 993 bp, Homo Sapiens
  misc_feature (357)..(539): n is a, c, g, or t
  misc_feature (556)..(566): n is a, c, g, or t
  misc_feature (607)..(622): n is a, c, g, or t
  misc_feature (688)..(697): n is a, c, g, or t
  misc_feature (727)..(735): n is a, c, g, or t
  misc_feature (832)..(832): n is a, c, g, or t
ccatatcatgggagcagaagaaaggtgttccttcccatggatatttgtatgctgcatggtgtttcacaagaggactttctacggaggaaccaagataaaaatgtgagagatgtaatatatgacattgccagtcaagcacacttgcacctaaagcatgctaggtcctttcacaaaactgttcctgtgaaagcatttcctgcttttcttcagacggtttctctagaggactttctaaagaaaattcagcgagtggattttgatatattccacccatctttacagcagaagaatacattacttccattatatttgtatattcagtcatggagaaaaacatattaaaataatttcatggcnnnnnnnnnnnnnnnnnnnnnnnnnnnnnnnnnnnnnnnnnnnnnnnnnnnnnnnnnnnnnnnnnnnnnnnnnnnnnnnnnnnnnnnnnnnnnnnnnnnnnnnnnnnnnnnnnnnnnnnnnnnnnnnnnnnnnnnnnnnnnnnnnnnnnnnnnnnnnnnnnnnnnnnnnnnnnnnnnnnnnnnggggggggggccccggnnnnnnnnnnnaaaaatctttaaaacccccctggggggggcggggccgcccnnnnnnnnnnnnnnnnggggcaataggcgtttttctagaggaaattcccgggcaaaaaaaaggggggtttttcttccccccnnnnnnnnnnccccgcggggggcaacgcgaggggtttttnnnnnnnnncaacaaaagaggggttctttgggggggcttttgtgggaggattctcaaccaagagggggctctcacggggcgcctttttatattacaatatagtgcncctcgccccccccggcggggccatttttggggaaagaggggggtggggttattattataaaacaccccccggcgcccggcggggagagcaccctcactcctgcggggggttgtgtgaaaaacccaattatacgccccggggggaggccccaccacccgggt

SEQ ID NO: 257794 - DNA, 682 bp, Homo Sapiens
  misc_feature (298)..(298): n is a, c, g, or t
atttctggaggatgaccttgagggaagctttttaatattagtttcaagctttccttaccctacaactttaaacaaaagctttaattttgtttgcactcctattttgagcttgtaactggaaaagcatgtcttgcactgttcaacctcctgagtggtcgctttaacaacctccaaattgtgcacagtgggtattttccccagttgtatagttttgagacatcaaattatcactgtcttagtggtattttaatttacttaaattatgtagctattggactgttaagttcttttaaacaanctgtttccttgggcttcagttatttaaagtaaatttaggtgtaatatagaaaactgtccctttccaggtgggagcttaacacctgtataaaacctaaggttttggtaagtaccttagttgaataaaagcacaaggttatcaccttttttatccgtccaccgtgacatggttatgcatcctttagattaacctcaccaaatgaagctttttctatccatttttaatattgtccttacataatattgtccttagattttgatcaattctatgtctgacttagaaattccatctacaatgtagtatgttttcaatgaaaaaccataaagtaacatccaagtgtttcatggtttgttgggaaggtaattttaaaataaaacaatttcc

SEQ ID NO: 257795 - DNA, 503 bp, Homo Sapiens
  misc_feature (227)..(227): n is a, c, g, or t
aagcggcaacgtgagtaggtttgtcaccaggaaggaatataaccttttttcctgaaggaaaacactcagcttgcccattattattgttcatatattaaaccatttcaatctaacaaaaattgtaccaggggcacagagtgctaccaaaagtttatcatcaggaaatatggtcccttcctagttttgttttagtcatattacttgccagtaattcatcttcctcttanttttttcccttgtgagatttaattttggtgtaaatgtagtccttctgtagaaaatgtaatattaataattattatcacaattattttaaaagagtaaataccaaataatcacaatgaactaagcactctaacaaactttacattttttaattcaatccctacaataactctgtaaacttcattttacagataagcaaattatgactcagagaggttaagccagacccaggtcatgtagttattaggttatgaaaccaggatttctcaaccagcact

SEQ ID NO: 257796 - DNA, 1874 bp, Homo Sapiens
  misc_feature (1413)..(1413): n is a, c, g, or t
  misc_feature (1500)..(1500): n is a, c, g, or t
ctcgtgcgcatgcgcggcaggcccttcgggacgagctggaggcagagcgtgagtacaaagtgatcggcctcggccgcacgcagtagcccccctactccccggccaagtcagggcctccctcttcccgcggagtcgcaaccacgggtagctcgtgtaggtaacggcaggtccaggcctccgcatgagcggagggccccccgcgcgaccttgaatggcccgggcgcgcgcggtcgtgtgggagttgtagtcctccgtccccgtccgcgcggactccgtttcccgtggtgccccgggcggcccgcttccggcgcagttagttacgagtcggcgcacgcggcctcggtccggttgactttgcggagccatggagggcggcttcggctccgatttcgggggctccggcagcgggaagctggacccagggctcataatggagcaggtgaaagtgcagatcgccgtggccaacgcgcaggagctgctgcagaggatgacggacaagtgtttccggaagtgtatagggaaacctgggggctccctggacaactccgagcagaagtgcatcgccatgtgcatggaccgctacatggacgcctggaacaccgtgtctcgcgcctacaactcgcggctgcagcgggaacgagccaacatgtgaccggcgagcgcgggccaccccaccctgttcatttccataaacgtgctttgagaggcggggtccgcatgtacgtactgcctgcccggggcttaggagggtggcaccggtgctgggacacacgggactgtgtcctcgccaccccccgccctgccccctgccagccagtgcagcttggatctcgggggtgtggggccctgtgccttcctgaagtgctggcagcccagtggcacctccttcaggcctttggggtattcccctagtgtgcccaagtcagcctcatattctgggcggacagcttgtctggacttcggagttgggggtggtcagacaccacaggagctgtcacctcctgcggatgggcaaataaattggtggaggacggagagaaacctctttatttccctcctgaggggtctctgggaagaggtgacgcgtgtccctggaaccccagctcggagggtctcagcctcccctgggtttgggagaagtccatctttccccttagtgccaccgggctgctgagtcacgaggaatgtgttgctgctgccacccctgccccaaaggctaaggggtcagccttccccttgtcagggcttgctttgaccctgcttcgttccaccccgggtcctggtgggagcaccaggcagggtggtcctcgctgtgacactgaggtgctgagccagtgagctagggtggaggggctgtgtttattggaacaaagggtggtaccaaaatgcatccccatgacccacagccccccnacacccgtccttgggtagggtacggtggggtggggtgttgggtggcctgctgctcctgttgctttcacgtagagtctcggcctgggnagtcacgtggtggtcactcctggatgtgctgtcctatccagcctctcacagctgccacccgggtatagacacctgggaagtggggccggccacagccatagccccagctagtgaccccagttagcacccaccgtccagagggctccctgcaggccaggggtcccccagcgtcaccctgttggggagagaagaaagggggttcagaggccggtacctcccctacagcagcccttgggtcattggcccctctaggagtgaccctagtgacttcccctgggagccgcattttcactatctggaaaatgggctcaatgcaaaggtggcagacatttatggacacccgccacgtggtcccggagtggaacggtgcctcc

SEQ ID NO: 257797 - DNA, 1003 bp, Homo Sapiens
  misc_feature (847)..(847): n is a, c, g, or t
gggcgccaatcttcgctctgaggtgctgtctcaccggtgagacctggaagcgggcgagtctcgtgctgtgtcggacctgcagcccctggccttccgccaccatggagtacctcatcggtatccaaggccccgactatgttcttgtcgcctccgaccgggtggccgccagcaatattgtccagatgaaggacgatcatgacaagatgtttaagatgagtgaaaagatattactcctgtgtgttggagaggctggagacactgtacagtttgcagaatatattcagaaaaacgtgcaactttataagatgcgaaatggatatgaattgtctcccacggcagcagctaacttcacacgccgaaacctggctgactgtcttcggagtcggaccccatatcatgtgaacctcctcctggctggctatgatgagcatgaagggccagcgctgtattacatggactacctggcagccttggccaaggccccttttgcagcccacggctatggtgccttcctgactctcagtatcctcgaccgatactacacaccgactatctcacgtgagagggcagtggaactccttaggaaatgtctggaggagctccagaaacgcttcatcctgaatctgccaaccttcagtgttcgaatcattgacaaaaatggcatccatgacctggataacatttccttccccaaacagggctcctaacatcatgtcctccctcccacttgccagggaacttttttttgatgggctcctttattttttcctacctcttttcaggcgcactcttgataaatggttaattcagaataaaggtgactatggatataattgaaacccaacancccacccccaaaaacccccttgtcggccgccctcggccttcgaaaatttttctaaaccattccgtttggcgggcgggcccagtaaggtaagtggaacatgggtcataacctggtttcctagggaaaacctgggccatgaactaagggcttggaatc

SEQ ID NO: 257798 - DNA, 887 bp, Homo Sapiens
  misc_feature (12)..(12): n is a, c, g, or t
  misc_feature (24)..(25): n is a, c, g, or t
  misc_feature (33)..(33): n is a, c, g, or t
  misc_feature (69)..(69): n is a, c, g, or t
  misc_feature (80)..(80): n is a, c, g, or t
  misc_feature (100)..(100): n is a, c, g, or t
cccatctttccntgctctcgcggnnaacctcgnctgctgcagaggactcgacgagctatctggcagccntgagacgtgcngctcaaagccttgtggccanctgcccggccggctgcagtacaagtgtgctgaccgaggcgaggacctgagcgtgggccagaaacagctcctgtgtctggcacgtgcccttctccggaagacccagatcctcatcctggacgaggctactgctgccgtggaccctggcacggagctgcagatgcaggccatgctcgggagctggtttgcacagtgcactgtgctgctcattgcccaccgcctgcgctccgtgatggactgtgcccgggttctggtcatggacaaggggcaggtggcagagagcggcagcccggcccagctgctggcccagaagggcctgttttacagactggcccaggagtcaggcctggtctgagccaggaccctcaaccgtaccccagttggaccagcccgcacagcctgcagtgctggagatggaagtgacccgtggtcatcgatagctccacacgatattgagtctagacctgtgtttgctctctgggaggaaaatggcagagaaagtggccaattatcacagagcatcagagccggaaggacctagcaatacacaggtctgcccgggcagggcccatctcgccctgtccaccctgcagccaatgtcaacagcgactctcagccccgctgtactctggactcacctgggggcctcaagcacatgcccaggctcccggctagacccttaaatcagaatctctgaggctgggaactgccatgctgtgtgtactttttacaaattaacacttttattttgggataatcccagactcacatgcagttaaagaaacaat

SEQ ID NO: 257799 - DNA, 931 bp, Homo Sapiens
  misc_feature (84)..(84): n is a, c, g, or t
  misc_feature (96)..(104): n is a, c, g, or t
  misc_feature (106)..(106): n is a, c, g, or t
  misc_feature (136)..(136): n is a, c, g, or t
  misc_feature (674)..(674): n is a, c, g, or t
ttagccctgaacctggggaaccggaggttgcagagcccaagcatcgccccccactgcactcccagcctggccaatagaacccgngctccgtctccnnnnnnnnngnaaatacaatttttatttcttctacttcttntagtaagttaatgtatataaaaatggcttcggacaaaatatctctgagttctgtgtattttcagtcaaaactttaaacctgtagaatcaatttaagtgttggaaaaaatttgtctgaaacatttcataatttgtttccagcatgaggtatctaaggatttagaccagaggtctagattaatactctatttttacatttaaaccttttattataagtcttacataaaccatttttgttactctcttccacatgttactggataaattgtttagtggaaaataggctttttaatcatgaatatgatgacaatcagttatacagttataaaattaaaagtttgaaaagcaatattgtatatttttatctatataaaataactaaaatgtatctaagaataataaaatcacgttaaaccaaatacacgtttgtctgtattgttaagtgccaaacaaaggatacttagtgcactgctacattgtgggatttatttctagatgatgtgcacatctaaggatatggatgtgtctaattttaggcnttttcctgtaccaggtttttcttacaatacctgaagacttaccagtattctagtgtattatgaagctttcaacattactatgcacaaactagtgtttttcgatgttactaaattttaggtaaatgctttcatggcttttttcttcaaaatgttactgcttacatatatcatgcatagatttttgcttaaagtatgatttataatatcctcattatcaaagttgtatacaataatatataataaaataacaaatatga

SEQ ID NO: 257800 - DNA, 483 bp, Homo Sapiens
  misc_feature (320)..(320): n is a, c, g, or t
  misc_feature (331)..(331): n is a, c, g, or t
gacttggtgtctgtagccactgtgtaccacggtagaatactagacagtgctcgaagtgtgtcgtgaagatccattttcatcactgctagaaatgcttggcctagaagatgacatgcatgaagaccccccaataccactgctgtgtccttcagtattaattttttcctttttgaacaggtccaatgatttcagatcttctggaaaaggctttttgtcatttgcattctatttccacaacacttacatcagtgaaattgccaatctgaatacatttgatcttttgaattaaaattgtgccttggaggagtgtgaggtgaccnaactggccaantatgactctttgaaggatctggaacattaggccagatgtgttttttaattaggtctcgcttattaaagcagaacagcactcccagaagagttgtcaataggaatgctaagcaaacaggcacgactatggcttcaatttctccttgagcttaa

SEQ ID NO: 257801 - DNA, 754 bp, Homo Sapiens
  misc_feature (640)..(653): n is a, c, g, or t
tttgctactgatggtttgttttcgttgttttcagaggcttttgaaccttgatcctcactgttattctctttaggactgttacttccttgttcatcatcatcactgaaattcagttgctctgtataatctacttcccatctgagcacctgccccaaccttcatcagcttccagcatctaggttatcaaatttatcaagctccttcagttctgatgcactaagaatggatgggcgttcaggctcagaggcccatgaaggaggtgggcctcttcctcgaaggcctttgtttgtttcagataaagaaggtgggaatctcatgggaccatgtagaggaggatatgtcatcctcggatactgttggaacatataaggaggcatcatagctctatactgggaagcgagagcagcctgctgtccattcagtttagcctgtggaggaccacaagctatcctcttttccaccactttgaggatatcattttgctctgatgttccagctgtgctttcatcctggccagggagcttttcatcttgatcagatgacgaaggtgagccagcagccttaccaccatctttccaacaagcaacatttggtggacgtaaactgggtccaggtccatagttgtcatcatttgtttccnnnnnnnnnnnnnncctgatccccagctgcctgcaggctgggaaattcttgctgaaactgactattcacttggattccatctccttgcccaccttgcttgttactggggatcagg

SEQ ID NO: 257802 - DNA, 687 bp, Homo Sapiens
tcaacatttcaaaatataaaaacaaaatgaaaaacttaagtaaatgaacaataaggtgacggtctttcacagtataaagtgtaacttttttgttgctctcattatgaccccatgccttcattactctaagtggacagaaattttcagacacaggttactgtacacaggatgattccatttggaaatttaggccaaagagcagagagaataatctttcaaaggtacatatatatagatctgtatcttatgttgtaaaacacacgtttatatacaaatttcatatttataagtacaaaagacaaagaatgcaaatgaataattaatctatagtcaatatagataatactgttgtccctgttctgttttctaattttacaagacaattgtagctgtctgcatgcaggtggacttgacttgtagcaactggagacaaggtgtaattctccatgtgtctgagattccagaactagactcaattgtggttccagatcaaatcagcctgcagagaatggctgttccctggtgcacatggagttgagcggagcagcacacttgggcacaggggttggccgtcagctcactgtcctgctgccaccctccaccacctcagaggctgctgtaactttgagaaaataacctttgaacctcagtctctacaatgcttaaataaagagaacattcaattag

SEQ ID NO: 257803 - DNA, 659 bp, Homo Sapiens
tatgtgaaccccttggtgaaggtcccttttccttggatgtgtagttatatgatctttttaaatgtacagatattttgctataaaatcggtgcagttttttatggtttttacacttctctttaattcccacctaagcctctgggtaatattgtaaatattgttttaaaatgcatcagcctatgctatacaatctgaatgttattttaacttatagttttttttaatatatatatttaactataaggacagtttagggaacaagttacctaccacatttcactttagtgtacctatttacagaaagattaaactgccacctgcgggcacattcccataaatgtgtactttactttaaaaagaacatgccacgattttgtctttctgtggactcaacattcacttcgattaaaaatagcaatttgaccaagttggacttccactacaaagcagctgttttccaaagttcaatgctgacatatatgtatattaaaataattacctatttattaatctacaaatagacaacgttggcatgttcttttctgtttgtctattaatgggcctgcttcttagcaatattagaatgttttataaaagcaattcatgttacttttctggtcttttcatggcatatgagcaaataataaactatttacact

SEQ ID NO: 257804 - DNA, 278 bp, Homo Sapiens
ggtatgggtgagagtaactgtgcttggaatagaaaagccctgctgcatcgagacacaatgctggcagctgcggcagtgtacagagaaatgtacagaaatgaagatggttcagtacctgctacataccagatctattacatgataggatggaaatatcatgagtcacaggcaagaccagctgaaagaggttccgcaactgtgtcatttggagagctaggaaaaataaacaaccttatgccaccggggaaaaaatcacaataaatatttattcagtgtta

SEQ ID NO: 257805 - DNA, 685 bp, Homo Sapiens
  misc_feature (545)..(545): n is a, c, g, or t
  misc_feature (646)..(646): n is a, c, g, or t
  misc_feature (650)..(650): n is a, c, g, or t
ctagggaaagcaggctatatttattcaagaactagaaaaaggttacaatataaatctatcaaacaaaattcatttttgttatattcaagtaactcatatatattcaaatttagaccaaatcaagacaacaatccaatacacagattattatatagctcaaggagcaaaaaacaacagtcttgtcaatacagactctacataaatacacaaatctcaaggttttaatataacatgaacaaatcacaagtacatgtgttagtgttctttctccaaatttctagtagtaaatcttgtatatttagtaaaagcatatagaatgtataaaaccttcaaccacatgtaatgtagactaggaagtgtaaatcaagtagaatgtgaggtttttatatgtaaagatgtacatttcagaaagaacccaacatgaagtaaattaacaaacatattgcaaaggtggtcactcacaaaaatgcttatcatttgcaattgtatacagagaacaaactgcccagaaattaatactggaatcttactgaggggtattatangtaaccaaccttaaaggacaaataacttatttggggggttaaaatagcagagatcagtgttaattaaataacacatgaatgaaaaaaatctacaatatacnatanccagaagtgagaaaaactgaatactggtggaaaaa

SEQ ID NO: 257806 - DNA, 1281 bp, Homo Sapiens
  misc_feature (9)..(9): n is a, c, g, or t
  misc_feature (31)..(31): n is a, c, g, or t
  misc_feature (36)..(36): n is a, c, g, or t
  misc_feature (38)..(38): n is a, c, g, or t
  misc_feature (45)..(45): n is a, c, g, or t
  misc_feature (47)..(47): n is a, c, g, or t
  misc_feature (51)..(51): n is a, c, g, or t
  misc_feature (53)..(53): n is a, c, g, or t
  misc_feature (73)..(73): n is a, c, g, or t
  misc_feature (86)..(86): n is a, c, g, or t
  misc_feature (90)..(90): n is a, c, g, or t
  misc_feature (137)..(137): n is a, c, g, or t
  misc_feature (1051)..(1051): n is a, c, g, or t
  misc_feature (1058)..(1058): n is a, c, g, or t
ctcccggtngccttgacttcaccgccaaatngcctncnggaaggncntctntnttttataaccgcaaccgcangttctcgtacctnattnagaacatggcccgtaattgtggcgagaacgccaaaactcgctacttnaaggggcggcatgctgaccaacgcgcgcctcctctttggccccacggtccgcctgccggacctcatcatcttcctgaaaacgctcaacaacatctttgagccacacgtggccgtgagagacgcagccaagatgaacatccccacagtgggcatcgtggacaccaactgcaacccctgcctcatcacctaccctgtacccggcaatgacgactctccgctggctgtgcacctctactgcaggctcttccacacggccatcacccgggccaaggagaagcggcagcaggttgaggctctctatcgcctgcagggccagaaggagcccggggaccaggggccagcccaccctcctggggctgacatgagccattccctgtgatgttaactctcctcccaaagcaaaccacagccaagcctgtctgagctgggagtccccttccccagccctgggtcagcggcatcctcagtcgttgttacttactcagctgatgtcacagtgcagacatccaccgttccaccacagaaccagtggctgagcggaccaacgttgccatgtgcgtttgctctgtggggaacagagcacagagggtgagcgacatgtgcagaacggccccttggctgcagttaggacctcagtggctggtatggccgagctgctagaagatgctgctgtccctgtgatcccagcagccctcccttcaccgtgacccctgacctttgtcaggaaggtgcagtttttcttctcaatctaaatgcctttcaggtgggccgcttccttggctacctggttccagggggctgttttgtaatgagatgctgctggcaggccactcagaggctcccagctgggttggtgggacagccaggccagatgacctgattccagcaaaaataaaactcagatttggggccgncaacccnagcgttcctgaaaaaaatcaaacatggtcggcccggcctcggctcctcggaggaaagcttttctagaaccatttccattttggggccgcggcgggggcccccagttaaggggtaaaggggaaaaccaatgggcccaataaagcgtggttttcccctaagggaagaaatcccctggggccacgtggaacttaggggcctttggggattctcccccaccccaatt

SEQ ID NO: 257807 - DNA, 1065 bp, Homo Sapiens
  misc_feature (9)..(9): n is a, c, g, or t
  misc_feature (14)..(14): n is a, c, g, or t
  misc_feature (29)..(29): n is a, c, g, or t
  misc_feature (38)..(38): n is a, c, g, or t
  misc_feature (40)..(40): n is a, c, g, or t
  misc_feature (42)..(42): n is a, c, g, or t
  misc_feature (44)..(44): n is a, c, g, or t
  misc_feature (48)..(48): n is a, c, g, or t
  misc_feature (54)..(54): n is a, c, g, or t
  misc_feature (60)..(60): n is a, c, g, or t
  misc_feature (75)..(75): n is a, c, g, or t
  misc_feature (83)..(83): n is a, c, g, or t
  misc_feature (107)..(107): n is a, c, g, or t
  misc_feature (109)..(109): n is a, c, g, or t
  misc_feature (112)..(112): n is a, c, g, or t
  misc_feature (114)..(114): n is a, c, g, or t
  misc_feature (119)..(119): n is a, c, g, or t
  misc_feature (127)..(127): n is a, c, g, or t
  misc_feature (133)..(133): n is a, c, g, or t
  misc_feature (141)..(141): n is a, c, g, or t
  misc_feature (155)..(155): n is a, c, g, or t
  misc_feature (157)..(157): n is a, c, g, or t
actgttctnagtgnacggtggattctgantttaactcnantnantaantacaancacttnagatgccggtaaccnagggttgngaaagggactccccgctcaaacangnttngntgtgntttctttngggagnagagtgancataacagggaacngntcatgtcagccccaggagggtgggctggcccctggtccccgggctccttctggcccggcaggcgatagagagcctcaaccctgctgccgcttctccttggcccgggtgatggccgtctggaagagcctgcagtagaggtgcacagccagcggagagtcgtcattgccgggtacagggtaggtgatgaggcaggggttgcagttggtgtccacgatgcccactgtggggatgttcatcttggctgcgtctctcacggccacgtgtggctcaaagatgttgttgagcgtgtgcaggaagatgatgaggtccggcaggcggaccgtggggccaaagaggaggcgcgcgttggtcagcatgccgcccctgaagtagcgagtgtgggcgtactcgccacagtcacgggccatgttctcaatcaggtacgagaactgccggttgcggcttataaacaagatgatgcccttgcggtaggccatgtgggcggtgaagttcaaggccagctggaggtgcgtggctgtctgttccaggtcgatgatgtcgtggtccaggcggctcccaaagatgtacggctccataaacctgtgccgacagccagctttgtgtcccagatggactcgggcatcgaagaggcttctcacggaaaacagttccttgacattgaagaagtcagagtgcttgaggggctcattcaaaatcttgtcgttgaaatcggtgctgtcctccgactcgcggatcataagggccgtcgcgcttccaagcgtcctgcggctcggccgagcaggccggggggtcgccttcccgagaaagcccaaccagcgcgacggggcccgggcacccgcgccgagtattcggggcagcgcggccgaggatgtcgccatggctgggacgcggggcagagcgaggatccc

SEQ ID NO: 257808 - DNA, 855 bp, Homo Sapiens
  misc_feature (23)..(23): n is a, c, g, or t
  misc_feature (33)..(33): n is a, c, g, or t
  misc_feature (48)..(48): n is a, c, g, or t
gtgccaggcccacccccaggtgntcccgcgccnggggcccacccctgnccaccggacctatagtggacctgctccagtacagccagaaggacctggatgcagtggtaaaggcgacacaggaggagaaccgggagctgaggagcaggtgtgaggagctccacgggaagaacctggaactggggaagatcatggactaggttcgaagaggttgtgtaccaggccatggaggaagttcagaagcagaaggaactttccaaagctgaaatccagaaagttctaaaagaaaaagaccaacttaccacagatctgaactccatggagaagtccttctccgacctcttcaagcgttttgagaaacagaaagaggtgatcgagggctaccgcaagaacgaagagtcactgaagaagtgcgtggaggattacctggcaaggatcacccaggagggccagaggtaccaagccctgaaggcccacgcggaggagaagctgcagctggcaaacgaggagatcgcccaggtccggagcaaggcccaggcggaagcgttggccctccaggccagcctgaggaaggagcagatgcgcatccagtcgctggagaagacagtggagcagaagactaaagagaacgaggagctgaccaggatctgcgacgacctcatctccaagatggagaagatctgacctccacggagccgctgtccccgcccccctgctcccgtctgtctgtcctgtctgattctcttaggtgtcatgttcttttttctgtcttgtcttcaactttttttaaaactagattgctttgaaaacatgactcaataaaagtttcctttcaatttacaaaacgacacacacaaa

SEQ ID NO: 257809 - DNA, 931 bp, Homo Sapiens
  misc_feature (7)..(7): n is a, c, g, or t
  misc_feature (22)..(22): n is a, c, g, or t
  misc_feature (31)..(31): n is a, c, g, or t
  misc_feature (40)..(40): n is a, c, g, or t
  misc_feature (72)..(72): n is a, c, g, or t
  misc_feature (88)..(88): n is a, c, g, or t
  misc_feature (723)..(723): n is a, c, g, or t
  misc_feature (772)..(772): n is a, c, g, or t
  misc_feature (820)..(880): n is a, c, g, or t
  misc_feature (909)..(909): n is a, c, g, or t
  misc_feature (911)..(911): n is a, c, g, or t
tttcctngcgggccatatcctngctgccacntgggcgggngctggcctgcccagccattggcagcgttgggnacaaccccgctccccnactggtggcacctggctgtcccggcgcttggctcttgctgtcccgagcctcagctcgtttaacttccacttttttgcccatgatgtcgtgaaaatgcatgttgacagcctggtccactgattgttcgtcctcgaaagtaataaatccaaaacctcggggccctctgcttctcggcgtcatagatcatgactacctccgtgaccactccgaacttcttgaagtattctcctgagctctgtctcaccacaattgtgaggaattccaccgacaaatatcttatttgattaactgttatcgctcctgggtcctatctgccatccttccttcggctcgtgttctctccggctgcatcccccggggtgtgcatggcttggggtcgatgtttcggccatctatgcgtgtgcggtctgctggccagcaccgtccccacacagtttgggtctttaaatttgacaaacccaaagcctcgagactggttggtggttttatctttcatgataacacaatctacgacttctccatattgggaaaagtagtgcgcagagtatcttgggtcgtgctccagtcaagaccgcccacgaagagcttcccgatctcgtcggcgcccgagttgttcatggcggcggcggcggcgnacgctcggcgctcccgggcctcctcgctcgctcccgcctccggaaggtnacgccgctccgtcgccctccccacagccgcggcccggatctgcgcaannnnnnnnnnnnnnnnnnnnnnnnnnnnnnnnnnnnnnnnnnnnnnnnnnnnnnnnnnnnntgcctcctcccctcggcgccaacggtcancncgcgtccccgcgccgccgcg

SEQ ID NO: 257810 - DNA, 1251 bp, Homo Sapiens
  misc_feature (46)..(58): n is a, c, g, or t
  misc_feature (69)..(69): n is a, c, g, or t
  misc_feature (75)..(75): n is a, c, g, or t
  misc_feature (161)..(161): n is a, c, g, or t
aaatccttatacaggtgtaaacattcttaataaattataagcaatnnnnnnnnnnnnntttagtatgtntgcttnttaaaataaaacaaattcatactttatcaaaatttgttcattcttctcacaaataattctgtgggtacataattttctctcatgcnaattcaacaaaccctgagccttgtgtctccatctatggctaaatacatatcactctaaccaaataaaaaggtttaaaataagggccctgcatctgggtgtctggttatttgaaatccggtttacattttgaatagttttggttaagtgtatgtcatggcagaatgtccctccatctcctttgatctgtgtgaaattgataaaaatacatgcttactcctgtacaaacatcgaacaatgtaattaaatcatcactacttgaaatacttttacatgaataatttatctctttacactgttgaagccttgcatttcagtatgtcctacagcttctgtatcatcacctgaaatttgcaagcaggcattgaagacacttcagctgttacaatactttttattcccaagtgtgacaagccacccctgattaagccacacgtaaatgcgaaatacttagatgcatgtgctaaatactgtgttcctgcagacatctgagtaagcaggcgaaatttgttgtcctgaagtacatagatgccctgatgatttgtccttagattgtcgatttgtttcttgaataccgtagtccaaaaatctttacaaatgaacttcatgatatctaactcatccttgaaccttgcagtatcttttgtaaacctgcaagaaaattttcaaatccaacctgctcacctttctatcaatccttgtcccactcgaaaccccatgttttccagcttagtaatacaatcgtccgttttccacctccccctgctccgcggacttgtacactccagacaccatctcgttatggagaagcaaaaacaacgcctcatccgccatttcctgctaattcttccaagcttcgagttttggctcccgtttgagctggtctgggggttccagctcgcgcctcagcgacttcgccggcgccgcggctccgtcaggccgccattctatccctgtggctaagagaccgaggtattcacacgacttcccaaaggctggtactgaaatgagtctggtactggagagagcccacacttcggggctaccaaatcctagggccgaacgaaagtctgacgggagctctaaccaaag

SEQ ID NO: 257811 - DNA, 1130 bp, Homo Sapiens
  misc_feature (6)..(6): n is a, c, g, or t
  misc_feature (19)..(21): n is a, c, g, or t
  misc_feature (23)..(23): n is a, c, g, or t
  misc_feature (29)..(29): n is a, c, g, or t
  misc_feature (43)..(43): n is a, c, g, or t
  misc_feature (55)..(55): n is a, c, g, or t
  misc_feature (60)..(60): n is a, c, g, or t
  misc_feature (71)..(71): n is a, c, g, or t
  misc_feature (97)..(97): n is a, c, g, or t
  misc_feature (101)..(103): n is a, c, g, or t
  misc_feature (106)..(106): n is a, c, g, or t
  misc_feature (108)..(108): n is a, c, g, or t
  misc_feature (113)..(113): n is a, c, g, or t
  misc_feature (117)..(117): n is a, c, g, or t
  misc_feature (493)..(493): n is a, c, g, or t
cccaanctaagctgcttannntnaactangctgtgcttgtganaccaaagctaangctgnggctgtgaagnggggtaggctcagttaccaccaaagntaannntgntntattntgangctggaactggtgctggtgccacaccaaaggtaatgccaggtccaccactgaagccaccactggagctgggtgcaccattgaagctaatactagcaccatcgctgaagccagccctggtactagctcctctgctgaagttgacgttggtgctggcatctgcattttcttgggctctggcctcaatttcaaatgaaaatctgctccaggcctgagcatcatcgcctaactcttcccttgttaggcagtcgatatccatgtcatcccaattccagggcccagccacagcttcctctccaatccccatttgggctcttgcctcagccctggcttcagcctcagccacagccacagctcgcagcttggacttccatctcnactgcctcgcggtactgcacagcccagtccttggggtctttcttctgcacctgaaatggggatgataatcataataagaaaacaaccctagtaatcatgtattaactacgggctttgtattaaactagtagcaatacttttttaaacttctcagttattggggctctatcatgggtcagttctgaactccagtttcagctctgctgacttacgtgctatatgaccttggacaagttacttaacctcacttagcctaagtgtctttataattacaggaaatgatagagcgtaaatatgttatgaactgaagggttgtgcccgcccccaaattcgtatgttgaatccctaacacccagtgtgattgtacttggagatagggcctttatggagataattaaggttaaatgaggccataagggtggggtcctgatcaacaggattagtgtccttataagaagagacaccagaaagcttgctctcttctctctcacacacaaagccatgtgaggacacagcaagaaggcagccatctgcaagccaggaagagagccttcaacaggaactgaccctcgtggaccctgacctaggattctcgccctcaagaactatgagaaaataaatttgttttttaatccaa

SEQ ID NO: 257812 - DNA, 1019 bp, Homo Sapiens
taggtagcgaggcctgggtggcgaattcggcacgaggcaccgttgcttcgcgggctgggaggcccggggtccccgggcgaacagaggctgcggtggactgacgccgcaggggcgagctagccggctccgcgcctctccgcgggatccagacgcctcctggggctgctggcggagggtctgaggcggcgcggccatggctcacctccggggatttgccaaccagcactctcgagtggaccctgaggagctcttcaccaagctcgaccgcattggcaagggctcgtttggggaggtctacaagggcatcgataaccacacaaaggaggtggtggccatcaagatcatcgacctggaggaggccgaggatgagatcgaggacatccagcaggagatcactgtcctcagtcagtgcgacagcccctacatcacccgctactttggctcctacctaaagagcaccaagctatggatcatcatggagtacctgggcggcggctcagcactggacttgcttaaaccaggtcccctggaggagacatacattgccacgatcctgcgggagattctgaagggcctggattatctgcactccgaacgcaagatccaccgagacatcaaagctgccaacgtgctactctcggagcagggtgacgtgaagctggcggactttggggtagcagggcagctcacagacacgcagattaagaggaacacattcgtgggcacccccttctggatggcacctgaggtcatcaagcagtcggcctacgacttcaaggctgacatctgggtccctgggggatcacagccatcgagctgggccaaggggggagccctccaaactctgacctccaccccatgcgcgtccctggttcctgattcccaaaaacgcccaccccacacctgggagggccagcacagcagcccctttcaagggagaattccggggaaggccctgcccccacaaagaacccccgaatccgggcccaccgggcaagggaactttcctgaaagcacac

SEQ ID NO: 257813 - DNA, 2104 bp, Homo Sapiens
ggcctgggtggcgaattcggcacgaggcaccgttgcttcgcgggctgggaggcccggggtccccgggcgaacagaggctgcggtggactgacgccgcaggggcgagctagccggctccgcgcctctccgcgggatccagacgcctcctggggctgctggcggagggtctgaggcggcgcggccatggctcacctccggggatttgccaaccagcactctcgagtggaccctgaggagctcttcaccaagctcgaccgcattggcaagggctcgtttggggaggtctacaagggcatcgataaccacacaaaggaggtggtggccatcaagatcatcgacctggaggaggccgaggatgagatcgaggacatccagcaggagatcactgtcctcagtcagtgcgacagcccctacatcacccgctactttggctcctacctaaagagcaccaagctatggatcatcatggagtacctgggcggcggctcagcactggacttgcttaaaccaggtcccctggaggagacatacattgccacgatcctgcgggagattctgaagggcctggattatctgcactccgaacgcaagatccaccgagacatcaaagctgccaacgtgctactctcggagcagggtgacgtgaagctggcggactttggggtagcagggcagctcacagacacgcagattaagaggaacacattcgtgggcacccccttctggatggcacctgaggtcatcaagcagtcggcctacgacttcaaggctgacatctggtccctggggatcacagccatcgagctggccaagggggagcctccaaactctgacctccaccccatgcgcgtcctgttcctgattcccaagaacagcccacccacactggagggccagcacagcaagcccttcaaggagttcgtggaggcctgcctcaacaaagacccccgattccggcccacggccaaggagctcctgaagcacaagttcatcacacgctacaccaagaagacctccttcctcacggagctcatcgaccgctataagcgctggaagtcagaggggcatggcgaggagtccagctctgaggactctgacattgatggcgaggcggaggacggggagcagggccccatctggacgttcccccctaccatccggccgagtccacacagcaagcttcacaaggggacggccctgcacagttcacagaagcctgcggagcccgtcaagaggcagccgaggtcccagtgcctgtccacgctggtccggcccgtcttcggagagctcaaagagaagcacaagcagagcggcgggagcgtgggtgcgctggaggagctggagaacgccttcagcctggccgaggagtcctgccccggcatctcagacaagctgatggtgcacctggtggagcgagtgcagaggttttcacacaacagaaaccacctgacatccacccgctgaagcgcactgctgttcagataggggacggaaggtcgtttgtttttgttctgagctccataagaactgtgctgacttggaaggtgccctgtgctatgtcgtgcctgcagggacacgtcggatcccgtgggcctcacatgccaggtcaccaggtcaccgtctccttccacccctgcagtgtgctgttgtgcacgtcagggacgctgttctctatgcccactgccctcctccctctcctggcccagcagtattgctcacgggggctccagcagccggcgtggccctcatgagctacgcctgggtcttctgcagactcatgcagccctatggccgctcagaccaaggcgcagagcaactatcagggcagctctgcctcctcctcccatgaggtggggagaggcaacagggcagcccccagaggagtgtcctggccgctgtcctcccggggcccatgatggccatagatttgccttgtggtgttggatcaggtactgtgtctgctcataagtacttgtgtcatccagaatgttttgttttttaagaaaattgaattacttgtttcctgaaatattctgaggttaatatgttagttttcatagaacattgagagcccctgccactttcaataaagacctgacttgga

SEQ ID NO: 257814 - DNA, 1092 bp, Homo Sapiens
gccccataggagttgagcgaagaagctgcagctgcctgacccccataggaggaaagggccgaggctgagggctgggctccaccatatgggccgagtgaagaagctgcagcagactgggagctaggactagccagctggcccctgtatggtgccccaagggagacagagggctgagcgcggtaagaggctgcctgggctgtcatgggctgagtccgatagccaacacccaaagaggcagaaggccgggccctgtaggcagctcccagtgacacggacggctgggccccgtaggtagctggctgggccgtcagaggagccacataagaggctcggggaggtgaacggcgcagagggctgcggtcgcgaccaaagaagggtggtgtgggctgacgggcttgcccatcaaagccaccagtgctgttgccaaaagcctgctggtagtcgaaggtggcagagaagccaccagttccagggaaggccgtatccccagcccctggtttcttggtcttgtccccagactggacagccaggccaggccccttcttctgacccttggtggagagttccacgttgatgcgcttgcccttcacttctttgccgttgagctgcgcgattgcggctttggcatctgcttccttctccatgtgaacaaacgcgtagtctttcaccacgtcacactcgatgacgcgtccgcggcgctcgaagaggctgcgcagttcctggctcgtgcatgcagccgacacattgcccacgaaaatcttccaagtattaagaggccttgggcgcgacatctccaccacgagcgcgcgccccggccgcagctcgtggccgtgcagggcttcgatggcgcgcagcgcgcccgcgttctcgcgcatgtgcacgaaggcgaactgtttcatgacggcgcagctcatgaccgtgccgtagggcgcaaagagggctgccagctcctccggagtcgtatccgccccgtcgacgttgcccacgaatatcttcattttgtcgccgcagccaccttcctggagagcccggacctctcctccagcgacaggcaagacgtccgaacgaccggcagtcctcctcaggaatcca

SEQ ID NO: 257815 - DNA, 2182 bp, Homo Sapiens
cgggatcggaaccgccacgggtgagtcgggtcgtggctgctgccgggtcctgcgcgctccggactgaggtggcgtccctgggccggacggcggtgtcccggcgtggcgggaagccggcactggagcgggagcgcactgggcgcgggaccgggaggcgcagggaccggacggctcccgagtcgcccacctgacggtaccgagagggcggcgcccctccgagcagagccgtcccggccactcccctgggatctgacttggctcttgcggtcgcgggcaccgtgaagccctggggtgtgcgtggctcctcctggtaggcgccctttcccggcgtccggcttggggtggtggtggcgttgactccagccccgcctctccctggagaggagggctccactcgctccttcggcctcctcccctggggccgcagcgactcgggccggcttcctgcttccctgcctgccggcggtcccgctggctagaagaagtcttcacttcccaggagagccaaagcgtgtctggccctaggtgggaaaagaactggctgtgacctttgccctgacctggaagggcccagccttgggctgaatggcagcacccacgcccgcccgtccggtgctgacccacctgctggtggctctcttcggcatgggctcctgggctgcggtcaatgggatctgggtggagctacctgtggtggtcaaagagcttccagagggttggagcctcccctcttacgtctctgtgcttgtggctctggggaacctgggtctgctggtggtgaccctctggaggaggctggccccaggaaaggacgagcaggtccccatccgggtggtgcaggtgctgggcatggtgggcacagccctgctggcctctctgtggcaccatgtggccccagtggcaggacagttgcattctgtggccttcttagcactggcctttgtgctggcactggcatgctgtgcctcgaatgtcactttcctgcccttcttgagccacctgccacctcgcttcttacggtcattcttcctgggtcaaggcctgagtgccctgctgccctgcgtgctggccctagtgcagggtgtgggccgcctcgagtgcccgccagcccccatcaacggcacccctggccccccgctcgacttccttgagcgttttcccgccagcaccttcttctgggcactgactgcccttctggtcgcttcagctgctgccttccagggtcttctgctgctgttgccgccaccaccatctgtacccacaggcggagttaggatcaggcctccaggtgggagccccaggagcagaggaagaggtggaagagtcctcaccactgcaagagccaccaagccaggcagcaggcaccacccctggtccagaccctaaggcctatcagcttctatcagcccgcagtgcctgcctgctgggcctgttggccgccaccaacgcgctgaccaatggcgtgctgcctgccgtgcagagcttttcctgcttaccctacgggcgtctggcctaccacctggctgtggtgctgggcagtgctgccaatcccctggcctgcttcctggccatgggtgtgctgtgcaggtccttggcagggctgggcggcctctctctgctgggcgtgttctgtgggggctacctgatggcgctggcagtcctgagcccctgcccgcccctggtgggcacctcggcgggggtggtcctcgtggtgctgtcgtgggtgctgtgtcttggcgtgttctcctacgtgaaggtggcagccagctccctgctgcatggcgggggccggccggcattgctggcagccggcgtggccatccaggtgggctctctgctcggcgctgttgctatgttccccccgaccagcatctatcacgtgttccacagcagaaaggactgtgcagacccctgtgactcctgagcctgggcaggtggggaccccgctccccaacacctgtctttccctcaatgctgccaccatgcctgagtgcctgcagcccaggaggcccgcacaccggtacactcgtggacacctacacactccataggagatcctggctttccagggtgggcaagggcaaggagcaggcttggagccagggaccagtgggggctgtagggtaagcccctgagcctgggacctacatgtggtttgcgtaataaaacatttgtatttaaa

SEQ ID NO: 257816 - DNA, 1433 bp, Homo Sapiens
tggtaccggtccggaattcccgggatgggccatggagttcccgttcgatgtggacgcgctgttcccggagcggatcacggtgctggaccagcacctgaggcccccagcccgccgacccggaaccacaacgccggcccgtgttgatctacagcagcaaattatgaccattatagatgaactgggcaaggcttctgccaaggcccagaatctttccgctcctatcactagtgcatcaaggatgcagagtaaccgccatgttgtttatatcctcaaagacagttcagcccgaccggctggaaaaggagccattattggtttcatcaaagttggatacaagaagctctttgtactggatgatcgtgaggctcataatgaggtagaaccactttgcatcctggacttttacatccatgagtctgtgcaacgccatggccatgggcgagaactcttccagtatatgttgcagaaggagcgagtggaaccgcaccaactggcaattgaccgaccctcacagaagctgctgaaattcctgaataagcactacaatctggagaccacagtcccacaggtgaacaactttgtgatctttgaaggcttctttgcccatcaacatcggccccctgctccctctctgagggcaactcgacactctcgtgctgctgcagtcgatcccacgcccgctgctccagcaaggaagctgccacccaagagagcagagggagacatcaagccatactcctctagtgaccgagaatttctgaaggtagctgtggagcctccttggcccctaaacagggcccctcgccgcgccacacctccagcccacccacccccccgctccagcagcctgggaaactcaccagaacgaggtcccctccgcccctttgtgccagagcaggagctgctgcgttccttgcgcctctgccccccacaccctaccgcccgccttctgttggctgctgaccctgggggcagcccagctcaacgtcgtcgcaccagggggactcccccaggtctggtagcccaaagctgctgctacagccgccatgggggggtgaattcctcatcccccaatacaggcaaccaagactccaagcagggagaacaggaaacaaagaataggtctgccagtgaggagcaggccttgtcacaggatgggtctggggagaagcccatgcacacagctcctccacaggccccggccccgccagcccagtcctggacagtgggtggggacatactcaacgccaggttcattcgaaacctgcaggaacgtcgcagcaccaggccttggtgaccgcagccccgtcaaacatcttcaaagtattatttctccctcactacaggaaagagccaaagcccaaccctcataatagatggatacattcattcattcattcattcagcaggcttatcagattcaagtcatttgt

SEQ ID NO: 257817 - DNA, 1471 bp, Homo Sapiens
  misc_feature (1416)..(1416): n is a, c, g, or t
tcccgggatggtgaccgggctggtccacaagtgggcatggaccaaagacgacgtgatcctccacgtgctcccgctgcaccacgtccatggtgtggtcaacgcgctgctctgtcctctctgggtgggagccacctgtgtgatgatgcctgagttcagccctcagcaggtttgggaaaagttcttaagttctgaaacgccgcggatcaatgtctttatggcagtgcctacaatatacaccaagctgatggagtactacgacaggcattttacccagccgcacgcccaggatttcttgcgtgcagtttgtgaagaaaaaattaggctgatggtctcaggctcagctgccctgcccctcccagtactggagaagtggaagaacatcacgggccacaccctgctggagcggtatggcatgaccgagatcggcatggctctgtccgggcccctgaccactgccatgcgcctgccaggttccgtggggaccccactgcctggagtacaggtgcgcattgtctcagaaaacccacagagggaagcctgctcctacaccatccacgcagagggagacgagagggggaccaaggtgaccccagggtttgaagaaaaggagggggagctgctggtgaggggaccctccgtgtttcgagaatactggaataaaccagaagaaactaagagtgcattcaccctagatggctggtttaagacaggggacaccatggtgtttaaggatggccagtactggatccgaggccggacctcagtggacatcatcaagactggaggctacaaggtcagcgccctggaggtggagtggcacctgctggcccaccccagcatcacagatgtggctgtgattggagttccggatatgacatggggccagcgggtcactgctgtggtgaccctccgagaaggacactcactgtcccacagggagctcaaagagtgggccagaaatgtcctggccccgtacgcggtgccctcggagctggtgctggtggaggagatcccgcggaaccagatgggcaagattgacaagaaggcgctcatcaggaacttccacccctcatgacccggcagactgggactgcgggtctggtggggagcagcagacgtccccttcacaccgagaaccacgggggcccgtccaagacctggcctcccttaaacctgaaccccccaaatcaggtcacgtagaatcaagaactgtttgggatgaaatcaccatgtggggtccccagcctcgggccagttgttgcagctcaaggagaccgtccctggtgtcacctctgcctggtcaccgccgacctcatctgtgcagcgcggtgcagccagcccctggccccacgtgctgaggcacctcccgccccacagtgccctgcagttgccaggctctcctagggcaggtcccangaggtttcccaaaaaaaacaaataaagactccactggaggaaaacaaaacaaacg

SEQ ID NO: 257818 - DNA, 1298 bp, Homo Sapiens
  misc_feature (13)..(13): n is a, c, g, or t
  misc_feature (352)..(360): n is a, c, g, or t
  misc_feature (665)..(692): n is a, c, g, or t
gatgccaggctgngatctctttccgcagctctcctcacgttcccctctagtcccggcgcggcgctgctgcccaggggactggcctatcctcggccaatccgctgggtccttattgcctgttgggcccctagtgcgaatcagtcccgccagagacccttgacgggcatactgtttcctccgggctcctgcctcatgaggggagagaatggcgccattttgcggtacggaagctacacagcaacacgtataggagactctccccgagatcttctagggagtgacccatctatttttgtttgggaagaggaaactccgaaatgggatcgcggaagacttaaagggccaggctgannnnnnnnncctactgcaggtctctgaggctgtggttgctacagggtcaccacgagcttggcttacttgtctcatccttcccttgcctggtatcattttctcagttctcccaaaagccatgtcccggcccttgctcatcaccttcaccccagccactgaccccagcgacctctggaaggatgggcagcagcagccacagcccgagaagccagagtccaccctggatggggctgcagcccgagctttctatgaggccctgattggggatgagagcagcgctcctgactcccagagatctcagactgaacctgccnnnnnnnnnnnnnnnnnnnnnnnnnnnntaatgaaggcaccagcagcagaagcagtggcagaaggagcatcaggaagacatggacaagggagatcccttgaggctgaggataagatgactcaccggatactgagggcagcccaggagggggacctgccagaacttaggagactgctggaaccgcatgaggcaggaggagctggggggaatatcaacgcccgggatgccttctggtggaccccactgatgtgtgctgctcgagcgggccagggggcagctgtgagctatctcctgggccgtggggctgcctgggtgggggtctgtgagcctgagtggccgggatgcggctcagctcgctgccgcaagctggcttccctcgaggtagcccgcatggtcagggagagccatggacgagacaaggagcccggaaaacggtctcctactcactccctccagtactgcgagaactgtgacacccacttccaagattccaaccaccgtcacatccactgcctcagctgcctgtcaactgtcgcagggtcctcagccttccatgcttccacttggggtgcccatctccagcccggccttcaccctgctgctgaggggcgcctgggagccaggactggggctg

SEQ ID NO: 257819 - DNA, 1543 bp, Homo Sapiens
  misc_feature (124)..(124): n is a, c, g, or t
  misc_feature (144)..(152): n is a, c, g, or t
  misc_feature (333)..(333): n is a, c, g, or t
  misc_feature (339)..(339): n is a, c, g, or t
  misc_feature (411)..(411): n is a, c, g, or t
  misc_feature (413)..(413): n is a, c, g, or t
  misc_feature (434)..(434): n is a, c, g, or t
  misc_feature (436)..(436): n is a, c, g, or t
  misc_feature (441)..(441): n is a, c, g, or t
  misc_feature (451)..(451): n is a, c, g, or t
  misc_feature (454)..(485): n is a, c, g, or t
  misc_feature (543)..(543): n is a, c, g, or t
  misc_feature (549)..(549): n is a, c, g, or t
  misc_feature (553)..(554): n is a, c, g, or t
  misc_feature (600)..(600): n is a, c, g, or t
  misc_feature (633)..(633): n is a, c, g, or t
  misc_feature (644)..(644): n is a, c, g, or t
  misc_feature (646)..(646): n is a, c, g, or t
  misc_feature (661)..(661): n is a, c, g, or t
  misc_feature (664)..(665): n is a, c, g, or t
  misc_feature (680)..(680): n is a, c, g, or t
  misc_feature (688)..(688): n is a, c, g, or t
  misc_feature (691)..(691): n is a, c, g, or t
  misc_feature (928)..(929): n is a, c, g, or t
  misc_feature (1075)..(1075): n is a, c, g, or t
  misc_feature (1112)..(1112): n is a, c, g, or t
  misc_feature (1119)..(1119): n is a, c, g, or t
  misc_feature (1129)..(1129): n is a, c, g, or t
  misc_feature (1254)..(1254): n is a, c, g, or t
  misc_feature (1256)..(1256): n is a, c, g, or t
gcgccattttgcggtacggaagctacacagcaacacgtataggagactctccccgagatcttctagggagtgacccatctatttttgtttaggaagaggaaactccgaaatgggatcgcggaanacttaaagggccaggctgannnnnnnnncctactggtctctgaggctgtggttgctacagggtcaccacgagcttggcttacttgtctcatccttcccttgcctggtatcattttctcagttctcccaaaaaccatgtcccggcccttgctcatcaccttcaccccagccactgaccccagcgacctctggaaggatgggcagcagcanccacancccgagaagccaaagtccaccctggatggggctgcagcccgagctttctatgaggccctgattggggatganancagcgctcctgactcccagananctcanactgaacctnccnnnnnnnnnnnnnnnnnnnnnnnnnnnnnnnnaaaggcaccaacagcagaagcagatagagcaagaagagagacatcaggaagacatggnacaagnggannatccctttgagggctgaaggataaagatagactcaccgagatactngagaggcagcccagagagggaggacctgcacanaacttaagganantgctgagaaccgcanganngcagggaggagctgngggggaanatnaacgcccggggatgccttctggtggaccccactgatgtgtgctgctcgagcgggccagggggcagctgtgagctattctcctgggccgtggggctgcctgggtgggggtctgtgagctgagtggcagggatgcggctcagctcgctgaagaagctggcctccctgagatagcccgcatggtcagggagagccatggagagacaaagagcccggaaaaccggtctcctactccctccnnccagtactgcgagaactgtgacacccacttccaagattccaaccaccgcacatccactgctcacctgctgtcactgtcgcagggtcctcagcctcccaaccttccacttggggtgcccatctccagcccgggcttcaaactgctgntgagggggggctgggagccaggaatggggctgggacnccggggngagggccgtnctaatcccatccccactgtcctcaagagagaccaggaaggactaggctacagatcagcaccccagccccgagtgacacatttcccagcttgggatacccgagctgtggttgggagggagagaccncntcgggtggccacactgagctggagggaggagagaaggagggaggagaaagacagggcttgggagcgggatctaaggacttacatgaacctcgagttctgactttggtaaagtctgaccctagtctgctgctgaagtctgaacttgggcctctgacctgggccctttgacttccccttcctgggatctgctcagatgcagatcctgaagtttttggtcaataggctctgtcttcgtgagagacgggctgagagtcagaaataaatcaaccatttgtgggtttaaaaaa

SEQ ID NO: 257820 - DNA, 797 bp, Homo Sapiens
gggacgccggaccggagagcgcggaggcagccatggtgcggttcaagcacaggtacctgctctgcgaactggtgtctgacgacccccgctgccgcctaagcctcgatgaccgagttctgagcagcctcgtacgggacacgatcgccagggtgcacggaactttcggcgcagccgcctgctccatcggcttcgcggttcgatatctcaatgcctatactggaatagtgctacttcgatgcagaaaagaattctatcagcttgtgtggtcagctcttcccttcatcacatacttggagaacaaaggacaccgttacccatgctttttcaacacattacatgtgggaggtacaataagaacatgtcagaagttcctaattcagtacaacaggagacagctgttgatcttgttgcagaactgcactgatgaaggagagcgggaagctatccagaagtctgtgacaagaagctgcttactagaggaggaggaggagtcaggtgaggaggctgcagaagcaatggagtgaacctctgctccccacacagctggctacactgctcaggcttcaggcccacttgttgaacagaacaatctgggtagcaacagcatcttccacagttttccaaactggatagctgccaaccagcagacattacccacttgaaatggagtactcagttaaactgaagttgcctttacctagcattccctggtgaagtgttgcaggttgtgaactctgtagacatctttattgcttggctaagagtagatttaataaatgtatctggtttccgtggca

SEQ ID NO: 257821 - DNA, 1116 bp, Homo Sapiens
  misc_feature (194)..(194): n is a, c, g, or t
  misc_feature (215)..(215): n is a, c, g, or t
  misc_feature (245)..(245): n is a, c, g, or t
  misc_feature (416)..(416): n is a, c, g, or t
  misc_feature (423)..(423): n is a, c, g, or t
  misc_feature (427)..(427): n is a, c, g, or t
  misc_feature (430)..(430): n is a, c, g, or t
  misc_feature (433)..(433): n is a, c, g, or t
  misc_feature (447)..(448): n is a, c, g, or t
  misc_feature (452)..(452): n is a, c, g, or t
  misc_feature (461)..(461): n is a, c, g, or t
  misc_feature (468)..(468): n is a, c, g, or t
  misc_feature (478)..(479): n is a, c, g, or t
  misc_feature (486)..(487): n is a, c, g, or t
  misc_feature (919)..(919): n is a, c, g, or t
  misc_feature (944)..(945): n is a, c, g, or t
  misc_feature (964)..(964): n is a, c, g, or t
  misc_feature (970)..(970): n is a, c, g, or t
  misc_feature (979)..(979): n is a, c, g, or t
  misc_feature (987)..(987): n is a, c, g, or t
  misc_feature (989)..(989): n is a, c, g, or t
  misc_feature (991)..(992): n is a, c, g, or t
  misc_feature (1001)..(1001): n is a, c, g, or t
  misc_feature (1013)..(1013): n is a, c, g, or t
  misc_feature (1017)..(1017): n is a, c, g, or t
  misc_feature (1019)..(1019): n is a, c, g, or t
  misc_feature (1021)..(1021): n is a, c, g, or t
  misc_feature (1038)..(1038): n is a, c, g, or t
  misc_feature (1065)..(1065): n is a, c, g, or t
  misc_feature (1087)..(1087): n is a, c, g, or t
cgcccgggccatggcggcggcggtggcgggagctgctgtctgagcagcggttgcggaccgagcgaacttggcccaggagcccgggcctagggagaggcgcggcggcggcgggagcgcgaacggctggagctggccttcttcgccttctcctcggctgtggagccctggtggggggtctgcgcccggtcaccatnactactccgtctaattcccanaatgccagcaaaacgtgggaactgagtctntattatcttcaccgtacccctcagaagccataatggatggcacagagattgctgtttcccctcggtcactgcattcagaactcatgtgccctatctgcctggacatgctgaagaatacgatgaccaccaaggagtgcctccacagattctgctcttacttcattttcacanccctacntatnttnaanaatgattttcttannttcntaaataatnttttttncaattctatnnctatctnncataccccatactttgatgcccttatctctaatatttatcctatttttgaggaatacgaggcccatcaagaccgagtgcttatccgcctgagccgcctgcacaaccagcaggcattgagctccagcattgaggaggggctacgcatgcaggccatgcacaggtgtgagggtcaggagagaagcagaactgatgggatgggtccgtgggtcagtccttgttgcctgctagcttctaagcctcagcatcctaggagctgaccacatactgatcattagggctggaaatcatgggtgtaaattgcagtttcttagtaaacaactggccctgctcttcttaagaaaaatatagggctgggcacagtgactcacatctgtaatccccagcactttgggaggtgaggatgggaggatcacttgaacccagagtttganacccccttgataacatagggaatcnnactcctaaaaaaattaaanatttanctggcatgntgaaaatncntnnagcctcctncttggagctagnaatngnanactttgaccctgggaanaaagtgatgttgcagtgaccatgtcanaccactgcacactgcactccanctgctggcgacagaacaaggccctgaaca

SEQ ID NO: 257822 - DNA, 1232 bp, Homo Sapiens
  misc_feature (552)..(552): n is a, c, g, or t
gggaaactttctggtgctgtcttttgttctctgaattttcagagactttttttataatgttattcatttggtgactgtgtaactttctcttaagattaattttctctttgtatgtctgttaccttgttaatagacttaatacatgcaacagaagtgacttctggagaaagctcatggctgtgtccactgcaattggtggtaacagtggtagagtcatgtttgcacttggcaaaaagaatcccaatgtttgacaaaacacagccaaggggatatttactgctctttattgcagaatgtgggtattgagtgtgatttgaatgatttttcattggcttagggcagattttcatgcaaaagttctcatatgagttagaggagaaaaagcttaatgattctgatatgtatccatcaggatccagtctggaaaacagaaaccattctaggtgtttcaacagagggagtttaatacaggaaattgacttacatagatgataaaagagaagccaaacagcaagaagctgttaccacacccagggctatgaggataatggngaagaggtttggtttcctgtgtccagtagtgggatcatccagaggagctggaaccatggtgggggctgcctagtgggagttaggaccaccaatggattgtggaaaatggagccatgacaagaacaaagccactgactgagatggagtgagctgagacagataagagaataccttggtctcacctatcctgccctcacatcttccaccagcaccttactgcccaggcctatctggaagccacctcaccaaggaccttggaagagcaagggacagtgaggcaggagaagaacaagaaatggatgtaagcctggcccataatgtgaacataagtaatcactaatgctcaacaatttatccattcaatcatttattcattgggttgtcagatagtctatgtatgtgtaaaacaatctgttttggctttatgtgcaaaatctgttatagctttaaaatatatctggaactttttagattattccaagccttattttgagtaaatatttgttacttttagttctataagtgaggaagagtttatggcaaagatttttggcactttgttttcaagatggtgttatcttttgaattcttgataaatgactgtttttttctgcctaatagtaactggttaaaaaacaaatgttcatatttattgaataaaaacccggttgctaattcct

SEQ ID NO: 257823 - DNA, 1135 bp, Homo Sapiens
ctattcgggctcccgcctctgttcaggacactgggtccccttggagcctccccaggcttaatgattgtccagaaggcggctataaagggagcctgggaggctgggtggaggagggagcagaaaaaacccaactcagcagatctgggaactgtgagagcggcaagcaggaactgtggtcagaggctgtgcgtcttggctggtagggcctgctcttttctaccatggcagcccagggctatggctattatcgcactgtgatcttctcagccatgtttgggggctacagcctgtattacttcaatcgcaagaccttctcctttgtcatgccatcattggtggaagagatccctttggacaaggatgatttggggttcatcaccagcagccagtcggcagcttatgctatcagcaagtttgtcagtggggtgctgtctgaccagatgagtgctcgctggctcttctcttctgggctgctcctggttggcctggtcaacatattctttgcctggagctccacagtacctgtctttgctgccctctggttccttaatggcctggcccaggggctgggctggcccccatgtgggaaggtcctgcggaagtggtttgagccatctcagtttggcacttggtgggccatcctgtcaaccagcatgaacctggctggagggctgggccctatcctggcaaccatccttgcccagagctacagctggcgcagcacgctggccctatctggggcactgtgtgtggttgtctccttcctctgtctcctgctcatccacaatgaacctgctgatgttggactccgcaacctggaccccatgccctctgagggcaagaagggctcctttggaaggaggagagcaccctgcaggagctgctgctgtccccttacctgtgggtgctctccactggttaccttgtggtgtttggagtaaagacctgctgtactgactggggccagttcttccttatccagggagaaaggacagtcagcccttgtaggtagctcctacatgagtgccccgggaaattgggggccctggtaggcaacatcgcagctggttacctggcagaccgggccatgggcaaaggcggggcttgttcaactaccgggaaccctcgccatggg

SEQ ID NO: 257824 - DNA, 1514 bp, Homo Sapiens
  misc_feature (138)..(193): n is a, c, g, or t
  misc_feature (1373)..(1429): n is a, c, g, or t
gcctggccagacaatctgtcctgaggtgtccctggtactgcactcctgagtttctccctgagttgtctgccgctccttgttcagccataccaccatggggtgactctgtcaagcacctgggggtcctgggtgcccagnnnnnnnnnnnnnnnnnnnnnnnnnnnnnnnnnnnnnnnnnnnnnnnnnnnnnnnnctccatgggaggatgtaattttcctgaaaaagacagggccgggcccacccagggtccacttccactcagcatcttggattccagggaagcagacagcgttcaggtcctgcccttctgtgactccctgcagccactgcttcttgaagcctttgtctctaagcttctgtccagctcaaacccacccaggtgccagggtctttggacaccagggagccaggtgtccacattccctggcaggagtaggaggttgacatgaagcaggaggccgatgcacaggccaggtaccagagtatgatcaggaggagctgggcttccccactgttgggtagagcttgcgcaggctggagtccaggaggaaatccaccgacctgtcaatggggtggataatgatggggatggtcaacagcccaagcgcggtggtggtccacttgcggacagccaggggccagcgggtggcagtgcccaggacatagagagaggcagcacacacgcggttgatggtgaagcccggaatggccacagaggctagagcctgccatacaaaggtgtccaccacagccacagtcaccctggcgctgcggcctgcttcagggctgggcacctctccagccttcttgcctttgtcaatggcatccgccagcacgtaggagctggccacgccatagctcagccacaccaccgccgctggcacaagagagcggaaagcctcgcccacctcattggcatagcccaggtatcgcacccacgtgtcccggtagagatcgcgctctgcgccccgcggctgcggctctgacatgactctcccgccacggccccggccactacagccggtactggctccactgcagtctccgccgccggcacttgggtctgcccggccgggacccgccgaaagtcccgcgccgaaggacaggtcaggaaatctccgccagcagggagcgtctgcaaattccccccgcgcaccgaagcccctctcccaggctcgggttttacagactggttttcgtcacgttttctctgagctgttggcgctaatcgctcccaggactgagtgtaggttttggagccaaagagacaggggatcaagttgggggatgctacactgcaaagcttgtgacctcgggcttatccagcatctctttattcatttgtaaaaacgaggggagggacacagggctgnnnnnnnnnnnnnnnnnnnnnnnnnnnnnnnnnnnnnnnnnnnnnnnnnnnnnnnnngaaaaatctccttgagccccaaggggttcgaaaaacagcctgggacaaaataacggaagaccttcggtctcttactattagaaaa

SEQ ID NO: 257825 - DNA, 1162 bp, Homo Sapiens
  misc_feature (400)..(400): n is a, c, g, or t
  misc_feature (426)..(426): n is a, c, g, or t
  misc_feature (1038)..(1038): n is a, c, g, or t
  misc_feature (1040)..(1040): n is a, c, g, or t
  misc_feature (1056)..(1056): n is a, c, g, or t
  misc_feature (1087)..(1087): n is a, c, g, or t
  misc_feature (1092)..(1092): n is a, c, g, or t
  misc_feature (1105)..(1105): n is a, c, g, or t
  misc_feature (1118)..(1118): n is a, c, g, or t
  misc_feature (1123)..(1123): n is a, c, g, or t
  misc_feature (1145)..(1145): n is a, c, g, or t
atcatatatgctgactctgccaaccttggggtggttgacaataaagggatgtcgtagtccatcctcaaatgcactcccatctcttgtcacacgacagcaaatagcacgggtcagatgcccttggctgaaaaggtaacccaatgtgacagatttgagataaatgggctgcaggaagtgggtcaacagtgccccttgcaggcccagcacgttccagcgtaggattttgtcactacaggacatggtacggagtctctccccgagccgaatgccatcccacgtaggcacaatgtcactggattccacagggattgtgccttctccgttctccaccttggtgcggactttccttgtttgggattctcgaagacagggtagtggcgggattctgtgctttccatancacggtcgctgcaggacttgtcaaanagggcgccatctccacacggagcagtgctgatatacagatggaatgacacagtcttttttatttggagcttttctcctcccttagcaggttcaaatatactatccttcgcagtctgggagttgtatttcattaactacactgtagagaaacctgatgaagcctctccgggagattatttctgcatggcagtcattgacagtttctccttttaggctgagagaatctcctttcacacagcgattccctgttcccaagctgacgacgacacccatgtcctcagagtcttttttcataatgatggcggccagaatcttgcggccgagcaaggagggctggaagctgttagtcagagtgttgaagcaccggtggctcagcatggctatctggtcatggaaggtgctgccagtgagagggagtgtctttggctgtgcttctggggaccttgagaggaggagcatagttcttctgagactggcccctgtcactggggttacctctgtgaaacccatgcgttctgccttctcgttctccccaatcaagacacggagagccgcatctgctgcttcctgcttgccttgcttcttgctgtgtgcgcagacggctgggaaccngnaccccccaaacttttnctttgggaaacgaacttgggctcgttaggangtccnggacttggtcgancaacttgaaattnagcancaaaagccatgggagccgggcnttacttccaaaaaggcc

SEQ ID NO: 257826 - DNA, 1738 bp, Homo Sapiens
  misc_feature (941)..(941): n is a, c, g, or t
  misc_feature (1361)..(1361): n is a, c, g, or t
  misc_feature (1559)..(1559): n is a, c, g, or t
ggcgcgggagggtgctctggttcaggcaggttcccgttgcggcggggttccctcggttgggaggaatgcccctgccgagggtatgctccggctggagggggtgtccctaacggcgggaatacctggactggctggggtgtcccactggggagggtttcccggtggggaggtgtctggcgggggagcggctccggctaagcatgggtgttctgctaggaggatgtgtctggctgggggcggtgtcccaatcgggagggttgccctgatgggggaggttctacagttgtggagatgccaacctggggggcgctccggttggggggtgtgccctctctggttaccccgctctcgctgccactcataggcccgctgcccaggtatgcacaagtcaaggccttttctgcagaccaagtagccttccctggagagcgcccccagcaccacggaaactacctacatgccccgcggtggtcagcccgccttatcccagccccgagacccaaaacaagaagcatggactgaatttgaggtttctggatggtcgtgtgaaccgaggggacgggtactggactgacaagaaatgagccttgaaggtcaatctgggtgacacccgagtctcctggtgagtcggactccggagaattatctcaagtccagcatagacagcgcacatagacagaaaaggaaacggacaatcccaagtgccaagggaacctccccaggtttctttagggcagctaaactgctctgtcaaagcctaagtccatttatgacaggccgagcaccctgagccctcgcaggagacacgagcgccttcatggccctcctgccccgcacccacctctccgccacccctgctgtctgtcccttccctgaaacctttatttcgagtgtctttgtggcttccctctttaccatccttgagttgaaatatcacctcnttaagggaagccttccctctcctccctagttaaaatgatactgcccggcctggtcctgtgcattttatagataaggtaactgacaaacctagccacagtcaccccttcgccctaaaggagaactggaatttgaacccagagccttcttcaccaccatctccgttgtttctggaagcaccctccaggcaggccagccagcatcacggggcctcccctggggctggaacgtctgcaggatgcccctttgagaaatgctgttccacagaaccctgcctttcaggccttggagacgtgggcaggggagaagcagcgtccctcagagccaggcctggcagtggtgctagcaggggccaaggcccagggagcagggtctcctgtcggagggacctgggcaagcccctccacgcgccagcgggtttntcagcaggggaggtccacaccacaccgcttgggaacctgggtgcctaaacgcaacaggagccaaggcacaaatttaacccaaaacacccaaggttccgtgaggccccatttcatgagccgggctcccaaggacgtgtccttaggcggctctggaaggcccagcgccagcccccgtcctctgttaaagggagccagccnccgcgctccgccccaggcatggtagcctgagcgcgcccccagggtagtagggggcacctgaggagcagggtctgccctggcatgagcagagcccaggatggggtcagggtcaggccctgccagaggctggagggtgcccaaggcgaggccggtgaggcccagctctacaaataaagtgt

SEQ ID NO: 257827 - DNA, 993 bp, Homo Sapiens
  misc_feature (44)..(44): n is a, c, g, or t
  misc_feature (763)..(804): n is a, c, g, or t
cagaagatcggggacaacctgcgagagcttcagcagccgcttgnagccctacgcggaacccacgcgcaccccaggtcaacacgcaggccgagcagctgcggcgccagctgaccccctacgcacagcgcatggagagagtgctgcgggagaacgccgacagcctgcagcctcgctgaggccccacgccgacgagctcaaggccaagatcgaccagaacgtggaggagctcaagggacgccttacgccctacgctgacgaattcaaagtcaagattgaccagaccgtggagggagtgcgccgcagcctggctccctatgctcaggacacgcaggagaagctcaaccaccagcttgagggcctgaccttccagatgaagaagaacgccgaggagctcaaggccaggatctcggccagtgccgaggagctgcggcagaagctggcgcccttggccgaggacgtgcgtggcaacctgaggggcaacaccgaggggctgcagaagtcactggcagagctgggtgggcacctggaccagcaggtggaggagttccgacgccgggtggagcctacggggaaaacttcaacaaagccctggtgcagcagatggaacagctcaggcagaaactgggcccccatgcgggggacgtggaaggccacttgagcttcctggagaaggacctgagggacaaggtcaactccttcttcagcaccttcaaggagaaagagagccaggacaagactctctccctccctgagctggagcaannnnnnnnnnnnnnnnnnnnnnnnnnnnnnnnnnnnnnnnnnatgctggcccctttggagagctgagctgcccctggtgcactggccccaccctcgtggacacctgccctgccctgccacctgtctgtctgtctgtcccaaagaagttctggtatgaacttgaggacacatgtccagtgggaggtgagaccacctctcaatattcaataaagctgctgagaatctagcctc

SEQ ID NO: 257828 - DNA, 1087 bp, Homo Sapiens
  misc_feature (970)..(971): n is a, c, g, or t
  misc_feature (982)..(982): n is a, c, g, or t
  misc_feature (997)..(997): n is a, c, g, or t
  misc_feature (1006)..(1006): n is a, c, g, or t
  misc_feature (1012)..(1012): n is a, c, g, or t
  misc_feature (1015)..(1015): n is a, c, g, or t
  misc_feature (1028)..(1028): n is a, c, g, or t
  misc_feature (1033)..(1033): n is a, c, g, or t
  misc_feature (1039)..(1039): n is a, c, g, or t
  misc_feature (1044)..(1045): n is a, c, g, or t
  misc_feature (1049)..(1050): n is a, c, g, or t
  misc_feature (1053)..(1053): n is a, c, g, or t
  misc_feature (1055)..(1055): n is a, c, g, or t
  misc_feature (1057)..(1057): n is a, c, g, or t
tgcagcgcaggtgagctctcctgaggacctctctgtcagctcccctgattgtagggaggatccagtgtggcaagaaactcctccagcccagcaagcagctcaggatgttcctgaaggccgtggtcctgaccctggccctggtggctgtcgccggagccagggctgaggtcagtgctgaccaggtggccacggtgatgtgggactacttcagccagctgagcaacaatgccaaggaggccgtggaacatctccagaaatctgaactcacccagcaactcaatgccctcttccaggacaaacttggagaagtgaacacttacgcaggtgacctgcagaagaagctggtgccctttgccaccgagctgcatgaacgcctggccaaggactcggagaaactgaaggaggagattgggaaggagctggaggagctgagggcccggctgctgccccatgccaatgaggtgagccagaagatcggggacaacctgcgagagcttcagcagcgcctggagccctacgcggaccagctgcgcacccaggtcagcacgcaggccgagcagctgcggcgccagctgaccccctacgcacagcgcatggagagagtgctgcgggagaacgccgacagcctgcaggcctcgctgaggccccacgccgacgagctcaaggccaagatcgaccagaacgtggaggagctcaagggacgccttacgccctacgctgacgaattcaaagtcaagattgaccagaccgtggaggagctgcgccgcagcctgggctccctatgctcaggacacgcaggagaagctcaaccaccagcttgagggcctgaccttccagatgaagaagaacgccgaggagctcaaggccaggatctcggccagtgccgaggagctgcggcagaggctggcgccttggccgaggacgtgcgtggcaactgaggggcaaaccgaggggctgcagaatcactggnnactgggtgggnctggacagcagtggnggagtccgngccggnggngcctacgggaaanttcanaagccnggtgnncaannganantnaagcaaaattggcccatgcggggcgtgaag

SEQ ID NO: 257829 - DNA, 1641 bp, Homo Sapiens
gccggctcttcttgctctgccacaaggaggccctcatgaagcgtaatttttgtgtccccccaggagcaagtccagaggtgcccaagcccgccctcagtttctatgtgttggggagctggcttgggggcacccagaggaaggagggtactggatgggggctgcccgagccccagggaaatgacgacaatgatcagaaggttcacctcattttctttggctcttcagtccgctggtttgagttcttgcacccgggacaggtgtaccgactcgtagctcctggccccgcttttcacagattccttggtgtctttctccgctgagattttgtcacggacactatgtgaaccccttgtggcgtctctctggatgaaactggggaacacgggggccatgagaaggtgtgtgaagctaacagtcgctcttgagactgctgaatgtgaattcccccctcacctggatgtatatatagaagacccacacttgcctccctcactaggactacttccaggagcccgggtccacttcagccagttggagaaaagggtttccagatctcacaatgtttattgttgtttccggtcatccacttatgtgcaggtcctgagttttccccctgagaccaccatcagcattcccctgccccacatctacctggctgaacttctgcagggtggtcagtccccattccaggccactgcctcttgccatatcgtctctgtcttcagccttcagctcttctgggtgtgtgcttattgtaccagcatctgccggcagggaaagtgcactcgcctgggctccacttgccctacgcagacagctataagccaggccatcatcaggctcctggtggaggatgggactgccgaagccgtggtgacctgtaggaatcaccatgtggcagcagcactagggctgtgtcctagagagtgggcctccctcctagatttcgtccaagtgccaggcagagtggtcttgcagtttgcagggcctggagcccaacttgagtcttcagccagggttgacgagcccatgaccatgttcctctggacactttgtactagcccctctgtcctccgtcctattgtgctttcttttgagctggaaaggaaaccgtcgaagatcgtcccattagaacctcctcggctacagcgattccagtgtggagagctccctttcctaactcacgtgaaccccaggctccgattgtcctgcctttctatccgagagtcagagaactccagctctctggggatccttgcttcctcctgttaactgaactgcaaggatggcctgagagtccttccttgctgaaaaactgaaggcctaggtcctggctcctctccctacttgttctgtgattgaaccaaggactccagattcacaaactgctactccactataatttcccttctttggtgttctggtggccgccggcttggaaatggggcacagggaacctggcctataatagtctctgatggggaaggacctgatttcgcggcggaaccgggtcgcttgtgcgggcggcggaaaactgctcccgggtgggagccttcaggcccgggtttaaaaaagggggggaaccaggcaccacttaagagtataaggcccgagcgtgaccgtacaaacatagtcagaacg

SEQ ID NO: 257830 - DNA, 1413 bp, Homo Sapiens
  misc_feature (70)..(70): n is a, c, g, or t
  misc_feature (171)..(171): n is a, c, g, or t
  misc_feature (272)..(272): n is a, c, g, or t
  misc_feature (284)..(284): n is a, c, g, or t
  misc_feature (407)..(407): n is a, c, g, or t
  misc_feature (419)..(419): n is a, c, g, or t
  misc_feature (450)..(450): n is a, c, g, or t
  misc_feature (462)..(462): n is a, c, g, or t
  misc_feature (499)..(499): n is a, c, g, or t
  misc_feature (864)..(864): n is a, c, g, or t
  misc_feature (998)..(998): n is a, c, g, or t
  misc_feature (1012)..(1012): n is a, c, g, or t
  misc_feature (1195)..(1195): n is a, c, g, or t
  misc_feature (1223)..(1224): n is a, c, g, or t
  misc_feature (1273)..(1273): n is a, c, g, or t
  misc_feature (1328)..(1329): n is a, c, g, or t
aaaatactttccttggaggccccaggagggagaggcactgtcaggactcacctggccagggaaggcaacnccaccagaggcagaacggaggtcagcggggcagctggcccaggaagcctttggggaatggctcaggcctcaggcagggactgtgcaaacgccgaggctgcncagggagtaatgggttgggggcttaagccgccgagcaccgtgttcccctgcatgggcagacacgcagtcaggctagcacctgcccactccacctgtgagtntacacaggtgtncgcgtaaaagccggtgcctgcacgcagcttacatacagagagcggaacgagggttcccagcagaacagggggctcgttccagagcttaaggaaatagcttagagaagtctttggaagcctggntcgaggggagancagggaggctgctctgttgcccatgggcctnaggaagccaggncttcctgccgccgctggaggacctcgatgacgctgcngataccgttctcgggcaccagggcgtggtcgaaagttgaaggtgctgatgtagtaggcagaaatgttagcggcagctaggggacctgcaatctgtgcacgatgccacactcatcaaagcccaggggctgtccaccgatgcgcaccatcctccacagctcccccgagggagctggtcagcaggaggtcactggggaacctgtgcgagtagaagaggacatctatgagggtggtggcgatggctggaagcgtctcagggtccagtgtgaggacacagaagccgttctgtgggccctggatgggatgcaccgtggggctgggcccatgctgagtgcggggaaagccattgctggaatcatccctcgtnacaggcacaggctctccgcccacctcgcggtaaatgtcgaactcctgggccagcgtgtggatcaccacggacaggtcctctcccgcaccaggatgaagtccgtctggtaagtgaacagcatcagcacagacacntggtgctcggccantggcgcgatgaccgaacgggcgatcttggtgaccccagcagcctgcactgccgcaccgctttgagacgacacgttcagcaccagccatgtggcctcagctacttgcaggaactcagatgggggcagctctttaaagccctcctcgtccaccataagcgtgtaatcctcaggggtctccgtcangctgaagaacttgcaccggctgcggcgnngcaggaagagcagcttgatgagcgggtgggtgtagagccagagaccggnacgggcgacgctcagcacccgcacccggtgttctaggatgtgcagctccatcgcnntcgcgcggacccgaccccgccgccaactagacccaggccgcacgggaggcggggcggcgggggtggtgcccgagccttaaagga

SEQ ID NO: 257831 - DNA, 1057 bp, Homo Sapiens
  misc_feature (20)..(20): n is a, c, g, or t
  misc_feature (58)..(58): n is a, c, g, or t
  misc_feature (64)..(65): n is a, c, g, or t
  misc_feature (79)..(79): n is a, c, g, or t
  misc_feature (131)..(131): n is a, c, g, or t
  misc_feature (187)..(187): n is a, c, g, or t
  misc_feature (201)..(201): n is a, c, g, or t
  misc_feature (664)..(688): n is a, c, g, or t
  misc_feature (796)..(796): n is a, c, g, or t
  misc_feature (891)..(892): n is a, c, g, or t
  misc_feature (907)..(907): n is a, c, g, or t
cttcacacaattgttgaaanaagcaatttcctctctccaggggttttcatttgtgaantctganncttagtctgggttntattcaccagtgagcgaggagttatccaccttgcagccatttgcagatatanttctgaggtcagcaggaattcggtctcctccttttacttccaaccagatccccaanccacaacttcctcncgcatttatgctcaatttctccaccatttcaaatcacaagggctggctgagggaccatgtttttgaaggattccatgatctttgaacttttagcttcttgatagtaggagaagcaaccagttatgattacaacggctgatagcaccacacccaggtacagattatcgttttgaggttcctcttctgtagcagcttggatgctataagccaagaaacaaagaatcgctccaatccacagtaacattgagaaccccccaaagagctgccgacaaaacttgatccattcaggagtagtgggagggggagtgagggcgttgggaccatctcgcgccaggatctcagctgcacgagcagatgttaatccccggctcaagtctgttccatatttacgatgaagttcatcaaggctaagtttatgatcatccatagaaacttctttcttcagttcatccatgtccctgtnnnnnnnnnnnnnnnnnnnnnnnnnatcaccttgttctgaaacagctgcaggctcatacttatcacgtccaacccccttccccatggtggcggtgctcagtgcccggcgccggatcctgtcgctggagaatanagagagatataagcacagagcagctcccggccaagcgagagggaccaggggagccaagtggagggagctagggctgccgcggggcgggagggtgnnagggcggccggcggntcgggccgatgccgccgccgctgttgctgccgccgcccgggctgctaccgctgttgccacgtgtccgcctcctcccgccgctgctctgcgccccagaccccgccgcagctccagcccgcgcctcctcctcacttcctaaaatatgcatcc

SEQ ID NO: 257832 - DNA, 2100 bp, Homo Sapiens
  misc_feature (81)..(101): n is a, c, g, or t
  misc_feature (1632)..(1645): n is a, c, g, or t
cactatagggaatcactgttggcctactggtcttcggcttccgtagaggaagtggcgcggaccttcatttggggtatcggnnnnnnnnnnnnnnnnnnnnnggggtctgggggtgacattgcaccgcgcccctcgtggggtcgcgttgccaccccacgcggactccccagctggcgcgcccctcccatttgcctgtcctggtcaggcccccaccccccttcccacctgaccagccatgggggctgcggtgtttttcggctgcactttcgtcgcgttcggcccggccttcgcgcttttcttgatcactgtggctggggacccgcttcgcgttatcatcctggtcgcaggggcatttttctggctggtctccctgctcctggcctctgtggtctggttcatcttggtccatgtgaccgaccggtcagatgcccggctccagtacggcctcctgatttttggtgctgctgtctctgtccttctacaggaggtgttccgctttgcctactacaagctgcttaagaaggcagatgaggggttagcatcgctgagtgaggacggaagatcacccatctccatccgccagatggcctatgtttctggtctctccttcggtatcatcagtggtgtcttctctgttatcaatattttggctgatgcacttgggccaggtgtggttgggatccatggagactcaccctattacttcctgacttcagcctttctgacagcagccattatcctgctccataccttttggggagttgtgttctttgatgcctgtgagaggagacggtactgggctttgggcctggtggttgggagtcacctactgacatcgggactgacattcctgaacccctggtatgaggccagcctgctgcccatctatgcagtcactgtttccatggggctctgggccttcatcacagctggagggtccctccgaagtattcagcgcagcttcttgtgtaaggactgactacctggactgatcgcctgacagatcccacctgcctgtccactgcccatgactgagcccagccccagcccgggttccattgcccacattctctgtctccttctcgtcggtctaccccactacctccagggttttgctttgtccttttgtgaccgttagtctctaagctttaccaggagcagcctgggttcagccagtcagtgactggtgggtttgaatctgcacttatccccaccacctggggacccccttgttgtgtccaggactccccctgtgtcagtgctctgctctcaccctgcccaagactcacctcccttcccctctgcaggccgacggcaggaggacagtcgggtgatggtgtattctgccctgcgcatcccacccgaggactgagggaacctaggggggacccctgggcctggggtgccctcctgatgtcctcgccctgtatttctccatctccagttctggacagtgcaggttgccaagaaaagggacctagtttagccattgccctggagatgaaattaatggaggctcaaggatagatgagctctgagtttctcagtactccctcaagactggacatcttggtctttttctcaggcctgagggggaaccatttttggtgtgataaataccctaaactgccnnnnnnnnnnnnnngaggtggggggagggaggaggtatattggaactcttctaacctccttgggctatattttctctcctcgagttgctcctcatggctgggctcatttcggtccctttctccttggtcccagaccttgggggaaaggaaggaagtgcatgtttgggaactggcattactggaactaatggttttaacctccttaaccaccagcatccctcctctccccaaggtgaagtggagggtgctgtggtgagctggccactccagagctgcagtgccactggaggagtcagactaccatgacatcgtagggaaggaggggagatttttttgtagtttttaattggggtgtgggaggggcggggaggttttctataaactgtatcattttctgctgagggtggagtgtcccatccttttaatcaaggtgattgtgattttgactaataaaaaagaatttgtaaaa

SEQ ID NO: 257833 - DNA, 1589 bp, Homo Sapiens
  misc_feature (186)..(199): n is a, c, g, or t
  misc_feature (383)..(383): n is a, c, g, or t
  misc_feature (818)..(818): n is a, c, g, or t
  misc_feature (939)..(940): n is a, c, g, or t
  misc_feature (943)..(943): n is a, c, g, or t
  misc_feature (954)..(954): n is a, c, g, or t
  misc_feature (971)..(971): n is a, c, g, or t
  misc_feature (973)..(973): n is a, c, g, or t
  misc_feature (1007)..(1007): n is a, c, g, or t
  misc_feature (1016)..(1016): n is a, c, g, or t
  misc_feature (1193)..(1193): n is a, c, g, or t
  misc_feature (1213)..(1213): n is a, c, g, or t
  misc_feature (1218)..(1218): n is a, c, g, or t
  misc_feature (1220)..(1222): n is a, c, g, or t
  misc_feature (1229)..(1229): n is a, c, g, or t
  misc_feature (1231)..(1232): n is a, c, g, or t
  misc_feature (1236)..(1236): n is a, c, g, or t
  misc_feature (1249)..(1249): n is a, c, g, or t
  misc_feature (1252)..(1252): n is a, c, g, or t
  misc_feature (1359)..(1359): n is a, c, g, or t
  misc_feature (1375)..(1375): n is a, c, g, or t
  misc_feature (1574)..(1574): n is a, c, g, or t
gggtccgtgggaagaagcctgtggtggccccccagtggggtctctcaaggcttcagtgggtgaaaccaaaggggccttgatcccccacaagggaaggcaatggttccttaccggagttggcttaaaaaaagacttggaaaattggccggtgctcggggaaacccacccttgttgctgcaccttttnnnnnnnnnnnnnncggtgccccgtgtccgataaacgcctgtgtccttgctaacgcccctctccgcagaagcggtccagagcagcatgtggatctccactgattccgccgcctcggtgctggagcctctgaaggtggtgtgggccaagtgcagcggctacccctcctacccggcactgatcatcgaccccaagatgcnccgtgtgcctggccaccacaacggcgtcaccatcccggccccacccctgtacgtgctgaagattggggagcacatgcagaccaagtctgatgagaagctgttcctcgttctcttttttgataataagagaagttggcagtggcttcctaagtccaaaatggttccccttggtattgacgaaactatagacaagttaaagatgatggaagggaggaattccagcatccggaaggccgtgcggatcgcttttgaccgcgccatgaaccacctgagccgcgtccacggggagccgaccagcgacctcagtgacatggactgacagcccggccgccagcgcgggtcttgtccatagtgttgataagctgtacatgtttgtatattgtccaaaacttaacttattctgatttttagttatagctctttaattctttttcncccggggaggggggaggttttatttccaagttttctaggaacccatctccgtctgggcgctgtgagtggggtgggcacgtccgggcagcccagtgcgtctgtcgcacgtccccaggccgtnnttntggcgtcactntctatgatatgtagctntntcttaaagacttttgaatgtttaataattttttnttcatgttnttttcacagagtaccacttatttaataagacgggatgtaaatttacaatgacaaatgtgtattttaagaaagaaaatgacattattttgaatggtactttgtggaaagaggggagaataaagttatgctgtgtacatcacttgcagatcaccaaaaacactccgctgcccgtgaccnccggtgggtgtgtccccgcnccccncnnnccccccncnncaanccccgcaggtgtnccncccagcggattatttattgtagaaagtgtattcatttgctttataatgaaaaatacatttgcaaaggtatattgatatgcatttttatacaggcacataaaaattcnacttggcttgggagcngaatgcattgcattgtataaatgattctggcctgtgtgtactttgattttataacttgtaatcttttgtttacaatgaggggctttctgtaacttgttttaatttagaacactttggtagcaatagaaactttggatacatttttgtatggtacctgtgatgtatatagaattagtactttatttttatttttaagagntaaagcattatgttg

SEQ ID NO: 257834 - DNA, 1807 bp, Homo Sapiens
  misc_feature (157)..(400): n is a, c, g, or t
  misc_feature (1321)..(1321): n is a, c, g, or t
  misc_feature (1717)..(1717): n is a, c, g, or t
  misc_feature (1759)..(1759): n is a, c, g, or t
  misc_feature (1768)..(1768): n is a, c, g, or t
  misc_feature (1777)..(1777): n is a, c, g, or t
gatggttggtgcagaagtacccacagcagaatagatcatgtgtcccaccagtggcagagtgggctgttcctcagtcatcaagactgaaatacaggcaattattcaatagtcatgacaaaactatgagtggacacttaacagatggagcttcactctnnnnnnnnnnnnnnnnnnnnnnnnnnnnnnnnnnnnnnnnnnnnnnnnnnnnnnnnnnnnnnnnnnnnnnnnnnnnnnnnnnnnnnnnnnnnnnnnnnnnnnnnnnnnnnnnnnnnnnnnnnnnnnnnnnnnnnnnnnnnnnnnnnnnnnnnnnnnnnnnnnnnnnnnnnnnnnnnnnnnnnnnnnnnnnnnnnnnnnnnnnnnnnnnnnnnnnnnnnnnnnnnnnnnnnnnnnnnnnnnnnnnatgagccaccacacccggcccactgaaggtccccaagcaagaactattcttatgcagtcaagtttaccacaggctcagctggcttcaatatggaatctttctgacattgatcaagatggaaaacttacagcagaggaatttatcctggcaatgcacctcattgatgtagctatgtctggccaaccactgccacctgtcctgcctccagaatacattccaccttcttttagaagagttcgatctggcagtggtatatctgtcataagctcaacatctgtagatcagaggctaccagaggaaccagttttagaagatgaacaacaacaattagaaaagaaattacctgtaacgtttgaagataagaagcgggagaactttgaacgtggcaacctggaactggagaaacgaaggcaagctctcctggaacagcagcgcaaggagcaggagcgcctggcccagctggagcgggcggagcaggagaggaaggagcgtgagcgccaggagcaagagcgcaaaagacaactggaactggagaagcaactggaaaagcagcgggagctagaacggcagagagaggaggagaggaggaaagaaattgacaggcgagaggctgcaaaacgggaacttgaaaggcaacgacaacttgagtgggaacggaatcgaaggcaagaactactaaatcaaagaaacaaagaacaagaggacatagttgtacttgaaagcaaagaaaaagactttggaatgtgaattagaagctctaaatgataaaaagcatcaactagaagggaaacttcaagatatcagatgtcgattgaccacccaaaggcaagaaattgagagcacaaacaaatctagagagtggagaattgccgaaatcacccatctaaagcaacaattacaggaatctcagcaaatgcttgnaagacttattccagaaaacagatactcaatgaccaattaaaacaagttcagcagaacagtttgcacagagattcacttgttacacttaaaagagccttagaagcaaaagaactagctcggcagcacctacgagaccaactggatgaagtggagaaagaaactagatcaaaactacaggagattgatattttcaataatcagctgaaggaactaagagaaatacacaataagcaacaactccagaagcaaaagtccatggaggctgaacgactgaaacagaaagaacaagaacgaaagatcatagaattagaaaaacaaaaagaagaagcccaaagattcctaattcttagccgattgacctgtgtgcgttaccattgttcacaggatggccagttncagggtgggagactctggggacccgggtgcctgggggtttgnaagcccctngcctgtttngggctgttttgacttggacaattcttttat

SEQ ID NO: 257835 - DNA, 1578 bp, Homo Sapiens
  misc_feature (240)..(240): n is a, c, g, or t
  misc_feature (243)..(299): n is a, c, g, or t
  misc_feature (319)..(331): n is a, c, g, or t
  misc_feature (1163)..(1163): n is a, c, g, or t
gggggctcccaggagccaagttggggagtgggaggtggcagggatcttcgagagctcaggccagcggggcacggtggcactttagaaggccaaggtgggaggatggctgagatcggcctgggcaatagaggaagactccatctgtttttgaaaaaaagttgtaaatcattcaggtatggtggtgtatatgcctgtagtcccagctacttgagaggctgaagtgggacgatggcttgagcncannnnnnnnnnnnnnnnnnnnnnnnnnnnnnnnnnnnnnnnnnnnnnnnnnnnnnnnnaagtgagaccctgtctcttnnnnnnnnnnnnntaaaggactcctgtcaagcctctcttgtctgcttgtggaacacatggtgcgatgtcttggcagcagcagggctgtctttccagtgatgtgtgctcaggaccacgtcactactcgtttgtgccccttccctcctgaatcctcaaaggagccggggacccagaggagtgcaggaggcagaaggaagcccggtgtggtctcacggtcaccacagagagcgcgccatgtgcacaggctgtaaagatggtgaccgggggacaccgtgtgtgtcttgcatggctctctgagctcaaggtttgggcagaactgggggaacccacgggggttgactccagcttcaatatcccagcctgggcctggccacaggcagccctgagcaccactctcagtgctgagtagacacgtgctctcatatcagagctctgcggaaacggtggcaggcacagctgctaagcttgaatagctgtgatgaattccagaccctcccgccgtgtaccaacactgctttcacttctctgtgcttccttccctctgcggctgaggccagcagggtgggtgaggctgctgggacgcccctcttacctgcatgatgaggatgcacatcccccaccgtgcccagcacgtgcttattgtcatcgaaccacatcttcaccttttcatagcagcccgttctccacaaaggcgtggtggcgttgcgcccgcagccctgggagttctccatgcagcagcggtcgggaaccgtgttctcccccagcactgggtaccagtctgtgtagtcagtgacaccacagcatcgcatctcagcctggatgatgttccaggcgttcttcagccncacgttgttctcggtgtggtacagcagcaggccttccttcaggtccttcttggcgttctcgttcaccttgtccatgtagacaaagaagaggatgagtaagatcagctctgctaggaggatgaccaacaggacgatgaaaaagctgaggaggaggcacttgttttccttgatggcccccaggcagccgaggaagcccgtcaccatgacaatggtgcctatggcgatgaccaggttggctgcagacaacgaagggaagctgggggagaaggtggcaaagttgccttgggacacggagagccagatgcccactcccagcagcccacagccacagagccagaatatcaaattgaagaggaacatcatgtacttcaagcagcagaggcagcccctggccatgttgcacttcttaaattct

SEQ ID NO: 257836 - DNA, 2068 bp, Homo Sapiens
  misc_feature (1971)..(1971): n is a, c, g, or t
acttcctgaatcctgcttcctgcttcccagaggccgggatccggagccgcccgaagccggtgccgcagccccctgcgcccccggtgcccccgacatgtccttccgcaaagtggtccggcagagcaaattccggcatgtgttcgggcagccggtcaagaacgaccagtgctatgaggacattcgcgtgtcccgtgttacctgggacagcaccttctgcgccgtcaaccccaagttcctggcggtgattgtggaggccagtggagggggtgcctttctggtgctccccctaagcaagacgggccgcattgacaaggcctacccgacggtgtgtgggcacacgggacctgtcctggacatcgactggtgtcctcacaacgacgaagtcatagccagcggctcggaggactgcacggtcatggtgtggcagatcccagagaacgggctgacctccccgctgacagagccggtggtggtactggaggggcacaccaagcgagtgggcatcatcgcctggcaccccacggcccgaaacgtgctgctcagtgcaggctgcgacaacgtggtactcatctggaatgtgggcacagcggaggagctgtaccgcctggacagcctgcaccctgacctcatctacaatgtcagctggaaccacaatggcagcctgttttgctcagcatgcaaggacaagagcgtgcgcatcatcgacccccgtcggggcaccctggtggcagagcgggagaaggctcatgagggggcccggcccatgcgggccatcttcctggcagatggcaaggtgttcaccacaggcttcagccgaatgagcgagcggcagctggcgctctgggacccagaaaacctcgaggaacccatggccctgcaggaactggactcgagcaacggggccctgctgcccttctacgaccccgacaccagtgtggtctacgtctgcggcaagggtgactccagcatccggtactttgagatcacagaggagcctccctacatccacttcctgaacacgttcaccagcaaggagccgcagcggggtatgggcagcatgcccaagcggggcctggaggtcagcaagtgcgagatcgcccggttctacaaactgcatgagcgcaagtgtgagcccatcgtcatgactgtgccaagaaagtcggacctcttccaggatgatctgtaccccgacacagccgggcccgaggcagccctggaggctgaggagtgggtgagcgggcgggatgccgacccgatcctcatctcactgcgggaggcctacgtgcccagcaagcagcgggacctgaagatcagccggcgcaacgtgttgtctgacagccggcccgccatggccccgggctcctcccacctaggggcccccgcctccaccaccactgctgctgatgccacccccagcggcagcctggccagagccggggaggctgggaagctggaggaggtgatgcaggagctgcgggccctgagggcgctggtcaaggagcagggcgaccgcatctgccgcctggaggagcagctgggccgcatggagaacggggatgcgtagggccacagccacacgccaccttcatctcctccgccgcccccttcccactcagcttctgccagcgggtcgcaccgggctagctggctgcccagagcctctgaggcagcgcaggggtcagttcccacccccacccgtcccaggcccaggccgaagccagcgcccagctttcctcactgttcctgtggaggatgtctacgcccaggcgagctcctcgacctctgagggaccatctccccgaccactgcccagccctctgctccctccccaaaggaggcgggagggtgggctctatattttcattccaaataaaattctctttcccgccaagctacttcgcccgcctacatacctcttgttcggccgccctcgggccctccaagaagctttcctaaaccatttcctttggnggcgcgggccccagttaggtaaagtgaacatgggtccttagctggtttcctaaggagaatcctgggccttgacctaggggctttggattctcccccc

SEQ ID NO: 257837 - DNA, 2412 bp, Homo Sapiens
  misc_feature (46)..(54): n is a, c, g, or t
cccttccagaatccatttaaggaaggggataaagagggagccaatnnnnnnnnncacatccgacagagcactcgtggtttgccagctgtgggcaacagttcaaaagtgcaccaagaagggaaggaatggtttaagttggaacggacagtcctcacagggtgcctgtaagaaaggacattttaccccccacatcatagtcacatcactgactcctaggtctagcacgactgcctctttgtgattctcttgagtacccttgggcttccagccatgctgtcctcacatacggtaaagccaaagagctgtcacatgggccagaaacatgagccacggcaggaagaccgtggagcccgtgggcactgcatggtgttggctggcatgcccatcagctgaggacagcaaactcccagcagcccctacagaggtggcacatgcttggccacacatctactccctgcccacaccatctatgctcttggttggtgctggctgggatggcggttctgcccagtggtgtctctgagcgcgggatgacaggagcaaccgaagcaccctgaaggccttcactccttgttgggtaactcagccatggagatgccaagcactagccaggaggtgagttcctctttagggctttggttttcattcctttttgtttggcttggccaaaccagaattcagcttatctgaattattttccaaaggaatgctgtcagggagggactgttctgccagcctaacaaagcaacgtagccacgtatagtacccactttctgctctttggagagaacacaggttatcaagttcatctctcttgactactcttatgatagctgatgccacagagcctatgggcaaatgccagacccagggttagacacaaggacctgaagtgacatgacggcgggacaggggaaatgtgactttctaattaggcattttatgttagtcacagtcttgaatgtataaacagcactaagactctcaggtcaggtaccttggtgatcagctactagttcttccagccctcattgaggtaacaagataaagacaaatccacttctttggccaaattcaggctttggctttatgactttcccacagagactggaatgcgtcagcctgagaccactggcctattttctcagctgccctcttgaggtcctttaacactcaaattcccagctccccactgaggtgttgtgatgcttgccttttgccctccccctcccctttagtccctgcttactactttgacattcacatcctcagtgtctcagtcttttttgccgagaaagcacagtagtctggcactgcgcatttatcttctctgactgaaaatctctccttggtcttaaggaaaatactaacattgaactcactgacatgatcttagcttctttaatcagactttgtgacttaaaagtttgggggtttccctttgaaagtttccagccctattcagaaagcaactcttggctgtgtgcatttttcaactccaagcagcccaggggtaagtaaacaaagtatggatgaaggtcagattttcttgtcagtttctgagaaacctggcagcctgctgttaacaacacaggccagtattgggttttattgaatttggtatgtgaccaaggtcggcctaaaggatggcgcaggtcctgggcaggaaagaatttttcctttatcacataactgtaatatttggttgctcagcataagtgatggaagcaaacactaatttctaataaaattgtgttaaactcaatggtacagagccaggtttacagtgagcaggccttgaccagcttgcggccatgggctgagttcctgtgcttctgtttatcatctgaccttgtgttctagccaggtcgtaagcgcgactgtactgttgccctgcaaccccagctccccctggaggactaaggacaagaataacaagggctggaactgtgatttaatattaattcaagaaaactacctctaacaatcactgcagtggcggaggaaaagaaatcctaagaattggggcaagatgcagcacaattcatctctggctcttggaaatctgagagaagctcaggaagtagcttgacttagtcatcaatccatacctaaagctgctcctcagccaaattcctgcatttgtggtctggatgcttggcagagtcatgctgagggctggcacacccattgctccaggaaacccgactggcttgcctccctcctctcctgggcctagcgaggccaggaaatggcaatggtcggtcagtgctaagagccaggccactccgacccttgacactggcctccctctctgcatttggcagaaggtaaagtgaacaagagtccagtccagcacccccgccaactagctgagaggcacagtgaccctaggagatgtccagccagcct

SEQ ID NO: 257838 - DNA, 1589 bp, Homo Sapiens
  misc_feature (179)..(179): n is a, c, g, or t
  misc_feature (399)..(399): n is a, c, g, or t
  misc_feature (686)..(686): n is a, c, g, or t
  misc_feature (853)..(854): n is a, c, g, or t
  misc_feature (858)..(858): n is a, c, g, or t
  misc_feature (861)..(861): n is a, c, g, or t
  misc_feature (875)..(875): n is a, c, g, or t
  misc_feature (889)..(889): n is a, c, g, or t
  misc_feature (910)..(910): n is a, c, g, or t
  misc_feature (940)..(949): n is a, c, g, or t
  misc_feature (958)..(959): n is a, c, g, or t
  misc_feature (963)..(963): n is a, c, g, or t
cctggccttgggtttaaaacccaattcctgggcctcgggcccctcccttagttcccacccacggtcaaccttttgggccagccatcgcccaagatcgaagggtcaactggaagtgccgttggtgctccctgtgaacttgcgtcggcacccaaaggccttggaggaacaagggcactggncggtgtgactggtcatggcacttgctggccttctggccagaggtcctcctggaagcccctcctttcagtgcctggctacagcggtgctagccaggctggagtccagcacctctcgccggtgtctgtgtgagtgagcgcatgtgcgcatttatgagcatctacttgcggctgcactcagggccatttgaacccagtgcagagttatctctatgaggaggcnccgggtctccagccccctccatctcccctggggtttggcatatttgacatggagccccatgccaagggatgcagctgttggtgtctgtccagtccattcaaggctagcctgcccatgcactgtggcaggggttggattggagggagagaacagagttgggaaaaacaacaggtttgagtcctataaagccataatttaactccagtagctgatgtcagacaagcttgtcctatgtcctatttgagtcgcagcagcgccagcccagcaagaaggctgggggttgtcanaggttgtccccagaccttgcttgcagtggttggagaacccagggggctgccttgggccctctggccagagggaagcgggcagctctagccctggagattgtggtcacattggggcttgtttaggattggagggccaggtcacctccccagccaccctcccttctctnntctngantccccactttaggncaactttgcccaangcccacgcatccatccactcntttattcccttaaatatcattcacaatcannnnnnnnnnttcacctcnnggtntcactctgttgatgtaatcctcccacccccagtgtccatcctaagacaggcatcaaaagaggccctaactttacttcccaaatggtgctttttaaaaaacaccatcactacattaggggcaattttttcacacctccctgtcttcagaatgtaaagggtggggattatgtctctgtttaatatgcagccccctgcactgtggggtttggggcatgttcagtaataagaatgaatacaatagacaaagggggtgtgatgagtgttaacttggttgttccagaggtaaaccaggtctcagggaagagcctggagctgctattgcttaggaagttgtacgtgccttgaaatgtccactacctgaggacgcagcatctggtgggcccggggctgctggggccaaggagggaccttgaccttctggtgcctgcccctccccggcctacgtgccatccgcgtgacgctaggtcagcgctgccggttctttaccaaatgtgcttgcttctcctaagttatttataaagagaaatcactaatggacactactggtatgagtgcttatgagctggaagaccgaccgcctgtatgtttgtgtaattaattgccataataaactttgatgagtcaca

SEQ ID NO: 257839 - DNA, 1692 bp, Homo Sapiens
  misc_feature (499)..(499): n is a, c, g, or t
  misc_feature (1177)..(1192): n is a, c, g, or t
  misc_feature (1263)..(1312): n is a, c, g, or t
  misc_feature (1602)..(1602): n is a, c, g, or t
  misc_feature (1674)..(1674): n is a, c, g, or t
gcctccgccgcagatcccccggtgcaggcctccgtgctggtgcggatcctggagctcagccgcgcgcgccctgcccgatcctgtgccgacccaccgcactatgcgcgccgtgccgctgcccgccccgctcctgccgctgctgctgctcgcgctcctggccgctcccgccgcccgcgccagcagagccgagtccgtctccgcgccgcgcccgaacccgagcgcgagtcgcggccaccgcccggcccggggcccgggaacaccacccggtttgggtctggggcggcgggcggcagcggcagctccaacagcagcggcgacgccttggtgacccgcatttccatcctcctccgcgacctacccaccctcaaggcagccgtgatcgtggcgttcgcctttaccaccctcctcatcgcctgcctgctgctgcgcgtcttcaggtcgggaaagaggttaaagaagacacgcaagtatgatatcatcaccactccagcagagcgangtggaaatggcgccactaaatgaagaggatgatgaagatgaggactccacagtattcgacatcaaatacaggtaaaacctgtttcccagcctggtggcatcctgtggaaagttggtcagctgcaacctggggtgtgaaggactggacctggaagccctcttgcgtcggaggtgttgaaaccaaaacgaacgttatgtataaaaccccagctccatcgtgcgtgtcaggcatctgctcagactgtcactggcaagctcgtttccacgtcaccacaatggagttgcttctgccaccctttgggcatccctttaaagtgccccctacttctactccccatgtaagaggctttgtgccttgctaaggagcaaagggtagaaatcatgttgattttaaagaagtttttttaagacaattgttgacaatagtaaaagagatcaggaggaactaagaatctaaaacaagcctgaaggatgtccaactgtgtatttagaatttccgacattcttctctactggatctacacattggaccccatctgatcctttgctgcttttttggcttggtcaggtcctggcctcattttggcgttacctgtgtcagagttcaaggtggatgtgcttagagctggtcagccccttccagacctggacacgtctgtggctccttttctttcttccnnnnnnnnnnnnnnnnaaaaaaaaaaaaggttcagcagaaatcagcgtggctagttcacaaagaatttccagtatcagggaaaaacnnnnnnnnnnnnnnnnnnnnnnnnnnnnnnnnnnnnnnnnnnnnnnnnnnatacctataaaacagttactccttctctgaagggaaaggaaagtgctaggcagcctgtgattagcaacattctttgtgcttttttgatgaaactctgctctgacacaggactacgttggttgccttagaaatgtaatggttaaaaaccattgtaaaaatgaacggtgatttggctgactggaaaaaatacactgtcaggggactatatttgaagttagtctagacggggctgaactaggaacccacctggtcccaggagaccccacaggacctagtaggttccttgccgnaaggcagagttacagtgagagtggctcacctctgagctggtgaagggagacttgcctgtgaatgacccaggnatcgttgttgcttttgga

SEQ ID NO: 257840 - DNA, 300 bp, Homo Sapiens
ccacgtgcagaacaccccaggacccaacacttcactaaaaaacaagaacacatggacaccatgcctgacctcgaggtcccaccaacccactgccccaagcccaggaggaagcctctgtctccaccctgtacctgtatttgatgtcgaatactgtggagtcctcatcttcatcatcctcttcatttagtggcgccatttccactcgctctgctggagtggtgatgatatcatacttgcgtgtcttctttaacctctttcccgacctgaagacgcgcagcagcaggcaggcgatgaggagga

SEQ ID NO: 257841 - DNA, 1550 bp, Homo Sapiens
  misc_feature (4)..(4): n is a, c, g, or t
  misc_feature (37)..(38): n is a, c, g, or t
  misc_feature (101)..(101): n is a, c, g, or t
  misc_feature (107)..(107): n is a, c, g, or t
  misc_feature (120)..(120): n is a, c, g, or t
  misc_feature (216)..(216): n is a, c, g, or t
  misc_feature (274)..(274): n is a, c, g, or t
  misc_feature (438)..(438): n is a, c, g, or t
  misc_feature (793)..(793): n is a, c, g, or t
  misc_feature (874)..(874): n is a, c, g, or t
  misc_feature (917)..(917): n is a, c, g, or t
  misc_feature (1249)..(1249): n is a, c, g, or t
  misc_feature (1324)..(1324): n is a, c, g, or t
  misc_feature (1370)..(1370): n is a, c, g, or t
aggngtcctgtcagtcagtcatccaccaatagcctgnngggtccgagactcccgaccccattctgggcccgtcttttggcctccctgggcagcgcccaggnacaganggggccgcctgcngggctgagtgggctttgtatggggggcagcatggaaggctgcccgccaaggacaggccctgggttgagagggcctgggaaggtgccgccaggctangaggtcgggaagggcgcctgagcagacacgccagcatccgctgctaggtgctggccanggctggggccttggagctccgctgcttgttcatggcactcaggagctgctgcacatatgaggtcagcaggtcatccatcttatagcccagggaggtctcgcacagcaggcggctgccacggcccaggctccccagcgccatgtggaagtaggtgctgccgctgntccagctggagatcttggtgaagggataggtggtgagcaggtccttggtacttggaggtggatgagcagaaccccatgtcggttgatggcgatgaggatgacgtccgggtaggaaggctccgaggtttgcttcacctcgaagaaggcggatccgaaggtggggccaccggcagatccacttcaggaaggccaccttggcctcctccactgtcttgtccttatgcttgtcataggctagaaggatgctctttttccactcctccgaggacatcaggcgtgtgaggttctcaggcaccagttccctcaggatcttggggacactagccagctgggaccggtcgttgttgaactgggnccttgtagatgaggcccgccaggtggatggcatcctcccgcgaacacttgtggaatccgcgcaggtacttgggcagctccntggtggtaatggagtatggtgtctgcattcacatccttccctnggagatatgttgagccacaatttccgcatgaagtacacctggtaggggagcgtcacgggggccccttctttctggggcttgttcttcttcacccagtcagacacctccctcaaggaatcaaagaagaagtctccctccttctggctgatgaccttgtctgaaatcttgatgaagaggctgcagccctcccaggaggccagctgcagcctggtggcaatgctgtcacacacatcccgcacccgtgtgttggcaaccacctccagcatctcactggtgtcattggggaagtagatcttgtggcagatgcgggagacgttctgctctgcggcctncacctccacctggtgcgggggctgcttccggggccccgtcctcaggaccttttggattcggcggctgcagtcggnggccagcagcttccccctccgagtgtctataaactctgggcatggngcagcagccccttgctgggccggaagaggcccgtgcacagccacaggcagttgccagcccccgctctttcgtgtgcctgttggaagtggggcgttagcttgtttaggatctggcagtaaaccttgtcctggagagcccggttgctgaaggccagtgtgaaaaattggtgcggtgagcccc

SEQ ID NO: 257842 - DNA, 1645 bp, Homo Sapiens
  misc_feature (447)..(447): n is a, c, g, or t
  misc_feature (541)..(541): n is a, c, g, or t
  misc_feature (1021)..(1021): n is a, c, g, or t
  misc_feature (1109)..(1109): n is a, c, g, or t
  misc_feature (1334)..(1342): n is a, c, g, or t
cgcctcacacttccaaaaggcaggggcaggggcacctggcttccccagttgccctcgagggtaagggaggaaaaaagggctcctaccatttggtgggagtaacgcccctgggattaaacccagccagcccaatgacgcaacaggaaccagaggaagtacgggaaaatgaggcagaggggcaggcttggtggaaggcagcattctctggtacccaccacccctgcccagggctcagaagctttggccggggtccaaaggacaaggacaagggaggcttggctcacagatggggggcgggggtcacccatatcttcctccccactctgggactgactgacagccaagaaaccggcaggagctcacacagagctaatgctaaatgtcctcttacctctgggtggccctgggccccagggttctgaaggaaaagtgggcatggtaccctantactcattatggggactgaggctctccatgacctagggccctcagacccagggggaccaagggattcataggaattccctcccaaaaagcctgnttacccaaagacctggggcaggcagagagcagcagggaggaacgggaacagggcagggcgtgtggcatcgtacccacgctcacccacactggcccagcagcctcccgaggcctggcccaaggtcactcctcagtgaagtccctgtctatgtccatgtagggctcctcaatgtagctaacgagagcagagggtgactgccggtccgggttcaacaggatggacactgtctccttccagtatgagaagctgatgcaggagctctgggcaaagagggaggggctggggggcgcctggaggacccaggtcaagcccagcaccgggacacccctctgagaggccctgggtccgcggcccacccatcacccccttgaggggtggggcactcacgttctctaggcaggtgctgtccttgtccttgtgcaggtagtgctgctgccagaagcgcagcaggttgtggaagttgttgagcaggaagccggngtacttcttgctgtgctccatccgctgcagcagccgcaggtacaggggcagccgctctttccgtcgggccagcatcaggatcaccagngctggtgttgaggcagctgacgttcttctgcaggccccacagcccacagggtcaggggcttgtggaagccccagtggcccctggggaacctgggtagccctcaggcagggaggaaaggggccccaggccttggcccaccccaaaagctttcccttcccaaaggggaaaaaaggaatggggggaaggggggccccaagaagacccagttttccggaatgacaaccnnnnnnnnncccaaaggccaacttttcaacccaactggggggaaaaacccccgtgtctttgtaaaaactggggttaaaaaataacttttttccggaaggggcccccccaaagaagccttgtggcccttttttggggggcttttttccccttttaagagaggccttttaaaaatattttctcccccccttgggggagaagaaatttttcgcccactaacaggggccccccaccgggggggtcttcccaaaagggccacaaaccaccctttggggggggtaacaaccccctttctttaagaaaggggcgggggg

SEQ ID NO: 257843 - DNA, 886 bp, Homo Sapiens
  misc_feature (711)..(711): n is a, c, g, or t
  misc_feature (862)..(862): n is a, c, g, or t
accgatgcaaagttccaggtattcctgaagcagatcaacagctccctggtggactccaacatgctggtgcgctgtgtcactctgtccctggaccgatttgaaaaccaggtggatatgaaagttgccgaggtactgtctgaatgccgcctgctcgcctacatatcccaggtgcccacgcagatgtccttcctcttccgcctcatcaacatcatccacgtgcagacgctgacccaggagaacgtcagctgcctcaacaccagcctggtgatcctgatgctggcccgacggaaagagcggctgcccctgtacctgcggctgctgcagcggatggagcacagcaagaagtaccccggcttcctgctcaacaacttccacaacctgctgcgcttctggcagcagcactacctgcacaaggacaaggacagcacctgcctagagaacagctcctgcatcagcttctcatactggaaggagacagtgtccatcctgttgaacccggaccggcagtcaccctctgctctcgttagctacattgaggagccctacatggacatagacagggacttcactgaggagtgaccttgggccaggcctcgggaggctgctgggcccagtgtgggtgagcgtgggtacgatgccacacgccctgccctgttcccgttcctccctgctgctctctgcctgccccaggtctttgggtacaggcttggntggggaagggaagtcctagaagcccttgggtccccctgggtctgagggccctaggtcatggagagcctcagtccccataatgaggacagggtaccatgcccacctttccttcagaaccctggggcccagggccacccagaggtacgaggantttagcattagcctgtgtgagctc

SEQ ID NO: 257844 - DNA, 963 bp, Homo Sapiens
  misc_feature (812)..(828): n is a, c, g, or t
aaccggggtggggtggcgaattcggcacgaggcatcaacatcatccacgtgcagacgctgacccaggagaacgtcagctgcctcaacaccagcctggtgatcctgatgctggcccgacggaaagagcggctgcccctgtacctgcggctgctgcagcggatggagcacagcaagaagtaccccggcttcctgctcaacaacttccacaacctgctgcgcttctggcagcagcactacctgcacaaggacaaggacagcacctgcctagagaacagctcctgcatcagcttctcatactggaaggagacagtgtccatcctgttgaacccggaccggcagtcaccctctgctctcgttagctacattgaggagccctacatggacatagacagggacttcactgaggagtgaccttgggccaggcctcgggaggctgctgggccagtgtgggtgagcgtgggtacgatgccacacgccctgccctgttcccgttcctccctgctgctctctgcctgccccaggtctttgggtaccaggcttggtgggagggaagtccctagaagcccttggtcccccctgagtctgaggggcctaggtcatgggagagcctcagtcccccctaatgaggacagggtacccatgccaccctttccttcagaaaccctgggggcccaggggccacccaagaaggtaagaaggacattttagcattaagcctcctgtggtgagcctccctggccgggtttttctttgggcttgtcaaatccagatcccccaaaaggggggggaaagaaaacaaaatgggggtggannnnnnnnnnnnnnnnnatctggggaaacccaaagcccctccccttggtccccctgggcccttttggggaccccaaggcaacaagggctttccttgaaaccccctgtgggcaaggggtgtggatggggtataccccgggaaagaaagcggtt

SEQ ID NO: 257845 - DNA, 1569 bp, Homo Sapiens
  misc_feature (39)..(39): n is a, c, g, or t
  misc_feature (61)..(71): n is a, c, g, or t
  misc_feature (122)..(122): n is a, c, g, or t
  misc_feature (1456)..(1456): n is a, c, g, or t
  misc_feature (1458)..(1458): n is a, c, g, or t
cccccgaaccgggagaggtcaggtggtaatgaagtcaanccttgttattttgagacccaannnnnnnnnnnaaaaaacccacgagagtgggcggaaatgaaccttcccccccacatccagcncaaagacaagcttgtgcacacaccaatacgcataacttggctttcagagatagttcagagggtaaggggaagtgaagggactggggagggacaggggaagctgagtctttggctactgactcagtccctctggaatagcccctcttccctcagcttgagggaaagcagttctcctcctgcccccaccgcataagcctcttcaactcctgaggttggagcaatatctgagagtgggaagcggggaggagtgatgccaattatcaggtgtgggaggttaccaaggcaatccaatttgaataaattataaattaaaaataaataaaataacaagtggcccctgcccaggacagggaggcaacgctggcataacttgcctgggaacttgagaaaatctcagggtagctccagttcctccctactacctaagctggcctgggaaacccaagggaggggacaggcacatggagtacccgaagtagggcagggtgtagtaagaatcagaagctttaaacacccaaataatccatttgggcgtgagcatggtgagggctttaattcaagcctgaagggtctcttgctgtctctccatatatgttctctaagatggagcaggatgggcaggtcattagcccgcatgggttcagagtgctggcaatcagggcaaaggtgaataacgtggattatgaggggcctcggtcacagcctgcagttcgtaggggagccctgtgtccagctccaggctccggcgggaaaaaagcaggcggatatctccatgcaggcttaagcggcctgagcgggagctccggaacctgaggtgcagcaagtagcagaggaggcggtgggtggggttagcatttccctcctcacccacaggcaccaaaaagaggcgatggcgcaggaaggtcatgtgggcagcaggcatgtccgagaagtcaaaggtcacaaggaacatctttaccacagtctggttggggttaaataaggtcacttggacggtgcccaccttgggcacgctgtaacccttcctccccaaggggttcagatccacgatgcccaggaagggagccggggcattttgctcagaaacatcaaagaatgtgacagtgacaggcagcgtgacgtgctgggggcagtatgacccactagctccaatttctgctgtgaagccctcaatgtggccagatggtgcaaaacgtcctcgcagcaatgattcctcaaagttgcccagcagggtacggctgacagcaggggtaggaacaggggaggcactgggctcttcgctgttcagcttcgtgtgcaacactagcgggccctggcgcccgcagccccccagncnctgccgcgcccctccctgcgacggtccctccccggggccgccccggtccgcgccgccgactccactgcccctctgactcacaggccatttcctaccagctgatggggccgc

SEQ ID NO: 257846 - DNA, 1024 bp, Homo Sapiens
  misc_feature (14)..(14): n is a, c, g, or t
  misc_feature (24)..(24): n is a, c, g, or t
  misc_feature (29)..(30): n is a, c, g, or t
  misc_feature (35)..(35): n is a, c, g, or t
  misc_feature (38)..(38): n is a, c, g, or t
  misc_feature (50)..(50): n is a, c, g, or t
  misc_feature (68)..(68): n is a, c, g, or t
  misc_feature (71)..(71): n is a, c, g, or t
  misc_feature (85)..(85): n is a, c, g, or t
  misc_feature (91)..(91): n is a, c, g, or t
  misc_feature (143)..(143): n is a, c, g, or t
  misc_feature (185)..(185): n is a, c, g, or t
  misc_feature (355)..(386): n is a, c, g, or t
  misc_feature (654)..(707): n is a, c, g, or t
  misc_feature (767)..(767): n is a, c, g, or t
ccctcatatccacntatcactttnccctnntgccngantctgaaccaagngggctaatgaccgcccanccngctccttttagagnaacatntatggagagacagcaagagaccctccaggcttgaattaaagccctcacccangtcacgcccaaatggattatttgggtgtttaaagcttctgantcttactacaccctgccctacttcgggtactccatgtgcctgtcccctcccttgggtttcccaggccagcttaggtagtagggaggaactggagctaccctgagattttctcaagttcccaggcaagttatgccagcgttgcctccctgtcctgggcaggggccacttgnnnnnnnnnnnnnnnnnnnnnnnnnnnnnnnncaaattggattgccttggtaacctcccacacctgattattggcatcactcctccccgcttcccactctcagatattgctccaacctcaggagttgaagaggcttatgcggtgggggcaggaggagaactgctttccctcagctgagggaagaggggctattccagagggactgagtcagtagccaaagactcagcttcccctgtccttccccagtcccttcacttcccctaccctctgacctatctctgaaagccaagttatgcgtannnnnnnnnnnnnnnnnnnnnnnnnnnnnnnnnnnnnnnnnnnnnnnnnnnnnnatgcacacacacaggggttaaccacccctcacctagggctccacactccagttgtccctnctcctcctacctgtgtctccttgttttggggtcctgactgaagaaggtgtccagggggcagagtcagggccaagcactggggtgcctcctctcacctggccagactctgacccacctacctcagctggggtgaggggcacccctcaaactcagtcatgtggttccaaactaccccattccccactccagactctgacccagcctcagtcctaactcctggggctgggctgaggggaacaagcatttgctgaaacttg

SEQ ID NO: 257847 - DNA, 2786 bp, Homo Sapiens
  misc_feature (2491)..(2556): n is a, c, g, or t
aagcaggctggtaccggtccggaattcccgggatggccaggcttgtgttcgcagccttgccggggctggggttccgatgtggtccccggagcgggaggccgaggccccagccgggggagacccggcgggccttctgccccccgagtgggaggaggacgaggagcgcatgtccttcctgttctccgctttcaagaggagtcgcgaggtgaacagcaccgactgggacagcaagatgggcttctgggcgccgttggtgctgagccacagccgccgccagggggtggtgcgcctgcgtctgcgggacttgcaggaggcctttcagcgcaaggggagcgtcccgctggggctggccacggtgctgcaggacctgctgcgtcgaggggagctgcagcgggagtcagacttcatggccagtgtagacagcagctggatctcctggggggttggggtcttcctgctgaagcctctcaagtggactctttctaacatgctgggagataataaggttccagctgaggaggtccttgtcgctgtggagctgttgaaggaaaaggctgaggaggtgtatcgtctgtatcagaactcgcccctctcctcccaccccgtggtggccctgtcagagctcagcaccctctgtgctaactcctgcccagatgagaggaccttctacttggtgttgctgcagctgcagaaggagaagagggtcacagtcctcgagcagaacggggagaagattgtgaagtttgcccgagggccacgtgccaaggtctctccagtcaatgacgtagatgttggggtgtaccagctgatgcagagtgaacagcttctctcacgcaaagtggagtccttatcccaggaagcagagaggtgtaaagaagaagcccgccgggcatgccgagcaggaaagaagcagctggcactgaggtctctcaaggccaagcaacggacagagaagcgcatcgaggccttgcatgccaagctggacactgttcaaggcatcctggaccggatctatgcctcccagacagatcagatggtttttaacgcctaccaggctggggtaggagcacttcaaactctccatgaaggatgtcaccagtggagaaggcagagagcctcgtggatcagatccaagagctctgtgacacccaggatgaagtttctcagactctggctggtggggtaacaaatggcttagattttgacagtgaagaactggagaaggaattggacatcctccttcaggataccaccaaagaacctttggatctgcctgacaacccccgcaataggcattttaccaacagcgtgcctaaccctaggatctcagatgctgaacttgaagctgaacttgagaaactgtccttatcagagggaggtttggtcccaagcagtaaatctccaaaaaggcaattggaaccgactctaaagccattgtaggaccctcaagtgaaggaccctcatgtaaaagagagaccaggcttgctgggtgtgtacatagttatttaaacaagaaactctcagaatgtgtttggaagaggagaaaggagaaccactgattttatctggatgctactacttactacaggacagatagaatttctggaagcgatgctccaaaggcttgctcccagctgtatcatggacctgccttctcatctttatagtgccacgatttatacagtcctgtgtctgacctgtcatttcatagcctgcagttcttgccattggacacttagatttgtcttcacccaccagcttcgttccagcccatgaaggggaaagatttgcagctttgccaaatctgaatcagttcccactcccccctgtggttttttagaggggttttatcctgtcgctaatgtcagttaaatagcttattcctgtcccacttgatttcactggtaagaatgagaatgaaaaaggttttatttgaggggacttagctgccattttatggaaaaacatgtagtataaaaggtttttctccagggtcatttgacagaattctccaggtgttcagagaaagaggtcgccccaagtggcccagagtcgtgacagtccggaggggctggtgtggccggtgggcgctgcctcttcatctgatggagccaggaggtccgccggtgggggaaaggcttcttccgaggcttctgcactcgcctgggaagaggcccagtcactacaggaccctgagatgtccagaccccttatgcaaagaggcaaaattgttgccttggccccatcatggagtaacttaaaaatacatatctatcttccagaacaagccacacaacaacacacctcccctccttgagcctggcacacagcaccgggctctctgaatttggaaagtgtttcattttgtggcctactgctcggggcaggggggctgagccaggatgtgcaatagaagcaggggttgtcccctctgccagatctgtggggagctgcccaagccacccgtgcacctgtactcaatacaacaatnnnnnnnnnnnnnnnnnnnnnnnnnnnnnnnnnnnnnnnnnnnnnnnnnnnnnnnnnnnnnnnnnntgaatctactggcaatggcgagaagaagcgatcgccacactgccactctgctgcccagccaccaggatttctgcctggagccctttgccctgtccatgctgcctgaggtcgcgtcgagcagaggagaagaatttgctccaggacaggagcacaaatcgttgttcaatgaatttctctccaactcgaccttggtaaacggaaatcttgggggtgaagagaaacaatcacta

SEQ ID NO: 257848 - DNA, 430 bp, Homo Sapiens
ccagggggctgagccaggatgtgcaatagaagccaggggttgtcccctctgccaaaatctgtggggaagctgccccaggcccacccgtgcacctgtccctgccttcctgcagtcccccactccctgcctcctttgagggactgggggactcggggtagggggacagacgggaaagggtctgaatgctctggcaatggcgagaagaagcgatcgccacactgccactctgctgcccagccaccaggatttctgcctggagccctttgccctgtccctgctgcctgaggtggcgtagagcagaggagaagaatttgctccaggccaggagcacaaatcgttgttcaatgaatttctctccaactcgaccttggtaaacggaaatgttgggggtgaagagaaacaatcactattttttccttttttatctggt

SEQ ID NO: 257849 - DNA, 1582 bp, Homo Sapiens
  misc_feature (1427)..(1447): n is a, c, g, or t
  misc_feature (1494)..(1509): n is a, c, g, or t
gggaatttatgtgatatagaaccacgctgggctttaataaacaggcagcggctggtacggtccggaattcacgggatatcgtcgaccacgcgtcgggcgctgaagagaccggttgccgccatgatagaacagcagaagcgtaagggcccagagttgccgctggttccagtcaagcggcagcggcatgagttgctgttgggagcggggtctggcccaggagccgggcagcagcaggcgacgccgggagccttgctgcaagcgggacctccaagatgttcctcccttcaagccccaatcatgctgctctctggacatgaaggggaagtctactgctgcaagttccaccccaacggatccaccttagcatctgcaggatttgaccgactgatattactgtggaatgtctatggtgactgtgataactatgccacactgaagggacacagtggagcagtgatggaattgcattacaacacagatggcagtatgcttttctcagcatccacagataaaaccgtggctgtgtgggatagtgaaacaggtgagagggttaaaaggctaaagggacatacttcctttgtgaattcctgttatccagccaggagaggccctcagcttgtctgcactggcagtgacgatggcacagttaagctttgggacatccggaagaaagcagccatccagacatttcagaacacgtaccaggtgttagctgtgaccttcaatgacacaagtgatcagattatttctggtggaatagacaatgatatcaaggtctgggacctgcgccagaacaagctaacctacaccatgagaggccatgcagattcagtgactggcctgagtttaagttctgaaggctcttatcttttgtccaatgcaatggacaatacagttcgtgtctgggatgtctggccatttgcccccaaagagagatgtgtaaagatatttcaaggaaatgtgcacaactttgaaaagaaccttctgagatgttcttggtcacctgatggaagcaaaatagcagctggctcagccgacaggtttgtttatgtgtgggataccacaagcaggagaatattgtataagctgcccggccatgctggctccatcaatgaagtggctttccaccctgatgagcccatcattatctcagcatcgagtgacaagagactgtatatgggagagattcagtgaagatatggactggaagactccaaggccgcttgtctttgagacctcagactgcataagtgatgccaaatgttggatgtccaggctagcaccctcccttcagatgaccattgctagcaagaaacaggaggcggtggccatattccaaaaaccacttctgtcccatttcaccaggatgactaaggcaagctccctgtggcctctaaaaaccacctgccagatttcagggactgtgnnnnnnnnnnnnnnnnnnnnncctgttttctaatgcaggcccaatgtgacaaatatgttggttgggannnnnnnnnnnnnnnngaactggcttgtatgatattacctttctgatttctctatatatttcgtattaaaagcaaatagatgccttttt

SEQ ID NO: 257850 - DNA, 1499 bp, Homo Sapiens
  misc_feature (84)..(144): n is a, c, g, or t
  misc_feature (441)..(449): n is a, c, g, or t
tacaaaaacatggtgtgagagccatgggatcctcgggccagcccccttcccgcacttgagccccgggcccccctaatttgccannnnnnnnnnnnnnnnnnnnnnnnnnnnnnnnnnnnnnnnnnnnnnnnnnnnnnnnnnnnntcagggaagaccttcctgggcctccctttctccctatccccaatctagaaatttagtgggggtcgcggttcatggccatggcaggaggtggggcagatgggtgtcggcagatttagtgtttggcaaccagtggggctgggggtgggatctgggagggagccgaggggcctggggaagggaaaagatcttggaccctgccccggcccataggacactcaaaaacactttataaaaattggggccacagagtagaagaaaaacgagtcatcagaatcaaaaactaaagagtggaaagannnnnnnnncttgtctaaaaggcaaaaaactacaaacagcccaagtcctgagctccccaagacctggatcctccactgtccccctgaaacccggcaggaggcgggatggggagcacaagaggtgggttcttaaaaaagtcacccctggatgggaaagctcttcatcttctgccgccttcctctgcctcccgctgctgccgaggagagagatggagaggaccggggctatgccggcaaactcaacttcttcccctttaggactttggtgatatagaggtagaagaaatcgcagtagaggactgtctggaccaggcctgccacaatggcgatgaggtcgaagaagccctcgaaatggtagcgccagatccagttgaagagatagagcgtgcggtaaacgcctagcgcaaacaagtagtggctggtgatggtctccgcctcgccggtcttgctcaccatgaacagctgcggcaagatggccactgactccaggtagatggagaaggtccagaggatctccagaggggtgaagtcatgattgaccaggaacgccagaatggctgtgggaacgaccaggaactccactctgaacgtgtcatggttcccatcgtaagtagctttgaacttgctataaatcaaccagaccgtggtgaaggagcaggctatgtagaccaccttcatacacgtgttgtagagtgagatgtagttggtgaagaggtccagatatcgggcagtgaacaccacagcaaacaggacctggctcttccctgaaattccggcgcacgagcgggacttccagattttgagcagtagcaagatgatggcgaggaggtgggagaggtctcccaggaatcggaagagattcatggctggggaaccctggcagggctgagcgggagggaggcaggctggcgggggggtgccccccgaggctgctggtctgaacgggtagctgggctggggggacggaagagggaccctaggtgcgctccgctccggggaggggactttgggagggggagcaaaggctggagctggcggcggagctggagccgggaagag

SEQ ID NO: 257851 - DNA, 952 bp, Homo Sapiens
tcctaggtagcgaggcctgggtggcgaattcggcacgaggcccaaagtcccctccccggagcggagcgcacctagggtccctcttccgtccccccagcccagctacccgttcagaccagcagcctcggggggcacccccccgccagcctgcctccctcccgctcagccctgccagggttccccagccatgaatctcttccgattcctgggagacctctcccacctcctcgccatcatcttgctactgctcaaaatctggaagtcccgctcgtgcgccggaatttcagggaagagccaggtcctgtttgctgtggtgttcactgcccgatatctggacctcttcaccaactacatctcactctacaacacgtgtatgaaggtggtctacatagcctgctccttcaccacggtctggttgatttatagcaagttcaaagctacttacgatgggaaccatgacacgttcagagtggagttcctggtcgttcccacagccattctggcgttcctggtcaatcatgacttcacccctctggagatcctctggaccttctccatctacctggagtcagtggccatcttgccgcagctgttcatggtgagcaagaccggcgaggcggagaccaatcaccagccactacttgtttgcgctaagcgtttacccgcacgctctatctcttcaactgggatctggcgctaccatttgcgagggcttcttacaactcatcgccattgtggcaaggctggtcccaaacagtcccctacggcaatttcttccacctctatatcacaaagtccctaaaggggaaaaaagttgaagtttgccgggataaccccggggcctctccaatttctctcctcgggaagcaacggggaaggcaaaggaaaggcggcaacacaatgaaaaacttttccccatccgagggggggactttttttaagaacccccccc

SEQ ID NO: 257852 - DNA, 1051 bp, Homo Sapiens
  misc_feature (967)..(975): n is a, c, g, or t
tgggtggcgaattcggcacgaggcccaaagtcccctccccggagcggagcgcacctagggtccctcttccgtccccccagcccagctacccgttcagaccagcagcctcggggggcacccccccgccagcctgcctccctcccgctcagccctgccagggttccccagccatgaatctcttccgattcctgggagacctctcccacctcctcgccatcatcttgctactgctcaaaatctggaagtcccgctcgtgcgccggaatttcagggaagagccaggtcctgtttgctgtggtgttcactgcccgatatctggacctcttcaccaactacatctcactctacaacacgtgtatgaaggtggtctacatagcctgctccttcaccacggtctggttgatttatagcaagttccaaagctacttacgatgggaaccatgacacgttcagagtggagttcctggtcgctcccacagccattctggcgttcctggtcaatcatgacttcaccccctctggagaacctctggaccttctccatctacctgggagtcaggggccattcttggccgcaactgttcatgggggagcaagaaccggggaaggggggagaccatccaccagccaactactttgttttgccgctaaggccatttacccgcacggctcctttcttcttccaactggggaccctggccgctcaccattttgaagggggttccttccaaccccctttcgcccatttgggggagaggcccgggggcccaaaaagagaccccccaatggggggtcccccccaacctcctaaatgcacccaccggcccctaaagggggaaagacgctcggggtcctgccggcgaatacccccgcgggccctcaccatctctcttgccctcgggagccccccgcgaagggcacacgggacggggcggtgaagaaaaaacacaaagctcttcccccactcnnnnnnnnnacctttcatttaaaaacaccgcacctcgtggtgtaggaccactctgggcaattcagcgagcagattcaacaagggg

SEQ ID NO: 257853 - DNA, 852 bp, Homo Sapiens
  misc_feature (722)..(722): n is a, c, g, or t
  misc_feature (765)..(765): n is a, c, g, or t
  misc_feature (775)..(775): n is a, c, g, or t
  misc_feature (820)..(820): n is a, c, g, or t
  misc_feature (837)..(837): n is a, c, g, or t
gtagcgaggcctgggtggcgaattcggcacgaggggaagtcccgctcgtgcgccggaatttcagggaagagccaggtcctgtttgctgtggtgttcactgcccgatatctggacctcttcaccaactacatctcactctacaacacgtgtatgaaggtggtctacatagcctgctccttcaccacggtctggttgatttatagcaagttcaaagctacttacgatgggaaccatgacacgttcagagtggagttcctggtcgttcccacagccattctggcgttcctggtcaatcatgacttcacccctctggagatcctctggaccttctccatctacctggagtcagtggccatcttgccgcagctgttcatggtgagcaagaccggcgaggcggagaccatcaccagccactacttgtttgcgctaggcgtttaccgcacgctctatctcttcaactggatctggcgctaccatttcgagggcttcttcgacctcatcgccattgtggcaggcctggtccagacagtcctctactgcgatttcttctacctctatatcaccaaagtcctaaaggggaagaagttgagtttgccggcatagccccggtcctcttccatctctcttccttcgggcaggcagcggggagggcaggagggaagggcgggcagaaaggatggaaggagctttttccccattccaggggggtggacttttttttnaaaggaaaccccaccttttttgttggtttcccccattccccgnctttccttgnccgggttttcagggggggaacagtgggaaggattccagggttttngggggagttcagggatnttggggttgttttgt

SEQ ID NO: 257854 - DNA, 1109 bp, Homo Sapiens
  misc_feature (187)..(260): n is a, c, g, or t
  misc_feature (268)..(386): n is a, c, g, or t
  misc_feature (452)..(503): n is a, c, g, or t
  misc_feature (578)..(586): n is a, c, g, or t
  misc_feature (753)..(803): n is a, c, g, or t
catagtaatttttttccccagagtttgaattttttggtcttctcctggttttttggcaaattaggggggcccggggctcaagtgcgggaagggggctggcccgaggatcccatggctctcacaccatgtttttgtacagaactgatggttgaatctttgttctcttgaaataaacagaagaaaatgnnnnnnnnnnnnnnnnnnnnnnnnnnnnnnnnnnnnnnnnnnnnnnnnnnnnnnnnnnnnnnnnnnnnnnnnnnctatttannnnnnnnnnnnnnnnnnnnnnnnnnnnnnnnnnnnnnnnnnnnnnnnnnnnnnnnnnnnnnnnnnnnnnnnnnnnnnnnnnnnnnnnnnnnnnnnnnnnnnnnnnnnnnnnnnnnnnntagggacccgacactggccttcccttttttcaaaaaaaaccctgtcatgactactgggttggtttnnnnnnnnnnnnnnnnnnnnnnnnnnnnnnnnnnnnnnnnnnnnnnnnnnnnaagggagcttctgggggccactcccggcgttttttctaaggggggcccgcccgggcacccgcattatccaaattnnnnnnnnnggccctgggcggccttctatatacagaaatgggggtgggagaactcccatcagaggaccacttttcccccccgcagagttagtgacacgccctccctaaaaaaacgcggccgccccggtaggaaaacctcctcataaaccgaccccgtcgtcggccgccttccaccnnnnnnnnnnnnnnnnnnnnnnnnnnnnnnnnnnnnnnnnnnnnnnnnnnnccccgtgggagaaaccacagtggggcgcaaacaaaacaactctgccccacacctcgtgtttcccccctctcttttaccccgcccacaccggtggcgacatttctccccccccgacgccttctggcgactgaaacacacccaaaaacacttcgctctccaaaagaaacaccctttttttggggacaaacgcgggcccccgctcttctcttctctacttacaccaccccatttcttcgccccgatttcttttttgaccacatcccgccctttatatgcccgcgcgcggtatatctctatctacaggag

SEQ ID NO: 257855 - DNA, 437 bp, Homo Sapiens
  misc_feature (72)..(122): n is a, c, g, or t
  misc_feature (239)..(239): n is a, c, g, or t
  misc_feature (254)..(315): n is a, c, g, or t
ctactctgtggccccaatttttataaagtgtttttgagtgtcctatgggccggggcagggtccaagatcttnnnnnnnnnnnnnnnnnnnnnnnnnnnnnnnnnnnnnnnnnnnnnnnnnnnctggttgccaaacactaaatctgccgacacccatctgccccacctcctgccatggccatgaaccgcgacccccactaaatttctagattggggatagggagaaagggaggcccaggnaaggtctcccctgannnnnnnnnnnnnnnnnnnnnnnnnnnnnnnnnnnnnnnnnnnnnnnnnnnnnnnnnnnnnnggcaaattaggggggcccggggctcaagtgcgggaagggggctggcccgaaggatcccatggctctcacaccatgtttttgtacagaactgatggttgaatctttggttctcttgaaataaa

SEQ ID NO: 257856 - DNA, 2160 bp, Homo Sapiens
  misc_feature (486)..(486): n is a, c, g, or t
  misc_feature (490)..(490): n is a, c, g, or t
  misc_feature (1604)..(1604): n is a, c, g, or t
ggcctcctccgcgcagtccctgagtcccgcagccctgcgtccccgctgcacacccccgtccactcccgtggtccccggtccggcatggcgcgcgcggtggggcccgagcggaggctgctggccgtctacaccggcggcaccattggcatgcggagtgagctcggcgtgcttgtgcccgggacgggcctggctgccatcctgaggacactgcccatgttccatgacgaggagcacgcccgagcccgcggcctctctgaggacaccctggtgctaccgtgagtgtgggctcctcccagtcccggacagggcatggctgctgaggggcaccgatcctgaggctgggcactgctggccaggcccacgtgagccatttgctcacccctgtctctaaaatcccctcagcttacagggctttaggactgaccagcagtcgccttccaccagagcctgaacctctgagggttccccgtgcctggtcccaccttncctncccaccctcctcccacacccccagccaggctgcttcggcaagtgtgatgagggcgccccgtctagggatcctgtatatcaggagccagctggcccaggtggccttgcccccagcatagaggtccttccatttctcagctctgggcccagctccctgatgtcccccacagctggggggtgagctgggagttgccctcgtggtggctgaccaccacagccgccacaggcgagcctcctgcaagcatcctctcctgcctgggggatggctggtcccagcccccctcttcgagctggtgtgggaagaagactgctgggagtggcccatcctgacccacgtccttgcctctgtggggagctccaggtggaaggggggccgggccccgtacctgggatgctgagaacttgctatgtgcggagcccttggcgtaggggccccagctctgccagaggggaacagagcgggtcagggcatttagagcaggaggaggtgcagagcgggagcctgctgttccgcctcctgctgtttctgtcccgcagcccggccagccgcaaccagaggattctctacaccgtgctggagtgccagcccctcttcgactccagtgacatgaccatcgctgagtgggtttgccttgcccagaccatcaagaggcactacgagcagtaccacggctttgtggtcatccacggcaccgacaccatggcctttgctgcctcgatgctgtccttcatgctggagaacctgcagaagactgtcatcctcactggggcccaggtgcccatccatgccctgtggagcgacggccgtgagaacctgctgggggcactgctcatggctggccagtatgtgatcccagaggtctgccttttcttccagaatcagctgtttcggggcaaccgggcaaccaaggtagacgctcggaggttcgcagctttctgctccccgaacctgctgcctctggccacagtgggtgctgacatcacaatcaacagggagctgtgcggaaggtggacgggaaggctgggctggtggtgcacagcagcatggagcaggacgtgggcctgctgcgcctctaccccgggatccctgccgccctggggtcggcccttctgcnagcctcccctgaagggcgtggtcatgaagaccttccgttcagggaacggacccaccaagcccgacctgctgcaggagctgcgggtggccaccgagcgcggcctggtcatcgtcaactgtacccactgcctccagggggctgtgaccacagactatgcagctggcatggccatggcgggagccggcgtcatctcaggcttcgacatgacatcggaggccgccctggccaagctatcgtatgtgctgggccagccagggctgaggctggatgtcaggaaggagctgctgaccaaggaccttcggggggagatgacgccaccctcggtggaagagcgccggccctcactgcagggcaacacgctgggcggtggggtctcctggctcctcagtctgagcggcagccaggaggcagatgccctgcggaatgccctggtgcccagcctggcctgtgctgctgcccacgccggtgacgtggaggcgctgcaggcgcttgtggagctgggcagtgacctgggcctggtggactttaacggccaaaccccactgcacgcggccgc

SEQ ID NO: 257857 - DNA, 1199 bp, Homo Sapiens
  misc_feature (258)..(258): n is a, c, g, or t
  misc_feature (296)..(296): n is a, c, g, or t
  misc_feature (539)..(539): n is a, c, g, or t
tgctggaggaggtgaggcgtcggcagggggcaggtcttcacaacagcagaggcccaggcccgggtacaggctccgtagtctcctgggacatggtcccgacccacggatggctgggggtggtctgaaaaggtcctggccctggggaggtggcttcctcgctgctgactgccgagggggccctggcctggatccatgctgggcagaagcagctggacactgaccaggaccccccagggccggaggaaccaagcttgacanccccccagacaatacacagagcctggacccagacgagncctccccacccccccatctttgtccccaccaggacaaagagctcttgccagtcttcccactggccagtggtccagctgtccccctagttctcctgccagggaccccaaggctgggaccaccccgccagcctgatgccccaggcacccactctgcggcaagcttttctgccacggcagcccccctctagtggacacttggagccctgccgcggaggcgggggctggaggcttgtggagcccttncccaggggtcctcccctagaccccggtggagcagagagggcgggggccggcccagggtcactgcccttctgcacccacagaagctgcagctggtgctggccccactgcacagcctggcctcgcaggcactggagcatgggctcccggaccccggcagcctcctgggtgcactccttccagcagctcggccgcatcgactccctgagcgagcagatttccttcctggaggagcagctggggtcctgctcctgcaagaaaagactcgtgactgcccagcgccccaggctggactgagcccctcacgccgccctgcagcccccatgcccctgcccaacatgctgggggtccagaaaccacctcggggtgactgagcggaaggccaggcagggccttcctcctcttcctcctccccttcctcgggaggctccccagaccctggcatgggatgggctgggatcttctctgtgaatccacccctggctacccccaccctggctaccccaacggcatcccaaggccaggtgggccctcagctgagggaaggtacgagctccctgctggagcctgggacccatggcacaggccaggcagcccggaggctgggtggggcctcagtggggctgctgcctgacccccagcacaataaaaatgaaacgtgaa

SEQ ID NO: 257858 - DNA, 1311 bp, Homo Sapiens
ggtccggaattcccgggataaaacgccctctgcggtgaaggagagaccacactgccatgcctccctctgggccccgaggaaccctccttctgttgccgctgctgctgctgctcctgcttcgcgccgtgctggctgtccccctggagcgaggggcgcccaacaaggaggagacccctgcgactgagagtcccgacacaggcctgtactaccaccggtacctccaggaggtcatcgatgtactggagacggatgggcatttccgagagaagctgcaggctgccaatgcggaggacatcaagagcgggaagctgagccgagagctggactttgtcagccaccacgtccgcaccaagctggatgagctcaagcgacaggaggtgtcacggctgcggatgctgctcaaggccaagatggacgccgagcaggatcccaatgtacaggtggatcatctgaatctcctgaaacagtttgaacacctggaccctcagaaccagcatacattcgaggcccgcgacctggagctgctgatccagacggccacccgggaccttgcccagtacgacgcagcccatcatgaagagttcaagcgctacgagatgcttaaggaacacgagagacggcgttatctggagtcactgggagaggagcagagaaaggaggcggagaggaagctggaagagcaacagcgccggcaccgcgagcaccctaaagtcaacgtgcctggcagccaagcccagttgaaggaggtgtgggaggagctggatggactggaccccaacaggtttaaccccaagaccttcttcatactgcatgatatcaacagtgatggtgtcctggatgagcaggagctggaggcactcttcaccaaggagctggagaaagtgtacgacccaaagaatgaggaggacgacatgcgggagatggaggaggagcgactgcgcatgcgggagatgtgatgaagaatgtggacacaaccaggaccgcctcgtgaccctggaggagtttctcgcatccactcaaaaggaggaatttggggacaccggggagggctgggaaacaatgagatgcacccttgctacacccagaaaaactgaggccttttaagagaactgcttgcccgggaggagagctaattgcaaggcccagcgcctaaacaggaaacagaggtttctggggggcccagggccgcctggaggcccaaaagaaaaattgcaaaggcttttctttccttggaccaccgaggcccacctcatctatagaagggcccaagggcccgtttgccaccctggggggagttaagttcacccaaca

SEQ ID NO: 257859 - DNA, 1523 bp, Homo Sapiens
  misc_feature (1410)..(1410): n is a, c, g, or t
  misc_feature (1439)..(1439): n is a, c, g, or t
  misc_feature (1444)..(1444): n is a, c, g, or t
  misc_feature (1452)..(1452): n is a, c, g, or t
  misc_feature (1455)..(1455): n is a, c, g, or t
ctcggagccgttgggtcggttcctgctattccggcgcctccactccgtcccccgcgggtctgctctgtgtgccatggacggcattgtcccagatatagccgttggtacaaagcggggatctgacgagcttttctctacttgtgtcactaacggaccgtttatcatgagcagcaactcggcttctgcagcaaacggaaatgacagcaagaagttcaaaggtgacagccgaagtgcaggcgtcccctctagagtgatccacatccggaagctccccatcgacgtcacggagggggaagtcatctccctggggctgccctttgggaaggtcaccaacctcctgatgctgaaggggaaaaaccaggccttcatcgagatgaacacggaggaggctgccaacaccatggtgaactactacacctcggtgacccctgtgctgcgcggccagcccatctacatccagttctccaaccacaaggagctgaagaccgacagctctcccaaccaggcgcgggcccaggcggccctgcaggcggtgaactcggtccagtcggggaacctggccttggctgcctcggcggcggccgtggacgcagggatggcgatggccgggcagagccccgtgctcaggatcatcgtggagaacctcttctaccctgtgaccctggatgtgctgcaccagattttctccaagttcggcacagtgttgaagatcatcaccttcaccaagaacaaccagttccaggccctgctgcagtatgcggaccccgtgagcgcccagcacgccaagctgtcgctggacgggcagaacatctacaacgcctgctgcacgctgcgcatcgacttttccaagctcaccagcctcaacgtcaagtacaacaatgacaagagccgtgactacacacgcccagacctgccttccggggacagccagccctcgctggaccagaccatggccgcggccttcggcctttccgttccgaacgtccacggcgccctggcccccctggccatcccctcggcggcggcggcagctgcggcggcaggtcggatcgccatcccgggcctggcgggggcaggaaattctgtattgctggtcagcaacctcaacccagagagagtcacaccccaaagcctctttattcttttcggcgtctacggtgacgtgcagcgcgtgaagatcctggtcaataagaaggagaacgccctagtgcagatggcggacggcaaaccaggcccagctggccatgagccacctgaacgggcacaagctgcacgggaaagcccatccgcatcacgctctcgaagcaccagaacgtgcagctgccccgcgagggccaagaggaccaaggcctgaccaaggactacgggaactcacccctgcaccgtttaagaagccgggctcaggacttncagaacatattccgccttgggcacgctgnacctntcaacatncgnccttagtttcgaggagatctaaggcctgtttccacatgggggcgtcgtaaagaatcagagtctccgaa

SEQ ID NO: 257860 - DNA, 932 bp, Homo Sapiens
tcggaatgacggcattgtcccagatatagcccctggtacaaagcggggatctgacgagcttttctctacttgtgtcactaacggaccgtttatcatgagcagcaactcggcttctgcagcaaacggaaatgacagcaagaagttcaaaggtgacagccgaagtgcaggcgtcccctctagagtgatccacatccggaagctccccatcgacgtcacggagggggaagtcatctccctggggctgccctttgggaaggtcaccaacctcctgatgctgaaggggaaaaaccaggccttcatcgagatgaacacggaggaggctgccaacaccatggtgaactactacacctcggtgacccctgtgctgcgcggccagcccatctacatccagttctccaaccacaaggagctgaagaccgacagctctcccaaccaggcgcgggcccaggcggccctgcaggcggtgaactcggtccagtcggggaacctggccttggctgcctcggcggcggccgtggacgcagggatggcgatggccgggcagagccccgtgctcaggatcatcgtggagaacctcttctaccctgtgaccctggatgtgctgcaccagattttctccaagttcggcacagtgttgaagatcatcaccttcaccaagaacaaccagttccaggccctgctgcagtatgcggaccccgtgagcgcccagcacgccaagctgtcgctggacgggcagaacatctacaacgcctgctgcacgctgcgcatcgactttttcaagctcacccagccctaacggtcaagtacaacaatggacaagaagccggggactacacaccgcccagaacctgcccttcccgggggacagcccagcccctcgcctggaaccacgaccatgggcccggcgggcctttcgggggcaacctggggat

SEQ ID NO: 257861 - DNA, 949 bp, Homo Sapiens
aggctggaccggtccggaatcccgggattgagtctataactcggagccgttgggtcggttcctgctattccggcgcctccactccgtcccccgcgggtctgctctgtgtgccatagacggcattgtcccagatatagccgttggtacaaagcggggatctgacgagcttttctctacttgtgtcactaacggaccgtttatcatgagcagcaactcggcttctgcagcaaacggaaatgacagcaagaagttcaaaggtgacagccgaagtgcaggcgtcccctctagagtgatccacatccggaagctccccatcgacgtcacggagggggaagtcatctccctggggctgccctttgggaaggtcaccaacctcctgatgctgaaggggaaaaaccaggccttcatcgagatgaacacggaggaggctgccaacaccatggtgaactactacacctcggtgacccctgtgctgcgcggccagcccatctacatccagttctccaaccacaaggagctgaagaccgacagctctcccaaccaggcgcgggcccaggcggccctgcaggcggtgaactcggtccagtcggggaacctggccttggctgcctcggcggcggccgtggacgcagggatggcgatggccgggcagagccccgtgctcaggatcatcgtggagaacctcttctaccctgtgaccctggatgtgctgcaccagattttctccaagttcgggacaggtgtttgaagatcatcacccttcaccaagaacaaccagttccaggcccctgctgcagtatgccggaccccggtgagcgcccaacacgcccaagctggtcccttggacggggcagaaacatcctacaacgcctgcctggaacgctgtgccatcgaacttttttccaaacctcaccaagccctccacggtcaagggacaaacaatggacaa

SEQ ID NO: 257862 - DNA, 1424 bp, Homo Sapiens
  misc_feature (1322)..(1322): n is a, c, g, or t
  misc_feature (1373)..(1373): n is a, c, g, or t
aacggcagtaactccagggttcaaggtagcgaggcctgggtggcgaattcggcacgaggagaacgtgcagctgccccgcgagggccaggaggaccagggcctgaccaaggactacggcaactcacccctgcaccgcttcaagaagccgggctccaagaacttccagaacatattcccgccctcggccacgctgcacctctccaacatcccgccctcagtctccgaggaggatctcaaggtcctgttttccagcaatgggggcgtcgtcaaaggattcaagttcttccagaaggaccgcaagatggcactgatccagatgggctccgtggaggaggcggtccaggccctcattgacctgcacaaccacgacctcggggagaaccaccacctgcgggtctccttctccaagtccaccatctaggggcacaggcccccacggccgggccccctggcgacaacttccatcattccagagaaaagccactttaaaaacagctgaagtgaccttagcagaccagagattttatttttttaaagagaaatcagtttacctgtttttaaaaaaattaaatctagttcaccttgctcaccctgcggtgacagggacagctcaggctcttggtgactgtggcagcgggagttcccggccctccacacccggggccagaccctcggggccatgccttggtggggcctgtgtcgggcgtggggcctgcaggtgggcgccccgaccacgacttggcttccttgtgccttaaaaaacctgccttcctgcagccacacacccacccggggtgtcctggggacccaaggggtgggggggtcacaccagagagaggcagggggcctggccggctcctgcaggatcatgcagctggggcgcggcggccgcggctgcgacaccccaaccccagccctctaatcaagtcacgtgattctcccattcaccccgaccccagggccttcccttctgaccccaggcagggctaccacgctgctccagctgcggaactggtcgacataatctctgtatcatatactttgcagttgcagacgtctgtgcctagcaatatttccagttgaacaaatattctaatcttttttcatttatatgcaaaagaaatagttataagtaactttttatagcaagatgatacaatggtatgagtgtaatctaaacttccttgtggtattaccttgtatgctgttacttttattttattccttgtaattaagtcacagggcaggacccagtttccagagagcaggcggggcccgcccagtgggttcaggcacaaggaagccccggttcctatcttaanaagcccctgaggcttcagggaagggggcgggcggtgttcccccgccttctngcatccgccttccgggttggcctttacaccacagcctttcaacttgggagc

SEQ ID NO: 257863 - DNA, 1309 bp, Homo Sapiens
ccccccacccttgggtccccaggacacccgggtgggttgtgctgcaggaaggcaggttttttaaggcacaaggaagccaagtcgtggtcggggcgcccacctgcaggccccacgcccgacacaggccccaccaaggcatggccccgagggtctggccccgggtgtggagggccgggaactcccgctgccacagtcaccaagagcctgagctgtccctgtcaccgcagggtgagcaaggtgaactagatttaatttttttaaaaacaggtaaactgatttctctttaaaaaaataaaatctctggtctgctaaggtcacttcagctgtttttaaagtggcttttctctggaatgatggaagttgtcgccagggggcccggccgtgggggcctgtgcccctagatggtggacttggagaaggagacccgcaggtggtggttctccccgaggtcgtggttgtgcaggtcaatgagggcctggaccgcctcctccacggagcccatctggatcagtgccatcttgcggtccttctggaagaacttgaatcctttgacgacgcccccattgctggaaaacaggaccttgagatcctcctcggagactgagggcgggatgttggagaggtgcagcgtggccgagggcgggaatatgttctggaagttcttggagcccggcttcttgaagcggtgcaggggtgagttgccgtagtccttggtcaggccctggtcctcctggccctcgcggggcagctgcacgttctggtgcttcgagagcgtgatgcggatgggcttcccgtgcagcttgtgcccgttcaggtggctcatggccagctgggcctggttgccgtccgccatctgcactagggcgttctccttcttattgaacaggatcttcacgcgctgcacgtcaccgtagacgccgaaaagaataaagaggctttggggtgtgactctctctgggttgaggttgctgaccagcaatacagaatttcctgcccccgccaggcccgggatggcgatccgacctgccgccgcagctgccgccgccgccgaggggatggccaggggggccagggcgccgtggacgttcggaacggaaaggcctgcagcttgaggaatggcaaaggtgggagggaaaccagctcctgcatacggagaggctgagattataccaggtgcaccgaaggccgcggccatggtctggtccagcgagggctggctgtccccggaaggcaggtctgggcgtgtgtaatccccgcttcttggcatttgttggggggggcgcagggttgttatggaaccaaaaggggt

SEQ ID NO: 257864 - DNA, 1249 bp, Homo Sapiens
aaggtagcgaggcctgggtggcgaattcggcacgagggtcgggcgtggggcctgcaggtgggcgccccgaccacgacttggcttccttgtgccttaaaaaacctgccttcctgcagccacacacccacccggggtgtcctggggacccaaggggtgggggggtcacaccagagagaggcagggggcctggccggctcctgcaggatcatgcagctggggcgcggcggccgcggctgcgacaccccaaccccagccctctaatcaagtcacgtgattctcccttcaccccgcccccagggccttcccttctgcccccaggcgggctccccgctgctccagctgcggagctggtcgacataatctctgtattatatactttgcagttgcagacgtctgtgcctagcaatatttccagttgaccaaatattctaatcttttttcatttatatgcaaaagaaatagttttaagtaactttttatagcaagatgatacaatggtatgagtgtaatctaaacttccttgtggtattaccttgtatgctgttacttttattttattccttgtaattaagtcacaggcaggacccagtttccagagagcaggcggggccgcccagtgggtcaggcacagggagccccggtcctatcttagagcccctgagcttcagggaaggggcgggcgtgtcgccgcctctggcatcgcctccggttgccttacaccacgccttcacctgcagtcgcctagaaaacttgctctcaaacttcagggttttttcttccttcaaattttggaccaaagtctcatttctgtgttttgcctgcctctgatgctgggacccggaaggcgggcgctcctcctgtcttctctgtgctctttctaccgcccccgcgtcctgtcccgggggctctcctaggatcccctttccgtaaaagcgtgtaacaagggtgtaaatatttataattttttatacctgttgtgagacccgaggggcggcggcgcggttttttatggtgacacaaatgtatattttgctaacagcaattccaggctcagtattgtgaccgcggagccacaggggaccccacgcacattccgttgccttacccgatggcttgtgacgcggagagaaccgattaaaaccgtttgagaaactcctcccttgtctagccctgtgttcgctgtggacgctgtagaggcaggttggccagtctgtacctggacttcgaataaatcttctgtatcctcaaa

SEQ ID NO: 257865 - DNA, 460 bp, Homo Sapiens
  misc_feature (29)..(29): n is a, c, g, or t
  misc_feature (284)..(284): n is a, c, g, or t
  misc_feature (434)..(434): n is a, c, g, or t
gatacagaagatttattcgaagtccaggnacagactggccaacctgcctctacagcgtccacagcgaacacagggctagacaagggaggagtttctcaaacggttttaatcggttctctccgcgtcacaagccatcgggtaaggcaacggaatgtgcgtggggtcccctgtggctccgcggtcacaatactgagcctgggaattgctgttagcaaaatatacatttgtgtcaccataaaaaaccgcgccgccgcccctcgggtcttcacaacaggtataaaaanttataaatatttacacccttgttacacgtttttacggaaaggggatcctagggagagcccccggggacagggacggcgggggcggttaggaaaggaggcacaggagaaggacagggagggagccgcccgtctttcccgggtccccaggcnttcagagggcagggcaaaaacacagg

SEQ ID NO: 257866 - DNA, 1849 bp, Homo Sapiens
tgggaacgtagctggtcgcagagggcaccagcggctgcaggacttcaccaagggaccctgaggctcgtgagcagggacccgcggtgcggttatgctgggggctcagatcaccgtagacaactggacactcaggaccacgccatggaggagctgcaggatgattatgaagacatgatggaggagaatctggagcaggaggaatatgaagacccagacatccccgagtcccagatggaggagccggcagctcacgacaccgaggcaacagccacagactaccacaccacatcacacccgggtacccacaaggtctatgtggagctgcaggagctggtgatggacgaaaagaaccaggagctgagatggatggaggcggcgcgctgggtgcaactggaggagaacctgggggagaatggggcctggggccgcccgcacctctctcacctcaccttctggagcctcctagagctgcgtagagtcttcaccaagggtactgtcctcctagacctgcaagagacctccctggctggagtggccaaccaactgctagacaggtttatctttgaagaccagatccggcctcaggaccgagaggagctgctccgggccctgctgcttaaacacagccacgctggagagctggaggccctggggggtgtgaagcctgcagtcctgacacgctctggggatccttcacagcctctgctcccccaacactcctcactggagacacagctcttctgtgagcagggagatgggggcacagaagggcactcaccatctggaattctggaaaagattcccccggattcagaggccacgttggtgctagtgggccgcgccgacttcctggagcagccggtgctgggcttcgtgaggctgcaggaggcagcggagctggaggcggtggagctgccggtgcctatacgcttcctctttgtgttgctgggacctgaggccccccacatcgattacacccagcttggccgggctgctgccaccctcatgtcagagagggtgttccgcatagatgcctacatggctcagagccgaggggagctgctgcactccctagagggcttcctggactgcagcctagtgctgcctcccaccgatgccccctccgagcaggcactgctcagtctggtgcctgtgcagagggagctacttcgaaggcgctatcagtccagccctgccaagccagactccagcttctacaagggcctagacttaaatgggggcccagatgaccctctgcagcagacaggccagctcttcgggggcctggtgcgtgatatccggcgccgctacccctattacctgagtgacatcacagatgcattcagcccccaggtcctggctgccgtcatcttcatctactttgctgcactgtcacccgccatcacttcggcggcctcctgggagaaaagacccggaaccagatgggagtgtcggagctgctgatctccactgcagtgcagggcattctcttcgccctgctgggggctcagcccctgcttgtggtcggcttctcaggacccctgctggtgtttgaggaagccttcttctcgttctgcgagaccaacggtctagagtacatcgtgggccgcgtgtggatcggcttctggctcatcctgctggtggtgttggtggtggcccttcgagggtagcttccctggtccgcttcatctcccgctatacccaggagatcttctccttcctcatttccctcatcttcatctatgagactttctccaagctgatcaaggtgggggcctatggggatgttaatgcacacgggaggttgtgtataagactgagacagtggccgggtgcgaggcttcaggcc

SEQ ID NO: 257867 - DNA, 712 bp, Homo Sapiens
  misc_feature (13)..(13): n is a, c, g, or t
attcggcacgagncacccgccatcaccttcggcggcctcctgggtcagtgccaatacctgtctccctaactcttgcctctgaccctctggcctctgtctcagccccaacttctgactctgtctgaccctccagacccctgcatcagcctgaccatgacttgctctatgggctcctggaaatgatctcctgaccttgatcccactgtgacctctacccacaggagaaaagacccggaaccagatgggagtgtcggagctgctgatctccactgcagtgcagggcattctcttcgccctgctgggggctcagcccctgcttgtggtcggcttctcaggacccctgctggtgtttgaggaagccttcttctcggtagttctgtccttgccccactgaccctgtcatgtcccccgcaccacctgcctgatgcatggtgccttgccccaaggccctttgactgaccggcttcttctgaccaccctgcagttctgcgagaccaacggtctagagtacatcgtgggccgcgtgtggatcggcttctggctcatcctgctggtggtgttggtggtggccttcgagggtagcttcctggtccgcttcatctccctctatacccaggagatcttctccttcctcatttccctcatcttcatctatgagactttctccaagctgatcaaggtggggggcctatggggatgttaatgcacacgg

SEQ ID NO: 257868 - DNA, 2536 bp, Homo Sapiens
  misc_feature (15)..(15): n is a, c, g, or t
  misc_feature (1760)..(1760): n is a, c, g, or t
  misc_feature (1983)..(2082): n is a, c, g, or t
  misc_feature (2495)..(2495): n is a, c, g, or t
tttggccctacgccncccagtaattcggcacgaggtgcgtgatatccggcgccgctacccctattacctgagtgacatcacagatgcattcagcccccaggtcctggctgccgtcatcttcatctactttgctgcactgtcacccgccatcaccttcggcggcctcctgggagaaaagacccggaaccagatgggagtgtcggagctgctgatctccactgcagtgcagggcattctcttcgccctgctgggggctcagcccctgcttgtggtcggcttctcaggacccctgctggtgtttgaggaagccttcttctcgttctgcgagaccaacggtctagagtacatcgtgggccgcgtgtggatcggcttctggctcatcctgctggtggtgttggtggtggccttcgagggtagcttcctggtccgcttcatctcccgctatacccaggagatcttctccttcctcatttccctcatcttcatctatgagactttctccaagctgatcaagatcttccaggaccacccactacagaagacttataactacaacgtgttgatggtgcccaaacctcagggccccctgcccaacacagccctcctctcccttgtgctcatggccggtaccttcttctttgccatgatgctgcgcaagttcaagaacagctcctatttccctggcaagctgcgtcgggtcatcggggacttcggggtccccatctccatcctgatcatggtcctggtggatttcttcattcaggatacctacacccagaaactctcggtgcctgatggcttcaaggtgtccaactcctcagcccggggctgggtcatcccacccactgggcttgcgttccgagtttcccatctggatgatgtttgcctccgccctgcctgctctgctggtcttcatcctcatattcctggagtctcagatcaccacgctgattgtcagcaaacctgagcgcaagatggtcaagggctccggcttccacctggacctgctgctggtagtaggcatgggtggggtggccgccctctttgggatgccctggctcagtgccaccaccgtgcgttccgtcacccatgccaacgccctcactgtcatggcaaagccagcaccccaggggctgcagcccagatccaggaggtcaaagagcagcggatcagtggactcctggtcgctgtgcttgtgggcctgtccatcctcatggagcccatcctgtcccgcatccccctggctgtactgtttggcatcttcctctacatgggggtcacgtcgctcagcggcatccagctctttgaccgcatcttgcttctgttcaagccacccaagtatcacccagatgtgccctacgtcaagcgggtgaagacctggcgcatgcacttattcacgggcatccagatcatctgcctggcagtgctgtgggtggtgaagtccacgccggcctccctggccctgcccttcgtcctcatcctcactgtgccgctgcggcgtcgtcctgctgccgctcatcttcaggaacgtggagcctcagtgccccgtatgctgatgatgccaagccaacctttgatgaggaggaaggtcgggatgaatacgacgaagtggccatgcctgtgtgaggggcgggcccaggccctagaccctcccccaccattccacatccccaccttccaaggaaaagcagaagttcatgggcacctcatggactccaggatcctcctggagcagcagctgaggccccagggctgtgggnagggaaggaaggcgtgtccaggagaccttccacaaagggtagcctggcttttctggctggggatggccgatggggcccacattagggggtttgttgcacagtccctcctgttgccacactttcactggggatcccgtgctggaagacttagatctgagccctccctcttcccagcacaggcaggggtagaagcaaaggaaggaggtgggtgagcgggtggggnnnnnnnnnnnnnnnnnnnnnnnnnnnnnnnnnnnnnnnnnnnnnnnnnnnnnnnnnnnnnnnnnnnnnnnnnnnnnnnnnnnnnnnnnnnnnnnnnnnnggttactgaggaccaaagatacatgtaaaatagggctttgtaaactccacagggactgttctatagcagtcatcatttgtctttgaacgtacccaaggtcacatagctgggatttgaactgagccgtgcagctgggatttgaaccaggccttctgatttcaaggtccgagctctgtcctctgtcagtcatgcggtccactttcccttcccctgtgactcctcccttccccactctgctcccagcccctaccttgagaccctcttctctgggcccagagagaggcgtcctggtgaggacaagggtagagggaaggattgatccagggattggggcctggggactcagggcctcctaagtgttttgggttccttcccttcaaaacacttcattaagttcaatcaattcaattaanttccaacaaaacattttactgaggggcccccggaaatcagt

SEQ ID NO: 257869 - DNA, 992 bp, Homo Sapiens
  misc_feature (863)..(863): n is a, c, g, or t
  misc_feature (889)..(889): n is a, c, g, or t
  misc_feature (922)..(923): n is a, c, g, or t
  misc_feature (927)..(927): n is a, c, g, or t
  misc_feature (930)..(930): n is a, c, g, or t
  misc_feature (942)..(942): n is a, c, g, or t
  misc_feature (952)..(953): n is a, c, g, or t
  misc_feature (964)..(964): n is a, c, g, or t
  misc_feature (976)..(976): n is a, c, g, or t
  misc_feature (980)..(980): n is a, c, g, or t
  misc_feature (982)..(982): n is a, c, g, or t
  misc_feature (986)..(986): n is a, c, g, or t
  misc_feature (988)..(988): n is a, c, g, or t
acatgacagcagatccgcggaagggcagaatgggactccaagcctgcctcctagggctctttgccctcatcctctctggcaaatgcagttacagcccggagcccgaccagcggaggacgctgcccccaggctgggtgtccctgggccgtgcggaccctgaggaagagctgagtctcacctttgccctgagacagcagaatgtggaaagactctcggagctggtgcaggctgtgtcggatcccagctctcctcaatacggaaaatacctgaccctagagaatgtggctgatctggtgaggccatccccactgaccctccacacggtgcaaaaatggctcttggcagccggagcccagaagtgccattctgtgatcacacaggactttctgacttgctggctgagcatccgacaagcagagctgctgctccctggggctgagtttcatcactatgtgggaggacctacggaaacccatgttgtaaggtccccacatccctaccagcttccacaggccttggccccccatgtggactttgtggggggactgcacctgttaccccccaacatcatccctgaggcaacgtcctgagccgacaggtgaaagggaatgtaggcctgaatctgtgggataaccccctctgtgatccgtaagcgatacaaattgacctcacaagacatgagctctggcaccagcaataacagccaagcctgtgcccagttcctggagcagtatttccatgactcagacctggctcagttcatgcgcctcttcggtggcaactttgcacatcaggcatcagtagcccgtgtggttggacaacagggccggggccgggccgggattgacggcagtctagatgtncagtacctgatgagtgctggtgccanatctccacctgggtctacagtagccctggccgnntganggncaggagccttcngcagtggctnngctgccagaangagtagcctgcnaatntnatantntagc

SEQ ID NO: 257870 - DNA, 1082 bp, Homo Sapiens
atgcaggctggtaccggtcggaattccttggatatctgtcgacccacgcgtcggacgctgcagggagaggtgtggtggtgctgcagccgctagggggcgcggcggggcggagcgcacctttccgcgggccgcggggatggcggcgcagggcgtagggcctgggccggggtcggcggcgcccccggggctggaggcggcccggcagaagctggcgctgcggcgcaagaaggtgctgagcaccgaggagatggagctgtacgagctggctcaggcggcgggcggcggtatcgaccccgacgtgttcaagatcctggtggacctgctgaagctgaacgtggcccccctcgccgtcttccagatgctcaagtccatgtgtgccgggcagaggctagcgagcgagccccaggaccctgcggccgtgtctctgcccacgtcgagcgtgcccgagacccgagggagaaacaaaggcagcgctgccctcgggggagcattggccctggcggaacgcagcagccacgaaggatccagccagaggatgccacgccagcccagcgctaccaggctgcccaaggggggcgggcctgggaagagccctacacggggcagcacctaggatggggcagagacttgttgcatctttgtccccagcaaaggctacatgttacctccttcaattgataataaacctttctgagatgcagagggtccacgtcacacaacaaaaaaacggccggccgcaccaaaagtatccctacagggcgccaagctaaacacatcacaagattctgttcccaacgcgggccccctatatgcagacgccgacataccacaggaataaggaacagagccccgcgactcacaacggcacgcaaccgggacacacctgcagagcccgcggcaaccctgcgcacgaggaacacataaacacagcgcgcggacccaccctcggaccacaccccacacaacaaataacagccccacgacacacaaacaaccctacaactcacatagtgctctacacacaacacaccatatactaccacgacacaattacaaccgacataactacaataaccaccacc

SEQ ID NO: 257871 - DNA, 1525 bp, Homo Sapiens
  misc_feature (957)..(957): n is a, c, g, or t
  misc_feature (976)..(976): n is a, c, g, or t
  misc_feature (983)..(983): n is a, c, g, or t
  misc_feature (985)..(985): n is a, c, g, or t
  misc_feature (992)..(992): n is a, c, g, or t
  misc_feature (1006)..(1006): n is a, c, g, or t
  misc_feature (1010)..(1012): n is a, c, g, or t
  misc_feature (1025)..(1025): n is a, c, g, or t
  misc_feature (1032)..(1032): n is a, c, g, or t
  misc_feature (1035)..(1035): n is a, c, g, or t
  misc_feature (1039)..(1039): n is a, c, g, or t
  misc_feature (1042)..(1057): n is a, c, g, or t
  misc_feature (1070)..(1070): n is a, c, g, or t
  misc_feature (1073)..(1073): n is a, c, g, or t
  misc_feature (1075)..(1075): n is a, c, g, or t
  misc_feature (1078)..(1078): n is a, c, g, or t
  misc_feature (1080)..(1080): n is a, c, g, or t
  misc_feature (1085)..(1086): n is a, c, g, or t
  misc_feature (1088)..(1088): n is a, c, g, or t
  misc_feature (1093)..(1093): n is a, c, g, or t
  misc_feature (1096)..(1096): n is a, c, g, or t
  misc_feature (1102)..(1103): n is a, c, g, or t
  misc_feature (1108)..(1108): n is a, c, g, or t
  misc_feature (1112)..(1112): n is a, c, g, or t
  misc_feature (1118)..(1173): n is a, c, g, or t
  misc_feature (1179)..(1179): n is a, c, g, or t
  misc_feature (1187)..(1187): n is a, c, g, or t
  misc_feature (1208)..(1208): n is a, c, g, or t
  misc_feature (1212)..(1212): n is a, c, g, or t
  misc_feature (1233)..(1277): n is a, c, g, or t
  misc_feature (1280)..(1280): n is a, c, g, or t
  misc_feature (1287)..(1287): n is a, c, g, or t
  misc_feature (1303)..(1303): n is a, c, g, or t
  misc_feature (1351)..(1352): n is a, c, g, or t
  misc_feature (1396)..(1396): n is a, c, g, or t
tgcctgcatatataaactgtttaatgctctaaaagcttcatgagaagaagagagagataaaaatgggataaaatactatatgacagggcaattgaggtgagctcataacacattttattctcatttaatcaataccaaaacagtggctttgaaatatttggaggtttgtaaatgttacagccatataatagaggctcaaaaacttcttcataatgattttaactctaggatctgggaatttggaatgcaaaataaatgtttaacattttataaagatagatctttgtttttatattaatgtgtgaacataattgctgttacgggttgaatgcatcctctacaaaattcatgttgaaacttaatctccattgtgatgagattaagaggtgagggccttctgggaagtgatgaagtcatggtgctctgtcctcatgaatggattaataaaaaagaggcttcagcaagagtttgcccctttttgcacttgtgtcttctgccatgggaggatgtcactgtgagaggatgccatcgatggaacaagcccttaccagacactaatgcttgcaccttgatattgaacttctcagcctccagaactgtgagaaaataaatttctctttttttataatttactcagtctgtgctattctgttatagcagcacagagggacgaaggcaattgccaaccctgcttgagagatgcagaggcctggtggggagttagcagtattatgagattggatcagcctggatcactgaatcactgcatgtaggacacactatggagagtttctggtgccaagatcagacatggtatatgcaagaataaatgtgtgcgtgaatcaaaccagaggttgtgtttatttcttaattactacattgtattcttgctaacctgactaatccagccagcaaccttacaattctaattatctgactgtagatcctcccaggttnacaaagcacacaaacaccnccacacnangcaaaancaaacaaacacganacannncaacccaaacatnacaacanaanaaangcnnnnnnnnnnnnnnnngcacagaaagaanaananaananaaaannanaaaanaanacactnncacangaanccgaannnnnnnnnnnnnnnnnnnnnnnnnnnnnnnnnnnnnnnnnnnnnnnnnnnnnnnncaaagnaaaacacntgtgtcaatcaatttaagatncttnacaattggaacatgcactggnnnnnnnnnnnnnnnnnnnnnnnnnnnnnnnnnnnnnnnnnnnnnaancagaatnccctaaacctcctaanccagacactaacatcggtggatttccaaatgttcattcgattttgaannttgggggaggattatatttttaaaccactgttggatttagtatnttaatattaatgttaaattccatttatagttatgagtgcaataatttgtagtttcccaaccccctacagatatagtaacaaattaatataagattcataaatttgaagagatgtgttggtcttgtttaa

SEQ ID NO: 257872 - DNA, 1872 bp, Homo Sapiens
  misc_feature (1088)..(1088): n is a, c, g, or t
  misc_feature (1390)..(1390): n is a, c, g, or t
  misc_feature (1624)..(1624): n is a, c, g, or t
ccccagctggaaccaagaaggttgtgtcccccttcctctgggtgtccttgtctcctgctatcagggcacagtcctcaggatgtttcggggagaataggagccagaacctgagcccctaagccattcccctcaccaatgatggggtccccagtgagtcatctgctggccggcttctgtgtgtgggtcgtcttgggctgggtagggggctcagtccccaacctgggccctgctgagcaggagcagaaccattacctggcccagctgtttggcctgtacggcgagaatgggacgctgactgcagggggcttggcgcggcttctccacagcctggggctaggccgagttcaggggcttcgcctgggacagcatgggcctctgactggacgggctgcatccccagctgcagacaattccacacacaggccacagaaccctgagctgagtgtggatgtctgggcagggatgcctctgggtccctcagggtggggtgacctggaagagtcaaaggcccctcacctaccccgtgggccagccccctcgggcctggacctccttcacaggcttctgttgctggaccactcattggctgaccacctgaatgaggattgtctgaacggctcccagctgctggtcaattttggcttgagccccgctgctcctctgacccctcgtcagtttgctctgctgtgcccagccctgctttatcagatcgacagccgcgtctgcatcggcgctccggcccctgcacccccaggggatctactatctgccctgcttcagagtgccctggcagtcctgttgctcagcctcccttctcccctatccctgctgctgctgcggctcctgggacctcgtctactacggcccttgctgggcttcctgggggccctggcggtgggcactctttgtggggatgcactgctacatctgctaccgcatgcacaagaagggcggcacaagggacctgggcggactaccagagaaggacctgggcccggggctgtcagtgctcggaggcctcttcctgctctttgtgctggagaacatgctggggcttttgcggcaccgagggctcaggccaagatgcngcaggcgaaaacgaaggaatctcgaaacacgcaacttggatccggagaatggcagtgggatggcccttcagccccaacaggcagctccagagccaggggctcagggccagagggagaagaacagccagcacccaccagctctggcccctcctgggcaccaaggccacagtcatgggcaccagggtggcactgatatcacgtggatggtcctcctgggagatggtctacacaacctcactgatgggctggccataggtgctgccttctctgatggcttctccagcggcctcagtaccaccttngcggtcttctgccatgagctgccccacgaactgggtgactttgccatgctgctccagtcagggctgtcctttcggcggctgctgctgctgagcctcgtgtctggagccctgggattggggggtgcagtcctgggggtggggctcagccctgggccctgtccccctcactccctgggtgtttggggtcactgctggggtcttcctctatgtggcccttgtggacatgctacccanccctgcttccgtcctccggagcccctgcctacgccccatgtgctcctgcaggggctggggctgctgctggggggcggcctcatgcttgccataaccctgctggaggagcggctactgcccgtgaccactgagggctgatggggccagtggaaaggggtcgggttgcccttccttccccccaaccacaggaatggaggcgggacacagggccagtaggagcaataggattttaataaacagaacccata

SEQ ID NO: 257873 - DNA, 1039 bp, Homo Sapiens
  misc_feature (441)..(474): n is a, c, g, or t
  misc_feature (990)..(990): n is a, c, g, or t
  misc_feature (994)..(994): n is a, c, g, or t
  misc_feature (1027)..(1028): n is a, c, g, or t
attctagacttgtcggcgctcgattgaggagcgtggctacgttgcttccggtgcctggctccgtttcctgcttttggttcttacagtagtcggcgtaggccttagattttttactgtctcctgaagaatttaacacaaacatggatatcagaccaaatcatacaatttatatcaacaatatgaatgacaaaattaaaaaggaagaattgaagagatccctatatgccctgttttctcagtttggtcatgtggtggacattgtggctttaaagaccatgaagatgagggggcaggcctttgtcatatttaaggaactgggctcatccacaaatgccttgagacagctacaaggatttccattttatggtaaaccaatgcgaatacagtatgcaaaaacagattcggatataatatcaaaaatgcgtggaacttttgctgacnnnnnnnnnnnnnnnnnnnnnnnnnnnnnnnnnnctgtggaacagactgcaacaaccacaaacaaaaagcctggccagggaactccaaattcagctaatacccaaggaaattcaacaccaaatcctcaggtccctgattaccctccaaactatattttattccttaataacttaccagaagagactaatgagatgatgttatccatgctgtttaatcagttccctggcttcaaggaagtacgtctggtaccagggaggcatgacattgcttttgttgaatttgaaaatgatgggcaggctggagctgccagggatgctttacagggatttaagatcacaccgtcccatgctatgaagatcacctatgccaagaaataacatttgggatagtcgtctttaaaagacttggtgttatttacagtgtttgttttgataacatttggctgggtcattttaatagttagagatgaggaggagtaaaagtgaaatttttgtgaaggacttaaattatccagtgtttctttaaccctggtggactatgaaatacganggcnttaaattttgtacaataaacttttatttgtatnntgtgtaaaaaa

SEQ ID NO: 257874 - DNA, 1083 bp, Homo Sapiens
  misc_feature (475)..(508): n is a, c, g, or t
ggggcttttggttcttacagtagtcggcgtaggccttaggtgggttcgtgcgccttctacctcgctgtttcggttttcctggctcctcggcccttttctcccctgttgcagctgggagcggacgaagcgcgaagctgggattttttactgtctcctgaagaatttaacacaaacatggatatcagaccaaatcatacaatttatatcaacaatatgaatgacaaaattaaaaaggaagaattgaagagatccctatatgccctgttttctcagtttggtcatgtggtggacattgtggctttaaagaccatgaagatgagggggcaggcctttgtcatatttaaggaactgggctcatccacaaatgccttgagacagctacaaggatttccattttatggtaaaccaatgcgaatacagtatgcaaaaacagattcggatataatatcaaaaatgcgtggaacttttgctgacnnnnnnnnnnnnnnnnnnnnnnnnnnnnnnnnnnctgtggaacagactgcaacaaccacaaacaaaaagcctggccagggaactccaaattcagctaatacccaaggaaattcaacaccaaatcctcaggtccctgattaccctccaaactatattttattccttaataacttaccagaagagactaatgagatgatgttatccatgctgtttaatcagttccctggcttcaaggaagtacgtctggtaccagggaggcatgacattgcttttgttgaatttgaaaatgatgggcaggctggagctgccagggatgctttacagggatttaagatcacaccgtcccatgctatgaagatcacctatgccatagaaataacatttgggatagtcgtctttaaaagacttggtgttatttacagtgtttgttttgataacatttggctgggtcattttatatagttagagatgaggaggagtaaaatgtgaaaatttttgtgaaaggacttaaattatccagtggtttctttagcccttggtgaaactatgaaaataacgaaggcccttaaatttttgtacaattaaactttttattttggattcccgggg

SEQ ID NO: 257875 - DNA, 1015 bp, Homo Sapiens
  misc_feature (764)..(765): n is a, c, g, or t
  misc_feature (774)..(774): n is a, c, g, or t
  misc_feature (786)..(787): n is a, c, g, or t
  misc_feature (796)..(796): n is a, c, g, or t
  misc_feature (801)..(802): n is a, c, g, or t
  misc_feature (827)..(827): n is a, c, g, or t
  misc_feature (855)..(855): n is a, c, g, or t
  misc_feature (858)..(859): n is a, c, g, or t
  misc_feature (911)..(911): n is a, c, g, or t
  misc_feature (943)..(943): n is a, c, g, or t
  misc_feature (957)..(957): n is a, c, g, or t
  misc_feature (971)..(971): n is a, c, g, or t
tcaggtggcggaactgctgctccggcggctggaggcgtctgatggcggcctggacagcgccgagttggcggctgagctgggcatggagcaccaggcggtggtgggcgccgtgaagagccttcaggcgctgggcgaggtcatcgaggctgaacttcggtccaccaagcactgggagcttactgcggagggcgaggagattgcccgggagggcagccatgaggcccgtgtgtttcgaagcattcccccagagggcctggcccagagcgagcttatgcgactgcccagtggcaaagtgggcttcagcaaggccatgtccaacaagtggattcgggtggacaagagtgcggctgacgggccccgggtgttccgagtggtggacagcatggaggatgaggtgcagcggcggctccagctggtccgggggggacaggctgagaagctgggggagaaggagaggagcgagctgaggaagaggaagctgttggctgaagtgactctgaagacctactgggtgagcaaaggcagtgcctttagtaccagcatctccaagcaagagacagagctgagcccagagatgatctccagtggctcttggcgggaccggcccttcaagccctacaacttcttggcccacggtgtcctccccgacagcggccaccttcacccgctgctcaaggtccgctccaagttccgacagatcttccctgggagcatgggggttcacccgagaatgccgactggataaacttcatttggagaagctnnccttctggnaaaactttgacnngccctcttnccagnnccccagcaggcacccccagccccgntgacccaagcacgacaccctttcttccnttnncgaaggatccagcgggaggcccctgggcagctccccaaatggaccctattgntcccaggccgggggtccaagacgggaacccanactccttcaagggncgggctaccggggntttcaacaagggggggtggaagggcaacgaacttataccccggg

SEQ ID NO: 257876 - DNA, 1873 bp, Homo Sapiens
  misc_feature (1839)..(1839): n is a, c, g, or t
tgggtggcgaattcggcacgagggtcatggcggatggtcaggtggcggaactgctgctccggcggctggaggcgtctgatggcggcctggacagcgccgagttggcggctgagctgggcatggagcaccaggcggtggtgggcgccgtgaagagccttcaggcgctgggcgaggtcatcgaggctgaacttcggtccaccaagcactgggagcttactgcggagggcgaggagattgcccgggagggcagccatgaggcccgtgtgtttcgaagcattcccccagagggcctggcccagagcgagcttatgcgactgcccagtggcaaagtgggcttcagcaaggccatgtccaacaagtggattcgggtggacaagagtgcggctgacgggccccgggtgttccgagtggtggacagcatggaggatgaggtgcagcggcggctccagctggtccgggggggacaggctgagaagctgggggagaaggagaggagcgagctgaggaagaggaagctgttggctgaagtgactctgaagacctactgggtgagcaaaggcagtgcctttagtaccagcatctccaagcaagagacagagctgagcccagagatgatctccagtggctcttggcgggaccggcccttcaagccctacaacttcttggcccacggtgtcctccccgacagcggccaccttcacccgctgctcaaggtccgctcccagttccgacagatcttcctggagatggggttcaccgagatgccgactgataacttcattgagagctccttctggaactttgacgccctcttccagccccagcagcacccagcccgtgaccagcacgacaccttcttccttcgagatccagcggaggccctgcagctcccaatggactatgtccagcgggtcaagcggacccactctcagggcggctacggctcacaggggtacaagtataactggaagctggacgaggcccggaaaaacctactgcgaacccacaccacatcagccagcgcccgtgcgctctaccgccttgcccagaagaagcccttcactccggtcaagtacttctccatcgaccgcgtattccggaatgagaccctggacgccacgcacctggctgagttccaccagatcgagggcgtggtggcggatcatggtctcaccttgggccacctcatgggcgttctgcgggagttcttcaccaagctgggtatcacgcaactccgcttcaagccagcctacaacccatacacagagcccagcatggaggtgttcagctaccaccaaggcctgaagaagtgggtggaggtcggaaactcgggggtcttccgtccagagatgctgctgcccatggggcttcccgagaacgtgtcggtcattgcctggggcctctccctggagcgcccaacgatgatcaaatatggcatcaacaatatccgggagctggtgggccacaaggtgaacctgcagatggtgtatgacagtcccctgtgccgcctggatgccgagccgaggccccctcccacacaggaggctgcgtgacatgggccactctaggacaggtcatcctccccgagtccctgctgctgcgctcctttgcatccctggccagtgaccttgtatttatgaggcctctgtgaggccagcccccaccttcctctttcccacctgtcccaggaccagaatcccagggacagaggactgggtagcaggttccttctgttgtcctgtgtggtgtgtctactgtgagggtgggccctgaggagacctgtggggccaccctattgtctaataaagtgggcagttgcccccatctggtggctttccnccttaacgcgcctctaaactataatccccttgtc

SEQ ID NO: 257877 - DNA, 1038 bp, Homo Sapiens
  misc_feature (30)..(30): n is a, c, g, or t
aaaaatcaaccacacgctcccgcctcattnttataggtaccgaggcctgggtggcgaattcggcacgaggctgggcgaggtcatcgaggctgaacttcggtccaccaagcactgggagcttactgcggagggcgaggagattgcccgggagggcagccatgaggcccgtgtgtttcgaagcattcccccagagggcctggcccagagcgagcttatgcgactgcccagtggcaaagtgggcttcagcaaggccatgtccaacaagtggattcgggtggacaagagtgcggctgacgggccccgggtgttccgagtggtggacagcatggaggatgaggtgcagcggcggctccagctggtccgggggggacaggctgagaagctgggggacgaaggagacggacgcgagctgagtgacagacggaagctgttggctgaagtgactctgaagacctactgggtgacgcaaacggcagtgcctttagtaccagccatctccaagccaagacgacacgagctgagcccagagactgatctcccactggctcttggccgggaccggaccttcaagccctacaacttctaggcccacggtgtccatccccgacagcggccaccttcacccgctgctcacaggtccgctccaagttccgacagcatcttcctgggagatgggggtcaccgagatgcccgactgataatcttcatctgagagctcctactggaactattgacgccctccttccaggccccagcagcacccaggcccggggaccagccccgaccacccttcttcccttcaaaaatccgcgggagggccctggcagctcccaatgggacttatgtcccgcgggggccaacggggaccccccttctcaggggcgggctacgggctcacagggggtaccaagcattaactgggaaaccttggacccagggctccgcgaaaaacccttagtgggagaaccccaccccaaaattcgaccccaggggccccgtggggcttcaaccggcccttgggcccgaaaagaaagcccc

SEQ ID NO: 257878 - DNA, 3281 bp, Homo Sapiens
  misc_feature (457)..(473): n is a, c, g, or t
  misc_feature (1049)..(1049): n is a, c, g, or t
  misc_feature (1221)..(1221): n is a, c, g, or t
  misc_feature (1251)..(1251): n is a, c, g, or t
  misc_feature (1575)..(1575): n is a, c, g, or t
  misc_feature (1856)..(1856): n is a, c, g, or t
ggtttgtatccaatgtctggcacgtggttagatgctcacagatgcctgtagttgaatttcattctagtaaactagtgaaatgattcccatgaggaggtgagccagtggtaatgcccagagtcctggctctatctggttagaggttcacccctggcactgtctcatggtatcctagctggtctcgacttcctgtctggtgcagccggattagtgagaaactttccctctctactggcttctctcccttattcttatcgtgtccctaccaccagtcccttaatatgtttgccctgtgtttcccactttaccaaaggagtaggtagacaggcaagtcagattccaggtagaggatgtatagactggctagttcaagggtttgggggcagaatacctctattactttgtatgtttatatggcaggtttgcttaacaaaacaactgaaacttctctaaaaannnnnnnnnnnnnnnnntttaaagtttaaactcatatcccaggcatatgaagtgctttcagatccaaagaaaagggatgtttatgaccaaggcggagagcaggcaattaaagaaggaggctcaggcagccccagcttctcttcacccatggacatctttgacatgttctttggtggtggtggacggatggctagagagagaagaggcaagaatgttgtacaccagttatctgtaactcttgaagatctatataatggagtcacgaagaaattggccctccagaaaaatgtaatttgtgagaaatgtgaaggtgttggtgggaagaagggatcggtggagaagtgcccgctgtgcaaggggcgggggatgcagatccacatccagcagatcgggccgggcatggaacagcagatccagaccgtgtgcatcgagtgcaagggccagggtgagcgcatcaaccccaaggaccgctgcgagagctgcagcggggccaaggtgatccgtgagaagaagattatcgaggtacatgttgaaaaaggtatgaaagatgggcaaaagatactatttcatggagaaggagatcaggagcctgngctggagcctggtgatgtcataattgtgcttgatcagaaggatcatagtgtctctcagagacgaggccatgacttgatcatgaaaatgaaaattcagctttctgaagctctttgtggcttcaagaagacgataaaaacattgcacaatcgaattcttgttatcacatccaangcaggtgaggtgatcaagcacggggacctnagaggcgtgcgcgatgaaggaatgcccatctacaaagcacccctggaaaaagggattctgatcatacagtttttagtaatctttcctgaaaaaaactggctttctctggaaaagcttcctcagctggaagcttcactccctcctcgacagaaagtgaggatgacagatgacatggatcaggtggagctgaaggagttttgtcccaatgagcagcactggcgtcagcacagggaggcctacgaggaggacgaagacgggccccaggctggagtgcagtgccagacggcatgacgtggtgcggggcagcgtggccccaccggactngcacatgatgaatgtaaagttggcacaatgaaaatgacatcgctttaatggccttgtgtttgggatgtcctgtgtatgtgttcagcattcttaattgctgagtgtctttttggcttttcttttggttgtaacttaagttatagcttaatttatattaaaatgttttaagtataaatcacctctagtctgcatatggaatctgttcatttctattttcaggatatacttttgagatgtcagtgattgcaccaacactttgtgcttctagtggctttgccatnaattcagtgtcaccaataaggcacagcccagttagcagcttagcccccctagcaaaccccaaggcacaaagtgggcatcctgactcatctctaggtctgtggtttctcccctcttcccttggcagagttattgagggcatgatctcagggctgctaagataacatttctgaggattctagatgatcctcttaaagaataaaagcacatccgtggatcggacatggctgcatgtgcctgcttaacagggccaacttagttcctactgttctgtgcccttcagtggatggaacgtgagtgtctgatcatctctcttggaagttttctgaaccttccaagctctgtggtgaggacaaaccagtgtttgaatcatatgctgataactgtttgcctgtgaccctcacaccttgttcttcagggttttaatgattttctgttgacaacttttgcaatgctttcccaccaaagtgcttacttgtaaagaaaactaaatccttctgtgtccccggcagcctcagtgcagcaacagaagccaagggagaatgctgctggtttggcccatggcacagccagcttctctgaccagtaatccggggtgacttgagggtctgcaaaggcatagaactccccagtgttttccacctcattctcccagattgagctcccttccaaaggatcgttcctctcattgcacagccatattacaaagggtttcctgctcaagtgatgttttggtaagaacttcgctgagttccactgtggattacagtttgtatggactactactgtaaattatagcttgtttggagggatattagtcattattttattcatgacaggtagactacaattcgaacttagggttacctcagtctttagccattactgcttatttcttttccccaagtcacaaaaaacttgtaagctgctgggttaaagcagaggccacctgtcagatctaccctacccttatttggttacatggcacctgagagtttcactcagaccagggaccttccttaggagggtcaaagtgcagatcagaccatgcaggtaaggtgaacccagctgcacggcccaggttccccgcaaaacattgcccagcctagtgaggcataatttgcctcaaagtatagaaacagccccacctgtgcccactttgacccattggtgaggatagatataaaatcacttcttccaacgaagcctaggtgaaaatctatttataaatggaccacaactctggggtgtcgtttttgtgctgtgacttcctaattattgctaaagaactactgtttagttggtaatggtgtaaaattacattcagctccttcttgtcatataaaaggaatttggagggtgtcgcttaaaattttattccacctgtacatttgtcactttaaaattaaaattgagctggtatgagc

SEQ ID NO: 257879 - DNA, 537 bp, Homo Sapiens
  misc_feature (120)..(120): n is a, c, g, or t
  misc_feature (387)..(387): n is a, c, g, or t
  misc_feature (419)..(419): n is a, c, g, or t
  misc_feature (441)..(441): n is a, c, g, or t
  misc_feature (452)..(452): n is a, c, g, or t
  misc_feature (463)..(463): n is a, c, g, or t
  misc_feature (470)..(470): n is a, c, g, or t
  misc_feature (486)..(486): n is a, c, g, or t
  misc_feature (493)..(493): n is a, c, g, or t
  misc_feature (506)..(506): n is a, c, g, or t
ttgatcctcttaaagaataaaagcacatccgtggatcggacatggctgcatgtgcctgcttaacagggccaacttagttcctactgttctgtgcccttcagtggatggaacgtgagtgtnctgatcatctctcttggaagttttctgaaccttccaagctctgtggtgaggacaaaccagtgtttgaatcatatgctgataactgtttgcctgtgaccctcacaccttgttcttcagggttttaatgattttctgttgacaacttttgcaatgctttcccaccaaagtggcttacttgtaaagaaaactaaaatccttctgtgttccccgggcagcctcagtggcaggcaacaggaaggccaaggggaagaatgctggctgggtttngggccctggggaacaggcaggctttctctggnaccagttaatccgggggtgganttgaggggttnggcaaagggcntaggaantcccccagtgtttttnccacctncattttccccggntggaggttccctttccaagggttcggttccc

SEQ ID NO: 257880 - DNA, 1858 bp, Homo Sapiens
  misc_feature (1354)..(1401): n is a, c, g, or t
gggagtcctcgaaggctcggaagcccgtcaccatgtcgtgcgagtcgtctatggttctcgggtactgggatattcgtgggctggcgcacgccatccgcctgctcctggagttcacggatacctcttatgaggagaaacggtacacgtgcggggaagctcctgactatgatcgaagccaatggctggatgtgaaattcaagctagacctggactttcctaatctgccctacctcctggatgggaagaacaagatcacccagagcaatgccatcttgcgctacatcgctcgcaagcacaacatgtgtggtgagactgaagaagaaaagattcgagtggacatcatagagaaccaagtaatggatttccgcacacaactgataaggctctgttacagctctgaccacgaaaaactgaagcctcagtacttggaagagctacctggacaactgaaacaattctccatgtttctggggaaattctcatggtttgccggggaaaagctcacctttgtggattttctcacctatgatatcttggatcagaaccgtatatttgaccccaagtgcctggatgagttcccaaacctgaaggctttcatgtgccgttttgaggctttggagaaaatcgctgcctacttacagtctgatcagttctgcaagatgcccatcaacaacaagatggcccagtggggcaacaagcctatatgctgagcaggaggcagacttgcagagcttgttttgtttcatcctgtccgtaaggggtcagcgctcttgctttgctcttttcaatgaatagcacttatgttactggtgtccagctgagtttctcttgggtataaaggctaaaagggaaaaaggatatgtggagaatcatcaagatatgaattgaatcgctgcgatactggcatttccctactccccaactgagttcaagggctgtaggttcatgcccaagccctgagagtgggtactagaaaaaacgagattgcacagttggagagagcaggtgtgttaaatgggactggagtccctgtgaagactgggtgaggataacacaagtaaaactgtggtactgatggacttaaccggagttcggaaaccgtcctgtgtacacatgggagtttagtgtgataaaggcagtatttcagactggtgggctagccaatagagttgggacaattgcttactcattaaaaataatagagccccacttgacactattcactaaaattaatctggaatttaaggcccaacattaaacacaaagctgttgaaatattgatgaaaatgtaagaatttttgtgaccacggggtaggagaagtttctttaaagacgtaaaaagaaaaaaccatannnnnnnnnnnnnnnnnnnnnnnnnnnnnnnnnnnnnnnnnnnnnnnnaataataacaatcacaaaggaaagatttaccaattgaataggatcaaattctacaacttttcctaaggcaccccacaaataaatgacaagtgagacaaaaagcactagtataaagattatataaagacctataaatcattaagacaactgagtttttaaaaatggacaaaatccatgaacaatttataaaatagaaatatagccaaaaatgtctaaaagatgtttatgatgtaaggaattatcaattacaacagtgagaaaccatatttccttctatccgatgagtaaaaagtttctaaagtgttggcaaggcttaggaaagtgatatgcatttcctgctggtcaagttgtaaattagtatagctactttggaggacaattgtaaaatttaaatcatatcctatgacccagcaattccatgctataaaaactcatccatggccgggcttggtgctca

SEQ ID NO: 257881 - DNA, 886 bp, Homo Sapiens; identical to SEQ ID NO: 15378

SEQ ID NO: 257882 - DNA, 1673 bp, Homo Sapiens
  misc_feature (49)..(49): n is a, c, g, or t
  misc_feature (64)..(64): n is a, c, g, or t
  misc_feature (82)..(82): n is a, c, g, or t
  misc_feature (87)..(95): n is a, c, g, or t
  misc_feature (98)..(98): n is a, c, g, or t
  misc_feature (114)..(114): n is a, c, g, or t
  misc_feature (137)..(137): n is a, c, g, or t
  misc_feature (140)..(141): n is a, c, g, or t
  misc_feature (153)..(153): n is a, c, g, or t
  misc_feature (160)..(160): n is a, c, g, or t
  misc_feature (164)..(164): n is a, c, g, or t
  misc_feature (172)..(172): n is a, c, g, or t
  misc_feature (175)..(175): n is a, c, g, or t
  misc_feature (184)..(184): n is a, c, g, or t
  misc_feature (189)..(189): n is a, c, g, or t
  misc_feature (191)..(191): n is a, c, g, or t
  misc_feature (193)..(193): n is a, c, g, or t
  misc_feature (233)..(254): n is a, c, g, or t
  misc_feature (277)..(277): n is a, c, g, or t
  misc_feature (294)..(294): n is a, c, g, or t
  misc_feature (299)..(299): n is a, c, g, or t
  misc_feature (316)..(316): n is a, c, g, or t
  misc_feature (320)..(320): n is a, c, g, or t
  misc_feature (323)..(323): n is a, c, g, or t
  misc_feature (325)..(325): n is a, c, g, or t
  misc_feature (338)..(370): n is a, c, g, or t
  misc_feature (373)..(373): n is a, c, g, or t
  misc_feature (405)..(405): n is a, c, g, or t
  misc_feature (435)..(435): n is a, c, g, or t
  misc_feature (437)..(438): n is a, c, g, or t
  misc_feature (519)..(519): n is a, c, g, or t
  misc_feature (894)..(894): n is a, c, g, or t
  misc_feature (932)..(932): n is a, c, g, or t
  misc_feature (1332)..(1345): n is a, c, g, or t
  misc_feature (1497)..(1497): n is a, c, g, or t
tgaaaaatgaaggaagtcttcaacatgctgtacagattggcaacggaanaacaggagtttcaanagtcatgggcattcccanagtgnnnnnnnnngtnaaatcttacctcaaanaaactcttcattcccttattganaanntgtatcctgaanaaaagtnggantgtgttanagnagtcttcanagganananaaaaattgattatgtacatggtgttgtagccaacctggannnnnnnnnnnnnnnnnnnnnnagttctggcttggtggaagtcanatcaccccctgaaaacnattancctgacttgacaaaccnaaangananatttggagactcnnnnnnnnnnnnnnnnnnnnnnnnnnnnnnnnnccnaaattactgttttctaatgatgtatgctcaanaaaagggcataaattacattcagcttgaanannaaattattgtcaaacaaaattattttaataccaaaaaaaattttgcacttcaactttcttctgaggaatggatgattctanagttttcccagctgggcttcattggtaaaatgtttcaagcgccggatcttactctgattgtagaattcatattcatgttttacaaggagaaacccattgattggctcctggaccatattctctgggtgaaagtctgcaaccctgaaaaagatgcaaaacattgtgatagacagaaagcaaatctgcgaattcgcttcagaccttcccttttccaacatgttggtctgcactcatcactatcaggaaaaatccaaaaactcacggataaagattatatgaaaccattacttgcttaaaatccatgtaaacccacctgcggaggtatctacttccttgaaggtctaccaagggcatacgctggagaaaacttacatngggagaggatttcttctgggctatcacaccgatagctnggagactacatcttgtttaaatctgataaaccagtcaatgtagaaagttatttgttccatagcggcaaccaagaacatcctggagatattctgctaaacacaactgtggaagttttgccttttaagagtgaaggtttggaaataagcaaagaaaccaaagacaaacgattagttgatggctatttcagaataggaaaatttgagaatggtgttgcagaaggaatggtggatccaagtctcaatcccatttcagcctttcgactttcagttattcagaattctgctgtttgggccattcttaatgagattcatattaaaaaagccaccaactgatcatctgagaaaccaacacattgttttcctgtgaattcgttaattaaagatagtaaagcatgtatcnnnnnnnnnnnnnnacttgaacacttaccttttgtgaagtctactgctgattagacgattggcatttccacttgcaaggtgaattctccataataattgtatttgtttgaaactaagctgttcttaatatttatacttgactaaatcatttttcaatatttatagncttgttaaataaacttgcacctatgttgggtttacactaaaacatataaagccggaccatattgctacaattcttttaaattcgcgaaaaacttcatgtccccaaccatctccttctatggagggtccttttgctgctcaatttatatatacttttacatagccgctgcttcttat

SEQ ID NO: 257883 - DNA, 1486 bp, Homo Sapiens
  misc_feature (9)..(9): n is a, c, g, or t
  misc_feature (15)..(15): n is a, c, g, or t
  misc_feature (18)..(18): n is a, c, g, or t
  misc_feature (21)..(21): n is a, c, g, or t
  misc_feature (25)..(25): n is a, c, g, or t
  misc_feature (30)..(30): n is a, c, g, or t
  misc_feature (35)..(36): n is a, c, g, or t
  misc_feature (41)..(41): n is a, c, g, or t
  misc_feature (44)..(44): n is a, c, g, or t
  misc_feature (59)..(59): n is a, c, g, or t
  misc_feature (64)..(64): n is a, c, g, or t
  misc_feature (66)..(66): n is a, c, g, or t
  misc_feature (74)..(75): n is a, c, g, or t
  misc_feature (91)..(91): n is a, c, g, or t
  misc_feature (130)..(130): n is a, c, g, or t
  misc_feature (146)..(146): n is a, c, g, or t
  misc_feature (166)..(166): n is a, c, g, or t
  misc_feature (170)..(186): n is a, c, g, or t
  misc_feature (221)..(221): n is a, c, g, or t
  misc_feature (238)..(238): n is a, c, g, or t
  misc_feature (257)..(257): n is a, c, g, or t
  misc_feature (263)..(263): n is a, c, g, or t
  misc_feature (294)..(294): n is a, c, g, or t
  misc_feature (1331)..(1331): n is a, c, g, or t
cacaatccnctccantcntanacanttttncgcannccctncancccccgcccccaatngcatntntgtccggnngcccccaggctcattnatcgcccctatgccgcccatcatccacgcgcccagaatnaacgtgtgcccatgcntccctcggcccctcttattntggnnnnnnnnnnnnnnnnnatgattgtgccaacagcctttgtgcctgctccacntgtggcacttgtcccanttccagccccaatgccccntgtgcntcccccacctcccatggaagatgagcccacntccaaaaaactgaagacagaggacagcctcatgccagaggaggagttcccgcgcagaaacaagggtccagtgtccaacaaagaccaggtgcccaacatgcaggataagacggaatggaaactgaatgggcaggtgctggtctacacccacccacacacggaccaggtctctgtcattaaggtgaagattcatgaagccacaggcatgcctgcagggaaacagaagctacagtatgagggtatcttcatcaaagattccaactcactggcttactacaacatggccaatggcgcagtcatccacctggccctcaaggagagaggcgggaggaagaagtagacaagaggaacctgctgtcaagtccctgccattttgcctctcctgtctcccaccccctgccccagacccaggagcccccctgaggctttgccttgcctgcatatttgtttcgctcttactcagtttgggaattcaaattgtcctgcagaggttcattcccctgaccctttccccacattggtaagagtagctgggttttctaagccactctctggaatctctttgtgttagggtctcgatttgaggacattcatttcttcagcagcccattagcaactgagagcccagggatgtcctacaggatagtttcatagtgacaggtggcacttggctaatagaatatggctgatattgtcattaatcattttgtaccttgacatgggttgtctaataaaactcggacccttcttgtgaaatcagttaaataagacttgtcccggtcacctgtgccctgcccacgacccgaggcagtggtaacactgcacagtgctatgtggcttctctttgaggatttttgggttttgtaactaaattcttgctgccctcatactttttatgtattagaatcatattcgtattgcccttttaaaacattgggatcctccaaaggcctgccccatgtatttaacagtaatacagggaagcatggcaggcaccatgcaaaccaaggatgggatggtgcaagtccctgtgtcaantgggcggtggttttcctggctggcctggaatcactcatcacctgattgattggctctgtggtcctgggcaggtgcctcataggtgtgtggatatgatgacgtttctttaaaatgtatgtatttaacaaatacttaattgtattaaggtcatgtac

SEQ ID NO: 257884 - DNA, 2733 bp, Homo Sapiens
  misc_feature (468)..(499): n is a, c, g, or t
  misc_feature (728)..(728): n is a, c, g, or t
  misc_feature (878)..(921): n is a, c, g, or t
  misc_feature (2039)..(2055): n is a, c, g, or t
actcgctcggccgccgccatcttgcgagctcgtcgtactgaccgagcggggaggctgtcttgaggcggcaccgctcaccgacaccgaggcggactggcagccctgagcgtcgcagtcatgccggccggacccgtgcaggcggtgcccccgccgccgcccgtgcccacggagcccaaacagcccacagaagaagaagcatcttcaaaggaggattctgcaccttctaagccagttgtggggattatttaccctcctccagaggtcagaaatattgttgacaagactgccagctttgtggccagaaacgggcctgaatttgaagctaggatccgacagaacgagatcaacaaccccaagttcaactttctgaaccccaatgacccttaccatgcctactaccgccacaaggtcagcgagttcaaggaagggaaggctcaggagccgtccgccgccatccccaaggtcatnnnnnnnnnnnnnnnnnnnnnnnnnnnnnnnntgccccagaaggtccaagcccaagtaatccaagagaccatcgtgcccaaagagcctcctcctgagtttgagttcattgctgatcctccctctatctcagccttcgacttggatgtggtgaagctgacggctcagtttgtggccaggaatgggcgccagtttctgacccagctgatgcagaaagagcagcgcaactaccagttttgactttctccgcccacagcacaganctcttcaactacttcacagaagctagtggaacagtacaccaagatcttgattccacccaaaggtttattttcaaagctcaagaaagaggctgaaaacccccgagaagttttggatcaggtgtgttaccgagtggaatgggccaaattccnnnnnnnnnnnnnnnnnnnnnnnnnnnnnnnnnnnnnnnnnnnncgggtggcctatgctcagatcgactggcatgattttgtggtggtggaaacagtggacttccaacccaatgagcaagggaacttccctccccccaccacgccagaggagctgggggcccgaatcctcattcaggagcgctatgaaaagtttggggagagtgaggaagttgagatggaggtcgagtctgatgaggaggatgacaaacaggagaaggcggaggagcctccttcccagctggaccaggacacccaagtacaagatatggatgagggttcagatgatgaagaagaagggcagaaagtgcccccacccccagagacacccatgcctccacctctgcccccaactccagaccaagtcattgtccgcaaggattatgatcccaaagcctccaagcccttgcctccagcccctgctccagatgagtatcttgtgtcccccattactggggagaagatccccgccagcaaaatgcaggaacacatgcgcattggacttcttgaccctcgctggctggagcagcgggatcgctccatccgtgagaagcagagcgatgatgaggtgtacgcaccaggtctggatattgagagcagcttgaagcagttggctgagcggcgtactgacatcttcggtgtagaggaaacagccattggtaagaagatcggtgaggaggagatccagaagccagaggaaaaggtgacctgggatggccactcaggcagcatggcccggacccagcaggctgcccaggccaacatcaccctccaggagcagattgaggccattcacaaggccaaaggcctggtgccagaggatgacactaaagagaagattggccccagcaagcccaatgaaatccctcaacagccaccgccaccatcttcagccaccaacatccccagctcggctccacccatcacttcagtgccccgaccacccacaatgccacctccagttcgtactacagttgtctccgcagtacccgtcatgccccggcccccaatggcatctgtggtccggctgcccccaggctcagtgatcgcccccatgccgcccatcatccacgcgcccagaatcaacgtggtgcccatgcctccctcggcccctcctattatggnnnnnnnnnnnnnnnnnatgattgtgccaacagcctttgtgcctgctccacctgtggcacctgtcccagctccagccccaatgccccctgttcatcccccacctcccatggaagatgagcccacctccaaaaaactgaagacagaggacagcctcatgccagaggaggagttcctgcgcagaaacaagggtccagtgtccatcaaagtccaggtgcccaacatgcaggataagacggaatggaaactgaatgggcaggtgctggtcttcaccctcccactcacggaccaggtctctgtcattaaggtgaagattcatgaagccacaggcatgcctgcagggaaacagaagctacagtatgagggtatcttcatcaaagattccaactcactggcttactacaacatggccaatggcgcagtcatccacctggccctcaaggagagaggcgggaggaagaagtagacaagaggaacctgctgtcaagtccctgccattttgcctctactgtctcccaccccctgccccagacccaggagcccccctgaagctttgccttgcctgcatatttgtttcgctcttactcagtttgggaaattcaaattgtcctgcagagggtcattcccctgaccctttgcccacattggtagagtagctgggttttctagccactctctggatctccttgggttaggg

SEQ ID NO: 257885 - DNA, 1840 bp, Homo Sapiens
  misc_feature (1478)..(1481): n is a, c, g, or t
  misc_feature (1802)..(1802): n is a, c, g, or t
  misc_feature (1806)..(1806): n is a, c, g, or t
ttcccgggatcccgtccatggtgtgtgcgccgagcgtccaggagccacggcggtgtcttccttgcgcgtcttttacacgtgtgggggtaggctgctcctcggggctgacccgtggccagggtaatggagaggcccgcctctccccagatggcgtcgtcgagccctgactccccatgttcctgcgactgctttgtctccgtgcccccggcctcagccatcccggctgtgatctttgccaagaactcggaccgaccccgggacgaggtgcaggaggtggtgtttgtccccgcaggcactcacactcctgggagccggctccagtgcacctacattgaagtggaacaggtgtcgaagacgcacgctgtgattctgagccgtccttcttggctatggggggctgagatgggcgccaacgagcatggtgtctgcattggcaacgaggctgtgtggacgaaggagccagttggggagggggaagccctgctgggcatggacctactcaggctggctttggaacggagcagctctgcccaggaggccttgcatgtgatcacagggttactggagcactatgggcaggggggcaactgcctggaggatgctgcgccattctcctaccatagcaccttcctgctggctgaccgcactgaggcgtgggtgctggagacagctgggaggctctgggctgcacagaggatccaggagggggcccgcaacatctccaaccagctgagcattggcacggacatctcggcccaacacccggagctgcggactcatgcccaggccaagggctggtgggatgggcagggtgcctttgactttgctcagatcttctccctgacccagcagcctgtgcgcatggaggctgccaaggcccgcttccaggcagggcgggagctgctgcggcaacggcaagggggcatcacggcagaggtgatgatgggcatcctcagagacaaggagagtggtatctgtatggactcgggaggctttcgcaccacggccagcatggtgtctgtcctgccccaggatcccacgcagccctgcgtgcactttcttaccgccacgccagacccatccaggtctgtgttcaaacctttcatcttcggggtgggggtggcccaggccccccaggtgctgtcccccacttttggagcacaagaccctgttcggaccctgccccgattccagactcaggtagatcgtcggcataccctctaccgtggacaccaggcagccctggggctgatggagagagatcaggtatcccccagggagtaggggctaccttgaggggatgatagacctcccccactcccagtgggactctggaaatatgaaggaactagggagtggaagagatttcagagctggggagaggagttcctaccttcaaagccagcaactgcctttggggaatggcggggggtattctccttgctcctgcttgtgtgaaggggtacacagtccccccnnnncctggcgggaagcctgtcccggacagactcatctcaactttcccttggggcaggatcgggggcagcagctccagcagaaacagcaggatctggagcaggaaaacctcgaggccacacaggggctgctggccggcgagtgggccccaaccctctgggagctgggcagcctcttccaggccttcgtgaagagggagagccaggcttatgcgtaagcttcatagcttctgctggcctggggtggacccaggacccctggggcctgggtgccctgagtggtggtaaagtggagcaatcccgtcacgcgccttggccatgttctgnaagncagcttgcctttgccttaataaatgtgctttatt

SEQ ID NO: 257886 - DNA, 2105 bp, Homo Sapiens
  misc_feature (1119)..(1127): n is a, c, g, or t
  misc_feature (1151)..(1385): n is a, c, g, or t
  misc_feature (1831)..(1839): n is a, c, g, or t
  misc_feature (1890)..(1890): n is a, c, g, or t
atgagccaccacgcttggctaagaacacctaaatttttatgtttcttggctcaaaaaccagttccatttctaatgttgtcctcacaagaaggctaattggtggtgagacagcaggggaggaggaagagctgtggtttgtaacttgttcaactcaggcaataagcgattttagctttatttaaagtcttctgtccagctttaagcactttgtaagacatggctgaaagtagcttttctatcagaattgcagatagtcatgttgggctaacagtcaattggatatattcctttacctcacatgaccccagcaactgtggtggtatctagaggtgaaacaggcaagtgaaatggacacctctgctgtgaatgttttagagaaggaaattcaaaaaatgttgtaactgaaagcactgttgaatatgggtatcggctttctttttcactttgactcttaacattatcagtcaacttccacattaatgaaagttgaccatagttatttccaaataaaaagaaaccaactcttaccaggtcttggactgtgatgtcatattattcagttttatgcttgttcctgagcagaactcataagagtgacatagtcagctgctgacggcacctcagccacgccactcttactcagttcagtgggtgtgcttgcgtggtaggatgtggtgcagccctctctacgctcttctatttttggtatatttcctatctaaccttcaaatagcttccaattctttttttcttggactggcttcattctgaatttgtgctaaaataatctttcataaagagacctcagtttatagcgtaacagactacacaatgcactgatgttttcataatgtttaagggacccactgcaagaagcttgctgcctccttttaattgtattcatttagattttgattttccatgttaagaaggtgaggtccatgttggtgcccttcagagtagagaaccatgtaaacattaggaatgaacagaggccttaggaatgaatagagagtttgccttatacaatttcctgttacaaagctctccctctcatgcaaagtagggaacaccttttgagcatctttgaatttgacaaatggtgctgttgcaaacacnnnnnnnnngagatgaagtctcgcggttgtcannnnnnnnnnnnnnnnnnnnnnnnnnnnnnnnnnnnnnnnnnnnnnnnnnnnnnnnnnnnnnnnnnnnnnnnnnnnnnnnnnnnnnnnnnnnnnnnnnnnnnnnnnnnnnnnnnnnnnnnnnnnnnnnnnnnnnnnnnnnnnnnnnnnnnnnnnnnnnnnnnnnnnnnnnnnnnnnnnnnnnnnnnnnnnnnnnnnnnnnnnnnnnnnnnnnnnnnnnnnnnnnnnnnnnnnnnngtgtgagccaccgtgcccggcctgcaaacacattttaattgacaacactagggctgttgtacaaaatagtaatgatagccatggaagttttaccttattctgtgagaagtgttcttaaacttattaagtgtctaaactaaggtttagtgcttttttaaaggaaagttgtcccaggattcatcctaaagaaagcaaaagttaattcaactgatccaccaatggaattagatgggtagagttgggttcttgagttttaccaccacttagttcccactgaattttgtaacttcctgtgtttgcatcctctgttcctattctgcccttgctctgtgtcatctcagtcatttgacttagaaagtgcccttcaaaaggaccctgttcactgctgcacttttcaatgaattaaaatttatttctgttctagtgaacaacacacaacaacaaannnnnnnnnctcaagatatccctcgaggcccaggtttagcgtacccagttttctgtccangggccctattgggggttgtatatagtaggccttgcgcgtttaacagttgtgcgggaactgctactggattggaagacttctcggggtgacttggcaacaccacagtaagcagaataattaggtagtgccacgccttttgtgaattgcagatatgataagcgataaagtatcgtcgtgatatacggaggtaggtggcagaggcagaagtgaagttc

SEQ ID NO: 257887 - DNA, 918 bp, Homo Sapiens
  misc_feature (757)..(760): n is a, c, g, or t
  misc_feature (763)..(771): n is a, c, g, or t
  misc_feature (773)..(776): n is a, c, g, or t
aagaagcgaggcctgggtggcgaattcggcacgaggggaggagttcctgcgcagaaacaagggtccagtgtccatcaaagtccaggtgcccaacatgcaggataagacggaatggaaactgaatgggtaggtgctggtcttcaccctcccactcacggaccaggtctctgtcattaaggtgaagattcatgaagccacaggcatgcctgcagggaaacagaagctacagtatgagggtatcttcatcaaagattccaactcactggcttactacaacatggccaatggcgcagtcatccacctggccctcaaggagagaggcgggaggaagaagtagacaagaggaacctgctgtcaagtccctgccattttgcctctcctgtctcccaccccctgccccagacccaggagcccccctgaggctttgccttgcctgcatatttgtttcgctcttactcagtttgggaattcaaattgtcctgcagaggttcattcccctgaccctttccccacattggtaagagtagctgggttttctaagccactctctggaatctctttgtgttagggtctcgatttgaggacattcatttcttcagcagcccattagcaactgagagcccagggatgtcctacaggatagtttcatagtgacaggtggcacttggctaatagaatatggctgatattgtcattaatcattttgtaccttgacatgggttgtctaataaaactcggacccttcttgtgaaatccnnnnaannnnnnnnnannnnaaaactcgaggcatctatgtcggggtgccgaaaaaagagggaatgaaaatgggccatgggccatagctggtttcctgaacccagcttttcttgtaccaaagtggataaatctggccgggcctccctaaaaggggagtccgaa

SEQ ID NO: 257888 - DNA, 1405 bp, Homo Sapiens
  misc_feature (1309)..(1358): n is a, c, g, or t
tgcaccatgccccgcatagatgcggacctcaagctcgacttcaaggactgtcctgctccgacctaagcggacagcctcaagagccgagccgaggtggatcttgaacgcaccttcacgtttcgaaattcaaagcagacctactcagggattcccatcatcgtggccaacatggacactgtgggcacgtttgagatggcagccgtgatgtcacagcactccatgtttacagcaattcataagcattactccctggatgactggaagctctttgccacaaatcacccagaatgcctgcagaatgtagccgtgagttcaggcagtgggcagaatgatctggaaaagatgaccagcatcctggaagctgtgccacaggttaagtttatttgcctggatgtggccaatgggtattcagaacattttgtggaattcgtgaaacttgtccgtgccaaatttcctgaacacaccattatggcagggaacgtggtgacaggagaaatggtagaagagcttattctttccggagcagatatcatcaaagtgggagttggaccaggttctgtgtgcaccacccgcaccaagacgggagtggggtacccccagctgagtgccgtcattgagtgtgccgactctgcccatggcctgaagggcaacatcatctctgatggaggctgtacgtgtccaggggatgtcgccaaagcctttggagctggagcagattttgtcatgctgggaggaatgttttcgggtcatacggagtgtgctggagaagtgattgagaggaacggacggaagctcaagctcttctacgggatgagctctgacaccgccatgaacaagcacgcaggaggagttgctgagtacagagcctctgagggtaaaactgtggaagttccttacaaaggagatgtggaaaacactatcctggatattctcgggggactgaggtccacgtgcacctacgtgggggccgccaaactcaaggagctcagcaggagggcaacattcatccgggtgacccagcagcacaacaccgtgttcagctaaccctggggacaaagcagcgtctggctcgagtggaagcgtccaaacctgcttttcccatctccccccaagtctgttccgtcagagcttctggctgctcctgaatggtggaatgctgtgtcctctcttctgtctcctgctgcctggaggcttcggggctctcccgcctgccttgtcggggcccagacgcaaggcaccgattgggccaacatcagagccctgctgcccagaactcataacctcattgttcaaaccaacacttgcaccnnnnnnnnnnnnnnnnnnnnnnnnnnnnnnnnnnnnnnnnnnnnnnnnnnaaaagaagatggtttcactttaatataatgctattatcttaagactt

SEQ ID NO: 257889 - DNA, 770 bp, Homo Sapiens
  misc_feature (757)..(757): n is a, c, g, or t
acgaaacgccgcggagctgaggcagttccgctggctagtgtgtacgcggcgagcttctcccggcgccgcccgctcggctcccatagcgcccgcgacagcggtccggacgccgcccgaacatggactccgccggccaagatatcaacctgaattctcctaacaaaggtctgctgtctgactccatgacggatgttcctgtcgacacaggtgtggctgcccggactcctgctgttgagggtctgacagaggctgaggaggaggagctcagggctgagcttaccaaggtggaagaggaaattgtcactctgcgccaggtcctggcagccaaggagaggcactgtggagagctcaagaggaggctgggcctctccaccctgggggagctgaaacagaacctgtccaggagctggcatgacgtgcaggtctctagcgcctacaagaagactcaggaaactctttcacaggcaggacagaagacttcagctgccctgtccacagtgggctctgccatcagcaggaagcttggagacatgaggaactctgcgaccttcaagtcgtttgaggaccgagttgggaccataaagtctaaggttgtgggtgacagagagaacggcagtgacaacctcccttcctcagcggggagtggtgacaagcccctgtcggatcccgcacctttctaagcctgtggttgcttcacccgctgcagagcacacgcaacccagcctcagcatcacagccgcagctctgttcagcgganaggccagccaggg

SEQ ID NO: 257890 - DNA, 741 bp, Homo Sapiens
atagcgcccgcgacagcggtccggacgccgcccgaacatggactccgccggccaagatatcaacctgaattctcctaacaaaggtctgctgtctgactccatgacggatgttcctgtcgacacaggtgtggctgcccggactcctgctgttgagggtctgacagaggctgaggaggaggagctcagggctgagcttaccaaggtggaagaggaaattgtcactctgcgccaggtcctggcagccaaggagaggcactgtggagagctcaagaggaggctgggcctctccaccctgggggagctgaaacagaacctgtccaggagctggcatgacgtgcaggtctctagcgcctatgtgaaaacttctgagaaacttggagagtggaatgagaaagtgacccagtcagacctctacaagaagactcaggaaactctttcacaggcaggacagaagacttcagctgccctgtccacagtgggctctgccatcagcaggaagcttggagacatgaggaactctgcgaccttcaagtcgtttgaggaccgagttgggaccataaagtctaaggttgtgggtgacagagagaacggcagtaacaacctcccttcctcagcgggggagtggtgacaagcccctgtcggatcccgcacctttctaagcctgtggttgcttcacccgctgcagagcacacgcaacccagcctcagcatcacagccgcagctctgttcagcggagcagcc

SEQ ID NO: 257891 - DNA, 1544 bp, Homo Sapiens
ttttttccccaaaggaatgctttattgacaaattacccattattataataactttaaggaaaagatacatcggtcaacacccgcacaacctgccttctcaccacaccccacaggccgattttaaccctggacgaagggcaccgagcgctgggcttccctggcccctgcatctctgtcgtgtgtggagtgccatccccaagggtgtctgaactgtccggggacacggctgtcagaggacacttgctctaccgaacaggacaccttgagctgagcagcccttcccctcccgggagtggcagagccgggcacaccacaggcaggccctcagtgtcctgccaagagccactaaggcacagagctccccctgcagaccacgccatctgacatgcagggccccggtgtgcgagagaggctgctggggtgcgaccatttagtaacaggaagagatctttgtagctcctgagaaaaagactgtaacggcaatcctggctgatgcccacgccccaccctccacctgacctgtggggtcgtttcatcccaagtacagcaagcaggagggttggagtcactgacgaatgtgagccgggccaggcccatgcaaaggcagcactgagaaggggggcacagttcttttaaagggtgctaaagacagggttttccttctcttggcccctcccattcccagaggctcaagagccctttagggcagggcataggagccagcgggagctgccacggttgagaagagaagcaggttttgtacactgggatggagtgtgcgtgacataaaacacctcaactggaagaggctgccacgcaggccaggtgtaaaattccacacaatgctcacaaccattaaggaaccctcatctatatacatataaaaattagaaagaaataaagcataaggcaatgtaaggcttgtatttcagcttgagtccaaagaaataatattctatgaggctaaagctgctttgcctaatttaaactttttgaaaagtccactgcatttaaaaaataatgaatttgcttccgttaaagctagattcgcgtaacaatcaggcagctgctgagggtcagtttcctttctgggggtctcagaaaatggacagttttctcgttcggcattttgagataaaaaattgcgtaacaggtaggacttgctgggtgattgcattccttctgtgagtcagggaaggaggaggaggaagaagtcagaaaatgccacttattttatgcttagaactcttcaatccttcaacattctgatgggctaacatgattcccaaagggagcctgggctttggctcaatattctttcaaaccctccgccctgtccacttcctgcacccctaggaaggacagcacagtgatctgtttcatctacaacgtgagtgtaaaacatctgttgtacaagcctgtgttcttcaaattcatgcaaacgcggcagccacatctcccgcgtggatgggcaggactgtcctcaggccgacgcgtgggcgaacgcgtgggtcgacgatatcccgaacttccggaccggtacc

SEQ ID NO: 257892 - DNA, 1707 bp, Homo Sapiens
  misc_feature (179)..(179): n is a, c, g, or t
  misc_feature (188)..(190): n is a, c, g, or t
  misc_feature (1473)..(1473): n is a, c, g, or t
  misc_feature (1485)..(1485): n is a, c, g, or t
tcgaggactctctgcgtctctggagacaagggcactacacgcacttcagaatgaagagttcacctagggcgcaatggaatattccattgcccctcctgtcctgggtctgtgttgcggggaacgctcgcgcggttgccagagaaagccccggacgtgacggatttgcgcgaccccaagcngcccgcccnnncccctcccatccgtcattcccctgcgctctctttcctcacccttccccccgccaccgtgggttccagacttgggataagtaaacagcgggtggagcgaggcctacggacccaggccaggtgggagtctgcactcttcaaggggcctgggctgctgctcacgggtattaaagaactccgcgttgttcatggctgaggcgatgcattaggaagatcctggacctagagaacaagtcccccgaacgctgagttggaggcgggacttcgggtgcgcgttggcgggagcatgctggggctctgggggcagcggctccccgcggcgtgggtcctgcttctgttgcctttcctgccgctgctgctgcttgcagcccccgcgccccaccgcgcgtcctacaagccggtcatcgtggtgcatgggctcttcgacagctcgtacagcttccgccacctgctggaatacatcaatgagacacaccccgggactgtggtgacagtgctcgatctcttcgatgggagagagagcttgcgacccctgtgggaacaggtgcaagggttccgagaggctgtggtccccatcatggcaaaggcccctcaaggggtgcatctcatctgctactcgcaggggggccttgtgtgccgggctctgctttctgtcatggatgatcacaacgtggattctttcatctccctctcctctccacagatgggacagtatggagacacggactacttgaagtggctgttccccacctccatgcggtctaacctctatcggatctgctatagcccctggggccaggaattctccatctgcaactactggcatgatccccaccacgatgacttgtacctcaatgccagcagcttcctggccctgatcaatggggaaagagaccatcccaatgccacagtatggcggaagaactttctgcgtgtgggccacctggtgctgattgggggccctgatgatggtgttattactccctggcagtccagcttctttggtttctatgatgcaaatgagaccgtcctggagatggaggagcaactggtttatctgcgggattcttttgggttgaagactctattggcccggggggccatagtgaggtgtccaatggccggtatctcccacacagcctggcactccaaccgtaccctttatgagacctgcattgaaccttggctctcctgaggatatattcaggggtccccaggaactcctcggtccagagaccaagtggtggccttggaaagcagatgtcaggctttggtgtgcctgtgnaccacctcattngctcccatattatcccccatttttagtagagacggggttttagtagagacttggcctcccagaacccccttcctctgctcctccatgaatgacaattccaggcctcccctacctcatgtcctctcatttgggggattgctccgtgctgtccctttctctcaaggccgaagttgggaagtgagaaaccatggttttaacttggggctgcttttgctgctgctg

SEQ ID NO: 257893 - DNA, 1096 bp, Homo Sapiens
  misc_feature (10)..(10): n is a, c, g, or t
  misc_feature (16)..(16): n is a, c, g, or t
  misc_feature (20)..(20): n is a, c, g, or t
  misc_feature (30)..(31): n is a, c, g, or t
  misc_feature (40)..(40): n is a, c, g, or t
  misc_feature (490)..(490): n is a, c, g, or t
  misc_feature (507)..(507): n is a, c, g, or t
ttctatatgnaatgancctncctgagatgnngagcaactntgagccccctgggattacttccccttctagccgctgtcccaccttattccagagccctctctgtgactcctgagctgaaggtgttcaccctgtggggagggaggtccaggatcccagcagtaactcactttgtctctccttgtgtctctcttccatgcttccacgccccttcgaccaccttgaaggtttatctgcgggattcttttgggttgaagactctatttgcccggggggccatagtgaggtgtccaatggccggtatctcccacacagcctggcactccaaccgtaccctttatgagacctgcattgaaccttggctctcctgaggatatattcagggtccccaggaactcctcggtccagagaccaagtggtggccttggaaagcagatgtcaggctttggtgtgcctgtgaccacctcatggctcccatattatcccccattnttagtagagacggggtnttagtagagacttggcctcccagaacccccttcctctgctcctccatgaatgacaattccaggcctcccctacctcatgtcctctcatttgggggattgctccgtgctgtccctttctctcaaggccgaagttgggaagtgagaaaccatgtttttaacttgtggctgcttttgctgctgctgctcctccgtatctggctgtatgggtggagaacccaccccctgccccaccacaggggtctccttcccaggccactcaggacatttttagcttctctcctccccatgttcccttttttctctaaagtcccctgacatcagccctcccaactcctaagagggactacccatgagagtggggttctgaggctcccctatggggacagttccgttcttgaagtgtcagtgttggggaatatctgtggcctatgaggcccatctcaggtttggggatcccccagtccctatgatcagtgttggagtacccccctgggagagcctagtttctttgaggccccaggccctcttttaactacctttgaataggtgttatccctgtatttatggaaataaagttccatttcctcag

SEQ ID NO: 257894 - DNA, 1532 bp, Homo Sapiens
  misc_feature (55)..(55): n is a, c, g, or t
  misc_feature (900)..(900): n is a, c, g, or t
  misc_feature (991)..(991): n is a, c, g, or t
  misc_feature (1519)..(1520): n is a, c, g, or t
  misc_feature (1522)..(1522): n is a, c, g, or t
  misc_feature (1524)..(1524): n is a, c, g, or t
  misc_feature (1526)..(1526): n is a, c, g, or t
  misc_feature (1530)..(1530): n is a, c, g, or t
ccgggatggccggcccacgggcgggaggacgcgcctccgctcgggcggaggcggncgcggtggctgatcagagcgcgtagggcttcgccggggccgggagctgggcgcggtcctgctcagcccagctcaccgcgcgccggccctcggcgccctggttctgcggatcaggagttgaaaccagcaccttccctttctctgagtcctgcctccttctgcagaagggagctcaaaagaactttgttgttttgccttttactctggggtgaaagcggcaggaggtatgtgagatggtgaaatgatttgcttctgccatgctggggtcacgggtggatcgccctaaactctcggtggccccctcagtagttttggaagaggaccaagtccttgtctctccagcagtggacctggaagaaggatgccggctcagggacttcactgagaaaataatgaatgtcaaaggaaaagtaattctgtcaatgctggttgtctcaactgtgatcattgtgttttgggaatttatcaacagcacagaaggctctttcttgtggatatatcactcaaaaaacccagaagttgatgacagcagtgctcagaagggctggtggtttctgagctggtttaacaatgggatccacaattatcaacaaggggaagaagacatagacaaagaaaaaggaagagaggagaccaaaggaaggaaaatgacacaacagagcttcggctatggggactggtttaatccaaacttgaaggaatccgaataactaaactggactctggttttctgactcagtccttctagaagacctggactgagagatcatgcggttaaggagtgtgtcacaggcggaccacctgttgggactgcgagattctcaaggggaaggactgggtctcatntctcccatctcagcgcttagcaggatgacctggtatagagcagggaactgggaaatgtgggtcaggggatcagacactccagttgggtctnttatataaattaaatggcaaaaggctccatacccttctccttctttcctaccctccactttatctgcaaaatgggaatgatgataacacccacttcatagaatggtcatgaagatcaaatgagagaataaaagtcaagcacttagcctctggtgcacaataagtattaaataagtatacctattcctccttttccttttttaaaaataatattaccaaatgtccagcttatacacatttacaagacttagctagtgggctatgttagagctactaaaagatctttgacaagctaaaactaagatgcaatgaatgaggtgtaacgaacaagagagttttaagttcagaaatggttacagaagtataagacagctgtgtgggtgttttttggtttttggtttctggtttacaatctcgtcattcaacaaagatgggagttttatagaactaaaagcaccatgtaagctactaaaaacaacaacaaaaaaggctcatcatttctcagtctgaattgacaaaaatgccaatnnanantnaaantg

SEQ ID NO: 257895 - DNA, 373 bp, Homo Sapiens
  misc_feature (26)..(26): n is a, c, g, or t
  misc_feature (251)..(251): n is a, c, g, or t
atatctaggtgcagcattaagcctgnaattcccctttacactttattttacactgaacgtgtatcctatgtacaatagagttaagcaataaagctgtcttcatttggaaatcaaggcaccattatcatccacatcttcaccaggactgtggttggggaccaaggggagtagggatgaagatgtccctctcagaaaccaggaagagccaagccgcgactccccgctccccaaaccatcctcaatcctcctcntactgcctgtggccatcaaccgtggggcctgtgttagagacagggggggaaaagagcccaagagccgtctgcctgcacagagggcatcataaatgagaggggaggccgggcgcagtggctca

SEQ ID NO: 257896 - DNA, 2142 bp, Homo Sapiens
  misc_feature (48)..(98): n is a, c, g, or t
  misc_feature (1838)..(1838): n is a, c, g, or t
  misc_feature (1849)..(1849): n is a, c, g, or t
  misc_feature (1887)..(1928): n is a, c, g, or t
cagtctgtctccggcgccgcccgtcgcggactcgtccttgctgcagtnnnnnnnnnnnnnnnnnnnnnnnnnnnnnnnnnnnnnnnnnnnnnnnnnnntgctcctccgcctggcctgggccgtctgcccgcagccatgagcgtgctcggccccggtggagcccgcagtcctctagattagtctccaccgccgtccaggacccacttgcagcatggagtcgcccgcctcgagccagcccgccagcatgccccagtccaaaggaaaatccaagaggaagaaggatctacggatatcctgcatgtccaagccacccgcacccaaccccacacccccccggaacctggactcccggaccttcatcaccattggagacagaaactttgaggtggaggctgatgacttggtgaccatctcagaactgggccgtggagcctatggggtggtagagaaggtgcggcacgcccagagcggcaccatcatggccgtgaagcgatccgggccaccgtgaactcacaggagcagaagcggctgctcatggacctggacatcaacatgcgcacggtcgactgtttctacactgtcaccttctacggggcactattcagagagggagacgtgtggatctgcatggagctcatggacacatccttggacaagttctaccggaaggtgctggataaaaacatgacaattccagaggacatccttggggagattgctgtgtctatcgtgcgggccctggagcatctgcacagcaagctgtcggtgatccacagagatgtgaagccctccaatgtccttatcaacaaggagggccatgtgaagatgtgtgactttggcatcagtggctacttggtggactctgtggccaagacgatggatgccggctgcaagccctacatggcccctgagaggatcaacccagagctgaaccagaagggctacaatgtcaagtccgacgtctggagcctgggcatcaccatgattgagatggccatcctgcggttcccttacgagtcctgggggaccccgttccagcagctgaagcaggtggtggaggagccgtccccccagctcccagccgaccgtttctcccccgagtttgtggacttcactgctcagtgcctgaggaagaaccccgcagagcgtattgagctacctggagctgatggagcaccccttcttcaccttgcacaaaaccaagaagacggacattgctgccttcgtgaaggagatcctgggagaagactcataggggctgggcctcggaccccactccggccctccagagccccacagccccatctgcgggggcagtgctcacccacaccataagctactgccatcctggcccagggcatctgggaggaaccgagggggctgctcccacctggctctgtggcgagccattttgtcccaagtgccaaagaagcagaccattggggctcccagccaggcccttgtcggccccaccagtgcctctccctgctgctcctaggacccgtctccagctgctgagatcctggactgaaggggcctggatgccccctgtggatgctgctgcccctgcacagcaggctgccagtgcctgggtggatgggccaccgccttgcccagcctggatgccatccaagttgtatatttttttaatctctcgactgaatggactttgcacactttggcccagggtggcacacctctatcccggctttggtgcggggtacacaagaggggatgagttgtgtgaataccccaagactcccatgagggagatgccatgagccgcccaaggccttcccctgggcactggcaaacagggcctctgcggagcaaactgnctcacccagtnctgcccgccaccgttatcggtgtcattcacctttcgtnnnnnnnnnnnnnnnnnnnnnnnnnnnnnnnnnnnnnnnnnnaatgggtttggcttgtttttcttgcatggtttggagctgatcgcctctcccccaccccctagggtaccagcaggcagagccttgcacctctgctcaggctggggtccagtgggaggggcccaagatctctgctcagagaagtgcagggggagccttccagctcactctccctgaggactggcttgacaggggctatgggtttgctttggtgttg

SEQ ID NO: 257897 - DNA, 488 bp, Homo Sapiens
  misc_feature (18)..(18): n is a, c, g, or t
  misc_feature (103)..(103): n is a, c, g, or t
  misc_feature (180)..(180): n is a, c, g, or t
  misc_feature (206)..(206): n is a, c, g, or t
ctatccccggctttggtnccgggtacacaaagaggggatgaagttgtgtgaataccccaagactcccatgagggagatgccatgaagcccgcccaaggccttncccctggcactggcaaacagggccttctgcgggagcaacactggcttcaccccaagtcctgccccgccaccgttaancggtggtcattcaccttttcggtgtntttttttaaatttatcctctgttgattttttccttttgctttatgggtttggcttgtttttcttgcatggtttggagctgatcgcttctcccccaccccctagggtaccagcagcagagccttgccctctgctcaggctggggtccagtgggaggggcccaagatctctgctcagagaagtgcagggggagccttccagctcactctccctgaggactggcttgacaggggctatgggtttgctttggtgttgtttttaaaaaaagaaaatatatttttttg

SEQ ID NO: 257898 - DNA, 1074 bp, Homo Sapiens
  misc_feature (356)..(356): n is a, c, g, or t
  misc_feature (358)..(413): n is a, c, g, or t
  misc_feature (451)..(451): n is a, c, g, or t
  misc_feature (495)..(495): n is a, c, g, or t
  misc_feature (524)..(524): n is a, c, g, or t
  misc_feature (800)..(800): n is a, c, g, or t
  misc_feature (912)..(912): n is a, c, g, or t
  misc_feature (914)..(914): n is a, c, g, or t
  misc_feature (975)..(975): n is a, c, g, or t
  misc_feature (1008)..(1008): n is a, c, g, or t
  misc_feature (1014)..(1017): n is a, c, g, or t
  misc_feature (1024)..(1024): n is a, c, g, or t
  misc_feature (1028)..(1028): n is a, c, g, or t
  misc_feature (1032)..(1032): n is a, c, g, or t
  misc_feature (1038)..(1038): n is a, c, g, or t
  misc_feature (1041)..(1043): n is a, c, g, or t
  misc_feature (1046)..(1046): n is a, c, g, or t
  misc_feature (1053)..(1053): n is a, c, g, or t
  misc_feature (1060)..(1060): n is a, c, g, or t
acaatctgagataatacagaggaataaaaagaataaagtaatttttaacaacaaatcacaatgtggtgaaggctgttttaacatgatagaatatttccttctgggttttctttttgtctcttaaactttttagttaactgagattatatggtaatcactcattatttctgaatattatattatgagcatttcagtaggtcattaaaattataattcataatatcctaatatttagattgattgcaatttttagtaagtagacataaagttgcagtacattttatatgtataagtgtatacatgtataatatttatataaatgtgtaaccttgtatgtatatgcatatacatttgcnannnnnnnnnnnnnnnnnnnnnnnnnnnnnnnnnnnnnnnnnnnnnnnnnnnnnnnnttatccatatttctaattctttcttaaaatagattgtnatggtgggggcatctctaggtcaatgagcataaacgtgcttaanacttttgccatcttggtgcaatttttaanaattatctttccatatctttctactatctttaggattcaggcaagcagcgaatgttgtgtaatagtgaactctgagcagactcagggtctggggctcctgtaccttggaaaggactgcatagtcataactgtgtcacacatttgcaaaaacacgcacgcacacattggcacggggtgatggtgggttgtgagccccaatttctaaacctacatttgtgagagcagcagcaggagaattgactggccagaagcgtctagggcaggaataggacagtnctgccctgttctaagaaaggagaggtgatccgggtggtgagcaggccccaggaaagcctggccaggtgatggttccaacaaagatttgagcgccactccctcacaagtgagntngaccacagcacaggcaatcacacaggggtggaagacacaggcgataagcccttttctcacnaagatgaagcttttggtgtctgttccttccgtnctggcnnnnttcaatnttanaaanatttanatnnnttntccaaantttcaantcccatacttttga

SEQ ID NO: 257899 - DNA, 1862 bp, Homo Sapiens
cggttccggattcccgggatgccatggcggcggcactgaagtgtctactgacattaggaagatggtgccccggccttggagtggctccccaggcccgggcgctcgccgccttagtacccggagtgacccaggtagataacaagtccggtttcctgcagaagaggcctcatcgccagcaccctggcatcctaaagctgccgcacgtgcggctgccacaggcactggctaacggtgcccagttattgctacttgggagcgctgggcccactatggagaatcaggtgcaaacactgaccagttatctctggagcagacatttgcctgtagagccagaggagttgcaaagacgggctaggcatcttgagaaaaaattcctggaaaacccagacttatctcagacagaggagaaacttcgtggagcagtgctacacgcactacgtaaaactacctaccattggcaagaactgagctacactgagggactgagcctggtgtatatggcagcaagactggatggtggctttgcagcagtctccagagcattccatgagatccgggctcgaaatccagcatttcagccacaaactttgatggactttggctcaggtactggttctgtcacctgggctgctcacagtatttggggccagagcctacgtgaatatatgtgtgtggacagatcagctgccatgttggttttggcagaaaaactactgaaaggtggttcagaatctggggagccttatattccaggtgtctttttcagacagtttctacctgtatcacccaaggtgcagtttgatgtagtagtgtcagctttttccttaagtgaactgcccagcaaggctgaccgcactgaggtagttcaaaccttatggcgtaagacaggtcatttcctggtactggtggagaatggaacaaaagctgggcacagccttctcatggatgccagggatctggtccttaagggaaaagagaagtcacctttggaccctcgacctggttttgtctttgccccgtgtccccatgaactcccttgtccccagttgaccaacctggcctgtagcttctcacaggcgtaccatcccatccccttcagctggaacaagaaaccaaaggaagaaaagttctctatggtgatccttgctcgggggtctccagaggaggctcatcgctggccccgtatcactcagcctgtccttaaacggcctcgccatgtgcattgtcacttgtgctgtccagatgggcacatgcagcatgctgtgctcacagcccgccggcacggcagggatttgtatcgttgtgcccgtgtcagctcctggggagatcttttacctgtgcttactccgtctgcgtttcctccatctacggctcaggatccctctgagagttgatgaggatgtgtaacaagtattttcttctatcgtgcctgccagggctgaagctgcctggtatccaggaggggaatgctggtatccccatatgtctgtgtttgtttgagatttttaataataaataataaatttttgcagaaccccccgcaacccctccccgcctacccacgacaccgatacaacatacgcttccccacccggcgcgaccctcgcatccgatgccctaatacccgcccgtttgtcctgttcccctcgcccccccgaattattttccccccttttcttccttgtgcgtgcgccccccctatggttttgcttcgtgtgccccgcgcgggccgcgataaaatgccgccgcggcgcggccccacgcttttttgcccccaccacacccaaaaacacgccccccggcgcgcaaacaacccggcggcgggtggttcgagcgccacacccccctaggcgcggcgctcc

SEQ ID NO: 257900 - DNA, 373 bp, Homo Sapiens
  misc_feature (107)..(107): n is a, c, g, or t
tgtccagatgggcacatgcagcatgcgtgtcgtcacaggcccgcggcacggcaggtatggggggtgtgaccaaaatcagtgggatgtggcaggaagctgcagcccancgccagcaatctgtttccacagggatgtgtatcgttgtgcccgtgtcagctcctggggagatcttgtacctgtgcgtgactccgtctgcgtttcctccatctacggctcaggatccctctgagagttgatgaggatgtgtaacaagtattgtcttctatcgtgcctgccagggctgaagctgcctggtatccaggaggggaatgctggtatccccatatgtctgtgtttgtttgagatttttaatagtaaataataaatttttggg

SEQ ID NO: 257901 - DNA, 1526 bp, Homo Sapiens
caggctggtactggtccggaattacgggatatcgtcgacccacgcagtcgggcctcgaacgggatggcagaggaggtgaggagggaggaagcgtccggagtggggcgggcccggactccgacccccggggcgcttcgagccccccagctggtcaccggaggcaccgccgcttcacccaggccagtagccgccccctcgcgcaccccggccccgcctcacacgcgcgcccgagcgagccccgggctcccctcgggcccagcgtggcgcaggggtcagtggttctctcgggtctcgggacaggtgagcaccctgatgaaggccacggtcctgatgcggcagcctgggcgggtgcaggagatcgtgggcgccctccgcaagggcggcggagaccggttacaggtgatttctgattttgacatgaccttgagcaggtttgcatataatggaaagcgatgcccttcttcttacaatattctggataatagcaagatcatcagtgaggagtgtcggaaagagctcacagcgctccttcaccactattacccaattgagatcgacccacaccggaccgtcaaggagaagctacctcatatggtggaatggtggaccaaagcgcacaatctcctatgtcagcagaagattcagaagtttcagatagcccaggtggttagagagtccaatgcaatgctcagggagggatataagaccttcttcaacacactctaccataacaacattccccttttcatcttttctgcgggcattggtgatatcctggaagaaattatccgacagatgaaagtgttccaccccaacatccacatcgtgtctaactacatggattttaatgaagatggttttctccagggatttaagggccagctgatacacacatacaacaagaacagctctgtgtgtgagaactgtggttacttccagcaacttgagggcaaaaccaatgtcatcctgctgggagactctatcggggacctcaccatggccgatggggttcctggtgtgcagaacattctcaaaattggcttcctgaatgacaaggtggaggagcggcgggagcgctacatggactcctatgacatcgtgctggagaaggacgagactctggatgtggtcaacgggctactgcagcacatcctgtgccagggggtccagctggagatgcaaggcccctgaaggcgcaggctccaagcccggcctgcaggccgtggtgaggaggggcgcctccccagagtctgctcccccgtgaacacagagcagaggccagggtggccagcagtggctgggtccttccgcgcccctccgtcctcctttccctgagcaccttcatcaccagaggcttgaaggaaccccgccatgtggcagggcacaggcactgttcctggtgaaccttggaccacagcatgtcagtgctctagggattgtctactccagggattttcttcaaaatttttaaacatgggaagttcaaacaaatataatgtgtgaaacagatcaaaatttttaaaatg

SEQ ID NO: 257902 - DNA, 964 bp, Homo Sapiens
  misc_feature (14)..(14): n is a, c, g, or t
ggtcggggtgattnttcctgcacagcaagcccgtcggttcaagatggtcagaaaaacaagtggggtctcaagctgcagaacctctgttaggagttgggagcccacaggtacctcagaagtgggaggagtgttcggaagggtcgcaccgtagaaagatgatttctcatctcagctctacagtgagctcgataacctaattaccagagttgggaaccaggttgaacgcttggtaatggaccgagatgagggacgttttccagttagaagaggagctgctgtctacatttgccatctgctgttgcctcttgtcaatgggaacagccaggaccgggggcaggggtagggaggttgaggatgatgcagttcagctgttcccactcaccagggctgtaacttcctttgcagggctggaccccaatggagaacaggtggtgtggcaggcgagcgggtgggcagcccgcatcatccagcacgagatggaccacctgcagggctgcctgtttattgacaaaatggacagcaggacgttcacaaacgtctattggatgaaggtgaatgactaaagctttgctactggggctgaggattccggataccaagacgcaaacactttcactttgagctgggcaaatcttacttggcatcaacttggatggctcgcatatgacaggaaactggattgccaaggcatggcagactgagctggaggaagatgtcagaaatgtttgccctgaaatcagttacggacaaaatgttggctacaacttgaggagaaaaatcacccccaaaggagtggacatttcctaacaattctgtatggaggaaagtggggtaattgcattcgtctgcagtagacacgagttcctcggacctgtataatctcccaaagccaaagtttggtaataatgtagtccccaaatacctgaaagctgtctttaaaaatgcaggtaagcatgtgactggc

SEQ ID NO: 257903 - DNA, 1933 bp, Homo Sapiens
  misc_feature (345)..(345): n is a, c, g, or t
  misc_feature (355)..(355): n is a, c, g, or t
  misc_feature (1194)..(1194): n is a, c, g, or t
cgaaaccccgctcctggagcggcttttctcaggcttgcgcggctctaggccgaagcggcggatgacgcaaccgggccgcgccgcgagaaggtcacacgattctccaacatggcggcggcggccctgcggagtggctggtgccgctgtccacggagatgcctcggcagtggaatccaatttctttccagccacaacctaccccatgggtcgacctatcagatgcgccggccgggcggagagctgccactgtccaaatcatattcttctggaaacagaaaaggctttctgtccggcttgctagataatgtcaaacaagaattagccaaaaacaaagaaatgaaaganagtataaaanaattccgtgacgaggccagaaggctagaagaatcagacgtgctccaggaggccagaaggaaatacaaaaccatcgagtcagaaaccgtgcggacgagcgaggtgctacggaagaagcttggggagctgacgggcaccgtgaaggagagccttcacgaagtcagtaaaagtgatctcggccggaaaatcaaggagggcgtggaggaagcagccaagacggccaagcagtcggccgagtcggtatccaaaggcggggagaagctgggcaggacagcggccttcagagccctctcccagggggtggagtccgtgaagaaggaaattgacgacagcgtcctgggacagaccgggccctaccggaggccccagcgactccggaagagaacggagtttgcgggagataagttcaaggaggagaaagtgtttgagccaaacgaggaggccctgggggtcgtgctgcacaaggactccaagtggtaccagcagtggaaggacttcaaggagaacaacgtggtgtttaaccgggttcttcgagatgaagatgaagtatgacgaaagcgacaacgcgttcatccgggcatcccgggcccttacggacaaggtcaccgacttgctggggggcctgttctccaagacagagatgtcggaggtgctcacggagatcctccgggtggacccggcctttgacaaggaccggtttctgaaacagtgcgagaacgacatcatccccaatgtcctggaggccatgatttctggagagcttgacattctcaaagactggtgctatgaagctacttacagccagctggcccaccccatccagcaggccaaggcactggngtctccagttccattctcgcatcctagacattgacaacgtcgacctggccatgggcaagatgatggagcaggggccggtgctgatcatcaccttccaggcacagctggtgatggtggtcaggaaccccaaaggcgaggtggtggagggtgacccggacaaggtgctgcggatgctgtacgtgtgggcgctctgccgagaccaggacgagctcaacccctacgcgcctggcggctcctggacatctcggcctccagcaccgagcagattctctgagtgtggtgccggagccaggtagccccggcctgggtcatcaggcacagaggcaccgcaacaccacctgcggcaactccagacctctgggaacaagactgcgggctctgcccccagctctgccaggacggctgcaagaccagctggcccgggaggggacaacgggctgttgcgggtgcgcggcagctggagacactcccccgcagggccaacccctgccctgttgctctgccctgcaggggtcccggcgcctggtcacctggggtgcacacaggtcacacagtgccaagaggccccagggcccagggactccccccacagcagggtgggacccgggacccgcggctcagtggcccgctagccacgtcagccaagccactttaggtccattttttaattttaacagtgctcttccatcttgtgcataagcctgagatttggaaagaataaaaccccgaattgcagaag

SEQ ID NO: 257904 - DNA, 1256 bp, Homo Sapiens
cccagcaccgaggcctgggtggcgaattcggcacgaggcgagtgccacgtcccaagtgctacgcggaggattagagcaggcggtgcgctgggggcgggagcagcgcggagcccggctcggccacaccgatcgcccgccgccatgggctcctcgcaaagcgtcgagatcccgggcgggggcaccgagggctaccacgttctgcgggtacaagaaaattccccaggacacagagctggtttggagcctttctttgattttattgtttctattaatggttcaagattaaataaagacaatgacactcttaaggatctgctgaaagcaaacgttgaaaagcctgtaaagatgcttatctatagcagcaaaacattggaactgcgagagacctcagtcacaccaagtaacctgtggggcggccagggcttattgggagtgagcattcgtttctgcagctttgatggggcaaatgaaaatgtttggcatgtgctggaggtggaatcaaattctcctgcagcactggcaggtcttagaccacacagtgattatataattggagcagatacagtcatgaatgagtctgaagatctattcagccttatcgaaacacatgaagcaaaaccattgaaactgtatgtgtacaacacagacactgataactgtcgagaagtgattattacaccaaattctgcatggggtggagaaggcagcctaggatgtggcattggatatggttatttgcatcgaatacctacacgcccatttgaggaaggaaagaaaatttctcttccaggacaaatggctggtacacctattacacctcttaaagatgggtttacagaggtccagctgtcctcagttaatcccccgtctttgtcaccaccaggaactacaggaattgaacagagtctgactggactttctattagctcaactccaccagctgtcagtagtgttctcagtacaggtgtaccaacagtaccgttattgccaccacaagtaaaccagtccctcacttctgtgccaccaatgaatccagctactacattaccaggtctgatgcctttaccagcaggactgcccaacctccccaacctcaacctcaacctcccagcaccacacatcatgccaggggttggcttaccagaacttgtaaacccaggtctgccacctcttccttccatgcctccccgaaacttacctggcattgcacctctccccctgccatccgagttcctcccgtcattccccttggttcc

SEQ ID NO: 257905 - DNA, 1664 bp, Homo Sapiens
  misc_feature (1003)..(1003): n is a, c, g, or t
  misc_feature (1479)..(1479): n is a, c, g, or t
  misc_feature (1535)..(1536): n is a, c, g, or t
  misc_feature (1538)..(1538): n is a, c, g, or t
  misc_feature (1540)..(1540): n is a, c, g, or t
ggggaaggcggcggcggcggcacctgcgatcagcggctggggcaggttatggtagtgcggactgcggtgtgagcagagcggccacggggcccgccatgcgccggcggccctgacatgggcgccagcgggtccaaagctcggggcctgtggcccttcgcctcggcggccggaggcggcggctcagaggcagcaggagctgagcaagctttggtgcggcctcggggccgagctgtgccccccttcgtattcacgcgccgcggctctatgttctatgatgaggatggggatctggctcacgagttctatgaggagacaatcgtcaccaagaacgggcagaagcgggccaagctgaggcgagtgcataagaatctgattcctcagggcatcgtgaagctggatcacccccgcatccacgtggatttccctgtgatcctctatgaggtgtgaccctgggaggtggcagacagaagcaccccctgccccggcaagaaactcccaggctcaatcaaggtgtggcttccattgaggagcccaggctggggccacaaccctgaataaactctgttggcccataaccttcagctgtgagcgggtcggtcccacagtattggttgggtgttggtttgtgtgtggacaagaggtggttggtgggtggtgaaggctaatggcagagttagcaccccactctcccaagccacccctgcaagcagcacagcagggcatataccagtcaggaatgcccgttacctggttccttgcctggtctgctttcttccaagtttgcctggggcctagccctgctagaggctacagcactttacaagcaaggtatgctttcttccagcccctaggctgtgggcactgtatacaagtaggaacttcctttccttcacttcccttttaacccctagtcagagcatttcagccatttgctacctcgattccctcctgtgttggacagagggctggggggcagtggccagcctgattcttccgacctacnctgccatttgttcccgccttcagatggatggacagtttgctggctattgataggagtggggactgggtgggggcttctccctctacccagggctgggctgatccccctactgcaactaactgttgccccccaaccccgaacccccagttgaggagttgagagagtgcaggctggggtcaggacaggctgcggatgcttgtgcctatggggagttactccaacccacctattctgtctaatctccatggctttgcaccaaatcctccacccctccaattgggaggggactgttcaccaccttgtggtaagggacaacaccctaaggctggtgccagtagttatgagtagcctaccaccccctcccttacagtaacccccaccccttcaggatcagtcaagggaaagcactagaacccctgggtagggaaagaaaggagggaaaaaccataaaaggaatacttataatgtgaaggttngtaaatagtccatgatgatgtcgtggcagagtctgatttctatatagaggtgactnntntnttaagtactgtgcaagctctgtgcttctataatgtgggaaatggcttggggaggatggcccctagcttaggaagactgttgtgttatttgttcaatttcaaaaaaaccatcttgtagatcctgc

SEQ ID NO: 257906 - DNA, 876 bp, Homo Sapiens
  misc_feature (203)..(203): n is a, c, g, or t
aaacttcatttctcttccaacccattgtgttcctctgccctcattctttacctttgttgtaagaactttagctccagggaactgaggcagaggccctgtttgtggtctgtgttgacagccacccaccctctcccacctcatgctcctgcacctgcaccaccaaggttgatgccggattcgaagccaggaaggcccagtccctnttctgctctcctcaaagacgcaaaacattttccaacaagagctgtcacagtggcagcaaagcaggggccacccgtctccacagtccttcagagtttcagctgcatcctggtgtcccacccaggtcgagcccccaggcttctggaaaacaatgtgtgctctactttgatggaaacatggcaaggaatttaaagacaggaatgtattaatattattgaaggtgtgttcgtaacctctgattctgtggacttgccactttctccaaacgctcggttcctttgaagatttcttctgaacgtgtgtgcgcacgctgggcgggttcgtgcatacatgcggggaccccagactgtcagcacagggaagatggatcccatcctaatttttatcacctgaaggttggaaccagtgagggactgggagagagtgatttataaacaccaatatcaacttcatgtggatttttgacaaggaggggtagtttgtaatttcatttaaattcttttcagcagctggaaatattgcactatctgaaacactgaatctccttttgtaactggtgttcactgacaccttgatggctcttgatggctctaaaaagttgtaggattttttgtttttgtagctaacttatggattgagatgtgatcaaaggctttattaaatttgtacttcagc

SEQ ID NO: 257907 - DNA, 1405 bp, Homo Sapiens
  misc_feature (1323)..(1323): n is a, c, g, or t
  misc_feature (1358)..(1358): n is a, c, g, or t
  misc_feature (1369)..(1369): n is a, c, g, or t
  misc_feature (1383)..(1383): n is a, c, g, or t
caaatttccatgtattttctgccatttttcagggtctaagattggtcatacattcccaatttactctcagttccagtcaagctggttgctctgaaagtaacccagcttgttgctctaaaatacctcagtagcctgagtgttatactagagatctaaagggttaacaggatagggataagcaaactgaatgggtggtggaattggcagaatggataccagttcctacattcctgaccccactaccataaaacaggatgtttcctgttgcaaagctaatgagaccccacccttcttgtctcagagcaggcaggagctcatctgtcttgttctgccttcctaattaccctggaagggccagaacgaagaacacctgagaatactgaaagtgcctaaaaacccctgctcctacgttgttttcccatttaaagcagactcttcagccagggggcagtgggacctggtcttcagacaaaactccctgagtctaatgtgtgtctaggactagggcacagaaatagagcttaaaatttggggaggataaggagtgtatctactgcttctctctcccctttccccaatcctaccataccctgttcatatctctacactgcaggaaccacttctccagagggcaagaatggaggagggggacctgtccatcatagcaacatgcaaacacaagcaaaacactgaataaagaattgtttggagattatgtgcagccctactgagcctcatttatatgggctcctagttgatccatggctcgggcttaagatgagtaagatgatgagggtagcgtgccaagcagaaatcacttcagagaaaaatatcttgactttagagttgtggttctcaaatggaggcgattttcccccctaggagaaatcgggccaatgaatagagacatttttgggtgtcataactagagtgggccaggggtgctgctaaatatcctgtaatgcacaaaataggaaacaggttttccttacaaagaacacttcagcccaaaatgtcaaaggcatctcggttgtgaaaccttgttctagagcctctccctgctcccgtgctgtgaggatcttaagactcctaaactcacagatgattgttttcaacctatttatctcaccatcctcaatgatcagaagtccaccttgagatggacttactcctagttctgccgcattctggggtttctttccagacccctcttcctcctctcacctgggggccagcaggggagggttgggcagaggggcagggaaaggatgcccccaaaactttaaatggggattgtccatcagggtggaaggaggcttaccntctttacccttaacttctttatttcgggtgggggnaaccaggggtncctaataggggggnaggaggtttaggggccggaggg

SEQ ID NO: 257908 - DNA, 890 bp, Homo Sapiens
  misc_feature (856)..(856): n is a, c, g, or t
  misc_feature (869)..(869): n is a, c, g, or t
gctgaggcggccaccgcgactccggctctgcgctcggctgcctgacttcttcctgctgctgcttttcaggggctgcctgataggggctgtaaatctcaaatccagcaatcgaaccccagtggtacaggaatttgaaagtgtggaactgtcttgcatcattacggattcgcagacaagtgaccccaggatcgagtggaagaaaattcaagatgaacaaaccacatatgtgttttttgacaacaaaattcagggagacttggcgggtcgtgcagaaatactggggaagacatccctgaagatctggaatgtgacacggagagactcagccctttatcgctgtgaggtcgttgctcgaaatgaccgcaaggaaattgatgagattgtgatcgagttaactgtgcaagtgaagccagtgacccctgtctgtagagtgccgaagggtgaccagtaggcaagatggcaacactgcactgccagggagagtgagggccacccccggcctcactacagctggtatcgcaatgatgtaccactgcccacggattccagagccaatcccagatttcgcaattcttctttccacttaaactctgaaacaggcactttggtgttcactgctgttcacaaggacgactctgggcagtactactgcattgcttccaatgacgcaggctcagccaggtgtgaggagcaggagatggaagtctatgacctgaacattggcggaattattgggggggttctggttgtccttgctgtactggccctgatcacgttgggcatctgctgtgcatacagacgtggctacttcatcaacaataaacaggatggagaaagttacaagaacccagggaancagatggagttantacatcgcactgacgaggagg

SEQ ID NO: 257909 - DNA, 1358 bp, Homo Sapiens
ttgtgtgaacaagccttcattgtgcaagcgtgacgcccaacaaacaaacaccaggtctgcgctggccgaagacgaagcgtcctccctggaggtgggaacaagtcacctctgaccacacctcctctgacgccatcacctcctcctggccccacccaagggctcgacacaagccccaaggtcggggggagaggggcggggcggaaccgagggcggaggccaaggtgggattccaggaaggccttccgaaggatggaggtgggtcctgtccctccaggtagcttgtgggtgtggacagcaggacttgctggctcagtgtgggcacaaggacactgtgccactggttgagtgagtggtgagggattggaggtggctcccagaggcctccatctgcatggccctggccctgtggctccagcaggctgccctggctgtgggtagcccaggagccacatgcgcttagtggggccgctctggggcaggggctctcacaggacagcatgagccactgagccgcctggggagggccaggccaggcggggagctgtggtgcaatttgctcctgtccctggaggtctgtgggcggaagctgtgggcacaggtggacatggctgtcagaagtggggtcataggctcccactccccagctcctgccttcctcacagacagaagccacgcccaaggagaggagagacatggggaaggcagagatgagggaacaggaagggagaaggcaatgagaaaagagaaagggagggtaagatgcggagggcacaggtggatggggacgagggggccaagcatggacagcaggaggggagaaggcggaggggccgagaggcagctgcgcaagagggccttcaggcagagttgaggtctgtggccttgggctgggccttgcgggaggtcagctccgacagcttcttcagccgcttcttcagctccagcgggaacttctcgtagcacctcttacacacgggcttcatgtcgaactccacaaacttgttcttcagggtgagcttgctgttgcaggtggagcaggagaagcagctcacacaccaggccttgttgagggccgacaccacatcgccttcaatcacatggctgcagttgtagcagacgtccccgaagagctgtgggccgagcaggctgtcagagtagctgcaggcagtcacaccccagcccagggccatcatgcagccagcctggccctccaacacggcccctctcaggcatctcccaggccctgcctcccagggcccagctgcaaggctgggttgagggcacggcaacccatgagaaccacccttccgggaaggacaacaggctggggcgttgctccccagaagggcccctctgct

SEQ ID NO: 257910 - DNA, 1722 bp, Homo Sapiens
  misc_feature (325)..(325): n is a, c, g, or t
  misc_feature (902)..(902): n is a, c, g, or t
  misc_feature (971)..(971): n is a, c, g, or t
  misc_feature (1040)..(1040): n is a, c, g, or t
  misc_feature (1681)..(1681): n is a, c, g, or t
  misc_feature (1720)..(1720): n is a, c, g, or t
ttcagccgcagccgcccgggcggacgcgtcccgcagccggctggtccctgtcgctgcccctgcgctcgtcccagcccacccgcccggtgcggactcgccatggcggccaccgacctggagcgcttctcgaatgcagagccagagccccggagcctctccctgggcggccatgtgggtttcgacagcctccccgaccagctggtcagcaagtcggtcactcagggcttcagcttcaacatcctctgtgtgggggagaccggcattggcaaatccacactgatgaacacactcttcaacacgaccttcgagactgaggaagccagtnaccatgaggcatgcgtgcgcctgcggccccagacctatgacctccaggagagcaacgtgcagctcaagctgaccattgtggatgccgtgggctttggggatcagatcaataaggatgagaggcccatagttgactacatcgatgcgcagtttgaaaattatctgcaggaggagctgaagatccgccgctcgctcttcgactaccatgacacaaggatccacgtttgcctctacttcatcacgcccacagggcactccctgaagtctctagatctagtgaccatgaagaaactagacagcaaggtgaacattattcccatcatcgccaaggctgacaccatctccaagagcgagctccacaagttcaagatcaagatcatgggcgagttggtcagcaacggggtccagatctaccagttccccacggatgatgaggctgttgcagagattaacgcattcatggaatgcacatctgccctttgccgtggtgggcagcaccgaggaggtgaaggtggggaacaagctggtccgagcacggcagtacccctggggagtggtgcaggtggagaatgagaatnactgcgacttcgtgaagctgcgggagatgttgatccgggtgaacatggaagacctccgcgagcagaccnacagccggcactacgagctctaccggcgctgcaagttggaggagatgggctttcaggacagcgatggtnacagccagcccttcagcctacaagagacatacgaggccaagaggaaggagttcctaagtgagctgcagaggaaggaggaagagttgaggcagatgtttgtcaacaaagtgaaggagacagagctggagctgaaggagaaggaaagggagctccatgagaagtttgagcacctgaagcgggtccaccaggaggagaagcgcaaggtggaggaaaagcgccgggaactggaggaggagaccaacgccttcaatcgccggaaggctgcggtggaggccctgcagtcgcaggccttgcacgccacctcgcagcagcccctgaggaaggacaaggacaagaagaaaggtttgagttggatcagctctcagaatccggctcacatccatagccacctggttaagcagcagatgtcttccagcagttcccctaaagcctgggatgcctaaactggtatgggccctcaggatgtccttctgcctcatgcactgtggtcccacttacactggaaggaaggaggcagagggcactcaacggccaccactggaagctgtgagcagcatggcctcagcatctccatctgtaaaatgggttctggactagaggagagttcttgatatgacctaggagatagtgttccaaatgtntctaactctcgcaaggctaaatgcatggtagctcaaaanaa

SEQ ID NO: 257911 - DNA, 1114 bp, Homo Sapiens
  misc_feature (5)..(5): n is a, c, g, or t
  misc_feature (24)..(24): n is a, c, g, or t
  misc_feature (30)..(30): n is a, c, g, or t
  misc_feature (40)..(40): n is a, c, g, or t
  misc_feature (226)..(226): n is a, c, g, or t
  misc_feature (784)..(784): n is a, c, g, or t
  misc_feature (1066)..(1066): n is a, c, g, or t
cagantcagactgaacaagagttntaccanactgccatantcagaccagcaagacagagatcacggagctcagcgcacgctccaagcctggagattgagctgcagtcccagctgagcatgaaagcggggctggagaacacggtcgcagagacggagtgccgctatgccctgcagctgcagcagatccagggactcatcagcagcatcgaggcccagctgagcagantccgcagtgagatggagtgccagaaccaagagtacaagatgctgctggacatcaagacacgtctggagcaggagatcgccacctaccgcagcctgctcgagagccaggacgccaagatgattggtttcccttcctcagcaggtaagggaacagccccgtggtgtagggggaggcagagttagcctcccattcactgccccaatgggggtgggagctcgcggggagggagggagccagtgctgggctctccagtgtagggagggggagagctggggtggaagtggtcattcgctcactgattttccttttgaaactgatggctctgccccacagagctatttggctgtcttgggaagagccatctttggggacaataaagagtctccatccacgcaccacctgactaatgaggagtttgtgagccctccaggggggccctgccctgtcctgaggtgggtcttctccagcctgagcatgtcttgtctcttgtttcccaggaagcgtcagcccccgtagcacctctgttaccacgacttctagtgcctctgttaccaaccnacctctaaatgcctctgggtcgccgcacttctgatgtccgtaggccttaaatcctccctggcgtcccctccctctgtcttcagcacccagaggaggagagagccggaagttccctgcaggagagaggaggggctgctggacccaaggctcagtccctctgctctcaggaccccctgtcctgactctctcctgatggtgggccctctgtgctcttctcgtccggtcggatctctctcctctctgacctggatacgctttggtttctcaacttctctaccccanaagaaaagattattcaataaagtttcctgcctttctgcaaacataaaa

SEQ ID NO: 257912 - DNA, 1531 bp, Homo Sapiens
  misc_feature (3)..(3): n is a, c, g, or t
  misc_feature (19)..(20): n is a, c, g, or t
  misc_feature (25)..(25): n is a, c, g, or t
  misc_feature (34)..(34): n is a, c, g, or t
  misc_feature (54)..(54): n is a, c, g, or t
  misc_feature (86)..(86): n is a, c, g, or t
  misc_feature (108)..(108): n is a, c, g, or t
  misc_feature (139)..(139): n is a, c, g, or t
  misc_feature (338)..(338): n is a, c, g, or t
  misc_feature (469)..(520): n is a, c, g, or t
atngatacttgagtccttnntgctnaatttatcngagactgcgctcgccaagangccgctggcagaaacacaggaggaattcaggncggaagtttctgcaaaggcagnaaaagaacatgagttaaatgaagaaataggnaaactccttgctaaagccgaacagctaggggctgaaggtaatgtggatgaatcccagaagattcttatggaagtggaaaaagttcgtgcgaagaaaaaagaagctgaggaagaatacagaaattccatgcctgcatccagttttcagcagcaaaagctgcgtgtctgcgaggtctgttcagcctaccttggtctccatnacaatgaccgtcgcctggcagaccacttcggtggcaagttacacttggggttcattcagatccgagagaagcttgatcagttgaggaaaactgtcgctgaaaagcaggagaagagaaatcaggatcgcttnnnnnnnnnnnnnnnnnnnnnnnnnnnnnnnnnnnnnnnnnnnnnnnnnnnntcaagaaccagagatcgcaggaggtcacgctcccgggatcggcgtcggaggcggtcaagatctacctcccgagagcgacggaaattgtcccggtcccggtcccgagatagacatcggcgccaccgcagccgttcccggagccacagccggggacatcgtcgggcttcccgggaccgaagtgcgaaatacaagttctccagagagcgggcatccagagaggagtcctgggagagcgggcggagcgagcgagggcccccggactggaggcttgagcgctccaacgggaagatggcttcacggaggtcagaagagaaggaggccggcgagatctgaacccgtctcccgggtgctgtaaatagtctgataaacgttcacacagtctaaaattaccctttatatttgctgaatacaactcatcttttgtagtttaaaatttctattgttttggagctagctgtgagtttctagaagtgtacagagttgctcctgtgttcccgggtcatgttgagtaggaataaataaatctgatgctgcctcctgaggctgcggggggtttctgctgtcctctgcgtagaggcttttcactgtgaccctgtgccagtgccaccagcacctcacagaaaccgtgacttactcgtgggtcacgtcttgtcttctggcatccagtagatggcagggcacttcctgtcccctgcatctgactgacgggacccaggtgtgcatgggtgtttgtttgctcgctcccacacaaccttctgagtgtctgagctgcccatctcccatggggaggagggaggggtccccattctgcattcatttatttaggaaaagctgtcttgtctgctcagctgctaccatagccttaacttgggactcaggtgagttacactgcatgtccccttttgaagttactagcagaaaacaaagacccatggggctgggcatggtgacacatgcctgtagtcccagctactactaagaaggctgaggcaggaggatctgttgagcaca

SEQ ID NO: 257913 - DNA, 1007 bp, Homo Sapiens
agagccgagtgggctcgaggcccacgcgaccatcgtttgtcgacgccgctgccaccgcctgcctgagagaagtcgtcgcggccgaccccgtcgcctccgccggctaccatgtccgcccaggcgcagatgcgggccctgctggaccagctcatgggcacggctcgggacggagacgaaaccagacagagggtcaagtttacagatgaccgtgtctgcaagagtcaccttctggactgctgcccccatgacatcctggctgggacgcgcatggatttaggagaatgtaccaaaatccacgacttggccctccgagcagattatgagattgcaagtaaagaaagagacctgttttttgaattagatgcaatggatcacttggagtcctttattgctgaatgtgatcggagaactgagctcgccaagaagcggctggcagaaacacaggaggaaatcagtgcggaagtttctgcaaaggcagaaaaagtacatgagttaaatgaagaaataggaaaactccttgctaaagccgaacagctaggggctgaaggtaatgtggatgaatcccagaagattcttatggaagtggaaaaagttcgtgcgaagaaaaaagaagctgaggaagaatacagaaattccatgcctgcatccagttttcagcagcaaaagctgcgtgtctgcgaggtctgttcagcctaccttggtctccatgacaatgaccgtcgcctggcagaccacttcggtggcaagttacacttggggttcattcagatccgagagaagcttgatcagttgaggaaaactgtcgctgaaaagcaggagaagaagaaatcaggatcccttgaggaggaaagaaggaaagggaaccgggaggaccgtctgagcaggaggtcgggatccagaccaaaaatcgcaggaagtcccgctccccgggatcggcgtcgggaggcggtcaagaatctacctcccaaaagcgagggaaattggccccggccccggtcccaaaaaaa

SEQ ID NO: 257914 - DNA, 940 bp, Homo Sapiens
  misc_feature (748)..(748): n is a, c, g, or t
  misc_feature (753)..(753): n is a, c, g, or t
  misc_feature (811)..(811): n is a, c, g, or t
  misc_feature (824)..(824): n is a, c, g, or t
  misc_feature (827)..(827): n is a, c, g, or t
  misc_feature (834)..(834): n is a, c, g, or t
  misc_feature (840)..(840): n is a, c, g, or t
  misc_feature (847)..(847): n is a, c, g, or t
  misc_feature (849)..(849): n is a, c, g, or t
  misc_feature (851)..(851): n is a, c, g, or t
  misc_feature (853)..(853): n is a, c, g, or t
  misc_feature (856)..(856): n is a, c, g, or t
  misc_feature (866)..(866): n is a, c, g, or t
  misc_feature (869)..(869): n is a, c, g, or t
  misc_feature (891)..(891): n is a, c, g, or t
  misc_feature (900)..(900): n is a, c, g, or t
  misc_feature (902)..(902): n is a, c, g, or t
  misc_feature (905)..(905): n is a, c, g, or t
  misc_feature (907)..(907): n is a, c, g, or t
  misc_feature (909)..(909): n is a, c, g, or t
  misc_feature (915)..(916): n is a, c, g, or t
  misc_feature (920)..(920): n is a, c, g, or t
  misc_feature (923)..(926): n is a, c, g, or t
  misc_feature (934)..(934): n is a, c, g, or t
  misc_feature (936)..(936): n is a, c, g, or t
tcccgggatcctcattgctgcagacgctcaccccagacactcactgcaccggagtgagcgcgaccatcatgtccatgctcgtggtctttctcttgctgtggggtgtcacctggggcccagtgacagaagcagccatattttatgagacgcagcccagcctgtgggcagagtccgaatcactgctgaaacccttggccaatgtgacgctgacgtgccaggcccacctggagactccagacttccagctgttcaagaatggggtggcccaggagcctgtgcaccttgactcacctgccatcaagcaccagttcctgctgacgggtgacacccagggccgctaccgctgccgctcgggcttgtccacaggatggacccagctgagcaagctcctggagctgacagggccaaagtccttgcctgctccctggctctcgatggcgccagtgtcctggatcacccccggcctgaaaacaacagcagtgtgccgaggtgtgctgcggggtgtgacttttctgctgaggcgggagggcgaccatgagtttctggaggtgcctgaggcccaggaggatgtggaggccacctttccagtccatcagcctggcaactacagctgcagctaccggaccgatggggaaggcgccctctctgagcccagcgctactgtgaccattgaggagctcgctgcaccaccaccgcctgtgctgatgcaccatggagagtcctcccaggtcctgcaccctggcccccnggtgnccctcccctgcgtggctcccctgagtggagtggacttcccgctacggcgcggggcgancgcgctgctggtnccncggaggnggaccngccacgntngntnttntttccctgancgngggggccctgggggatggaggnactacaccngncgntncnggtggnngacnccnnnnccggtggncngggg

SEQ ID NO: 257915 - DNA, 1691 bp, Homo Sapiens
cgctcaccccagacactcactgcaccggagtgagcgcgaccatcatgtccatgctcgtggtctttctcttgctgtggggtgtcacctggggcccagtgacagaagcagccatattttatgagacgcagcccagcctgtgggcagagtccgaatcactgctgaaacccttggccaatgtgacgctgacgtgccaggcccgcctggagactccagacttccagctgttcaagaatggggtggcccaggagcctgtgcaccttgactcacctgccatcaagcaccagttcctgctgacgggtgacacccagggccgctaccgctgccgctcgggcttgtccacaggatggacccagctgagcaagctcctggagctgacagggccaaagtccttgcctgctccctggctctcgatggcgccagtgtcctggatcacccccggcctgaaaacaacagcagtgtgccgaggtgtgctgcggggtgtgacttttctgctgaggcgggagggcgaccatgagtttctggaggtgcctgaggcccaggaggatgtggaggccacctttccagtccatcagcctggcaactacagctgcagctaccggaccgatggggaaggcgccctctctgagcccagcgctactgtgaccattgaggagctcgctgcaccaccaccgcctgtgctgatgcaccatggagagtcctcccaggtcctgcaccctggcaacaaggtgaccctcacctgcgtggctcccctgagtggagtggacttccagctacggcgcggggagaaagagctgctggtacccaggagcagcaccagcccagatcgcatcttctttcacctgaacgcggtggccctgggggatggaggtcactacacctgccgctaccggctgcatgacaaccaaaacggctggtccggggacagcgcgccggtcgagctgattctgagcgatgagacgctgcccgcgccggagttctccccggagccggagtccggcagggccttgcggctgcggtgcctggcgcccctggagggcgcgcgcttcgccctggtgcgcgaggacaggggcgggcgccgcgtgcaccgtttccagagccccgctgggaccgaggcgctcttcgagctgcacaacatttccgtggctgactccgccaactacagctgcgtctacgtggacctgaagccgcctttcgggggctccgcgcccagcgagcgcttggagctgcacgtggacggaccccctcccaggcctcagctccgggcgacgtggagtggggcggtcctggcgggccgagatgccgtcctgcgctgcgagggacccatccccgacgtcaccttcgagctctgcgcgagggcgagacgaaggccgtgaagacggtccgcacccccggggccgcggcgaacctcgagctgatcttcgtggggccccagcacgccggcaactacaggtgccgctaccgctcctgggtgccccacaccttcgaatcggagctcagcgaccctgtggagctcctggtggcagaaagctgatgcagccgcgggcccagggtgctgttggtgtcctcagaagtgccggggattctggactggctccctcccctcctgttgcagcacaaggccggggtctctggggggctggagaagcctccctcattcctcccaggaattaataaatggaagagagctctgt

SEQ ID NO: 257916 - DNA, 1592 bp, Homo Sapiens
  misc_feature (950)..(950): n is a, c, g, or t
  misc_feature (953)..(953): n is a, c, g, or t
  misc_feature (1020)..(1020): n is a, c, g, or t
  misc_feature (1034)..(1034): n is a, c, g, or t
  misc_feature (1039)..(1039): n is a, c, g, or t
  misc_feature (1052)..(1052): n is a, c, g, or t
ctgacgtgccaggcccgcctggagactccagacttccagctgttcaagaatggggtggcccaggagcctgtgcaccttgactcacctgccatcaagcaccagttcctgctgacgggtgacacccagggccgctaccgctgccgctcgggcttgtccacaggatggacccagctgagcaagctcctggagctgacagggccaaagtccttgcctgctccctggctctcgatggcgccagtgtcctggatcacccccggcctgaaaacaacagcagtgtgccgaggtgtgctgcggggtgtgacttttctgctgaggcgggagggcgaccatgagtttctggaggtgcctgaggcccaggaggatgtggaggccacctttccagtccatcagcctggcaactacagctgcagctaccggaccgatggggaaggcgccctctctgagcccagcgctactgtgaccattgaggagctcggaccaggtccaggaagctggccacacggttgcctgggtctgatggttgcaaaggagtttgggcagaggatgcccaaagaatggaaggctgcaccaccaccgcctgtgctgatgcaccatggagagtcctcccaggtcctgcaccctggcaacaaggtgaccctcacctgcgtggctcccctgagtggagtggacttccagctacggcgcggggagaaagagctgctggtacccaggagcagcaccagcccagatcgcatcttctttcacctgaacgcggtggccctgggggatggaggtcacaacacctgccgctaccggctgcatcacaaccaaaacggctggtccggggacagcgcgccggtcgagctgattctgagcgatgagacgctgcccgcgccggagttctcccccggagccggagtccggccagggccttgcggctgcggtgcctggcgcccctggagggcgcggcnttngccctggtgcgcgaggacaggggcgggcgccgcgtgcaccgtttccagagccccgctgggaccgagngctcttcgagctgnacaanatttccgtggctnactccgccaactacagctgcgtctacgtggacctgaagccgcctttcggggctccgcgcccagcgagcgcttggagctgcacgtggacggaccccctcccaggcctcagctccgggcgacgtggagtggggcggtcctggcgggccgagatgccgtcctgcgctgcgagggacccatccccgacgtcaccttcgagctgtgcgcgagggcgagacgaaggccgtgaagacggtccgcacccccggggccgcggcgaacctcgagctgatcttcgtggggccccagcacgccggcaactacaggtgccgctaccgctcctgggtgccccacaccttcgaatcggagctcagcgaccctgtggagctcctggtggcagaaagctgatgcagccgcgggcccagggtgctgttggtgtcctcagaagtgccggggattctggactggctccctcccctcctgttgcagcacaaggccggggtctctggggggctggagaagcctccctcattcctcccaggaattaataaatgtgaagagccc

SEQ ID NO: 257917 - DNA, 834 bp, Homo Sapiens
  misc_feature (295)..(295): n is a, c, g, or t
  misc_feature (303)..(303): n is a, c, g, or t
  misc_feature (436)..(436): n is a, c, g, or t
gaacctcccactcgtcctcccaccacggcttctgggcttctgggtctggcaggggcggctcaaccgtgtgcacagcccatctgaagcattggtgtaatggcggaccagttcatgcaggccgggaaaagtgattcgaggggagatgtagaagccaccgttgtccagattacggatcttgtaatgttcaccacctctccctggttctggtcgaagtcccggaccgacagtgaaaacgatcccgcggtgctctcgctctcccggatgaggaaggagccgtgagtgttcccgggcgccnaggagctngcctccgcgtccttgcggctcaggttcttgaagaaccagggttcgggctccaggctgttcgctttggccacaaaattgaaggggatgaagccttcctggcccgtggtcagggactgcgccttccaccactcgncgctctgctccaggatgcggagctgttcccccttctcaaagcccagatctccgtcgtgagagggctcatagctgtgcagagcgataaccaggttgtcttgcagtggggaagccggcggattggagccttcgtaggtaaccagtgggtcccgcacctcagagccatttcggatgagcagcgtgcccttgccatccagtgggactatgggataatggcagttctcacacacatcgatgttttccatccagtcatcttccgggtgtgagctgcagccacagcccatggtccctgcccagcccgggagccctctggccccattcacatggtcctcctggcctaacctggctgcctggacagtctcagctcccttcgccgtcgtagccaccacctgtctcccc

SEQ ID NO: 257918 - DNA, 629 bp, Homo Sapiens
gcgacgtgacctgtttgagcctatcctgagcaaactgcggcggcctgaaagctgtgctggagcggcaggcctcttaccgcttctactccagttccctgcttgtcatctatgatggcaaggagtgccgggctgagtcctgcctggaccgccggtctgagatgcgtctcaagcacctggacatggtgctccctgaggtggcgtcatcctgtggccccagcaccagccccagcaacaccagccccgaggcgggtccctcctctcagcccaaggtggatgtccgcatgattgactttgcacacagcacatttcaagggcttccgggatgaccccaccgtgcatgatggggccagacagaggctacgtggtttggcctggagaacctcattcagcatcatgggaacagattgcgggacgagaaccagtaggccctgtttctgggcccccagaacccctttccttctccactgcaggcagggaccatttgtttctgaacttgccgtgaggacaaacagactttgcttttaaagggttatatttctctttggtgtaaactaaaagaaatgtttttagctgtagcctggaatccatatatataaagtgaaggagggcagaccacacgccctctcagc

SEQ ID NO: 257919 - DNA, 985 bp, Homo Sapiens
  misc_feature (898)..(898): n is a, c, g, or t
  misc_feature (944)..(944): n is a, c, g, or t
  misc_feature (952)..(952): n is a, c, g, or t
gcgctgccgggggcgccgggactatgtcgcgggcgcggagccacctgcgcgccgctctattcctggcagcggcgtctgcgcgcggcgtaacgacccaggtcgcggcgcggcggggcttgagcgcgtggccggtgccgcaggagccgagcatggagtaccaggatgccgtgcgcatgctcaataccctgcagaccaatgccggctacctggagcaggtgaagcgccagcggggtgaccctcagacacagttggaagccatggaactgtacctggcacggagtgggctgcaggtggaggacttggaccggctgaacatcatccacgtcactgggacgaaggggaagggctccacctgtgccttcacggaatgtatcctccgaagctatggcctgaagacgggattctttagctctccccacctggtgcaggttcgggagcggatccgcatcaatgggcagcccatcagtcctgagctcttcaccaagtacttctggcgcctctaccaccggctggaggagaccaaggatggcagctgtgtctccatgcccccctacttccgcttcctgacactcatggccttccacgtcttcctccaagagaaggtggacctggcagtggtggaggtgggcattggcggggcttatgactgcaccaacatcatcaggaagcctgtggtgtgcggagtctcctctcttggcatcgaccacaccagcctcctgggggatacggtggagaagatcgcatggcagaaagggggcatctttaagcaaggtgtccctgccttcactgtgctccaacctgaaggtcccctggcagtgctgagggaccgagcccagcagatctcatgtcctctatacctgtgtccgatgctggaggccctcgaggaaaggagggcgcngctgaccctgggcctggagggggagcacagcgttcaacgccgcttngccttganctggccactgctggctgagcggaggaccgcatg

SEQ ID NO: 257920 - DNA, 956 bp, Homo Sapiens
  misc_feature (622)..(668): n is a, c, g, or t
  misc_feature (722)..(811): n is a, c, g, or t
acgcgggtgactcgtttaccaacacccacataaacaaacacacaaccaggcctgggtggcgaattcggcacgagggctcaataccctgcagaccaatgccggctacctggagcaggtgaagcgccagcggggtgaccctcagacacagttggaagccatggaactgtacctggcacggagtgggctgcaggtggaggacttggaccggctgaacatcatccacgtcactgggacgaaggggaagggctccacctgtgccttcaccgaatgtatcctccgaagctatggcctgaaaacgggattctttaactctccccacctggggcaggttcggggagcggatccgcatcaatgggcaccccatcaggcctgacctcttcaccaagtaagtcctggcgcctctacccaccggctggacggaaaccaacgatggcagctggagcctccatgcccccctacttccgcttcctgacactcatggccttccacgtcttcctccaagagaaggtggacctggcagtggtggaggtgggcattggcggggcttatgactgcaccaacatcatcaggaagcctgtggtgtgcggaatctcctctcttggcattgaccccaccaccctcnnnnnnnnnnnnnnnnnnnnnnnnnnnnnnnnnnnnnnnnnnnnnnncaatttttccaccaggggggccccgcccttccatgggtcctccactctaaacgnnnnnnnnnnnnnnnnnnnnnnnnnnnnnnnnnnnnnnnnnnnnnnnnnnnnnnnnnnnnnnnnnnnnnnnnnnnnnnnnnnnnnnnnnntcgccgggatcaccgcgacacatcaccggccgtgccgccggtactacctacccggacacaagcataccgaccgcccgcgcgtcaaacgcgctagtatacacggccaccgggagccccatatcgccctaccttatccgcccttacc

SEQ ID NO: 257921 - DNA, 1256 bp, Homo Sapiens
  misc_feature (1094)..(1094): n is a, c, g, or t
ctctcgtttctccccttgctcgtccgctatttcctcctacccccctaagtagcgaggcctgggtggcgaattcggcacgagcccggagtctgaaccggcagtgagagtggggaaagagggatgccgtgcgcatgctcaataccctgcagaccaatgccggctacctggagcaggtgaagcgccagcggggtgaccctcagacacagttggaagccatggaactgtacctggcacggagtgggctgcaggtggaggacttggaccggctgaacatcatccacgtcactgggacgaaggggaagggctccacctgtgccttcacggaatgtatcctccgaagctatggcctgaagacgggattctttagctctccccacctggtgcaggttcgggagcggatccgcatcaatgggcagcccatcagtcctgagctcttcaccaagtacttctggcgcctctaccaccggctggaggagaccaaggatggcagctgtgtctccatgcccccctacttccgcttcctgacactcatggccttccacgtcttcctccaagagaaggtggacctggcagtggtggaggtgggcattggcggggcttatgactgcaccaacatcatcaggaagcctgtggtgtgcggagtctcctctcttggcatcgaccacaccagcctcctgggggatacggtggagaagatcgcatggcagaaagggggcatctttaagcaaggtgtccctgccttcactgtgctccaacctgaaggtcccctggcagtgctgagggaccgagcccaacagatctcatgtcctctatacctgggtccgatgctggaggccctccaggaaagggggtcccccctctgaccatgagacttgagggggggccgccggacggtgccgcacgatacgggcattctgtcaaccccatacactacaccccggagttagatccctcctcccactgcaggcattagccaggtgccacactcatatccgctcattccggtcctgactcacgctctcagtgtcacaccacgaccttcaccccgtacgatagcgcgagcccccaggtaacgcctaaggaacacaacatanccgcaccacgtctttcgtcctcatccatgctaaagcggagccaggactcggccagtgcgtgtccagtctgatccttcgcagcgccgcccgccaccgctgtgtccttacgctcaatcatagcggtcgaggcgaaaccaatgcgcccgtagcgcgccgcacgaa

SEQ ID NO: 257922 - DNA, 1953 bp, Homo Sapiens
catggctgcccccacggctgagggcctggcagctgctgcgccctcgctttcttgacattccctggcttctgtgctctcttccccaggccaccccagcagacatgtttgccaaggcctttcgggtcaagtccaacacggccatcaaggggtcggacaggagaaagcttcgagctgatgtgacaactgctttccccacccttggaactgatcaagtctctgagttagtacctggaaaggaggagctcaacattgtgaagttgtatgctcacaaaggggatgcagtgactgtgtacgtgagtggtggtaaccccatcctctttgaactggagaaaaatctgtatccaacagtgtacacgctgtggtcctatcctgatcttctgccaacctttacaacatggcctctggtgctcgagaaactggtagggggagcagatttgatgctgcctggactggtgatgccccctgctggtctgcctcaggtacagaagggcgacctctgtgccatttctttggtggggaacagagcccctgtagccattggagttgcagccatgtccacagctgagatgctcacgtcaggcctgaagggaaggggcttctctgtgctccacacttaccaggaccacttgtggcggtctggaaacaagtcctctccaccttccattgctccactggccctggattcagcagatctcagtgaagagaaggggtctgtccagatggactccaccctgcagggagacatgaggcacatgaccctggagggggaagaggagaatggggaggttcaccaggcacgtgaagacaagtctctctcagaagccccagaagacaccagcaccaggggcctgaaccaagactccacagatagcaaaacgcttcaagaacaaatggatgagctgttacagcaatgcttcttacatgccttgaagtgccgagtcaaaaaggctgacctccctttactcaccagcactttccttggcagccacatgttctcctgctgccccgaaggacgacaactggacataaagaagtcaagctacaaaaagctctctaagttcctgcagcaaatgcagcaggagcagattatacaggtgaaggagctgagcaaaggggtggagagcattgtggctgtggactggaaacacccgaggattacatctttcgtcatacccgagccctccccgacctcccagactatccaggagggtagcagggaacagccctatcaccctccagatataaaacccctctactgtgtcccagccagcatgaccctgctcttccaggagtctggccacaagaaggggagctttctggagggcagtgaggtccgaacgatcgtcattaactacgccaagaaaaatgacctggttgatgcagacaacaaaaatcttgtgagattggatcccatcctatgtaactgcatcttagagaaaaatgaacagcatacagtcatgaagcttccatgggacagtcttctgaccaggtgtttggaaaaattacagcctgcctatcaagtgacccttcccggacaagagcccattgtgaagaaagggagaatctgtccaattgacatcaccctagcacaaagagcgtctaataaaaaggtgaccgtggtccggaacttggaggcctatggtctggacccatactcagtggctgccatccttcagcagcgatgccaggctagcaccaccgtcaatcctgcccctggggccaaggacagccttcaggtgcagatccagggaaaccaggtccaccacctcggctggctattgcttgaagagtatcagctccctcgaaaacacatccaaggtctagaaaaggccctcaaacctggcaagaagaagtgacagactcttttgtctcacgtggtggatccggtggaaatccaagctctgggctggtaatttttatgagcattttcagcttttgcaaatacaaaatata

SEQ ID NO: 257923 - DNA, 1580 bp, Homo Sapiens
  misc_feature (256)..(256): n is a, c, g, or t
  misc_feature (564)..(617): n is a, c, g, or t
cctccctcctgccactgacagaagccaacctacgcatgtttcaacgtgcccaggacgaccttatccctgctgtggaccggcagtttgcctgctcctcctgcgaccacgtctggtggcgccgcgtgccccagcggaaggaggtatcccggtgccggaaatgccggaagcgctacgagccagtgccagctgacaagatgtggggcctggctgagttccactgcccgaagtgtcggcacaacttccggggctgggccanataggggtccccgtccccctgctacgggtgcggcttccccgtgtatccaacacggatcctccccccgcgctgggaccgggacccggatcgccgcagcacccacactcactcctgctcagctgccgactgctacaaccggcgagagccccacgtgcctgggacatcctgtgctcaccccaagagccggaagcagaaccacctgcccaaagtgctccaccccagcaaccctcacattagcagtggctccactgtggccacctgcttgagccagggtggcctccctggaagaccgtggacaacctcatccnnnnnnnnnnnnnnnnnnnnnnnnnnnnnnnnnnnnnnnnnnnnnnnnnnnnnngcgggcccagggagtgacccctgccaggtgcagatacaaaccagacacggtctgtggctactttgtgttattataagatatgagctcaaaccgagatatgaatgaccttggggagccatctgaggccaagatattgacgggggggattcctgggtcccattttcagcgcccagggtcacagatccacagtgggaagttctgtgggacacattggcactgagccacaaagaaggtgtggccagaacaacttgggctcctgctgaccaatgtcctctagggcctaggggacagaggaacacagagtcacagcttcaggggccgaatgagcatggcggccttcctgagagaatatgccccaccacgaaactcagcccagtagacaccatcctggtagcggcttcggtagtggccgccgtggtgccacacaccgttgaggttggagtgggcacaggcatggtaccaccagcctccccgctggtacagggcacagttacctgaggggagagagagagtccatgtcctctcaccagaataaaagcctctacctgcacctcacagtgcaaggcttttgccaggcatcccctggcccctcccattcttattgaatacaagccctgatcttccatctcctcagcaaaaaaataggagccctggccccccaactttcttcagagtaatagccttaattccttccctatctccttaccaaagtacaagtcacatctttcccaccttttctgcaaactaggagtctaccgttcattcctttatcaaagaaaagtatctacttcctttctagaataagagtactagctctcaccctctgccctttacttgaacaggagtcttgattctttttttgcctcatcagagaaggaatctggactccccatccccccaccaggataaaagtcctgacctttgttctcttgacggaataaaagcttgcttatccttataaaa

SEQ ID NO: 257924 - DNA, 1772 bp, Homo Sapiens
  misc_feature (54)..(126): n is a, c, g, or t
  misc_feature (173)..(211): n is a, c, g, or t
  misc_feature (220)..(237): n is a, c, g, or t
gatccacaaaaaaaagcccgctcattaggggggttaaattcccgggtactgcannnnnnnnnnnnnnnnnnnnnnnnnnnnnnnnnnnnnnnnnnnnnnnnnnnnnnnnnnnnnnnnnnnnnnnnnaccactttgtacaagaaagctgggtcaggaaacagctatgaccatgnnnnnnnnnnnnnnnnnnnnnnnnnnnnnnnnnnnnnnngcctcgagnnnnnnnnnnnnnnnnnngagagaaataaaacaatttaatgatggcttccttgatttacacacaactctaagacaagaggacaaaattttctctccatgcactggtacaacgaagttcagggacaagaggcaacccaagtacaggggctgtggtgttcagatccacgctcagcctcgagtctcatgttccaaccgaccgtctggctcagtgactgtggacactggggagaggagggactgcccagacccctcaagtgcaggtgaggggaccggcagcagagtatgcatgggcactccatgccccagtgcgagaagtgcacaggggacagcgaacaccagcttccagtgcaccctgaagacccagtgggctcagggggcccagctctcccatcagagctgtcctcagggctggagctggggctggggctgaggcgctggggctgggagggaggtggtgataagaaccactgcagaaaggaacacatgctgaatgctgggccatgctttcctcccagacactgagttcctgaagacccagctttatcttccaagggtaacaacattcccaagactcagagctggaaggcggcaagagtggagccaggagagacagatcgcatccactcctgaggccgcctcgaatgtctccattcccttctggcctgccttccccctcccttcaaccccaaagacccaagaagacaacagagatcagagaccacatccctcttccctaatcaaaatagccaagtacaacatttctaaagttagggagaaggaggaaaaatgccacaggcttttaaagggaagactggaaccgagggaagggagaagtagccccctgctttgtccagcctggaagctggcagccatggtgttggggccttgacccaaccacaccagcccatctagctgagcatcttgtgccgatcgaagactgtcttccgctgctcctgcacctgcagcttccaccgctgctgggcaccttccacacgctccaggactgtgtttgctcggggtcccccgagggatgcagcagctgctgccatagagcgagcatcctcattctcctcctcattgtgcagttgctcagtgtatgcatccggctttcggatcagagggtccaccagcatcaggaaggccatgtagagcaacagggcacccaccacggacaggtagatgacaatgatgaccttgatggtggtggtgctgcgctcctcgtacctgcactcgcacagcaggcagtaggcctccacgtcatggccaggcactggcatgggctccaccacgtgcaggcagttgcagtccttctgggatacattctggttgtaaatgtgcccactgatgtttctataaggtggacagatgcatttgcaccggatatcttcagaactcttgttggcttcagctgggggcaccagcaaacacccgaccacagccaccaaagataagagcttcatgcttatcaggcttgctgggccagcaaagccggacacctacaagcccgctgcagccgcaaaagacccagttgtccccgccctctcctagcttct

SEQ ID NO: 257925 - DNA, 859 bp, Homo Sapiens
  misc_feature (204)..(204): n is a, c, g, or t
  misc_feature (217)..(218): n is a, c, g, or t
ggcagaagaaccacattccttttttcctttaatcaaaaatagccaagttaccaacattttctaaaagttagggagaagggaggaaaaaatgccaccacggcttttaaaagggaagactggaaaccgaggggaaggggagaagttagcccccctgctttgttccagccctggaagctgggcagccatggtgttgggggcctttgnccacaccacaccnncagcccattagctgagcatcttgtgccgatcgaagactgtcttccgctgctcctgcacctgcagcttccaccgctgctgggcaccttccacacgctccaggactgtgtttgctcggggtcccccgagggatgcagcagctgctgccatagagcgagcatcctcattctcctcctcattgtgcagttgctcagtgtatgcatccggctttcggatcagagggtccaccagcatcaggaaggccatgtagagcaacagggcacccaccacggacaggtagatgacaatgatgaccttgatggtggtggtgctgcgctcctcgtacctgcactcgcacagcaggcagtaggcctccacgtcatggccaggcactggcatgggctccaccacgtgcaggcagttgcagtccttctgggatacattctggttgtaaatgtgcccactgatgtttctataaggtggacagatgcatttgcaccggatatcttcagaactcttgttggcttcagctgggggcaccagcaaacacccgaccacagccaccaaagataagagcttcatgcttatcaggcttgctgggccagcaaagccggacacctacaagccccctcgtgccgaattcgccacccaggcctcgcttctt

SEQ ID NO: 257926 - DNA, 500 bp, Homo Sapiens
ggcggcgccatgctcagcgcccaggagcgcgcccaaatcgcgcaggtctgggacctgattgcgggccacgaggcgcaattcggggcggagctgctgctcaggctcttcacggtgtaccccagcaccaaggtctacttcccgcacctgagcgcctgccaggacgcgacgcagctgctgagccacgggcagcgcatgctggcggctgtgggcgcggcggtgcagcacgtggacaacctgcgcgccgcgctgagcccgctggcggacctgcacgcgctcgtgctgcgcgtggacccagccaactttccgctgctaatccagtgtttccacgtcgtgctggcctcccacctgcaggacgagttcaccgtgcaaatgcaagcggcgtgggacaagttcctgactggtgtggccgtggtgctgaccgaaaaataccgctgagccctgtgctgcgcaggccttggtctgtgcctgtcaataaacagaggcccgaaccatctgaaaaa

SEQ ID NO: 257927 - DNA, 1627 bp, Homo Sapiens
  misc_feature (501)..(503): n is a, c, g, or t
  misc_feature (516)..(516): n is a, c, g, or t
  misc_feature (547)..(547): n is a, c, g, or t
  misc_feature (675)..(675): n is a, c, g, or t
  misc_feature (679)..(679): n is a, c, g, or t
  misc_feature (799)..(799): n is a, c, g, or t
  misc_feature (820)..(820): n is a, c, g, or t
  misc_feature (860)..(860): n is a, c, g, or t
  misc_feature (888)..(888): n is a, c, g, or t
  misc_feature (911)..(911): n is a, c, g, or t
  misc_feature (931)..(931): n is a, c, g, or t
  misc_feature (933)..(933): n is a, c, g, or t
  misc_feature (970)..(970): n is a, c, g, or t
  misc_feature (974)..(975): n is a, c, g, or t
  misc_feature (977)..(977): n is a, c, g, or t
  misc_feature (982)..(982): n is a, c, g, or t
  misc_feature (989)..(990): n is a, c, g, or t
  misc_feature (998)..(998): n is a, c, g, or t
  misc_feature (1000)..(1000): n is a, c, g, or t
  misc_feature (1002)..(1002): n is a, c, g, or t
  misc_feature (1004)..(1005): n is a, c, g, or t
  misc_feature (1011)..(1011): n is a, c, g, or t
  misc_feature (1013)..(1013): n is a, c, g, or t
  misc_feature (1015)..(1016): n is a, c, g, or t
  misc_feature (1042)..(1042): n is a, c, g, or t
  misc_feature (1061)..(1061): n is a, c, g, or t
  misc_feature (1067)..(1067): n is a, c, g, or t
  misc_feature (1069)..(1069): n is a, c, g, or t
  misc_feature (1073)..(1074): n is a, c, g, or t
  misc_feature (1082)..(1083): n is a, c, g, or t
  misc_feature (1087)..(1087): n is a, c, g, or t
  misc_feature (1092)..(1092): n is a, c, g, or t
  misc_feature (1097)..(1098): n is a, c, g, or t
  misc_feature (1100)..(1101): n is a, c, g, or t
  misc_feature (1115)..(1115): n is a, c, g, or t
  misc_feature (1122)..(1122): n is a, c, g, or t
  misc_feature (1124)..(1124): n is a, c, g, or t
  misc_feature (1129)..(1132): n is a, c, g, or t
  misc_feature (1138)..(1138): n is a, c, g, or t
  misc_feature (1143)..(1143): n is a, c, g, or t
  misc_feature (1149)..(1151): n is a, c, g, or t
  misc_feature (1153)..(1153): n is a, c, g, or t
  misc_feature (1159)..(1159): n is a, c, g, or t
  misc_feature (1163)..(1163): n is a, c, g, or t
  misc_feature (1167)..(1167): n is a, c, g, or t
  misc_feature (1173)..(1173): n is a, c, g, or t
  misc_feature (1175)..(1176): n is a, c, g, or t
  misc_feature (1178)..(1178): n is a, c, g, or t
  misc_feature (1181)..(1181): n is a, c, g, or t
  misc_feature (1187)..(1188): n is a, c, g, or t
  misc_feature (1190)..(1190): n is a, c, g, or t
  misc_feature (1194)..(1194): n is a, c, g, or t
  misc_feature (1210)..(1210): n is a, c, g, or t
  misc_feature (1216)..(1216): n is a, c, g, or t
gggccagtcgggtggtcggggccgaggcgcgaggaggatatggaatattatcttgtaaaatggaaaggatggccagattctacaaatacttgggaacctttgcaaaatctgaagtgcccgttactgcttcagcaattctctaatgacaagcataattatttatctcaggtaaagaaaggcaaagcaataactccaaaagacaataacaaaactttgaaacctgccattgctgagtacattgtgaagaaggctaaacaaaggatagctctgcagagatggcaagatgaactcaacagaagaaagaatcataaaggaatgatatttgttgaaaatactgttgatttagagggcccaccttcagacttctattacattaacgaatacaaaccagctcctggaatcagcttagtcaatgaagctacctttggttgttcatgcacagattgcttctttcaaaaatgttgtcctgctgaagctggagttcttttggcttataataannnccaacaaattaanatcccacctggtactcccatctatgaatgcnactcaaggtgtcagtgtggtcctgattgtcccaataggattgtacaaaaaggcacacagtattcgctttgcatctttcgaactagcaatggacgtggctggggtgtaaagacccttgtgaagattaanagantgagttttgtcatggaatatgttggagaggtaatcacaagtgaagaagctgaaagacgaggacagttctatgacaacaagggaatgcacgtatctctttgatcgggacaatgagtctgangaattcacagtggatgcggcncgatacggcaatgtgtctccatcttgtgaatcacagctgngacccaaatcttcaggtgttcaatgttntcattgataacctcgatactcgnctcccccgaatagcattgtntnccacaagaaccataaatgctggagaagagctgactcntgannancaaangaaaggnncgggagananancnncagagncnanngaccacagcccagccaaaaagagggncagaacagcaggcaaaggnggagcngngacnngcagaggnnaccncaacngaacnnanncaggaaaaagagcngaggagnanaagannnnggcccnaaggntaacannncnaaaaanacanatcngggacncnnanaancaaggnncnaccnaggggaattgacaagncaggtntcaagacatttgccaaatgaatcaccgatgcctctgaaaagggggtcactgggtctcatagacggataggaagtcgacatagtgatagggcttagagaccaaactaatggaaggcagactatttacagcttagtatatgtgtacttaagtctaggtgaacagagaaatgccgcccgtagtgtcggaaagcgttaagctgataatgtaattaacaactcctgagagatcaaagattcaacttgccatacacctcaaattcggagaaacagttaatttgggcaaatctacagttctgtttttgctactctattgtcattcctgtttaatactcactgtactggtatgtgagacaaataggtgatactgaatgttatactgttttctacttttccattaaaacattggcaccgc

SEQ ID NO: 257928 - DNA, 2041 bp, Homo Sapiens
  misc_feature (2004)..(2004): n is a, c, g, or t
  misc_feature (2029)..(2029): n is a, c, g, or t
  misc_feature (2031)..(2031): n is a, c, g, or t
aaatctgaggctaggctggctcttctcggcgtgctgcggcggaacggctgttggtttctgctggttgtaggtccttggctggtcgggcctccggtgttctgcttctccccgctgagctgctgcctggtgaagaggaagccatggcgctccgagtcaccaggaactcgaaaattaatgctgaaaataaggcgaagatcaacatggcaggcgcaaagcgcgttcctacggcccctgctgcaacctccaagcccggactgaggccaagaacagctcttggggacattggtaacaaagtcagtgaacaactgcaggccaaaatgcctatgaagaaggaagcaaaaccttcagctactggaaaagtcattgataaaaaactaccaaaacctcttgaaaaggtacctatgctggtgccagtgccagtgtctgagccagtgccagagccagaacctgagccagaacctgagcctgttaaagaagaaaaactttcgcctgagcctattttggttgatactgcctctccaagcccaatggaaacatctggatgtgcccctgcagaagaagacctgtgtcaggctttctctgatgtaattcttgcagtaaatgatgtggatgcagaagatggagctgatccaaacctttgtagtgaatatgtgaaagatatttatgcttatctgagacaacttgaggaagagcaagcagtcagaccaaaatacctactggggtcgggaagtcactggaaacatgagagccatcctaattgactggctagtacaggttcaaatgaaaattcaggttgttgcaggagaccatgtacatgactgtctccattattgatcggttcatgcagaataattgtgtgcccaagaagatgctgcagctggttggtgtcactgccatgtttattgcaagcaaatatgaagaaatgtaccctccagaaattggtgactttgcttttgtgactgacaacacttatactaagcaccaaatcagacagatggaaatgaagattctaagagctttaaactttggtctgggtcggcctctacctttgcacttccttcggagagcatctaagattggagaggttgatgtcgagcaacatactttggccaaatacctgatggaactaactatgttggactatgacatggtgcactttcctccttctcaaattgcagcaggagctttttgcttagcactgaaaattctggataatggtgaatggacaccaactctacaacattacctgtcatatactgaagaatctcttcttccagttatgcagcacctggctaagaatgtagtcatggtaaatcaaggacttacaaagcacatgactgtcaagaacaagtatgccacatcgaagcatgctaagatcagcactctaccacagctgaattctgcactagttcaagatttagccaaggctgtggcaaaggtgtaacttgtaaacttgagttggagtactatatttacaaataaaattggcaccatgtgccatctgtacatataactgttgcatttacttttaataaagcttgtggccccttttacttttttatagcttaactaatttgaatgtggttacttcctactgtagggtagcggaaaagttgtcttaaaaggtatggtgggtatatttttaaaaactccttttggtttacctggggatccaattgatgtatatgtttatatactgggttcttgttttatatacctggcttttactttattaatatgagttactgaaggtgatggaggtatttgaaaattttacttccataggacatactgcatgtaagccaagtcatggagaatctgctgcatagctctattttaaagtaaaagtctaccaccgaatccctagtccccctgttttctgtttcttcttgtgattgctgccataattctaagttatttacttttaccactatttaagttatcaactttagctagtatcttcaaactttcactttgaaaaatgagaattttatattctaagcncagttttcattttggttttgtgttnangttaataaaa

SEQ ID NO: 257929 - DNA, 949 bp, Homo Sapiens
gtagcgaggcctgggtggcgaattcggcacgagggctgggtgtaggtccttggctggtcgggcctccggtgttctgcttctccccgctgagctgctgcctggtgaagaggaagccatggcgctccgagtcaccaggaactcgaaaattaatgctgaaaataaggcgaagatcaacatggcaggcgcaaagcgcgttcctacggcccctgctgcaacctccaagcccggactgaggccaagaacagctcttggggacattggtaacaaagtcagtgaacaactgcaggccaaaatgcctatgaagaaggaagcaaaaccttcagctactggaaaagtcattgataaaaaactaccaaaacctcttgaaaaggtacctatgctggtgccagtgccagtgtctgagccagtgccagagccagaacctgagccagaacctgagcctgttaaagaagaaaaactttcgcctgagcctattttggttgatactgcctctccaagcccaatggaaacatctggatgtgcccctgcagaagaagacctgtgtcaggctttctctgatgtaattcttgcagtaaatgatgtggatgcagaagatggagctgatccaaacctttgtagtgaatatgtgaaagatatttatgcttatctgagacaacttgaggaagagcaagcagtcagaccaaaatacctactgggtcgggaagtcactggaaacatgagagccatcctaattgactggctagtacaggttcaaatgaaattcaggttgttgcaggagaccatgtacatgactgtctccattattgatcggctcatgcagaataattgtgtgccccaaaaagatgctgcagcctggttgggtgtcactgcccatgttttattgccaagcaaaatatgaaagaaaatgtacccctcccagaaaatggggtggacctttggccttttgtgc

SEQ ID NO: 257930 - DNA, 1093 bp, Homo Sapiens
  misc_feature (10)..(10): n is a, c, g, or t
  misc_feature (19)..(19): n is a, c, g, or t
  misc_feature (24)..(24): n is a, c, g, or t
  misc_feature (30)..(31): n is a, c, g, or t
  misc_feature (38)..(38): n is a, c, g, or t
  misc_feature (43)..(43): n is a, c, g, or t
  misc_feature (48)..(48): n is a, c, g, or t
  misc_feature (51)..(52): n is a, c, g, or t
  misc_feature (55)..(55): n is a, c, g, or t
  misc_feature (64)..(64): n is a, c, g, or t
  misc_feature (66)..(67): n is a, c, g, or t
  misc_feature (71)..(72): n is a, c, g, or t
  misc_feature (80)..(80): n is a, c, g, or t
  misc_feature (88)..(88): n is a, c, g, or t
  misc_feature (113)..(113): n is a, c, g, or t
  misc_feature (136)..(136): n is a, c, g, or t
  misc_feature (177)..(177): n is a, c, g, or t
  misc_feature (216)..(216): n is a, c, g, or t
  misc_feature (270)..(270): n is a, c, g, or t
  misc_feature (272)..(272): n is a, c, g, or t
  misc_feature (274)..(274): n is a, c, g, or t
  misc_feature (276)..(276): n is a, c, g, or t
  misc_feature (324)..(324): n is a, c, g, or t
  misc_feature (343)..(344): n is a, c, g, or t
  misc_feature (348)..(348): n is a, c, g, or t
  misc_feature (359)..(359): n is a, c, g, or t
  misc_feature (362)..(362): n is a, c, g, or t
  misc_feature (371)..(371): n is a, c, g, or t
  misc_feature (377)..(377): n is a, c, g, or t
  misc_feature (397)..(397): n is a, c, g, or t
  misc_feature (404)..(404): n is a, c, g, or t
  misc_feature (416)..(416): n is a, c, g, or t
  misc_feature (419)..(420): n is a, c, g, or t
  misc_feature (424)..(424): n is a, c, g, or t
  misc_feature (461)..(461): n is a, c, g, or t
  misc_feature (480)..(480): n is a, c, g, or t
  misc_feature (483)..(483): n is a, c, g, or t
  misc_feature (493)..(493): n is a, c, g, or t
  misc_feature (499)..(499): n is a, c, g, or t
  misc_feature (501)..(501): n is a, c, g, or t
  misc_feature (526)..(526): n is a, c, g, or t
  misc_feature (588)..(588): n is a, c, g, or t
  misc_feature (603)..(603): n is a, c, g, or t
  misc_feature (617)..(617): n is a, c, g, or t
  misc_feature (628)..(628): n is a, c, g, or t
  misc_feature (657)..(657): n is a, c, g, or t
  misc_feature (662)..(662): n is a, c, g, or t
  misc_feature (688)..(689): n is a, c, g, or t
  misc_feature (692)..(692): n is a, c, g, or t
  misc_feature (719)..(719): n is a, c, g, or t
  misc_feature (726)..(726): n is a, c, g, or t
  misc_feature (746)..(746): n is a, c, g, or t
  misc_feature (1078)..(1078): n is a, c, g, or t
gcaataccancatcccttnccggnattcannaaggcangtcanccccntcnncanatagcattngnncccnnaaacagtntccacttnatctacaaacacagaggaaatgagnctctaccacacctctgttagcanattctttgtctttgcaccagttggctgctcttggagagatnctctatctggctactcgtatcgaacaagaaaatgttatnattcacacggatgaagaaggattttctcctcttatgtgggctgcagcacacggncnantngctgtggtagagttcctacttcagaatggtgctgatccccaacttttnggaaaaggtcgagaaagtnnactntcgttggcctntantaaaggctncacagntattttcaaaatgctgcttnattgtgnagttgatgtaantgnntatntttggtaatggagtgttacactctctgctttttgctntacttggaaattatgtgtnttntttaaagatnctcttngnaagtggggctgatccaacaattttnactgactcttgatttatttctttttatcttgttgtagccctaggctatagtaatgtgttctntcaggttatttagtntacatttgttgtantgctgctttanattatcaaggagtagacacatttatctgnaaatntctgtccttttgtttatttcttggtnnttntaaatgatagttttgttttcttattantttttanctcagttgcaatatttactngtttttagtaggttttaaaaaatatttctctgagtaattcactggtttataataaatgtaatactctttttatagctatgttttactgtatatttaaaattataaattaatgttttcgtggcatgtaaatttttatggtacagatagttatcatcagtctttgtatcaagtgctgtaatttgacattttcagaaattattctaccctagtcatcttcactcgtgtattaagtcattcactttatatagggtttgctataaatccctagaaaaaaattgttcttattgttgaattaaaaagtgcacagtgtgattgtttacaaaatgatattntaaataaataaaata

SEQ ID NO: 257931 - DNA, 988 bp, Homo Sapiens
  misc_feature (42)..(101): n is a, c, g, or t
agggggggcatcattcattccgggcggaaccaggcgttggannnnnnnnnnnnnnnnnnnnnnnnnnnnnnnnnnnnnnnnnnnnnnnnnnnnnnnnnnnncaccatagtggggttgccttgcatctgaggggctcctggagaagctgcggcagccgcctgctgctgttgccatggcgggatggaccctgtgccagcgctcgtggtggtagtcgtcgtattttgctgccatggcaagggggtactggaagccatactgctgctgggcggagggggtggcggaggctgctgctgctgttgttgccatgggggaagaggaccagagggagggggtgggggctgcccactgggaggcggcggcggcggcggcatcatgcccataggtggtggcggcatcataccttttccttgatgcaggcgatagaccccagagcccacaggcgtacttcccaggtactgatccattggaggagggccatggtgcccaggagggtgggggccctggttcatcggtggtggtggtggctgcatccaagggggtgggggtccattggggttgtgctgcatgggatgtccaccatgcccacctgtcaggctgggtaatgggtgtgggaagctgtgggggccacctccgggcccaccaggaccacctccatgcatgccgtggtagggccgactctctgaagggccagaattcatccagggtgggcggctctgggtggtagacatgagagacggtggaggtgggttgttggcgggagcagcaggacgaggtgcgctggccaggggtgtggtggcaggcccagaggtggagcccacagatgctgggacaggtgcttcacccagttcagccatgagggacaaatattctttatccatccgtgctttatcctgagctgactgaggatcacccctcgtgccgaattcgccactcaggcttcgctacttaggggtttggaagtggtttaggtgaggtagttgaagatggg

SEQ ID NO: 257932 - DNA, 1418 bp, Homo Sapiens
  misc_feature (1071)..(1071): n is a, c, g, or t
  misc_feature (1113)..(1113): n is a, c, g, or t
ggcctgggtggcgaattcggcacgaggccggagcgaacgccacgccgttggacttcccaagtaagaagcggaagaggagccgctggaaccaagacacaatggaacagaagacagtgattccaggaatgcctacagttattccccctggacttactcgagaacaagaaagagcttatatagtgcaactgcagatagaagacctgactcgtaaactgcgcacaggagacctgggcatcccccctaaccctgaggacaggtccccttcccctgagcccatctacaatagcgaggggaagcggcttaacacccgagagttccgcacccgcaaaaagctggaagaggagcggcacaacctcatcacagagatggttgcactcaatccggatttcaagccacctgcagattacaaacctccagcaacacgtgtgagtgataaagtcatgattccacaagatgagtacccagaaatcaactttgtggggctgctcatcgggcccagagggaacaccctgaagaacatagagaaggagtgcaatgccaagattatgatccgggggaaagggtctgtgaaagaagggaaggttgggcgcaaagatggccagatgttgccaggagaagatgagccacttcatgccctggttactgccaatacaatggagaacgtcaaaaaggcagtggaacagataagaaacatcctgaagcagggtatcgagactccagaggaccagaatgatctacggaagatgcagcttcgggagttggctcgcttaaatgggacccttcgggaagacgataacaggatcttaagaccctggcagagctcagagacccgcagcattaccaacaccacagtgtgtaccaagtgtggaggggctggccacattgcttcagactgtaaaatcccaaaggcctggtgatcctcagtcagctcaggataaagcacggatggataaagaatatttgtccctcatggctgaactgggtgaagcacctgtcccagcatctgtgggctccacctctgggcctgccacaacccctggccagcgcacctcgtcctgctgctcccgccanaaaccaactccaccgtctctcatgtctaccaaccagaagcgncccacctggatgaattctggccttcagagagtcggccctacacggatgcatggaggtggtcctggtgggccccggaggtggccccaaagttccaaacccatttaccagctgacaggtggctgcgggcatccatgagaaacccaagggcaccacacacacttgaaaaaccaccacacgagaaacagggccagccaggcaagcgcaccccaagagaatacgagaacaaaaaacacaagaagacagaggcaacaaagcaggcaacacagaaaagactgaaaccaagcaggcgaaatgaacactcgacc

SEQ ID NO: 257933 - DNA, 1543 bp, Homo Sapiens
  misc_feature (402)..(447): n is a, c, g, or t
  misc_feature (1133)..(1265): n is a, c, g, or t
  misc_feature (1276)..(1287): n is a, c, g, or t
  misc_feature (1312)..(1322): n is a, c, g, or t
  misc_feature (1347)..(1482): n is a, c, g, or t
ggcgcctgtgggctctggggtctatcgcctgcatcaaggaaaaggtatgatgccgccaccacctatgggcatgatgccgccgccgccgccgcctcccagtgggcagcccccaccccctccctctggtcctcttcccccatggcaacaacagcagcagcagcctccgccaccccctccgcccagcagcagtatggcttccagtacccccttgccatggcagcaaagatccctccccgcggcggcgatggcccgagccatgagagtgaggactttccgcgcccattggtgacccttccaggcagacagcctcagcaacgcccctggtggacaggatggttcggcaaagcagcctgagttatttttgtggacggaatcggaacacgctggctccatatcgtgaannnnnnnnnnnnnnnnnnnnnnnnnnnnnnnnnnnnnnnnnnnnnntcctttcttcagactccgtccaaggagatgctctccccggtcttctgctgcaatttagattcctttcccttctctccagttctccttcccttaccaaggagaggggagcaaatggttttgggcaagggctttggccattcatgtcaagctggttgtgggtttttcaaggtgccatagccacccccaaatatgtttgtttaaagcgtggggttttttaatctctgccacccttgtcaagggagtcttgtaaagttgccgagggtaggttcatctccaggtttcgggattcccatccgtcctggcgatcctgccagcagtgggtgggcagcctgagctccctcgggctcgcctgccagcctggagttcttcctgtgctccttgatcacctgagctgcctcagattccatttggtcctctccttcctggaaggcttccttttatgttttgttttaatcccaaatgtctgaatgttttgcagtgtgtaggggtttgagccccttgttcattctccttcctttttcctcccgcttccctctccatgaagtgattctgttgacaataatgtatactgcgcgttctcttcactggtttatctgcagaaatttctctgggcttttttcggtgttagattcaacactgcgctaaagcggggatgttccattgaataaaagagcagtgtggttttnnnnnnnnnnnnnnnnnnnnnnnnnnnnnnnnnnnnnnnnnnnnnnnnnnnnnnnnnnnnnnnnnnnnnnnnnnnnnnnnnnnnnnnnnnnnnnnnnnnnnnnnnnnnnnnnnnnnnnnnnnnnnnnnnnnnnttgggggggcnnnnnnnnnnnnaaaaaattttttaaaactttttttnnnnnnnnnnnccccaaggggaaaggaaaaggggcnnnnnnnnnnnnnnnnnnnnnnnnnnnnnnnnnnnnnnnnnnnnnnnnnnnnnnnnnnnnnnnnnnnnnnnnnnnnnnnnnnnnnnnnnnnnnnnnnnnnnnnnnnnnnnnnnnnnnnnnnnnnnnnnnnnnnnnnccagcgggttcaaatttaaaattccccccgcccggggaattatgggaagagggggggaaat

SEQ ID NO: 257934 - DNA, 534 bp, Homo Sapiens
  misc_feature (355)..(367): n is a, c, g, or t
cactgcttgcaggattcgccaggacggatgggaattcccgaaacctggagatgaaccctcccctcggccaactttacaagactcccttgacaagggtgggccagagattaaaaaaacccccacgctttaaacaaacatatttggggggtggctatggcaccttgaaaaaccccacaacccagcttgacatgaaatgcccaaagcccttgccccaaaaccatttgctcccctctccttggtaagggaaggagaactggagagaagggaaaggaatctaaattgcagcagaagaccggggagagcatctccttggacggagtctgaagaaaggaaaagataaagaagtaacaaaggnnnnnnnnnnnnnttaataaaaatttcacgatatggagccagcgtgttccgattccgtccacaaaaataactcaggctgctttgccgaaccatcctgtccaccaggggcgttgctgaggctgtctgcctggaagggtcaccaatgggcgcggaaagtcctcactctcatggctcgggcca

SEQ ID NO: 257935 - DNA, 1832 bp, Homo Sapiens
agaacagccgccgctccggcgcgcctgctcgctgcatctctgggcgtctttggctcgccacgctgggcagtgcctgcctgcgcctttcgcaacctcctcggccctgcgtggtctcgagctgggtgagcgagcgggcgggctggtaggctggcctgggctgcgaccggcggctacgactattctttggccgggtcggtgcgagtggtcggctgggcagagtgcacgctgcttggcgccgcagcctgatcccgccgtccactcccgggagcagtgatgttgggcaactctgcgccggggcctgcgacccgcgaggcgggctcggcgctgctagcattgcagcagacggcgctccaagaggaccaggagaatatcaacccggaaaaggcagcgcccgtccaacaaccgcggacccgggccgcgctggcggtactgaagtccgggaacccgcggggtctagcgcagagcagaggccgaagacgagacgggttgcaccccttaaggatcttcctgtaaatgatgagcatgtcaccgttcctccttggaaagcaaacagtaaacagcctgcgttcaccattcatgtggatgaagcagaaaaagaagctcagaagaagccagctgaatctcaaaaaatagagcgtgaagatgccctggcttttaattcagccattagtttacctggacccagaaaaccattggtccctcttgattatccaatggatggtagttttgagtcaccacatactatggacatgtcaattgtattagaagatgaaaagccagtgagtgttaatgaagtaccagactaccatgaggatattcacacataccttagggaaatggaggttaaatgtaaacctaaagtgggttacatgaagaaacagccagacatcactaacagtatgagagctatcctcgtggactggttagttgaagtaggagaagaatataaactacagaatgagaccctgcatttggctgtgaactacattgataggttcctgtcttccatgtcagtgctgagaggaaaacttcagcttgtgggcactgctgctatgctgttagcctcaaagtttgaagaaatataccccccagaagtagcagagtttgtgtacattacagatgatacctacaccaagaaacaagttctgagaatggagcatctagttttgaaagtccttacttttgacttagctgctccaacagtaaatcagtttcttacccaatactttctgcatcagcagcctgcaaactgcaaagttgaaagtttagcaatgtttttgggagaattaagtttgatagatgctgacccatacctcaagtatttgccatcagttattgctggagctgcctttcatttagcactctacacagtcacgggacaaagctggcctgaatcattaatacgaaagactggatataccctggaaagtcttaagccttgtctcatggaccttcaccagacctacctcaaagcaccacagcatgcacaacagtcaataagagaaaagtacaaaaattcaaagtatcatggtgtttctctcctcaacccaccagagacactaaatctgtaacaatgaaagactgcctttgttttctaagatgtaaatcactcaaagtatatggtgtacagtttttaacttaggttttaattttacaatcatttctgaatacagaagttgtggccaagtacaaattatggtatctattactttttaaatggttttaatttgtatatcttttgtatatgtatctgtcttagatatttggctaattttaagtggttttgttaaagtattaatgatgccagctgtcaggataataaattgatttgg

SEQ ID NO: 257936 - DNA, 1293 bp, Homo Sapiens
  misc_feature (87)..(87): n is a, c, g, or t
atttatcagcgtatttcagggtccaaacaaaatagagctaagatactgatgacagtgtgggtgacagcatggtaatgaaggacagtnaggctcctgcttatttataaatcatttcctttctttttttccccaaagtcagaattgctcaaagaaaattatttattgttacagataaaacttgagagataaaaagctataccataataaaatctaaaattaaggaatatcatgggaccaaataattccattccagttttttaaagtttcttgcatttattattctcaaaagttttttctaagttaaacagtcagtatgcaatcttaatatatgctttcttttgcatggacatgggccaggtttttcaaaaggaatataaacaggatctcaaacttgattaaatgttagaccacagaagtggaatttgaaagtataatgcagtacattaatattcatgttcatggaactgaaagaataagaactttttcacttcagtccttttctgaagagtttgacttagaataatgaaggtaactagaaagtgagttaatcttgtatgaggttgcattgattttttaaggcaatatataattgaaactactgtccaatcaaaggggaaatgttttgatctttagatagcatgcaaagtaagacccagcattttaaaagccctttttaaaaactagacttcgtactgtgagtattgcttatatgtccttatggggatgggtgccacaaatagaaaatatgaccagatcagggacttgaatgcacttttgctcatggtgaatatagatgaacagagaggaaaatgtatttaaaagaaatacgagaaaagaaaatgtgaaagttttacaagttagagggatggaaggtaatgtttaatgttgatgtcatggagtgacagaatggctttgctggcactcagagctcctcacttagctatattctgagactttgaagagttataaagtataactataaaactaattttttcttacacactaaaatggggtatccgttccaacataatggacgtatggcttcacattccattgccggcgatatggtcttccatgctaaaacatttttagaaactcccagtttccaaatcctgtcggactctacactcccttcttctggtctctctgagaacgaaactccgccggcaccagcggagtccggcacaactgcttaaggaacagactcccggttccacattcgtccagcccaatatgtggaaggccccccgccggctttttgtttcaacacatccctcgcaccacaactacagg

SEQ ID NO: 257937 - DNA, 996 bp, Homo Sapiens
  misc_feature (5)..(5): n is a, c, g, or t
  misc_feature (7)..(7): n is a, c, g, or t
  misc_feature (11)..(11): n is a, c, g, or t
  misc_feature (22)..(22): n is a, c, g, or t
  misc_feature (26)..(26): n is a, c, g, or t
  misc_feature (28)..(28): n is a, c, g, or t
  misc_feature (32)..(32): n is a, c, g, or t
  misc_feature (42)..(42): n is a, c, g, or t
  misc_feature (51)..(51): n is a, c, g, or t
  misc_feature (53)..(53): n is a, c, g, or t
  misc_feature (57)..(57): n is a, c, g, or t
  misc_feature (66)..(66): n is a, c, g, or t
  misc_feature (74)..(74): n is a, c, g, or t
  misc_feature (77)..(77): n is a, c, g, or t
  misc_feature (86)..(86): n is a, c, g, or t
  misc_feature (104)..(104): n is a, c, g, or t
  misc_feature (134)..(134): n is a, c, g, or t
  misc_feature (174)..(174): n is a, c, g, or t
  misc_feature (218)..(218): n is a, c, g, or t
caggncncgtngggccccactncccngnaatnatataaagcncgtgatgtngngaantgaactacnggccctgnaanggagagggngagatatgtgtgagaggnccaaatgtgttcaaaggctacttgaaaganccagacaggacgaaggaggccctggacagcgatggctggnttcacactggagacatcggaaaatggctgccggcaggaactctnaaaattattgatcggaaaaagcatatatttaaacttgctcagggagaatatgttgcacccgagaagattgagaacatctacatccggagccaacctgtggcgcaaatctatgtccatggggacagcttaaaggcctttttggtaggcattgttgtgcctgaccctgaagttatgccctcctgggcccagaagagaggaattgaaggaacatatgcagatctctgcacaaataaggatctgaagaaagccattttggaagatatggtgaggttaggaaaagaaagtggactccattcttttgagcaggttaaagccattcacatccattctgacatgttctcagttcaaaatggcttgctgacaccaacactaaaagctaagagacctgagctgagagagtacttcaaaaaacaaatagaagagctttactcaatctccatgtgaagttcaaggaaagttcttctcagtgtaatgaactgtctagcaatattatagttattcttgaaagtaatgagtcaaaatgacacagctgaaaatgaataagcatctgattttatgactgagccttttcctgtcccaagaggtctttaacaatattttctctatcatcaatgagtatattttatttttattataaaaatgatattgtggtggactgctaaaaatatcacaaatggcaatgtaaaaatcaagacattttctcaagaactgtgtaccactaaaagtaatatattgtcaatgttcacagaactattaaacataaaggaaaaacataaaa

SEQ ID NO: 257938 - DNA, 1829 bp, Homo Sapiens
  misc_feature (41)..(41): n is a, c, g, or t
  misc_feature (91)..(103): n is a, c, g, or t
  misc_feature (187)..(238): n is a, c, g, or t
  misc_feature (365)..(484): n is a, c, g, or t
agtggcgggaggcgagatcgcggggcgcggcgaagaagtgngagacaacggcgcatacgcgacgcgagggcgcgggaacattcacaaggcnnnnnnnnnnnnncttgttgcaccacggacagcgagtacgcgggggttgggattcgagtccgcggtccgtgtgccgggcgcgggtctcttggttttnnnnnnnnnnnnnnnnnnnnnnnnnnnnnnnnnnnnnnnnnnnnnnnnnnnntagccggggtgtggcccaactgcggcgtaacttagtgggccgcgcgcccgcaacgagagggttgagaaagtttctcgaggggcgagggcggccgacagggtcgcggcggtcgtccggaggcctaaannnnnnnnnnnnnnnnnnnnnnnnnnnnnnnnnnnnnnnnnnnnnnnnnnnnnnnnnnnnnnnnnnnnnnnnnnnnnnnnnnnnnnnnnnnnnnnnnnnnnnnnnnnnnnnnnnnnnnnnccctcctccccaatttttcatacagttgcccctatacaatatacacacccttgagggcaggtagaagtccagcccacctgcgccagggacgctgtggggagcatttttctctgagttgctaagagaaccctgatgggcggtgagcagaggaaccacagaacagccagggctcaaggctggcagcggataggccaggagagatcgctaggccccagaaagccccctactttcagtcagggtgggcaagagggtcttcgcagtgaagtgggaggcaggcctggaggagggagccagggagacccctgggagccctgaggttgggggccaggcagggagatggggatagcagctgcctcagtacttggggaccttgctgtagtcttcggaatggacgtgccggcacaagcagatggacaggaccatccccaggagctcgatgatggccacacccacgcccacgccgaggatgatgcccaggttctcctgcagccacgcctgcaccttctccatgcagccctcctggtacacaggccagtcctcagggtggttgccactctgggtcctgttgccgggggcctcgcagaagcccttcctcacagaaaggctgttgtcctcttcccccttgacttcgcaggaacaggggtaggtgacctcagggcgattcatgagctcagcgttgtctgtccagttgtagaagctgacccagccgcagcacttcacctgagcctgcacgtagtcccaggcatcctgcaggctgtcctcgcgactgctgttgtagtctcgaatgagctcagtcacgatgccgcccatctcctgcttcagcttgcccatgttgaagtagaagagggccccggccgtcacctgggcaatgaggatcaggagcaggaaagcaaagtacagccccagcaggcagcggacctcgttgacggcgccgatgcagcccaggaagcccatgagcatagtgactgcccccacgccgatgaagacataggcccccatcctaagcgagctggaggaggtttgcaggacagagatgaaactgctcttgtcggccaggatccacaccccgaagcccaggatcactgcgcccaggataaagaagatcaagttgaagaggaagagaaagtatttggtgactttgatacaggctgagcccatcccgccagtcctggagcttccttccacgaaaacagtgcagctggtcacagggcccacttctgcctgtgcccacgtgtcgtccacacagcagcagggaggactctgcgggttctgctttctgctccgcgctgcaggcccagcgtcacccgctcgtgcctcagtcggcgtcggactgcacagcccgggg

SEQ ID NO: 257939 - DNA, 1840 bp, Homo Sapiens
  misc_feature (213)..(213): n is a, c, g, or t
  misc_feature (1647)..(1685): n is a, c, g, or t
  misc_feature (1687)..(1692): n is a, c, g, or t
  misc_feature (1695)..(1723): n is a, c, g, or t
cgggatccgcgcgggacggagcttggctgttggtcggtgggttcccgtgcggcggcggccaaggaggaggagacacagttggagcagctccgtgggctgactggggcgaggcctcagcagcgcgagcttgagtgcggccgagcctgcggcgccttcccctgcgggtggggacgagcgggccccgcggcgtcatcggcggcgaggagccgcccngcctcggcctagcatgtcggaagcgggcgaggagcagcccatggagacgacgggcgccaccgagaacggacatgaggccgtccccgaaggcgagtcgccggccggggctggcacgggcgccgcggcgggggctggaggcgcgaccgcggcgcccccgagcgggaatcagaacggcgccgagggcgaccagatcaacgccagcaagaacgaggaggacgcgggaaaaatgttcgttggtggcctgagctgggatactagcaaaaaagatttaaaagactattttactaaatttggagaggtcgttgactgtacaataaaaatggatcccaacactggacggtcaagagggtttgggtttatcctgttcaaagatgcagccagtgtggagaaggtcctagaccagaaggagcacaggctggatggccgtgtcattgaccctaaaaaggccatggctatgaagaaggacccggtgaagaaaatcttcgttgggggtctgaatcctgaagccactgaggaaaagatcagggagtactttggcgagtttggggagattgaggccattgaattgccaatggatccaaagttgaacaaaagacgaggttttgtgtttatcacctttaaagaagaagaacccgtgaagaaggttctggagaaaaagttccatactgtcagtggaagcaagtgtgagatcaaggtggcccagcccaaagaagtctatcagcagcagcagtatggctctgggggccgtggaaaccgcaaccgagggaaccgaggcagcggaggtggtggtggaggtggaggtcagggtagtacaaactacggcaagagccagcgacgtggtggccatcagaataactacaagccatactgaggcggcagcaggagcgaccaactgatcgcacacatgctttgtttggatatggagtgaacacaattatgtaccaaatttaacttggcaaactttctattgcctgtcccatgtgcatcttatttaaaatttcccccatggaaatcactctcctgttgactatttccagagctctaggtgtttaggcagcgtgtggtgtctgagaggccatagcgccatcatgggctgatttttattaccaggtcccccagaagcaggtgggaggctctgcttcctgctgccgctctgcagcctggacctgtggaccctggttgtaaagagtaaattgtatcttaggaaaccagtgtcacctttttttcaccttttaattttatattatttgcgtcatacatttcctgtaacggaagtgttaattttactgtactttttggtaccttttgggaatctaatgtattgtaaggtattttacacgtgtcctgattttgccacaacctggatattgaagctatccaagcttttgaaataaaatttaaaaacccccaagcctgggtgagtgtggaaaaaannnnnnnnnnnnnnnnnnnnnnnnnnnnnnnnnnnnnnnannnnnngtnnnnnnnnnnnnnnnnnnnnnnnnnnnnncctggcgggcgccctcgcccccccgaaaagctttctaaaacctttccgtttggggcgccgggccccatagggaaaagggaacatgggccaaagcttggttccctaggaaaaaccggg

SEQ ID NO: 257940 - DNA, 462 bp, Homo Sapiens
  misc_feature (388)..(388): n is a, c, g, or t
  misc_feature (416)..(416): n is a, c, g, or t
  misc_feature (423)..(423): n is a, c, g, or t
  misc_feature (446)..(446): n is a, c, g, or t
ccagcgacgtggtggccatcagaataactacaagccatactgaggcggcacagggagcgaccaactgatcgcacacatgctttgtttggatatggagtgaacacaattatgtaccaaatttaacttggcaaactttctattgcctgtcccatgtgcatcttatttaaaatttcccccatggaaatcactctcctgttgactatttccagagctctagggtgtttagggcagcgtgtgggtgtctgagaggccatagcgccattcatggggctggatttttattaccagggtcccccaggaaggcaggtgggggaggctctgctttcctggctggccgctctggcagcctggggacctgtgggaccctgggttgttaaagagtaaattngttattcttaggggaaaccagtgttcanctttttntttcaacctttttaaatttttanaattattttggcgtca

SEQ ID NO: 257941 - DNA, 502 bp, Homo Sapiens
aggtagaaaggctctggaataagaaaaacttcaccacagaggagaatcagtgagttgcagaagttctaggatcttctgagaccttaaactgcaggcttcatacccctggactcaagaatctagaactgtcacctctagctttaagtgaggagctaaagaggctactcaaacctgctcttattcacagaggcccaccttctccttacctcccttcacatcctgtgttgtttattggcagtcctcccagcctgggaagtctttcaaggattggaacactgccccaatcagggcagcatacgcttcagagaaatagtaaagtctgaccaacctggagagctcctgcatgaggcccaacccctaacccatccctctaagggccagctctccagcagcacaggaggccaagcagagctgggaacaccttaccttgcttccactgacagtatggaactttttctccagaaccttcttcacgggttcttcttctttaaaggtgataaac

SEQ ID NO: 257942 - DNA, 925 bp, Homo Sapiens
  misc_feature (231)..(286): n is a, c, g, or t
aggctggaccggtccggattcccgggatgtcgtggggcttctggggcagctagggctgcccgccgcgctgcctgcgccggaccggggcgggtccagtcccgggcgggccgtcgcgggagagaaataacatctgctttgctgccgagctcagaggagaccccagacccctcccgcagccagagggctggagcctgctcagaggtgctttgaagatgccggaggccccgcctnnnnnnnnnnnnnnnnnnnnnnnnnnnnnnnnnnnnnnnnnnnnnnnnnnnnnnnntctgaggcactggggctggggcctgtgccttatcggctggaacgagttcatcctgcagcccatccacaacctgctcatgggtgacaccaaggagcagcgcatcctgaaccacgtgctgcagcatgcggagcccgggaacgcacagagcgtgctggaggccattgacacctactgcgagcagaaggagtgggccatgaacgtgggcgacaagaaaggcaagatcgtggacgccgtgattcaggagcaccagccctccgtgctgctggagctgggggcctactgtggctactcagctgtgcgcatggcccgcctgctgtcaccaaggggcgaggctcatcaccatcgagatcaaccccgactgtgccgccatcacccagcggatggtggatttcgctggcgtgaaggacaaggtcaccccttgtggtgtggagcgtcccagggacatcatccccccagctgaagaagaagtatgatgtgggacacactggacatgggtcttcctcgaccactggaagggacggtacctgccgggacacgcttctcttgggagaaaggtggcctggctgcggaaaggggaacgggttactgggctgaaaaacgggatctggccaaggggcgccagaatttccttccacacgg

SEQ ID NO: 257943 - DNA, 1112 bp, Homo Sapiens
ggggcagatgccggaggccccgcctctgctgttggcagctgtgttgctgggcctggtgctgctggtggtgctgctgctgcttctgaggcactggggctggggcctgtgccttatcggctggaacgagttcatcctgcagcccatccacaacctgctcatgggtgacaccaaggagcagcgcatcctgaaccatgtgctgcagcatgcggagcccgggaacgcacagagcgtgctggaggccattgacacctactgcgagcagaaggagtgggccatgaacgtgggcgacaagaaaggcaagatcgtggacgccgtgattcaggagcaccagccctccgtgctgctggagctgggggcctactgtggctactcagctgtgcgcatggcccgcctgctgtcaccaggggcgaggctcatcaccatcgagatcaaccccgactgtgccgccatcacccagcggatggtggatttcgctggcatgaaggacaaggtcacccttgtggttggagcgtcccaggacatcatcccccagctgaagaagaagtatgatgtggacacactggacatggtcttcctcgaccactggaaggaccggtacctgccggacacgcttctcttggaggaatgtggcctgctgcggaaggggacagtgctactggctgacaacgtgatctgcccaggtgcgccagacttcctagcacacgtgcgcgggagcagctgctttgagtgcacacactaccaatcgttcctggaatacagggaggtggtggacggcctggagaaggccatctacaagggcccaggcagcgaagcagggccctgactgcaccccccggcccccctctcgggctctctcacccagcctggtactgaaggtgccagacgtgctcctgctgaccttctgcggctccgggctgtgtcctaaatgcaaagcacacctcggccgaggcctgcgccctgacatgctaacctctctgaactgcaacactggattgttcttttttaagactcaatcatgacttctttactaacactggctagctatattatcttatatactaatatcatgttttaaaaatataaaatagaaattaagaatctaaatatttaga

SEQ ID NO: 257944 - DNA, 798 bp, Homo Sapiens
aaagctgttcgttggattctagtctgattgccctgggcatctcaggatctctcttggcaatgacattttggccagctgttcgtgaggataaccgacgcgttgcattggccacaattgtgacaattgtgttgctccatatgctgctttctgtgggctgcttggcatacttttttgatgcaccagagatggaccatctcccaacaactacagctactccaaaccaaatagttgctgcagccaagtccagctaatgaggaaattctcttttgttttttggagcatggttctttgggaagtggcatccactgcaggaaagcagaatgagcagagccagcagaactgatggagtggcacaaattcccagtgtctggatggtgccacactggcgcctaatcacccgtttaacaagcagaaattaaatgttgctcagcacatgtgtctttcagctcttccttttcacccatggatgatcattgcgagcatgcgctgattggactgaaatgccggggaataggttaggcatgctcagtgccgtccctttgccaccacagtcaaatgacatgcttcactgtggtaccttaatacctgaaatagaaccatggaaaattctgatgtcctctctctgaattatgtacagactacctgggggatcctcttctctccaaatgttagccatcctgaagtagccgaacagtagaaactttggtggggattaaccgggagcttgaaaatttgtctttggtaacctgatactggacagctgaactgaatggctgcaaaataaatacctcacatttc

SEQ ID NO: 257945 - DNA, 1006 bp, Homo Sapiens
  misc_feature (951)..(951): n is a, c, g, or t
  misc_feature (963)..(964): n is a, c, g, or t
  misc_feature (967)..(967): n is a, c, g, or t
  misc_feature (971)..(971): n is a, c, g, or t
  misc_feature (978)..(978): n is a, c, g, or t
  misc_feature (988)..(988): n is a, c, g, or t
  misc_feature (996)..(996): n is a, c, g, or t
tccggaattcccgggatctgggctggaccgaaaccggcgcggacaactgaggcccgagccttctcgggacccgggggacgcctaaccccgcgagatgaggaaactgaggccgcgaggagcgcgcacacagcagagaagcagcagaatcgggaatcaaacccagctctgtctgaccccagagcctgtgcccttaaccactggctaggctgaactgcctttgttcttcactgtccccatcacctctttcaaacctcagcctctccttcctcatcgttacatctctaggctgcacctggtctctaaacattcacacaacccctgcaaattttcttcctcataattgggagaagactcactggccgaatggcagcagtagatgacttgcaatttgaagaatttggcaatgcagccacttctctgacagcaaacccagatgccaccacagtaaacattgaggatcctggtgaaaccccaaaacatcagccaggatccccaagaggctcaggaagagaagaagatgatgagttactgggaaatgatgactctgacaaaactgagttacttgctggacagaagaaaagctcccccttctggacatttgaatactaccaaacattctttgatgtggacacctaccaggtctttgacagaattaaaggatctcttttgccaatacccggggaaaaactttgtgaggttatatatccgcagcaatccagatctctatggccccttttggatatgtgccacgttggtctttgccatagcaattagtgggaatctttccaacttcttgatccatctgggagagaagacgtaccattatgtgcccgaattccgaaaagtgtccatagcagctaccatcatctatgcctatgcctggctggttcctcttgcactctggggtttctcatgtggagaaacagcaagttatgacatcgtctctattcnttctggagatgnntgnttanggatatncctcttcatnatatcccncgcaatatgt

SEQ ID NO: 257946 - DNA, 1355 bp, Homo Sapiens
  misc_feature (1235)..(1235): n is a, c, g, or t
  misc_feature (1252)..(1252): n is a, c, g, or t
  misc_feature (1267)..(1267): n is a, c, g, or t
  misc_feature (1275)..(1275): n is a, c, g, or t
  misc_feature (1283)..(1285): n is a, c, g, or t
  misc_feature (1292)..(1292): n is a, c, g, or t
  misc_feature (1305)..(1305): n is a, c, g, or t
  misc_feature (1322)..(1322): n is a, c, g, or t
  misc_feature (1329)..(1329): n is a, c, g, or t
  misc_feature (1335)..(1335): n is a, c, g, or t
  misc_feature (1337)..(1337): n is a, c, g, or t
  misc_feature (1344)..(1344): n is a, c, g, or t
  misc_feature (1348)..(1348): n is a, c, g, or t
cgctccttcctcagcggcgggaagctggcggcagcggcggtggcggtggctgagcagaggacccggcgggcggcctcgcgggtcaggacacaatgtttgcacgaggactgaagaggaaatgtgttggccacgaggaagacgtggagggagccctggccggcttgaagacagtgtcctcatacagcctgcagcggcagtcgctcctggacatgtctctggtgaagttgcagctttgccacatgcttgtggagcccaacctgtgccgctcagtcctcattgccaacacggtccggcagatccaagaggagatgacgcaggatgggacgtggcgcacagtggcaccccaggctgcagagcgggcgccgctcgaccgcttggtctccacggagatcctgtgccgtgcagcgtgggggcaagagggggcacatcctgctcctggcttgggggacggccacacacagggtccagtttctgacctttgcccagtcacctcagcacaggcaccaaggcacctgcagagcagcgcctgggagatggatggccctcgagaaaacagaggaagctttcacaagtcacttgatcagatatttgaaacgctggagactaaaaaccccagctgcatggaagagctgttctcagacgtggacagcccctactacgacctggacacagtactgacaggcatgatggggggtgccaggccgggcccctgcgaagggctcgagggcttggctccggccaccccaggccctagctccagctgcaagtccgacctgggcgagctggaccacgtggtggagatcctggtggagacctgagcaggagccctgagtgctcacagccgcctctgacgcattgacacgtgagcactggctcccacggagggtgcgcctgccgccagcggcccagccttgctgccctgtctgctgattctgagaaatcccagaacagcccattaccagtggggctgcagccctaggcccgtcccactcacctcccccctgtggagcgccaggcagaggctgttctggaaggcttcttgtcttctgacgtccccacagccctgggcccctcgtgtctctttgtgtcccccactgtagaggacggtgagccgcagctgcatcaacctccttttacctttagataggtgaatttttacaattcagttttacatgttttgggcagtattttgtcttaagatatattttttaaactttttataccttatctcttanatttttcagctatttcntaaaagatatttttntataacanctttgtgnnnattagantttaaacgtaaanaatgagtggggggttantttttangttaananggttttntttnttgtttt

SEQ ID NO: 257947 - DNA, 1131 bp, Homo Sapiens
  misc_feature (7)..(7): n is a, c, g, or t
  misc_feature (11)..(11): n is a, c, g, or t
  misc_feature (24)..(24): n is a, c, g, or t
  misc_feature (28)..(28): n is a, c, g, or t
  misc_feature (46)..(46): n is a, c, g, or t
  misc_feature (48)..(49): n is a, c, g, or t
  misc_feature (58)..(58): n is a, c, g, or t
  misc_feature (64)..(64): n is a, c, g, or t
  misc_feature (69)..(69): n is a, c, g, or t
  misc_feature (71)..(71): n is a, c, g, or t
  misc_feature (78)..(78): n is a, c, g, or t
  misc_feature (81)..(81): n is a, c, g, or t
  misc_feature (84)..(84): n is a, c, g, or t
  misc_feature (86)..(86): n is a, c, g, or t
  misc_feature (89)..(89): n is a, c, g, or t
  misc_feature (94)..(94): n is a, c, g, or t
  misc_feature (99)..(99): n is a, c, g, or t
  misc_feature (111)..(111): n is a, c, g, or t
  misc_feature (122)..(122): n is a, c, g, or t
  misc_feature (127)..(127): n is a, c, g, or t
  misc_feature (131)..(131): n is a, c, g, or t
  misc_feature (136)..(136): n is a, c, g, or t
  misc_feature (235)..(293): n is a, c, g, or t
  misc_feature (382)..(433): n is a, c, g, or t
aaatccnaganacccattaccagngggngcaccctagcccgcccancnncctcccccntgggancgcangnagagctnttntgnanggnttttnttttnacgcccccacanccctggccccntcgtntctnttttnccccccactgtagaggacggtgagccgcagctgcatcaacctccttttacctttagataggtgaatttttacaattcagttttacatgttttgggcagnnnnnnnnnnnnnnnnnnnnnnnnnnnnnnnnnnnnnnnnnnnnnnnnnnnnnnnnnnnagctattttcttaaaagtatattttttctataaacatcctttgctgctacattagaacttttatagcctaaacaattgcagttggtgtnnnnnnnnnnnnnnnnnnnnnnnnnnnnnnnnnnnnnnnnnnnnnnnnnnnngcagtgagcatcactacagtctcagtcaacagtgtgaatgtatcatgttttactttaaatgtgtgtgtgatacttcttcattatgtcctgcgctgcagtgagacctgggtgaaaatcaggagccgcacacagccacatcttcctagacctaagagtaaattatggaggattttatttatgtctatttatatgtaaatgtcattgaagacaaaggtcaaatatttgtctgtttgtagatcacaggcaccagttggtcttcagggacctcatagcccctcggtggtgccttctcaaggcagtgttcctggaggctcccgtcagggtcagcccatgcacctgccctgggtgaggaagtagcattgctgctggatgagaaacgcctgcgctgctctgttagactggtgctgaaacaaaaggttaaggctaggttgaagtctagaatgaaagaaatctgaatccatgtcattcataaccccttgatctgtagtgtcatgggtgctgccgcaggcagggagtgagctgggggtgcctgcagccttccactcctgccccgcctcaccccacatgctccctgtttctcatgctttctctaacttcctcaccccttaaccaaaaaggtgtgttttcttttgtgcatatagccattcttaaatatcagtgatgtaaacctcactttattaaaaaattatccagcaaaa

SEQ ID NO: 257948 - DNA, 1010 bp, Homo Sapiens
  misc_feature (944)..(944): n is a, c, g, or t
gggagactcacgccgattctctctcagcgtagggctgtgagggcgcagtccaccgccaggagccttccggtttctgcgcggtgcgcgacctcgtcccgaagcctggggatacaccctctcgagagcccgctgtcgccctccgttaaggtcgaacccctcacagttgctgtgggcaactccagcccaacattccctcgctctggttctcgccccattgggaaactcggccccacgcttcccacttttctggatgaggtgtcccctttctccccactaaaatgtcaaataacctacggagggtcttcctgaaacccgcagaggaaaattcaggcaacgcctcgcgttgatccataatgagatggcatcaacatcagataaaggtgcccaaggaagaaatgacaagaaagattctcaaggaagaagtaataaggcattacatctgaagagtgatgctgaatttaaaaagatatttggccttactaaggatttgagagtgtgccttactcgaattcctgaccatttgacctctggagaaggtttcgattcctttagcagtttggtaaagagtggtacttacaaagagacagagtttatggtgaaggaaggagagagaaaacagcagaattttgataagaaaagaaaagcaaaaactaataagaagatggatcacataaagaagagaaaaacagagaatgcttataacgcaatcataaatggggaagctaatgtcaccggttcccaactcctaagcagtattttaccaacttcagatgtgtcacaacataacattctcacgagtcacagcaaaacccgacaagaaaagagaactgagatggaatactatacccatgagaagcaagagaaaggcactttgaaattcaatgcagcttatgaacaaagtcatttcttcaataaaaattataccgaaagatatttttccaggnacaccacccggatttagagaaaacatttccagatggaaaaataagaagactttagccaggtgcttg

SEQ ID NO: 257949 - DNA, 917 bp, Homo Sapiens
agctcccttcccggcggcctttgcgggaacaagatggcagcccccatacctcaagggttctcttgtttatcgaggtttttgggctggtggtttcggcagccagttctggtgactcagtccgcagctatagttccagtaagaactaaaaaacgtttcacacctcctatttatcaacctaaatttaaaacagaaaaggagtttatgcaacatgcccggaaagcaggattggttattcctccagaaaaatcggaccgttccatacatctggcctgtacagctggtatatttgatgcctatgttcctcctgagggtgatgcacgcatatcatctctttcaaaggagggactgatagagagaactgaacgaatgaagaagactatggcatcacaagtgtcaatccggaggataaaagactatgatgccaactttaaaataaaggacttccctgaaaaagctaaggatatctttattgaagctcacctttgtctaaataactcagaccatgaccgacttcataccttggtaactgaacactgttttccagacatgacttgggacatcaaatataagaccgtccgctggagctttgtggaatctttagagccctctcatgttgttcaagttcgctgttcaagtatgatgaaccagggcaacgtgtacggccagatcaccgtacgcatgcacacccggcagactctggccatctatgaccggtttggccggttgatgtatggacaggaagatgtacccaaggatgtcctggagtatgttgtattcgaaaagcagttgacaaacccctatggaagctggagaatgcataccaagatcgttcccccatgggcaccccctaagcagcccatccttaagacggtgatgatccctggccctcagctgaaaccagaagaagaatatgaaga

SEQ ID NO: 257950 - DNA, 553 bp, Homo Sapiens
  misc_feature (12)..(12): n is a, c, g, or t
  misc_feature (250)..(250): n is a, c, g, or t
  misc_feature (523)..(523): n is a, c, g, or t
caggtgtgagcnaccgcgccaggcccgtaactgtattttaatatagccattctatggatttaatatggtattttattatggccttaatttgcatttccctagatactaaccatgctgagtgtcctgtcttgtgtttattaaccattcatatatttttagtgaaatgtgtatcaaatcttttgcccatttttaagttgacttatttgtttgtcttcttactattgggttgcatatgtttttgatataagtnctttatcagatatatgatttggaaatattatctaccaatctgtggtttgtttttctcaatggtgtcttttgaagtgcaaaaggtttgaattttgaagtacattttattgattttttcttctatatattgtgcttttggtatcatgtctaataaatctttaccaaacccacagttacaaagattatctcctgtcttctttttatactttttacagctttatggttttagctctaacaataaatgtgattttgaacatacataagactatttgtnacaaacacaaataaattgaattgttgggca

SEQ ID NO: 257951 - DNA, 1811 bp, Homo Sapiens
  misc_feature (1596)..(1596): n is a, c, g, or t
aaaaaactatacatatttaaaaatactgcaaggttgtggtttcctgagcaggatggattgggcagacaaaatcagcaatgcccctgctcctgagagaggcctcgccatccctgttccataagtcttgagtctgcactggttctctgagtcatattggatccctgatcatctgcagcctggtgtcctaagagcaagccacatagctggggggcagaggctcagcggctgggataaggctgttctcataagggttggagtaggggccatcggataagcccccttgggctccctgggagtcccctgagctgtagtcagttgagatgccagagtcagataccacaaggtacaggtactttaggtggggtggggtagggggcagctcagggcacagtgtccatggacgcaagagctgggagctggggtcccaggatagtgtactcaaagctggcagcagaggctccctctgggctgggcttcgaggccaaagcagatgagcaggaggatgcttctgagccttcatccatggccactatgtccacactgccaccaggccctgggaggtcctcactgggcgggttccggggcagcaaccatttgtccagcaccagataggtatcctgggcatgctcactgcccactggctccagcagggggccctcatcatctgtccccggctccactgcctgcatcgtcccccagcagcgctctgagaggacttccagggaagcaggtgggtcctccgtgaagggggtgcaggggctccaccacaggcagccatcattctggtacagccacagctggaagttacccttgtgggtggtgaagaggccttcaaactcgctctctgggctcgggatgccaggccagatcttctgcttcagagcccggcggtgggagagcagcgcgagcacggtcagcagcaccaggatgaccacgaggatgagggagagcgtcaggatgagggggtccaggtcgctaggcgtcagcagcgacacaggctccgaccaggcgctccagaagccgccgaagctcggctcagccatacgcgcgcggacggcgaaggtgtagcgcgtccggccccgcaggttgctcagcacacactcggtgcggccctccaggatctccaccctctgtacgctccactgcgccgttgccggccgagacgtccacctcgtagcggatgtgagacgtcatgggtgtctcaggcggcgggagccagcgcaaactacgtggccgctctcgtcagccaaccgcgcacaccagccccacgggggcgtctaggagcactacttcattgatgtggatgacacggtgatatcgcggagcgccggaggctgctgtgacgcgcaactctaggggcacgaagctcgacgtgtcggctgtaggcagcgaacaccagaagcgcaccgcaccacgagccgtgggagcctggtgcaggcgacacagcttccatggctcatcctcgagctggtaggagaagctgtagttgcccgggcccaccccagcgctcgccgcttcctcccagaaacacaccaagtcctccaaccgctcggtgaagcacagaagctcttcgggcccccgggccgccagcaaggncgctttgctctcgaacttggggtccgggaggttaggcgggggcgcccaggcggccccagcgagcaggagacaaagggagccgacctggggccagagggacgccccgaggtggtccatgatacagcccccgccacggggagcccagggctcctgcccctccgtcccccgcccccggcacagtccacagctgggtcagcagctgcctccgccggacg

SEQ ID NO: 257952 - DNA, 1072 bp, Homo Sapiens
  misc_feature (922)..(922): n is a, c, g, or t
  misc_feature (980)..(980): n is a, c, g, or t
  misc_feature (990)..(990): n is a, c, g, or t
  misc_feature (1000)..(1000): n is a, c, g, or t
  misc_feature (1011)..(1011): n is a, c, g, or t
  misc_feature (1018)..(1018): n is a, c, g, or t
  misc_feature (1026)..(1027): n is a, c, g, or t
  misc_feature (1032)..(1032): n is a, c, g, or t
  misc_feature (1037)..(1037): n is a, c, g, or t
  misc_feature (1039)..(1039): n is a, c, g, or t
  misc_feature (1043)..(1043): n is a, c, g, or t
  misc_feature (1045)..(1045): n is a, c, g, or t
  misc_feature (1050)..(1050): n is a, c, g, or t
  misc_feature (1056)..(1056): n is a, c, g, or t
  misc_feature (1058)..(1058): n is a, c, g, or t
  misc_feature (1064)..(1064): n is a, c, g, or t
ggagcagggacaggtccaagacaaggaaggcagttgggctgtgggaatggggagcccagggaaggcctccagagctggccggcctccagcctggctggaccctgctgcctgtgtggcccggagccagaggcccccacactcccagctgctcttctacagatgccatcaacgagcaggactctgggtggctccactgtctaagcctggagagtcaccgccgagggatgaggacgcgccaccccgggggaacgcgccactgctttcgcggccccaagcgcgcagtgcccagcagccgcgccgagcctgacacgctgtcctctcccctcgcgcacagggctctgcgagtgacccggcgggcgagctccgtgctgcatggaacggctgcagaagcaaccacttacctcccccgggagcgtgagcccctcccgagattccagtgtgcctggctctccctccagcatcgtggccaagatggacaatcaggtgctgggctacaaggacctggctgccatccccaaggacaaggccatcctggacatcgagcggcccgacctcatgatctacgagcctcacttcacttattccctcctggaacacgtggagctgcctcgcagccgcgagcgctcgctgtcacccaaatccacatcccccccaccatccccagaggtgtgggcggacagccggtcgcctggaatcatctctcaggcctcggccccagaaccactggaaccccccggaccagcctgccccatttccaccaccctgagacctcccgcccagattccaacatctacaagaagcctcccatctataagcagagagagtccgtgggaggcagccctcagaccaagcacctcatcgaggatctcatcatcgagtcatccaagtttcctgcagcccagcccccagaccccaaccagcnagccaaaatcgaaaccgactactggccatgcccccgtctctggctgttgtggagaagnatggaggaancggaagggtntcggagggganagagganagaggagnngaaangacgntntggnangaganaaggtntnaggagntcaaaaag

SEQ ID NO: 257953 - DNA, 1001 bp, Homo Sapiens
aaggtagcgaggcctgggtggcgaattcggcacgagggtgaccttgtggggaaaggagccaagaacggggcgtcggggggcctgggacccccctgcctgagagatacaggaatcctggccccgtgttgtggacacaagcgcccatcctcaaggtcctgagaactcctgaacttccaaagcctggagagtcaccgccgagggatgaggacgcgccagcccgggggaacgcgccagctgctttcgcggccccaagcgcgcagtgcccagcagccgcgccgagcctgacacgctgtcctctcccctcgcgcacagggctctgcgagtgacccggcgggcgagctccgtgctgcatggaacggctgcagaagcaaccacttacctcccccgggagcgtgagcccctcccgagattccagtgtgcctggctctccctccagcatcgtggccaagatggacaatcaggtgctgggctacaaggacctggctgccatccccaaggacaaggccatcctggacatcgagcggcccgacctcatgatctacgagcctcactttacttattccctcctggaacacgtggagctgcctcgcagccgcgagcgctcgctgtcacccaaatccacatcccccccaccatccccagaggtgtggggcggacagccgggtcgcctggaatcatctctcaggcctcggcccccagaaccactggaaccccccggaccagcctgccccatttccaccaccctgagacctcccgcccagattccaacatctacaagaagcctcccatctataagcagagagagtccgtggggaggcagccctcagaccaagcacctcatcgaggatctcatcatcgagtcatccaaggtttcctggcagcccagcccccagaccccaaccagccagccaaaatcaaaaccgactactggccatgccccccgtctcgggctggtggggagaacgaaatgggaggaagcggaaaggggcttccggggggaa

SEQ ID NO: 257954 - DNA, 1004 bp, Homo Sapiens
  misc_feature (893)..(951): n is a, c, g, or t
ctacgtaacgaggcctgggtggcgaattcggcacgagggtgaccttgtggggaaaggagccaagaacggggcgtcggggggcctgggacccccctgcctgagagatacaggaatcctggccccgtgttgtggacacaagcgcccatcctcaaggtcctgagaactcctgaacttccaaagcctggagagtcaccgccgagggatgaggacgcgccagcccgggggaacgcgccagctgctttcgcggccccaagcgcgcagtgcccagcagccgcgccgagcctgacacgctgtcctctcccctcgcgcacagggctctgcgagtgacccggcgggcgagctccgtgctgcatggaacggctgcagaagcaaccacttacctcccccgggagcgtgagcccctcccgagattccagtgtgcctggctctccctccagcatcgtggccaagatggacaatcaggtgctgggctacaaggacctggctgccatccccaaggacaaggccatcctggacatcgagcggcccgacctcatgatctacgagcctcactttacttattccctcctggaacacgtggagctgcctcgcagccgcgagcgctcgctgtcacccaaatccacatcccccccaccatccccagaggtgtgggcggacagccggtcgcctggaatcatctctcaggcctcggcccccaaaaccactggaaaccccccggaccagcctgccccatttccaccacccctgagacctcccgcccagattccaacatctacaagaagccctcccatctataaagcagaagagagtcccgtgggaggcaatcccctcagaccaagcaccctaatccgagggatctcaatcatcggaggtcttccaaaggttccctgggnnnnnnnnnnnnnnnnnnnnnnnnnnnnnnnnnnnnnnnnnnnnnnnnnnnnnnnnnnnattacctgggcccttggccccccccgtttctcttggggcgtgtttagtgagaa

SEQ ID NO: 257955 - DNA, 394 bp, Homo Sapiens
  misc_feature (40)..(40): n is a, c, g, or t
  misc_feature (66)..(66): n is a, c, g, or t
catcgagcggcccgacctcatgatctacgagcctcacttnacttattccctcttggaacacgtggnagttgcttgcaagccgcgagcgctcgctgtcacccaaatccacatcccccccaccatccccagaggtgtgggcggacagccggtcgcctggaatcatctctcaggcctcggcccccagaaccactggaaccccccggaccagcctgccccatttccaccaccctgagacctcccgcccagattccaacatctacaagaagcctcccatctataagcagagagagtccgtgggaggcagccctcagaccaagcacctcatcgaggatctcatcatcgagtcatccaagtttccttgaccagcccctcccccaataaactcgcctcttgg

SEQ ID NO: 257956 - DNA, 1100 bp, Homo Sapiens
  misc_feature (970)..(970): n is a, c, g, or t
  misc_feature (985)..(985): n is a, c, g, or t
  misc_feature (989)..(990): n is a, c, g, or t
  misc_feature (1026)..(1026): n is a, c, g, or t
  misc_feature (1028)..(1028): n is a, c, g, or t
  misc_feature (1042)..(1043): n is a, c, g, or t
  misc_feature (1049)..(1049): n is a, c, g, or t
  misc_feature (1055)..(1055): n is a, c, g, or t
  misc_feature (1077)..(1077): n is a, c, g, or t
  misc_feature (1082)..(1082): n is a, c, g, or t
gatggcgggcacagcggccggcggactgaggcgcgcggcggggaaagctcggccggcctcccgggccccagccttctccagaacccctgctacccacgactaagccccgaacaatctgcccttgggcttgttctcttcgcagttgtcggccctgggccgggagctggagtcccagactcataggtcccggcccagcccccgaagagccgcctcagccggggggagttgctcggactcaaacgtccagtcctcgtgcgaccgcgctgggtcggaagtgagcaggctgaggccaccatggagcagtgtgcgtgcgtggagagagagctggacaaggtcctgcagaagttcctgacctacgggcagcactgtgagcggagcctggaggagctgctgcactacgtgggccagctgcgggctgagctggccagcgcagccctccaggggacccctctctcagccaccctctctctggtgatgtcacagtgctgccggaagatcaaagatacggtgcagaaactggcttcggaccataaggacattcacagcagtgtatcccgagtgggcaaagccattgacaggaacttcgactctgagatctgtggtgatgtgtcagatgcggtgtgggacgcgcgggaacagcagcagcagatcctgcagatggccatcgtggaacacctgtatcagcagggcatgctcagcgtggccgaggagctgtgccaggaatcaacgctgaatgtggacttggatttcaagcagcctttcctagagttgaatcgaatcctggaagccctgcacgaacaagacctgggtcctgcgttggaatgggccgtctcccacaggcagcgctgctggaactcaacagctccctggagttcaagctgcaccgactgcacttcatccgcctcttggcaggaggcccgcgaaagcttggaggcctcagctatgtcggcacttcagcctttgctcggtncacagcggagatcangtgnnatggcagctggtgtactgcggtgggctggagaatancnactgccactgctgnnacacantggganaattttaaacttaccggagctntcctnctggggttttgtgatccc

SEQ ID NO: 257957 - DNA, 1916 bp, Homo Sapiens
  misc_feature (38)..(38): n is a, c, g, or t
ttaaaggtatggcccaaatgaccctgtgaggacacagnacagaggtccagtgtctccagagcccattccttctgtgcctctgctgcctgcaactgataaacctcttatctggcccaggcaggggagcccagggccaggataggaggagagggcagagctgctatcaaccaccaggcctgggccatatcttggagaggaggaggggctgtctgcttgcctctttccacaacttgttcttggggatcctcaagcatatactgtcatcatcttggaaagaaaaggctgagaacgtaaaactgaggacagaggaggaaagcagggtgacccctgatgttgccctagaaaatggaaaacaaaacacagcaaaacagaaaaacagaagatctgactctgcctttagccaggaaaacagtttgggggagtaaaaagtattagggaaaagagtgggcattttgcctggaaaaaaggtttctagagccatctgggctttccgggaacctggaccagactctggcccagtaggatgtccccgtgtcctccccagcagagcaggaacagggtgatacagctgtccacttcagagctaggagagatggaactgacttggcaggagatcatgtccatcaccgagctgcagggtctgaatgctccaagtgagccatcatttgagccccaagccccagctccataccttggacctccaccacccacaacttactgcccctgctcaatccacccagattctggcttcccacttcctccaccaccttatgagctcccagcatccacatcccatgtcccagatcccccatactcctatggcaacatggccataccagtctccaagccactgagcctctcaggcctgctcagtgagccgctccaagaccccttagccctcctggacattgggctgccagcagggccacctaagccccaagaagacccagaatccgactcaggattatccctcaactatagcgatgctgaatctcttgagctggaggggacagaggctggtcggcggcgcagcgaatatgtagagatgtacccagtggagtacccctactcactcatgcccaactccttggcccactccaactataccttgccagctgctgagacccccttggccttagagccctcctcaggccctgtgcgggctaagcccactgcacggggggaggcagggagtcgggatgaacgtcgggccttggccatgaagattccttttctacggacaagattgtcaacttgccggtagatgactttaatgagctattggcaaggtacccgctgacagagagccagctagcgctagtccgggacatccgacgacggggcaaaaacaaggtggcagcccagaactgccgcaagaggaagctggaaaccattgtgcagctggagcgggagctggagcggctgaccaatgaacgggagcggcttctcagggcccgcggggaggcagaccggaccctggaggtcatgcgccaacagctgacagagctgtaccgtgacattttccagcaccttcgggatgaatcaggcaacagctactctcctgaagagtacgcgctgcaacaggctgccgatgggaccatcttccttgtgccccgggggaccaagatggaggccacagactgagctggcccagaggggtggaactgctgatgggatttccttcattcccttctgataaaggtactccccaaccctgagtcccagaaggagctgagttctctagaccagaagaggatgacaatggcaacaagtgtttggaagttccaaggtgtgttcaaagaggcttgccttgagggagggctggaatctgtcttccctgactcggctcctcaggtctttagcctccaccttgtctaagctttggtctataaagtgcgctacagaaatggcaaaaa

SEQ ID NO: 257958 - DNA, 512 bp, Homo Sapiens
  misc_feature (67)..(67): n is a, c, g, or t
  misc_feature (84)..(84): n is a, c, g, or t
atggaagaaatgggaaaccaaaaatctgggtgaattgaaccagggccaataaattgtggggtggtgnaggtcccaaggtaaggnagctggggcttggggcctcaaaatgatggctcaacttggagccattcaagaccctgcaagctcggtgatggacatgatctccctgcccaagtcagttccatctctcctagctctgaagtggacagctgtatcaccctgttcctgctctgctggggaggacacggggacatcctactgggccagagtctggtccaggttcccggaaagcccagatggctctagaaaccttttttcccaggcaaaatgcccactcttttccctaatactttttactcccccaaactgttttcctggctaaaggcagagtcagatcttctgtttttctgttttgctgtgttttgttttccattttctagggcaacatcaggggtcaccctgctttcctcctctgtcctcagttttacgttctcagcctttctcgtgccgaa

SEQ ID NO: 257959 - DNA, 468 bp, Homo Sapiens
gagcctcatctctctcctcaccctgctgtgactccaccacaggtttctagagccatctgggctttccgggaacctggaccagactctggcccagtaggatgtccccgtgtcctccccagcagagcaggaacagggtgatacagctgtccacttcagagctaggagagatggaactgacttggcaggagatcatgtccatcaccgagctgcagggtctgaatgctccaagtgagccatcatttgagccccaagccccagctccataccttggacctccaccacccacaacttactgcccctgcttcaatccacccagattctgggtttcccacttccttcaacaaccttatggaggttcccaggcattccaaaatccaatgttcccagaatcccccaaaattcctatgggcaaaatgggccataacaagttttccaaagcaattgaagctttttagggctggttaaatt

SEQ ID NO: 257960 - DNA, 441 bp, Homo Sapiens
gccatttctgtagcgcactttatagaccaaagcttagacaaggtggaggctaaagacctgaggagccgagtcagggaagacagattccagccctccctcaaggcaagcctctttgaacacaccttggaacttccaaacacttgttgccattgtcatcctcttctggtctagagaactcagctccttctgggactcagggttggggagtacctttatcagaagggaatgaaggaaatcccatcagcagttccacccctctggggccagctcagtctgtgggcctccatcttgggtcccccggggccacaagggaaggatgggtcccatcgggcagcctgtttgcaggcgcgttacttctttcagggagagtaggctgtttgcctggatttcattcccgaaggtggcttgggaaaatggtcacgggtaacagttttgttcagt

SEQ ID NO: 257961 - DNA, 2124 bp, Homo Sapiens
  misc_feature (2122)..(2122): n is a, c, g, or t
gagctcctctgctactcagagttgcaacctcagcctcgctatggctcccagcagcccccggcccgcgctgcccgcactcctggtcctgctcggggctctgttcccaggacctggcaatgcccagacatctgtgtccccctcaaaagtcatcctgccccggggaggctccgtgctggtgacatgcagcacctcctgtgaccagcccaagttgttgggcatagagaccccgttgcctaaaaaggagttgctcctgcctgggaacaaccggaaggtgtatgaactgagcaatgtgcaagaagatagccaaccaatgtgctattcaaactgccctgatgggcagtcaacagctaaaaccttcctcaccgtgtactggactccagaacgggtggaactggcacccctcccctcttggcagccagtgggcaagaaccttaccctacgctgccaggtggagggtggggcaccccgggccaacctcaccgtggtgctgctccgtggggagaaggagctgaaacgggagccagctgtgggggagcccgctgaggtcacgaccacggtgctggtgaggagagatcaccatggagccaatttctcgtgccgcactgaactggacctgcggccccaagggctggagctgtttgagaacacctcggccccctaccagctccagacctttgtcctgccagcgactcccccacaacttgtcagcccccgggtcctagaggtggacacgcaggggaccgtggtctgttccctggacgggctgttcccagtctcggaggcccaggtccacctggcactggggggaccagaggttgaaccccacagtcacctatggcaacgactccttctcggccaaggcctcagtcagtgtgaccgcagaggacgagggcacccagcggctgacgtgtgcagtaatactggggaaccagagccaggagacactgcagacagtgaccatctacagctttccggcgcccaacgtgattctgacgaagccagaggtctcagaagggaccgaggtgacagtgaagtgtgaggcccaccctagagccaaggtgacgctgaatggggttccagcccagccactgggcccgaggcaccagctcctgctgaaggccaccccagaggacaacgggcgcagcttctcctgctctgcaaccctggaggtggccggccagcttatacacaagaaccagacccgggagcttcgtgtcctgtatggcccccgactggacgagagggattgtccgggaaactggacgtggccagaaaattcccagcagactccaatgtgccaggcttgggggaacccattgcccgagctcaagtgtctaaaggatggcactttcccactgcccatcggggaatcagtgactgtcactcgagatcttgagggcacctacctctgtcgggccaggagcactcaaggggaggtcacccgcaaggtgaccgtgaatgtgctctccccccggtatgagattgtcatcatcactgtggtagcagccgcagtcataatgggcactgcaggcctcagcacgtacctctataaccgccagcggaagatcaagaaatacagactacaacaggcccaaaaagggacccccatgaaaccgaacacacaagccacgcctccctgaacctatcccgggacagggcctcttcctcggccttcccatattggtggcagtggtgccacactgaacagagtggaagacatatgccatgcagctacacctaccggccctgggacgccggaggacagggcattgtcctcagtcagatacaacagcatttggggccatggtacctgcacacctaaaacactaggccacgcatctgatctgtagtcacatgactaagccaagaggaaggagcaagactcaagacatgattgatggatgttaaagtctagcctgatgagaggggaagtggtgggggagacatagccccaccatgaggacatacaactgggaaatactgaaacttgctgcctattgggtatgctgaggccccacagacttacaaaagaagtggccctccatagacatgtgtagcatcaaaacacaaaggcccacacttcctgacggatgccagcttgggcactgctgtctactgaccnca

SEQ ID NO: 257962 - DNA, 1034 bp, Homo Sapiens
agagggtgggcaagatggcggcgcccatggagctgttctgctggtcagggggctgggggctgccgtcagtggacctggacagcctggccgtgctgacctatgccagatttactggtgctccactgaaggtacacaagatcagcaacccctggcagagcccttcaggaactctgcctgcccttcggaccagtcatggagaggtcatctcagttccacacaagatcatcacccaccttcgaaaagagaagtacaatgctgattatgatctgtcagctcggcaaggggcagacaccctggccttcatgtctctcctggaggagaagttgctcccggtgctggtacatactttttggatagacaccaagaactacgtggaagtgacccggaagtggtatgcagaggctatgccctttcccctcaacttcttcctgcctggccgcatgcagcggcagtacatggaacggctacagctgctgactggggagcacaggcctgaggacgaggaagagctggagaaggagctgtaccgagaggctcgggagtgtctgaccctgctctctcagcgcctgggctctcaaaagttcttctttggagatgcccctgcctccttggacaccttcgtcttcagctacttggccctgctgctgcacgcaaagctggcccgtgggaagctgcgggcccccctggggggggtgaaccaactctgtgcctattgggaccacattctcacgctcaacttcccctggggaggaacttgaggccccccgggagccccaacaccagcagggccatagactggggaggagccttaccgggggcgggagcagatcctatcttgggcgggccggactggcaaccctggtggggctacgccctgcccacccggcgtgggtctcctccacgggggaaggcctggtggggccccaggcgagccgggatctgggggcagggtgtggagggattaaaaagaagtgatttggcgtcgccggtcgccagagggtggtgcgcgacacccccagcctggtaggcggagc

SEQ ID NO: 257963 - DNA, 1036 bp, Homo Sapiens
ggcctgggtggcgaattcggcacgaggaagatggcggcgcccatggagctgttctgctggtcagggggctgggggctgccgtcagtggacctggacagcctggccgtgctgacctatgccagatttactggtgctccactgaaggtacacaagatcagcaacccctggcagagcccttcaggaactctgcctgcccttcggaccagtcatggagaggtcatctcagttccacacaagatcatcacccaccttcgaaaagaggtacatactttttggatagacaccaagaactacgtggaagtgacccggaagtggtatgcagaggctatgccctttcccctcaacttcttcctgcctggccgcatgcagcggcagtacatggaacggctacagctgctgactggggagcacaggcctgaggacgaggaagagctggagaaggagctgtaccgagaggctcgggagtgtctgaccctgctctctcagcgcctgggctctcaaaagttcttctttggagatgcccctgcctccttggacgccttcgtcttcagctacttggccctgctgctgcaggcaaagctgcccagtgggaagctgcaggtccacctgcgtgggctgcacaacctctgtgcctattgtacccacattctcagtctctacttcccctgggatggagctgaggtaccaccgcaacgccagacaccagcaggcccagagactgaggaggagccataccggcgccggaaccagatcctatctgtgctggcaggactggcagccatggtgggctacgccttgctcagcggcattgtctccatccagcgggcaacgcctgctcgggccccaggcacccggaccctgggcatggctgaggaggatgaagaggaatgatttgtcctcacgctcccaagactggtttttctactctcatgcattccagaggcccccgtgcctcctcgttgttggtacagccggacacggggtgctgccacccagaataaagccactcacactgactgggctcaaacatttaaaa

SEQ ID NO: 257964 - DNA, 1551 bp, Homo Sapiens
  misc_feature (349)..(349): n is a, c, g, or t
  misc_feature (413)..(413): n is a, c, g, or t
  misc_feature (938)..(940): n is a, c, g, or t
  misc_feature (942)..(944): n is a, c, g, or t
  misc_feature (946)..(946): n is a, c, g, or t
  misc_feature (948)..(955): n is a, c, g, or t
  misc_feature (958)..(963): n is a, c, g, or t
  misc_feature (965)..(1032): n is a, c, g, or t
  misc_feature (1035)..(1035): n is a, c, g, or t
  misc_feature (1091)..(1101): n is a, c, g, or t
tgggccatccctgagtgggtggagacctgctgtcatgagctggccaggagaacctgctataaaaaaatcaaggttttgtttctttgaacttactctgttttgatgccaaattggagaccattttcttgtctccttcccccactcatcctggccttccctggagttcttcctagcccagagctctgacagtccagcagggtgggaaggagggagtttgggcaaactctcatccctgataccacattgagatcctgggagccctcttttcgtactgagtatggagttgtagagccatcctaggtgccatccccttttggtccaaacattgggcagcgctagatggcaggangcagccttgaagacccgtctttcccccacagcagcaggggccccagcagtaacaaagggtaccnccaggggtttgggtagcgctgccctctggcagtcatgcaccgctgtctgccatagccgctctagggtcttggcagaattctgagcttgaagtgcagctcccttactaccctttcccttcctttttcttccctaataggaggtacaatctgcttttgtttgtcgttaagtggtcactcccatttcctttatcttggccgacaacacagagaggagggggagctgggcagtagcttggggtgggggtgggcacctgtggttgtttttaatgggaaatacctctcagagatgttcatgcaggctccctagggccccatcccagtgccaggctggtttccatggagatagggcactgaggctcccgtgaggttggaatcgacttcaccatgggggtccttcagccagcatccagctccccacccccaggctggcagtagcactgctgagatgctgtatttccacccaattctgggtatatcagtgtgtcttgcagaatcttggatcattaaagataaacatatttttannngnnngngnnnnnnnncgnnnnnngnnnnnnnnnnnnnnnnnnnnnnnnnnnnnnnnnnnnnnnnnnnnnnnnnnnnnnnnnnnnnnnnnnnnggngcgccgaccccctccgtcgccccccccgcagccccgaagaaaaaatttccgaacgnnnnnnnnnnngcgcaaaagagcttattaagccccttgttctcccgggcccggggcctaccggttgaaaaaaacactggggggggagatcggccccgagagaaacccaccccaaaaggaccgtcgtgggggtcttcccccccgagaaaaaacacccgcagtgagggacgtgggcggtgtttataacaaaacccaccctcgccttggcgcggggcgtctatggggaacttttgaaagcggccggcgccgcccccccctggctccgccctgtggagtacttatgggccgcggcacgggcctccatgccaccccctcgtgatgccgtggggtcgaccacccctccctcgacaaaggtgtccgcccttccgaagtgcgggggctaagcctctctccggcacagcggcgccgccgcatcgaacagagccggggtgataatacgaccacgccgtggcgctcgatgat

SEQ ID NO: 257965 - DNA, 1729 bp, Homo Sapiens
  misc_feature (27)..(27): n is a, c, g, or t
  misc_feature (58)..(58): n is a, c, g, or t
  misc_feature (248)..(248): n is a, c, g, or t
  misc_feature (1579)..(1579): n is a, c, g, or t
ttcccgggctcccccttcctctcttcntccccttttcagcccctccgttctttgaganccctcccgacccccgcgggcccccattggccggcccgctacccagccctctccgccacttccctcgcttctgaccatagtttgcggggaagggagcgagcgcgtcgaaaaccaaggaacgtgcgcgctgacgtcacggttgaggctcggagctgaggggccgcggagggcgtggcctgcgggcggttatnaagaggcagtggtgcgcgcgcggccggctcagtgctgccgggcaccggggcggcgggttggtctacgctgtgcgcggcggacgtcggaggcagcggggagcggagcggggccgccggggcctctccagggccgcagcggcagcagttgggccccccgccccggccggcggaccgaagaacgcaggaagggggccggggggacccgcccccggccggccgcagccatgaactccaacgtggagaacctacccccgcacatcatccgcctggtgtacaaggaggtgacgacactgaccgcagacccacccgatggcatcaaggtctttcccaacgaggaggacctcaccgacctccaggtcaccatcgagggccctgaggggaccccatatgctggaggtctgttccgcatgaaactcctgctggggaaggacttccctgcctccccacccaagggctacttcctgaccaagatcttccacccgaacgtgggcgccaatggcgagatctgcgtcaacgtgctcaagagggactggacggctgagctgggcatccgacacgtactgctgaccatcaagtgcctgctgatccaccctaaccccgagtctgcactcaacgaggaggcgggccgcctgctcttggagaactacgaggagtatgcagctcgggcccgtctgctcacagagatccacgggggcgccggcgggcccagcggcagggccgaagccggtcgggccctggccagtggcactgaagcttcctccaccgaccctggggccccagggggcccgggaggggctgagggtcccatggccaagaagcatgctggcgagcgcgataagaagctggcggccaagaaaaagacggacaagaagcgggcgctgcggcggctgtagtgggctctcttcctccttccaccgtgaccccaacctctcctgtcccctccctccaactctgtctctaagttatttaaattatggctggggtcggggagggtacagggggcactgggacctggatttgtttttctaaataaagttggaaaagctaccacaccgtcacacccacccacttttcaaacttggttgggccgcctccggccccttcaaggaagacttttctagaaccaatttccttttgggccgcgccggggctccccagtaagggtaaaggtgaaaccatggggcccataagcctggtttttccctaaaggaagaatccctggggcccatggaactaaatggccttggggaatttcctccaccaaattataaaaaacacgccccggggcggggccaaacccggaagccgttttctctgaaaaccacaatccncaggaatgggggaggtgtttccggagggccccctctataactggcgggagatctaatttccacacaggggaaagacccccaggaggcgggagatcttccgaaatatcccccaagattttatcggggcgcccccggggcccctttggtccc

SEQ ID NO: 257966 - DNA, 1324 bp, Homo Sapiens
  misc_feature (946)..(946): n is a, c, g, or t
attcccgggattggtggaaccctgcacagagacggacacaggatgagctctaagtacccgcggtctgtccggcgctgcctgcccctctgcgccctaacactggaagcagctctcattctcctcttctatttttttacccactatgacgcttccttagaggatcaaaaggggctcgtggcatcctatcaagttggccaagatctgaccgtgatggcggccattggcttgggcttcctcacctcgagtttccggagacacagctggagcagtgtggccttcaacctcttcatgctggcgcttggtgtgcagtgggcaatcctgctggacggcttcctgagccagttcccttctgggaaggtggtcatcacactgttcagtattcggctggccaccatgagtgctatgtcggtgctgatctcagcgggtgctgtcttggggaaggtcaacttggcgcagttggtggtgatggtgctggtggaggtgacagctttaggcaccctgaggatggtcatcagtaatatcttcaacacagactaccacatgaacctgaggcacttctacgtgttcgcagcctattttgggctgactgtggcctgggtgcctgccaaagcctctacccaagggaacggaggataatgatcagagagcaacgatacccagtttgtctgccatgctgggcgccctcttcttgtggatgttctggccaagtgtcaactctgctctgctgagaagtccaatccaaaggaagaatgccatgttcaacacctactatgctctagcagtcagtgtggtgacagccatctcagggtcatccttggctcacccccaaaggaagatcagcatgacttatgtgcacagtgcggtgttggcaggaggcgtggctgtgggtacctcgtgtcacctgatcccttctccgtggcttgccatggtgctgggtcttgtggcntaggctgatctccatcgggggagccaagtgcctgccggattggcttccaggtcctcctcagcatttggggaactcagcttggccatcgtgatagctctcacgtctggtctcctgacaggtttgctcctaaatctcaaaatatggaaagcacctcatgtggctaaatattttgatgaccaagttttctggaagtttcctcatttggctgttggattttaagcaaaagcatccaagaaaaacaaggcctgttcaaaaacaagacaacttcctctcactgttgcctgcatttgtacgtgagaaacgctcatgacagcaaagtctccttatgtataatgaaacaaggtcagagacagatttgatattaaaaaattaaagact

SEQ ID NO: 257967 - DNA, 917 bp, Homo Sapiens
  misc_feature (3)..(3): n is a, c, g, or t
  misc_feature (10)..(10): n is a, c, g, or t
  misc_feature (14)..(14): n is a, c, g, or t
  misc_feature (27)..(27): n is a, c, g, or t
  misc_feature (34)..(34): n is a, c, g, or t
  misc_feature (37)..(37): n is a, c, g, or t
  misc_feature (99)..(99): n is a, c, g, or t
  misc_feature (102)..(102): n is a, c, g, or t
  misc_feature (203)..(203): n is a, c, g, or t
  misc_feature (287)..(287): n is a, c, g, or t
  misc_feature (315)..(315): n is a, c, g, or t
  misc_feature (322)..(322): n is a, c, g, or t
  misc_feature (331)..(331): n is a, c, g, or t
  misc_feature (340)..(340): n is a, c, g, or t
  misc_feature (346)..(346): n is a, c, g, or t
  misc_feature (348)..(348): n is a, c, g, or t
  misc_feature (351)..(351): n is a, c, g, or t
  misc_feature (354)..(354): n is a, c, g, or t
  misc_feature (367)..(367): n is a, c, g, or t
  misc_feature (398)..(398): n is a, c, g, or t
  misc_feature (440)..(440): n is a, c, g, or t
  misc_feature (450)..(450): n is a, c, g, or t
  misc_feature (456)..(456): n is a, c, g, or t
  misc_feature (458)..(458): n is a, c, g, or t
  misc_feature (461)..(461): n is a, c, g, or t
  misc_feature (476)..(477): n is a, c, g, or t
  misc_feature (487)..(487): n is a, c, g, or t
  misc_feature (493)..(493): n is a, c, g, or t
acngactacnacangaacctgaggcantctcacngtntgcgcaccctattttgggctgactgtggcctggtgctgccaaacctctacccaagggaacgnagnataatgatcagagagcaacgatacccagtttgtctgccatgctgggcgccctcttcttgtggatgttctggccaagtgtcaactctcctctgctgagaagnccaatccaaaggaagaatgccatgttcaacacctactatgctctagcagtcagtgtggtgacagccatctcagggtcatccttngcttcacccccaaaggaaaatcagcatnacttatntgcacagtncggtgttgncagaancntgnctntgggtacctcgtntcacctgatcccttctccgtggcttgccatngtgctgggtcttgtggctgggctaatctccatcgggggatcnaattttcttnccggtntnttntaaccgagtgttggnnatttacttanatttcnttttatttattctatcttcagcttgctgggtctgcttggagagatcacctacattgtgctgctggtgcttcatactgtctggaacggcaatggcatgattgggctccccaggtcctcctcagcattggggaacctcagcttggccatccgtgatagctctcacgtctggtctcctgacaggtttgctcctaaatctcaaaatatggaaagcacctcatgtggctaaatattttgatgaccaagttttctggaagtttcctcatttggctgttggattttaagcaaaagcatccaagaaaaacaaggcctgttcaaaaacaagacaacttcctctcactgttgcctgcatttgtacgtgagaaacgctcatgacagaaaagtctccttatgtataatgaaacaaggtcagagacagatttgatat

SEQ ID NO: 257968 - DNA, 973 bp, Homo Sapiens
  misc_feature (882)..(882): n is a, c, g, or t
  misc_feature (888)..(888): n is a, c, g, or t
  misc_feature (891)..(891): n is a, c, g, or t
  misc_feature (905)..(905): n is a, c, g, or t
  misc_feature (910)..(910): n is a, c, g, or t
  misc_feature (918)..(918): n is a, c, g, or t
  misc_feature (921)..(921): n is a, c, g, or t
  misc_feature (924)..(924): n is a, c, g, or t
  misc_feature (951)..(951): n is a, c, g, or t
  misc_feature (962)..(962): n is a, c, g, or t
tcggctacccaccctcaccgcctggggtcccatggtgagacagctgggtgggcatcaggcttctgcagagggccaggccggagggagctgggcgagggagtggggctggctcctggcttgcaccggcctcttggaatccaggcctcagacctgatcgctggcgaaactggctctgtgcgctggagcccctggtcttctgcgtctgtcctcctcccggccagactttactcctggctcagcgacaggtgcatggctgcctcctaatcccatagtccagaggaggcatccctaggactgcgggcaagggagccgggcaagcccagggcagccttgaaccgtcccctggcctgccctccccggtgggggccaggatgctgaagaagcagtctgcagggcttgtgctgtggggcgctatcctctttgtggcctggaatgccctgctgctcctcttcttctggacgcgcccagcacctggcaggccaccctcagtcagcgctctcgatggcgaccccgccagcctcacccgggaagtgattcgcctggcccaagacgccgaggtggagctggagcggcagcgtgggctgctgcagcagatcggggatgccctgtcgagccagcgggggagggtgcccaccgcggcccctcccgcccagccgcgtgtgcctgtgacccccgcgccggcggtgattcccatcctggtcatcgcctgtgaccgcagcactgttcggcgctgcctggacaagctgctgcattatcggccctcggctgagctcttccccatcatcgttagccaggactgcgggcacgaggagacggcccaggccatcgcctcctacggcagcgcggtcacgaacatccggcagcccgacctgagcagcattncggtgncgncggaccaccgcaanttcanggctatanaanatngcgcgcaataccgctggggctgggcangtcttccgcanttcgctccccg

SEQ ID NO: 257969 - DNA, 1801 bp, Homo Sapiens
gagcgaggcctgggtggcgaattcggcacgagggtactttcaggccacctatccgctgctgaaggccgacccctccctgtggtgcgtctcggcctggaatgacaacggcaaggagcagatggtggacgccagcaggcctgagctgctctaccgcaccgactttttccctggcctgggctggctgctgttggccgagctctgggctgagctggagcccaagtggccaaaggccttctgggacgactggatgcggcggccggagcagcggcaggggcgggcctgcatacgccctgagatctcaagaacgatgacctttggccgcaagggtgtgagccacgggcagttctttgaccagcacctcaagtttatcaagctgaaccagcagtttgtgcacttcacccagctggacctgtcttacctgcagcgggaggcctatgaccgagatttcctcgcccgcgtctacggtgctccccagctgcaggtggagaaagtgaggaccaatgaccggaaggagttgggggaggttcgggtgcagtatacgggcagggacagcttcaaggctttcgccaaggctctgggtgtcatggatgaccttaagtcgggggttccgagagctggctaccggggtattgtcaccttccagttccggggccgccgtgtccacctggcgcccccaccgacgtgggagggctatgatcctagctggaattagcacctgcctgtccttcctgggcccctccttgccacatcatgagctgaggtgggaccacagtccccaggctgcatcggcctgcctgtgtttccctcttaggtgcatttatctttttgatttttccgagtggcatttaagtgcacaaatgataacaagaggattattctcccgttctcaagggagtcagatcaggggaactattctagggtatgttgcggggtattaagcaggaaaccactgtgtggtggggggcactgggcttgttggggccagaaatgtccacgtcctgagctttctcctggagcatgtgcagagagtttggcaacgttcgctctcttgaccagaccccttctccctgacctggctcttccagccagggcacgagccctccttctatacctgctccccttcccccagtggggactgagttatgggagaaggggacatatttgtggccaaaatgatactaaccaaaggggcttccttgtcagggcctggtggagttggtgggtcatcggggctcactgcctcctgcccttctctcctgtctgacccccacttagcccttctctccttgcagcctagcagtttatagttctgagatggaaagttgaagggggcaagcaagacctctcctcagcccatgcccagctgtcaggagagaggtgcagggaggaaggccttgtgctgggacaacctctctcttgccttacctcagagagggactatgccctgacccctcctttctgaaaatcagtgccctccctgttgctctaggaggctcctgctggcttggtagaagacagaattcgatctgcctgtccctttttcccctggggtttgacacacaggctcctctcagcatgaggtggagcagtgaccaggtggagcagtgaccaggacgcctctggcccagtgctgcccagcctccccgcccgctcccaggcgccccatgtcctcacaggccaggacgccatggcaggatggagaggacttggtggatttttgtttcttgcctgacctcagtttcatgaaagaaagtggaagctacagaattattttctaaaataaaggctgaattaaatgaaa

SEQ ID NO: 257970 - DNA, 1029 bp, Homo Sapiens
  misc_feature (872)..(872): n is a, c, g, or t
  misc_feature (889)..(889): n is a, c, g, or t
  misc_feature (923)..(923): n is a, c, g, or t
  misc_feature (928)..(928): n is a, c, g, or t
  misc_feature (935)..(935): n is a, c, g, or t
  misc_feature (961)..(961): n is a, c, g, or t
  misc_feature (973)..(973): n is a, c, g, or t
  misc_feature (977)..(977): n is a, c, g, or t
  misc_feature (980)..(980): n is a, c, g, or t
  misc_feature (988)..(988): n is a, c, g, or t
  misc_feature (1004)..(1004): n is a, c, g, or t
  misc_feature (1009)..(1010): n is a, c, g, or t
  misc_feature (1021)..(1021): n is a, c, g, or t
agtataaggaatcccggcgtggacagcgcgaggagaaagatggcggcgatggcggtcgggggtgctggtgggagccgcgtgtccagcgggagggacctgaattgcgtccccgaaatagctgacacactaggggctgtggccaagcaggggtttgatttcctctgcatgcctgtcttccatccgcgtttcaagagggagttcattcaggaacctgctaagaatcggcccggtccccagacacgatcagacctactgctgtcaggaagggactggaatacgctaattgtgggaaagctttctccatggattcgtccagactcaaaagtggagaagattcgcaggaactccgaggcggccatgttacaggagctgaattttggtgcatatttgggtcttccagctttcctgctgccccttaatcaggaagataacaccaacctggccagagttttgaccaaccacatccacactggccatcactcttccatgttctggatgcgggtacccttggtggcaccagaggacctgagagatgatataattgagaatgcaccaactacacacacagaggagtacagtggggaggagaaaacgtggatgtggtggcacaacttccggactttgtgtgactatagtaagaggattgcagtggctcttgaaattggggctgacctcccatctaatcatgtcattgatcgctggcttgggggagcccatcaaagcagccattctccccactagcattttcctgaaccaataagaagggatttcctggtctttctaagatgcaccagaggctcatcttccggctcctcaagttggaggtgcagttcatcatcacaggcaccaaccaccactcagagaaggagttntgttctacctccaatanctgggaatacttaagccagaaccgtcctccactnatgcntatgaantctttgccaagggctatgaagatatntgcagtcccgcntcancantgatgganatctggatctcagaanatganngtttgaaaagncccatcaa

SEQ ID NO: 257971 - DNA, 2773 bp, Homo Sapiens
  misc_feature (2270)..(2287): n is a, c, g, or t
  misc_feature (2665)..(2665): n is a, c, g, or t
taggtagcgaggcctgggtggcgaattcggcacgaggcctgaattgcgtccccgaaatagctgacacactaggggctgtggccaagcaggggtttgatttcctctgcatgcctgtcttccatccgcgtttcaagagggagttcattcaggaacctgctaagaatcggcccggtccccagacacgatcagacctactgctgtcaggaagggactggaatacgctaattgtgggaaagctttctccatggattcgtccagactcaaaagtggagaagattcgcaggaactccgaggcggccatgttacaggagctgaattttggtgcatatttgggtcttccagctttcctgctgccccttaatcaggaagataacaccaacctggccagagttttgaccaaccacatccacactggccatcactcttccatgttctggatgcgggtacccttggtggcaccagaggacctgagagatgatataattgagaatgcaccaactacacacacagaggagtacagtggggaggagaaaacgtggatgtggtggcacaacttccggactttgtgtgactatagtaagaggattgcagtggctcttgaaattggggctgacctcccatctaatcatgtcattgatcgctggcttggggagcccatcaaagcagccattctccccactagcattttcctgaccaataagaagggatttcctgttctttctaagatgcaccagaggctcatcttccggctcctcaagttggaggtgcagttcatcatcacaggcaccaaccaccactcagagaaggagttctgctcctacctccaatacctggaatacttaagccagaaccgtcctccacctaatgcctatgaactctttgccaagggctatgaagactatctgcagtccccgcttcagccactgatggacaatctggaatctcagacatatgaagtgtttgaaaaggaccccatcaaatactctcagtaccagcaggccatctataaatgtctgctagaccgagtaccagaagaggagaaggataccaatgtccaggtactgatggtgctgggagcaggacggggacccctggtgaacgcttccctgcgggcagccaagcaggccgaccggcggataaagctgtatgctgtggagaaaaacccaaatgccgtggtgacgctagagaactggcagtttgaagaatggggaagccaagtgaccgtagtctcatcagacatgagggaatgggtggctccagagaaagcagacatcattgtcagtgagcttctgggctcatttgctgacaatgaattgtcgcctgagtgcctggatggagcccagcacttcctaaaagatgatggtgtgagcatccccggggagtacacttcctttctggctcccatctcttcctccaagctgtacaatgaggtccgagcctgtagggagaaggaccgtgaccctgaggcccagtttgagatgccttatgtggtacggctgcacaacttccaccagctctctgcaccccagccctgtttcaccttcagccatcccaacagagatcctatgattgacaacaaccgctattgcaccttggaatttcctgtggaggtgaacacagtactacatggctttgccggctactttgagactgtgctttatcaggacatcactctgagtatccgtccagagactcactctcctgggatgttctcatggtttcccatcctcttccctattaagcagcccataacggtacgtgaaggccaaaccatctgtgtgcgtttctggcgatgcagcaattccaagaaggtgtggtatgagtgggctgtgacagcaccagtctgttctgctattcataaccccacaggccgctcatataccattggcctctagccctgcgtgccaagtgtccagagccttggaagcagcttcaggttctgctcctgtagtacagaaggtgcagtacatctatgggctgtgattccccttgcccatcagagaggagcatttcaatctgctttcctgccttacatcaaggtgggcaagggattataattaattgcagggctcaagccaccaatctatgaagacctcaggccagggggtgaggaattagtgctggatttgaagctacgcactcagcctcaagaactccctggaatatccctgagaacatggggtttgaacggattttcagcctttttctgttcttgttttgatggttttgtgtaagaggaaatacaaataaagttatagccctttactgcnnnnnnnnnnnnnnnnnnctccaggcatcctatgtccgggggcggcaaaaaaaagtaaatgaaatgggcccatgggccataaactgtcttccccgaacccacctttttcttgtaacaaaggggggaagaacctgcccgggtttcccctataggggaggtcggaatttaattttccaaacaccccacgctttaacccggcatctaacggaattgggcgtggcggtacccccgggaaattttaacccccgccctaaatggacgcgggcccttttttctttgtgggaaccacaaaggaaaccttcccccgaaaactcccttttttttctccgcgcgaagaataccccgccttgttttgccacaaacaaaagaaaacaccaccccgcccaccccacgggnggtggttttttgttctttgtccgggcatcccacaatactcccccccacctccctcttttctctccacaaagatgacacactgtcgtcctctctgcgacgaaatcgcct

SEQ ID NO: 257972 - DNA, 1286 bp, Homo Sapiens
  misc_feature (25)..(25): n is a, c, g, or t
ggcggcggggagctcagggtggggnagcagggcctacctggcaggcctggcagggcagtaccacttggagcggtacccggacagttacgagtccatgtccgagccgcccattgctcatcttttgcgccccgtgcttccccgggccttcgccttccccgtggacccccaggtccagtctgccgctgatgagactgctgtgcagctgagcgagttgctgacgctgcccgtgctcatgaagcgctccatcacggcaccgctggccgcccacatctccttggtgaacaaggccgctgtcgactacttcttcgtggagctgcacctggaggcgcactatgaggcactgcggcacttcctgctgatggaggacggcgagttcgcccagtccctcagcgacctgctctttgagaagcttggagctgggcaaacgcccggagagctgctcaacccgctggtgctgaactctgtgctgagcaaggccctgcagtgcagcctgcatggggacaccccgcacgcctccaacctctccctcgctctcaagtacctgcccgaggtgtttgcccccaacgccccggatgtgctgagctgcctggagctcaggtacaaggtggactggcctctcaacattgtcatcaccgagggctgcctgagcaagtacagcggcgtcttctccttcctgctgcagctgaagctcatgatgtgggcgctcaaggacgtctgcttccacctcaagcgcacagccctgctgagccacatggccggctctgtgcagttccgtcagctgcagctgttcaagcacgagatgcagcatttcgtgaaggtcatccagggctacatcgccaaccagatcctgcacgtcacctggtgcgagttcagggccaggttggcccccgtgggcgaccctggaggaaacccagcgtgcgcacccaaagtacctgcccaaggccgtcttcaggggcctgctcacggaaaaggcggcgcccgtcattaacgtcatccccagcattttcagccttgtggtcaagttccgcagccagctcatttcccaggcctgggggccccctgggggcccgcggggtgcaaagcaccccaactttgcactcatgcagcagtcctacaaccccttcaagtactactcccccttttttttcaaagtggtgaccaagctggttaaccccggctaccagccccccctggaggacttttttttgggcatcaacttcaacaactactaccaggacgccttaggctgcttttcgggggacgtgcccaataaaggtgttttcgga

SEQ ID NO: 257973 - DNA, 1464 bp, Homo Sapiens
  misc_feature (1192)..(1192): n is a, c, g, or t
  misc_feature (1288)..(1288): n is a, c, g, or t
  misc_feature (1313)..(1313): n is a, c, g, or t
  misc_feature (1318)..(1318): n is a, c, g, or t
ctgcactggggaaacgatcctactttatacctagacaacaccaattgcaatccagccctggttcttccttcccgacaagaagctgcccaccagattgtccagctcattcgaaaacacccacaacataacataaagattggactctacagcctgggaaaggaatcactgctggagcagctggccctggagtttcagacctgggtggtattgagtcctcggcgcctggagttggtacagctactgggcctggcagatgtgttcacagtggaggagaaggctggccgcatccatgcagtagaccatatggagatctgccattccaacatgctgcgttggaaccagacccaccctacgattgctatccttcccacaagccgaaaaatccacagctcccaccctgatatccacgtcatcccttactctgaccattcctcttactccgagcttcgtgcctttgtcgcagcactgaagccttgccaggtggtgcccattgtaagtcggcggccctgtggaggctttcaggacagtctgagccccaggatctccgtgcccctgattccggactctgtacagcaatacatgagttcttcctctagaaaaccaagccttctctggctgttagaaaggaggctaaagaggccgagaacccaaggtgttgtgtttgaatcccctgaggaaagtgctgatcaatctcaagctgacagagactcaaagaaggccaagaaagagaaactttctccctggcctgcggaccttgaaaagcagccttccaccatcctttgcggatcaagaagcagttgttcccagatctctatagcaaagaatggaacaaggcagtgccctttctgtgagtctcaaaagagggtgactatgttgacggccccactgggaattttcagtgcacttaaggtctacagatgaggagtttatttctcaaaaaaccagggaggaaattggtttagggtcccccttggtacccatgggagatgatgatggaggtccagaagccacagggaatcagagtgcctggatgggccatggttctcccctgtcccacagcagcaagggcacccctcttctagctactgaattcaggggtctagcactcaaatatcttctgactccagtgaactttttccaggcagggtattcttccaggagatttgaccagcaagtggaaaaaataccatanaccctgctgaagacaggagagtacagaatgacaacattgagcccacactgcagttttgaagatagtaactgatggctgggtgggaaaagagtttgntttttgggggcctacttttctatcntttancagactcttatggggccaccggtggagcagcacttcccaaacttggttcactgggggtcctcgtgcctatgggatccctcttttttataaactaagtttaagaaaatacttttttataaaaatctttgggaagatgcctgaggcat

SEQ ID NO: 257974 - DNA, 1464 bp, Homo Sapiens
  misc_feature (37)..(37): n is a, c, g, or t
  misc_feature (53)..(55): n is a, c, g, or t
  misc_feature (132)..(132): n is a, c, g, or t
  misc_feature (1441)..(1441): n is a, c, g, or t
cccagcttcccagcctgaagtgtggtgaattcgcaancaagtctcatctcagnnnacctcctgaagaaacagctctccaggctggggcaagaagcctgtccctacagtgatacaaccaccccctcaataacnccgggcaccacctggcacccactggggccacccagggagcccaccaagcccactccgggcttggacagagggcaggcctgaaggaaggcacatccaaccccactgaccggcatgcacctggggccaggggcctgctgccactgcagaggtgagaagcaggagcagcaagacctggtgcccattagtcatgggggaaaagcaaaagggggagacagggacaaatccaggcctgggtgggctgcctgtcagggggagtgatatccaaggaggaactggtggtcagagtggggtgggggatacccggtacaatttgttcatgcctcaacaccagccaccgcgggcctgccagccctgtgtgccctccctggcccggaggtccacagggtgcaaaaggcctgaccgcacaggaccctcccgtaagaaccctacgctgcagagctcgttctcttggctcccagccctttttatacgctgtcctgctgcttgaacatgccagtccccacccctgcacctaccaagctcctgcggcactcagctgtcacccatctgggacgcacacctgtccgaggctctagatcaaggtgggaggttagtcctcactcccttcaggggctggacagcgagctgaaggcccgagcccagctgcacccagaaaacctgccacttggaactcacctgaccatccaagcccagcccccagtgcatgcgacagatgaggcagagattgtgccgtacagagatcaatatatataaagtgccggtacaacgctctgaaaaatagttttgtcccaaaatccagcgcctagggtgctccgggcctagcctttgccagtgaggtccaacggctgcaggaatgggggcagcgacagctcgtccagggcctcgggcaagcggcctggagagatggcggtgaccagcacctgcatggcgcgcgcgaagagcgagggcggcgccaggcccgccagccactggaacttgtcctcacacagcagccgctgccagcgcggccggtcgcccagcagctcctggcgggccgagccggcggcacccacgggggtgtacagcgccaggaggtccagcagcagcaggcggcgctggcgcggctccccgggagctgaggcgggggctccggcggcggagggagtggccccggcgtcgcggcccagctggcgcagcagcagctcgagaggcgtgaggccgccaccgtcccgcagaaccgggcgaggcaccgtggcccaccagcagaaagaggcactcggggcgcgccagctcacaggccacgtctagctgcgcgcccccacccgccatntggtcacagccacccggttcagc

SEQ ID NO: 257975 - DNA, 1036 bp, Homo Sapiens
  misc_feature (897)..(897): n is a, c, g, or t
  misc_feature (965)..(965): n is a, c, g, or t
  misc_feature (982)..(982): n is a, c, g, or t
  misc_feature (985)..(985): n is a, c, g, or t
  misc_feature (993)..(993): n is a, c, g, or t
  misc_feature (995)..(995): n is a, c, g, or t
  misc_feature (998)..(998): n is a, c, g, or t
  misc_feature (1007)..(1008): n is a, c, g, or t
  misc_feature (1020)..(1020): n is a, c, g, or t
  misc_feature (1031)..(1031): n is a, c, g, or t
cccgggatgtgccttcgcgggatccatgccttgaggcccaggaacgccccgccgccagcatgccgtgggacgcgcggcggcctgggggtggcgcggacggcgggcccgaggcctcgggcgcggcgcgctcgcgagcgcagaagcagtgccgcaagtcgtcgttcgccttctaccaggcggtgcgcgacctgctacccgtgtggctgctggaggatatgcgcgccagagggccttccactgggacgagcgcgggcgcgccgccgcctactcgccctctgaggcgctgctctacgcgctcgtgcacgaccaccaagcgtacgcgcattacctgctggccacgttcccgcggcgcgcgctcgcaccgcccagtgccggcttccgctgctgcgcggctcccgggccgcacgtggcgctggcagtgcgctacaaccgcgtgggcattctgcgccgcatcctgcgcaccttgcgcgacttcccggccgaggagcgggcgcgcgtgctggaccggcgtggctgcagccgcgtggagggcggtggcacgtcgctgcacgtggcctgtgagctggcgcgccccgagtgcctcttcctgctgctgggccacggcgcctcgcccggtctgcgggacggcggcggcctcacgcctctcgagctgctgctgcgccagctggggccgcgacgccggggccactccctccgccgccggagcccccgcctcagctcccggggagccgcgccagcgccgcctgctgctgctggacctcctggcgctgtacacccccgtgggtgccgccggctcggcccgccaggagctgctgggcgaccggccgcgctggcagcggctgctgggtgaggacaagttccagtggctggcgggcctggcgcggcctcgctcttcgncgcgcgccatgcaggtgctggtcacgccatctctccaggcgcctccccgaggcctggacgagctgcgntgccccattctgcagcngtngactcatngnaangtaggcggnnacctagggtggntttggaaaaanatttt

SEQ ID NO: 257976 - DNA, 1850 bp, Homo Sapiens
  misc_feature (443)..(470): n is a, c, g, or t
  misc_feature (1623)..(1784): n is a, c, g, or t
  misc_feature (1794)..(1807): n is a, c, g, or t
aactgcatcaaagacagaaacaccaatagtgtctaagtctctgagttcttctttggatgacaccgaagttaagaaggttatggaagaatgtaagaggctgcaaggtgaagttcagaggctacgggaggagaacaagcagttcaaggaagaagatggactgcggatgaggaagacagtgcagagcaacagccccatttcagcattagccccaactgggaaggaagaaggccttagcacccggctcttggctctggtggttttgttctttatcgttggtgtaattattgggaagattgccttgtagaggtagcatgcacaggatggtaaattggattggtggatccaccatatcatgggatttaaatttatcataaccatgtgtaaaaagaaattaatgtatgatgacatctcacaggtcttgcctttaaattacccctccctgnnnnnnnnnnnnnnnnnnnnnnnnnnnnaatataatgtaacgatcttttagaaagttaaaaatgtatagtaactgattgagggggaaaagaatgatctttattaatgacaagggaaaccatgagtaatgccacaatggcatattgtaaatgtcattttaaacattggtaggccttggtacatgatgctggattacctctcttaaaatgacacccttcctcgcctgttggtgctggcccttggggagctgggagcccagcatgctggggaagtgcggtcagctccacacagtagtccccacgtggcccactcccggccccaggctgctttccgtgtcttcagttctgtccaagccatcagctccttgggactgatgaacagagtcagaagcccaaaggaattgcactgtggcagcatcagacgtactcgtcataagtgagaggcgtgtgttgactgattgacccagcgctttggaaataaatggcagtgctttgttcacttaaagggaccaagctaaatttgtattggttcatgtagtgaagtcaaactgttattcagagatgtttaatgcatatttaacttatttaatgtatttcatctcatgttttcttattgtcacaagagtacagttaatgctgcgtgctgctgaactctgttgggtgaactggtattgctgctggagggctgtgggctcctctgtctctggagagtctggtcatgtggaggtggggtttattgggatgctggagaagagctgccaggaagtgttttttctgggtcagtaaataacaactgtcatagggagggaaattctcagtagtgacagtcaactctaggttaccttttttaatgaagagtagtcagtcttctagattgttcttataccacctctcaaccattactcacacttccagcgcccaggtccaagtctgagcctgacctccccttggggacctagcctggagtcaggacaaatggatcgggctgcagagggttagaagcgagggcaccagcagttgtgggtggggagcaagggaagagagaaactcttcagcgaatccttctagtactagttgagagtttgactgtgaattaattttatgccataaaagaccaacccagttctgtttcactatgtagcatcttgaaaagaaaaattataataaagccccaaaattaagnnnnnnnnnnnnnnnnnnnnnnnnnnnnnnnnnnnnnnnnnnnnnnnnnnnnnnnnnnnnnnnnnnnnnnnnnnnnnnnnnnnnnnnnnnnnnnnnnnnnnnnnnnnnnnnnnnnnnnnnnnnnnnnnnnnnnnnnnnnnnnnnnnnnnnnnnnnnnnnnnntttggggccnnnnnnnnnnnnnnaaaaattttttaaaaaccttttttggggggcggcccccacaag

SEQ ID NO: 257977 - DNA, 1081 bp, Homo Sapiens
  misc_feature (11)..(11): n is a, c, g, or t
  misc_feature (27)..(27): n is a, c, g, or t
  misc_feature (32)..(32): n is a, c, g, or t
  misc_feature (42)..(42): n is a, c, g, or t
  misc_feature (51)..(51): n is a, c, g, or t
  misc_feature (60)..(60): n is a, c, g, or t
  misc_feature (102)..(115): n is a, c, g, or t
gaagcgctgtntcattccaagccagtnctggnagagaagaanaaggcattnttagaaganactgggacaattcaggacctttttgtggaactataagtagcnnnnnnnnnnnnnngatgatgtatctcacaaccagaaatgcagaatttgatcgtcatgaaatccagatatatgaggaggtagccaaaatgcctcccttccagagaaaaacattagtattgataggagctcaaggtgtaggccgaagaagcttgaaaaacaggttcatagtattgaatcccactagatttggaactacggtgccatttacttcacggaaaccaagggaagatgaaaaagatggccaggcatataagtttgtgtcacgatctgagatggaagcagatattaaagctggaaagtatttggaacatggggaatatgaaggaaatctctatggaaccaaaattgattctattcttgaggttgtccaaactggacgcacttgcattctggatgtcaacccacaagcactgaaagtattgaggacatcagagtttatgccctatgtggtatttattgcggctccggagctagagacgttacgtgccatgcacaaggctgtggtggatgcaggaatcactaccaagcttctgaccgactctgacttgaagaaaacagtggatgaaagtgcacggattcagagagcatacaaccactattttgatttgatcatcataaatgataatctagacaaagcctttgaaaaactgcaaactgccatagagaaactgagaatggaaccacagtgggtcccaatcagctgggtttactgatgattcagtaaggttaacaatgaaaattaaactcttaaaaagtgactgcaacaaataaaccttctactgagaaaatacatcacagatagaagattatctgctaagtccaggcatttttatggtgtagattgaaataatagtacacttctgaatttttatataaaatgtggttggaaggtgtactaatatataatttatcttaatttttctaactttgtatggataatctttctattcatatcacataaagaaatgcgttaagcatt

SEQ ID NO: 257978 - DNA, 859 bp, Homo Sapiens
  misc_feature (10)..(10): n is a, c, g, or t
  misc_feature (12)..(12): n is a, c, g, or t
  misc_feature (18)..(18): n is a, c, g, or t
  misc_feature (42)..(43): n is a, c, g, or t
  misc_feature (85)..(85): n is a, c, g, or t
  misc_feature (682)..(682): n is a, c, g, or t
  misc_feature (711)..(711): n is a, c, g, or t
  misc_feature (720)..(720): n is a, c, g, or t
  misc_feature (727)..(727): n is a, c, g, or t
  misc_feature (732)..(732): n is a, c, g, or t
  misc_feature (735)..(735): n is a, c, g, or t
  misc_feature (738)..(738): n is a, c, g, or t
  misc_feature (740)..(740): n is a, c, g, or t
  misc_feature (744)..(744): n is a, c, g, or t
  misc_feature (754)..(754): n is a, c, g, or t
  misc_feature (761)..(761): n is a, c, g, or t
  misc_feature (768)..(768): n is a, c, g, or t
  misc_feature (777)..(777): n is a, c, g, or t
  misc_feature (788)..(788): n is a, c, g, or t
  misc_feature (790)..(790): n is a, c, g, or t
  misc_feature (799)..(799): n is a, c, g, or t
  misc_feature (802)..(802): n is a, c, g, or t
  misc_feature (807)..(807): n is a, c, g, or t
  misc_feature (812)..(812): n is a, c, g, or t
  misc_feature (815)..(815): n is a, c, g, or t
  misc_feature (820)..(821): n is a, c, g, or t
  misc_feature (829)..(829): n is a, c, g, or t
  misc_feature (838)..(838): n is a, c, g, or t
  misc_feature (840)..(840): n is a, c, g, or t
  misc_feature (843)..(843): n is a, c, g, or t
  misc_feature (853)..(853): n is a, c, g, or t
  misc_feature (855)..(855): n is a, c, g, or t
aatatattananttatangaaatcaaaagcatatcagtaacnncttttagaaaaagaaatgaatgataaagaaaaacagatatgncctctcaatatcttggggaagtaagttaggatgatgtttcattcacgtcttaatgatataaataaaggataactctgtgtaagaagtagtgtttgtatctggtggtaaatttagttaaaaacataatcacaagttacaaaaactgtaattacaaattacaaagaaaaacaggcagacaatcttgtattgacatcctcttgcatcttgttacctaccaatgttctgttccattataaaattcaatactaaaatttcatagctaacattcaatattaatttcaacattaaaatgtatcaaaatcattaaaaacagtcaattagaaaaagcaatacaccaaaaataatggtagtgtttccaggcttcaactgtgttgtattaaccatcacacaggagaataaaagggctgtgaattttagataggccacttggctctggattccaggactatggaaatgccagtgaaggtagtccaagaagcatttcttgttttataaatatcagcagaggaccaaaaaaagggatcccagatatgttttcaagtaacaaaaaacattaaagtgcaattttgtcttttacatctgaacaaaagttctgtnatttttaaaaaataaagtagggacacagntttatagtnatttttntcatntanaancncacnattatttaanacagatnaaacttnagttttggnagagagcattngnaggggaaanaangaaangtgangangggcnnactaattnttgttgggnantgntgagggggangngttt

SEQ ID NO: 257979 - DNA, 719 bp, Homo Sapiens
  misc_feature (23)..(23): n is a, c, g, or t
  misc_feature (180)..(180): n is a, c, g, or t
  misc_feature (183)..(183): n is a, c, g, or t
  misc_feature (471)..(471): n is a, c, g, or t
  misc_feature (520)..(520): n is a, c, g, or t
  misc_feature (524)..(524): n is a, c, g, or t
  misc_feature (527)..(527): n is a, c, g, or t
  misc_feature (530)..(530): n is a, c, g, or t
  misc_feature (536)..(537): n is a, c, g, or t
  misc_feature (569)..(569): n is a, c, g, or t
  misc_feature (576)..(576): n is a, c, g, or t
  misc_feature (613)..(613): n is a, c, g, or t
  misc_feature (657)..(657): n is a, c, g, or t
  misc_feature (698)..(698): n is a, c, g, or t
  misc_feature (708)..(708): n is a, c, g, or t
gagggggactggaagaccatctncaaggagaggcggctcctccaaaaccggcgtctggacttggatgcctgcaaagcgaggtgaagaaggccaaggctgcagaagccaaagccacgacggtgcctgactttcaggagactagacctcgtaattacattctctcggccagcgcctccgctnctngggaatgatgaagtggacaaggccgagcaggagctccgcgtggcccagacagagtttgaccgggcaagcagaagtgacccgtctcttgctgggagggaatcagtagcactcacgtgaaccacctgcgctgcctccacgagttcgtcaagtctcagacaacctactacgcacagtgctaccgccacatgctggacttgcagaagcagctgggcagatttcccggcaccttcgtgggcaccacagagcccgcctccccacccctgagcagcacctcacccaccactgctngcggccactatgcctgtgggggccctctgtggccagcctggccctccgnggangcntcnctctgnntggaagaggtggccccccctgccagtgggacncgcaaanctcgggtgctctatgactacgaggcagccgacatcangtgagctggccctgctggctgatgagctcatcactgtctacagnctgcctggcatggaccctgactggctcattggcgagagagncaacaagaanggcaaggtcct

SEQ ID NO: 257980 - DNA, 1341 bp, Homo Sapiens
  misc_feature (188)..(188): n is a, c, g, or t
  misc_feature (1140)..(1223): n is a, c, g, or t
ccgccccaggaggccaacggcgacagttcatcccacctggtgcttcctcccaccctgcctgtgcgccacgctggcctcgagccaaaggaattctcccagcaacccgggaaggcggctgggcccgtcggggaggcttctgggtttgaaaacaggctttgcccaagttcccacagctaaagctctgtcanaggcagcctgggtgcccgaagtgttgcccactgagaactgggcctgcccgtggggggcacggtaccgagtttgggcagtggcggcaccacccggggagtggcctctggaggcgggaggctggagcaagagactgaccctgtccgttgggcctgcaggatgtcagtgggcccctgagggagctgcgccctcggctctgccacctgcgaaaaggacctcagggctatgggttcaacctgcatagtgacaagtcccggcccggccagtacatccgctctgtggacccgggctcacctgccgcccgctctggcctccgcgcccaggaccggctcattgaggtgaacgggcagaatgtggagggactgcgccatgctgaggtggtggccagcatcaaggcacgggaggacgaggcccggctgctggtcgtggaccccgagacagatgaacacttcaagcggcttcgggtcacacccaccgaggagcacgtggaaggtcctctgccgtcacccgtcaccaatggaaccagccctgcccagctcaatggtggctctgcgtgctcgtcccgaagtgacctgcctggttccgacaaggacactgaggatggcagtgcctggaagcaagatcccttccaggagagcggcctccacctgagccccacggcggccgaggccaaggagaaggctcgagccatgcgagtcaacaagcgcgcgccacagatggactggaacaggaagcgtgaaatcttcagcaacttctgagccccttcctgcctgtctcgggaccctgggacccctcccgcacggaccttgggcctcagcctgccccgagctcccccagcctcagtggactggagggtggtcctgccattgcccagaaatcagccccagccccggtgagcccccatcctgcccctgcccaccaggtactgggggcctgtggcagcaagataggggnnnnnnnnnnnnnnnnnnnnnnnnnnnnnnnnnnnnnnnnnnnnnnnnnnnnnnnnnnnnnnnnnnnnnnnnnnnnnnnnnnnncgagcgagcgcgcggcagccgcggggcgagggcctttgctgctctgccggggcctgctgactgaaaggaatttgtgtttttgctttttttccaaaaagatctccagctccacacatgt

SEQ ID NO: 257981 - DNA, 991 bp, Homo Sapiens
gggtggcaattcggacgagggcaccccaggtggtgcaaggataaggctgtggaggggcagactcggctgctggtggtggaccaggagacagatgaggagctccgccggcggcagctgacctgtaccgaggagatggcccagcgagggctcccacccgcccacgacccctgggagccgaagccagactgggcacacaccggcagccacagctccgaagctggcaagaaggatgtcagtgggcccctgagggagctgcgccctcggctctgccacctgcgaaagggacctcagggctatgggttcaacctgcatagtgacaagtcccggcccggccagtacatccgctctgtggacccgggctcacctgccgcccgctctggcctccgcgcccaggaccggctcattgaggtgaacgggcagaatgtggagggactgcgccatgctgaggtggtggccagcatcaaggcacgggaggacgaggcccggctgctggtcgtggaccccgagacagatgaacacttcaagcggcttcgggtcacacccaccgaggagcacgtggaaggtcctctgccgtcacccgtcaccaatggaaccagccctgcccagctcaatggtggctctgcgtgctcgtcccgaagtgacctgcctggttccgacaaggacactgaggattggcagtgcctggaaacaagatcccttccaggagagcggcctccacctgagccccacggcggccgaagccaaggaaaaagctcgagccatgcgagtcaacaagcgcgcgccacagatggactggaacaggaaccgtgaaatcttcagcaacttctgagcccccttccggccggtctccgggaccctgggaccccttccccaccggacccttgggcctcagccctgccccgagctcccccaacctaatgggaactgggagggggggccctgccattgccccaaaaaacagccccagcccccggggaagccccatcctggc

SEQ ID NO: 257982 - DNA, 1117 bp, Homo Sapiens
  misc_feature (695)..(698): n is a, c, g, or t
ggtaaacagaagcaacagaagggacaagaggctggcctctacatcactctcgccttccaaatcttgtggaagtgcatctacgtgccagaaccaaactaacctcacttccaagttctggctgcttgcaggtggaactccagctgcaagggagttagggaaatgaaggtcttttttaaaagcttctcagccttcctagggaacagacattgggtgagccaatctgcaatctctactacaggcattgagaccagttagattattgagatattatagagagttatgaacactcaaattatgatagtggtatgacattggatagaacatgggatactttagaagtagaattgacagggcatattagttgatgaaatggagtcatttgagtctcttaatagccatgtatcataattaccaagtgaagctggtggaacatatggtctccattttacagttaaggaatataatggacagattaatattgttctctgtcatgcccacaatccctttctaaggaagactgccctactatagcagtttttatatttgtcaatttatgaatataatgaatgagagttctggtacctcctgtctttacaaatattggcgttgtcagtatttttcctttttaaccattccaatcggggtgtagtggaggtttcattttgggttttaatttgtatatccctgatagctannnntaattgggtcatagaaattctttatacattctagatgcaagtctcttgtccgatatacgtattgagatattacacctagtctgtggcttgactgttttctttatgtcttttgatgaatagaagttttaaattttgacaacgccaaatttatttctttcttttggttgatattttttctctccaatttaaccccaagatctcagatattctgcctctattatataaactttatatttttatatttgagatctacccttgaattgatatgaatgttgtgaattaatggatcagggttctttttttcccccctaaccaggtcccctctcttggaaacacggtttattgaaagaaatttccccttcccccattaaattaccttgccccattaataaaaaattccctttacccttaaaaagaag

SEQ ID NO: 257983 - DNA, 2330 bp, Homo Sapiens
tatagggaatcactgttggcctactgggtgtgtggacggaattcgggaccgactgacggccggccggcttcccggaactggaaggttacattgattacccacctagtacaacatcttacgggaagagcatagtatttcctagaggaatatgaacataacaggaaggtatcattggctctgaattaaatttgaacttgtcccctgaatagctacaggttttggaagctgaatcaatgttatcagatgagttagaatccaaaccagagctcctggtacagtttgttcagaatacgtccatcccattgggacaggggcttgtagaatcagaagctaaagatattacttgcttgtccctccttcccgtgactgaagcctcagaatgcagtcggctaatgttaccagatgatactacaaatcattctaactcctccaaggaggtcccttcctcagctgttttgagaagccttcgggtgaatgtgggtccagacggagaggagacgagagctcagactgtacagaaatccccggagtttttgtccacttcagagtcttctagcttgttgcaagatctacagccaagtgatagcacttcttttattcttcttaacctaacaagagcaggtctgggctcttcagctgagcacttagtgtttgtacaggatgaggcagaagattcagggaatgatttcctctccagtgagagcacagacagtagcattccatggttcctccgggttcaggagttggcccatgacagtttgattgctgctactcgtgcacaactggcaaagaatgcaaaaaccagcagcaatggagaaaatgtccaccttggttctggtgatgggcagtcaaaagattctgggccccttcctcaagtggaaaagaagctcaagtgtacagttgaaggttgtgaccggacatttgtatggccagctcactttaaataccacctcaagactcatcgaaatgaccgctccttcatctgtcctgcagaaggttgtgggaaaagcttctatgtactgcagaggctgaaggtgcacatgaggacccacaatggagagaagccctttatgtgccatgagtctggctgtggtaagcagtttactacagctggaaacctgaagaaccaccggcgcatccacacaggagagaaacctttcctttgtgaagcccaaggatgtggccgttcctttgctgagtattctagcctccgaaaacatctggtggttcactcaggagagaagcctcatcagtgccaagtctgtgggaagaccttctctcagagtggaagcaggaatgtgcatatgagaaagcatcacctgcagctgggagcagctgggagtcaagagcaggagcaaactgctgagccactaatgggcagtagtttgcttgaagaggcttcagtacccagtaaaaacctggtgtctatgaattcccagcccagccttggtggagagtccttgaacctaccaaataccaattctatcctgggagttgatgatgaggtgcttgctgaaggatccccacgttccctgtcttcagtgcctgatgtgacacatcacctggtgaccatgcagtcagggaggcaatcatatgaagtttctgtcttaactgcagtaaatccacaagagttactaaaccaaggagatttaactgaaagacggacatgagcgtgggtgctgactcctggaagagcaactctatctgatctcaaaatgcgtatactgggaacaggatgccttagcccacaacagaaccagaatgaatctttgaaggcacaagactctgcttttgccactcttcctctttcctggtatagaagatggatgtaggagagcttcttttctaactaccatctgatcagacaaggaatgaagcaatgactgtgggctgggaaactgtacctacctctcttcccactgcaaatttctgggatagaccaaaagtgaatttgattatgtgttggctgaagttcttcattctgactgttgaggggaggttttcctttgaagagttttcatcccagactcagctgtcttttcacatggatgaaataattcctgctaccaacaacagagcttcaccaggaagttgagttttcaagatgccttgttgctttgaagaagggagtgatgtcaattctcttgttacattctccctttagcaacctgagtaagagactctctgccactgggctgcaaaaaaataaattacttgaatctccccttggcccaggctgaggtactatcttgtcctatacacttctacttggtcactttgctttcttcgttaatggaacatacagtagcatgttaagagggatttcgatg

SEQ ID NO: 257984 - DNA, 2272 bp, Homo Sapiens
  misc_feature (2178)..(2201): n is a, c, g, or t
ctttctcctccacgtggggacgcaggatggcggcagcagtggcggacgaggcggtggcgcgcgatgtgcagcggttgctagtgcagttccaggatgagggcgggcagctgctgggttccccgttcgacgtgcccgtggacatcaccccggacaggctgcagctcgtgtgcaacgcgctactggcccaggaggatcccctgccactggctttctttgtccacgatgctgagatcgtctcctcactggggaagacgttggagtcccaggcagtggagacagagaaggtcctagacatcatctaccagccacaggctatcttcagagtccgggctgtgactcgctgcaccagctccttggagggtcacagtgaggcagtcatttctgtggccttcagccctacgggaaagtacctggccagtggctctggagacaccaccgtgcgcttctgggatctcagcacagagacaccacatttcacatgcaagggacacagacactgggtccttagtatatcctggtctccagatggcaagaagctggcctcaggctgcaagaatggccagattctcctctgggacccaagcacagggaagcaggtgggcaggaccctcgctggccacagcaagtggatcacaggcctgagctgggagcccctccatgcgaaccctgagtgccgctatgtggccagcagctccaaggatggcagtgtgcggatctgggacacaactgcaggccgctgtgagcgcatcctcaccgggcacacccagtcggtcacctgtctccggtggggaggggacgggcttctctactctgcctcccaggaccgcaccatcaaagtctggagagctcatgacggtgtgctgtgccggactctgcaaggccacggccactgggtgaacaccatggccctcagcactgactatgccctgcgcactggggcctttgaacctgctgaggcctcagttaatccccaagacctccaaggatccttgcaggagttgaaggagagggctctgagccgatacaacctcgtgcggggccagggtccagagaggctggtgtctggctccgacgacttcaccttattcctgtggtccccagcagaggacaaaaagcctctcactcggatgacaggacaccaagctctcatcaaccaggtgctcttctctcctgactcccgcatcgtggctagtgcctcctttgacaagtccatcaagctgtggggatggcaggacggggcaagtacctggcttccctacgcggccacgtggctgccgtgtaccagattgcgtggtcagctgacagtcggctcctggtcagcggcagcagtgacagcacactgaaggtgtgggatgtgaaggcccagaagctggccatggacctgcccggccacgcggatgaggtatatgctgttgactggagtccagatggccagagagtggcaagtggtgggaaggacaaatgcctccggatatggaggagatgagacggcccgaagttctctctgacccccacctcgactcggcctctgccagctgccttccctgccagagaacaaaggctgagatggcagtgcacacaccctccccaccagtggggacctgagaatgcgtgtggcctgctgtcctcgatagaccggaatggggttttcccacagatccccgcctgtggcacaccccagagccagaaatcgaaggtcacaggaagttgtcactgaacttggcccgtgtctgctactctgtaccttgctggtacagacaggggtggtgggcagccaggctctatgagtgggcccctagtgtcagctctgtacagggtcagatcccaggttctatgaccaaataagtaacttaagttttgtgtgttgggttctaattccttgtcctagaatcgccatgagtcaatctaggactgtgctaaatgagattgtcagcccccgcctttgactggactagccaaaccacactgacgaggacttgcgttccgctcttccccgcgttgtaaaaagaagcccttgtattatggcaagagatcttgggtgattgtttcactcagtagaccgcccatttgatctgcataatgaatgagtctcatcgacggtagcgccctattgttgccgaaggttgtttaagaaaattgtgcttcctgaggggcgctgtcgtatttgtttgtcgattnnnnnnnnnnnnnnnnnnnnnnnnggttcctcgatgtttctgtttttggtggtttgtaggtatttccctgtgtttctctcttagtggtttcttcc

SEQ ID NO: 257985 - DNA, 602 bp, Homo Sapiens
  misc_feature (64)..(83): n is a, c, g, or t
ctgtgcaattcgggtgagttccttcacccttctgagccatcccttggctcgtctggaaaatgcnnnnnnnnnnnnnnnnnnnncaccaggtttttgcatcctcctggatgagggatataaagtgcctgacacagcatatgacagggatttgataaatgggggctgttagctgtcccattgtggatgtgagaatagcattctgctggctaaaaggcagacatgaatgttctagaacatggcgatcccggaatgtgcagtgaaggcaggaagaggaagaatgggcagggaagaacaagttgggatggaggaatgaactcttatctccagaagcagagctaagaatgcccacggagccttggcacatgacagcctccgctgagccaaatggcccaaagacttctgaatgagcttttgctgcaacaaaaaactttggatcattttgagagcctcccgtgaggtgccaatatgttgcagtaccttcccggccccgacactgatgtgattcatcgtaggtaacatatgaataagaatggaggagtgatggctgtaggagctcgtcactcttttgacaaaaaaggggtgattgtggttgaagtggagga

SEQ ID NO: 257986 - DNA, 1467 bp, Homo Sapiens
gtgctacgccatcaagggcccccagtcccgggtgccgcggggacagtgtagggtcattagctgttgagccgccccgggcgggcccaagcctttggatctcaggtgaccggcacaggcggccgcggggtccggaactgcttgttccggcagtggaagagacgcgccggcgttggccgctgctgctagcagcttgaaccccagggtcgggaccgatgtcggcttgggctgctgccagcctaagcagggccgctgcccgatgcttgctggcacgaggccccggggtcagggcggctcctccgcgcgacccccggccctcccaccccgagccccggggctgcggtgccgctccgggcaggacgctgcactttaccgcggctgtccccgccgggcacaacaagtggtccaaagtcaggcacatcaagggtccgaaggacgtcgaaaggagtcgcatcttctccaaactctgtttgaacatccgcctggcagtgaaagaaggaggccccaaccctgagcacaacagcaacctggccaatatcttagaggtgtgtcgcagcaaacatatgcccaagtcaacgattgagacagcactgaaaatggagaaatccaaggacacttatttgctgtatgagggtcgaggccctggtggctcttctctgctcatcgaggcattatctaacagtagccacaagtgccaagcagacattagacatatcctgaataagaatggaggagtgatggctgtaggagctcgtcactcttttgacaaaaagggggtgattgtggttgaagtggaggacagagagaagaaggctgtgaacctagagcgtgccctggagatggcaatcgaagcaggagctgaggatgtcaaggaaactgaagatgaagaagaaaggaacgtttttaaatttatttgtgatgcctcttcactgcaccaagtgaggaagaagctggactccctgggcctgtgttctgtgtcctgtgcactagagttcatccccaactcaaaggtgcagctggctgagcccgacctggaacaggccgcacatctcattcaggctctcagcaaccacgaggatgtgattcacgtctatgataacattgaataaccaggctacatgtgccccgggttccttcctagaaatgtggcagcccattccagcacacaggcttctgcagcaatctctgagggtaaagccggtgggaggctcagcaggccaggaggcccaaggacaggacttgcgaccttgaagccaaaggaatctcacttgtggggcctccttgtcagctctgctgctgtctcagagccatctggatgagtgtcccgacaccctctcggatgcagggcaggaccacccagctggtcagactctgatgttgggtagctggcctctgtggggattgtaagtgccctgaggcgctctgtactagaaaccgctcttaataataacggtgattattggttgctgc

SEQ ID NO: 257987 - DNA, 991 bp, Homo Sapiens
  misc_feature (20)..(20): n is a, c, g, or t
  misc_feature (968)..(968): n is a, c, g, or t
  misc_feature (975)..(975): n is a, c, g, or t
ccgggatgcgcgcgctctgnagctggatgtccaggctgcgggcgctgctgggcctcgggctgctggttgcgggctcgcgcctgccgcggatcaaaagccagaccatcgcctgtcgctcgggacccacctggtggggaccgcagcggctgaactcgggtggccgctgggactcagaggtcatggcgagcacggtggtgaagtacctgagccaggaggaggcccaggccgtggaccaggagctatttaacgaataccagttcagcgtggaccaacttatggaactggccgggctgagctgtgctacagccatcgccaaggcatatccccccacgtccatgtccaggagcccccctactgtcctggtcatctgtggcccggggaataatggaggagatggtctggtctgtgctcgacacctcaaactctttggctacgagccaaccatctattaccccaaaaggcctaacaagcccctcttcactgcattggtgacccagtgtcagaaaatggacatccctttccttggggaaatgcccgcagagcccatgacgattgatgaactgtatgagctggtggtggatgccatctttggcttcagcttcaagggcgatgttcgggaaccgttccacagcatcctgagtgtcctgaagggactcactgtgcccattgccagcatcgacattccctcaggatgggacgtggagaagggaaatgctggagggatccagccagacttgctcatctccctcacagcccccaaaaaatctgcaacccagtttaccggtcgctaccattacctggggggtcgttttgtgccaactgctctggaaaaagaagtaccagctgaacctgccaccctaccctgacactcagtgtgtctatcgtctgcagtgagggaaggtgggtgggtattctccccaataaagacttagagcccctctcttccagaactgtggattctgggagcnctctggnataaagtaagtaatgg

SEQ ID NO: 257988 - DNA, 478 bp, Homo Sapiens
ggcactgtgcccattgccagcatcgacattccctcaggtgctgggatccagaaggatgggacgtggagaagggaaatgctggagggatccagccagacttgctcatctccctcacagcccccaaaaaatctgcaacccagtttaccggtcgctaccattacctggggggtcgttttgtgccacctgctctggaaaagaagtaccagctgaacctgccaccctaccctgacactgagtgtgtctatcgtctgcagtgagggaaggtgggtgggtattctccccaataaagacttagagcccctctcttccagaactgtggattcctgggagctcctctggcaataaaagtcagtgaatggtggaagtcagagagcaaccctggggattgggtgccatctctctaggggtaacacaaagggcaagaggttgctatggtatttggaaacaatgaaaatggactgttagatgccaaaaaaaa

SEQ ID NO: 257989 - DNA, 1781 bp, Homo Sapiens
  misc_feature (3)..(3): n is a, c, g, or t
  misc_feature (1125)..(1125): n is a, c, g, or t
  misc_feature (1269)..(1270): n is a, c, g, or t
  misc_feature (1279)..(1409): n is a, c, g, or t
  misc_feature (1459)..(1692): n is a, c, g, or t
  misc_feature (1725)..(1730): n is a, c, g, or t
  misc_feature (1759)..(1759): n is a, c, g, or t
  misc_feature (1766)..(1767): n is a, c, g, or t
  misc_feature (1769)..(1769): n is a, c, g, or t
  misc_feature (1775)..(1778): n is a, c, g, or t
gcncctgttcccactctccttccacctcggaccggccggggctccgcagagccaaagctcgcttgtccccggaaccgccctgctgccgccgcctgcttcctctgctcgcggttagcccgtcagtccctgctctgtgcgcgcctccatctgggccatggatggcggggatctgatgagcttctttcttctggcatcattaacggaccttttaccatgaatagttctactccttctacagctaatgggaatgacagcaagaaatttaaacgagatagacctccctgttcgccttcccgtgttctccatcttcgaaaaattccatgtgatgtcaccgaagcagagatcatatcattaggtctaccatttggcaaagtaactaatcttttgatgttgaaaggaaaaagccaggctttcttagaaatggcttctgaggaagctgccgttactatggtgaattattacactcctattactcctcaccttcgaagccagcctgtttatattcagtattccaatcacagagaacttaagactgacaatctacctaatcaagctcgagcccaagctgcactgcaggctgtcagtgccgtccaatcaggaagcctggccctttctggaggtccttccaatgaaggcacagtcctacctgggcagagcctgtgcttcgaataattattgaaaacctcttttaccctgttaccctggaagttcttcatcagatattttctaaatttggcacagtcttgaagattatcacctttacaaagaataatcagtttcaagccttgcttcagtatgctgacccagtaaatgcacattatgccaaaatggctctggatggccagaatatctataatgcatgctgcactctgcgcattgacttctccaagctcaccagccttaatgtgaaatataataatgacaaaagcagagacttcactcgcttagaccttcctactggtgatggccagccatcccttgaaccccctatagctgctgcttttggtgcaccgggtataatttcttcaccatatgcaggggctgctgggatttgccccagccattggatttcctcaagctacaggtctatcagttccagctgttcctggagctcttggtcctctnacaatcacctcttctgctgtcactggaaggatggccattcctggggctagtggtataccaggaaattctgttctactcgtcacaaatctcaatcctgatgtgagttgaaaagtattatatgtaaatagtctttcaggagaagcnntagtagcannnnnnnnnnnnnnnnnnnnnnnnnnnnnnnnnnnnnnnnnnnnnnnnnnnnnnnnnnnnnnnnnnnnnnnnnnnnnnnnnnnnnnnnnnnnnnnnnnnnnnnnnnnnnnnnnnnnnnnnnnnnnnnnnnnagaaaggattttactctgttactcaggcttcagtgtggtgctgcattcannnnnnnnnnnnnnnnnnnnnnnnnnnnnnnnnnnnnnnnnnnnnnnnnnnnnnnnnnnnnnnnnnnnnnnnnnnnnnnnnnnnnnnnnnnnnnnnnnnnnnnnnnnnnnnnnnnnnnnnnnnnnnnnnnnnnnnnnnnnnnnnnnnnnnnnnnnnnnnnnnnnnnnnnnnnnnnnnnnnnnnnnnnnnnnnnnnnnnnnnnnnnnnnnnnnnnnnnnnnnnnnnnnnnnnnnntggtagcttctgatccagggttgtattcaaatnnnnnnccttaagtttgttttaagaacttctattnaactccnncncctccnnnntac

SEQ ID NO: 257990 - DNA, 866 bp, Homo Sapiens
  misc_feature (6)..(6): n is a, c, g, or t
  misc_feature (9)..(9): n is a, c, g, or t
  misc_feature (12)..(12): n is a, c, g, or t
  misc_feature (18)..(18): n is a, c, g, or t
  misc_feature (22)..(22): n is a, c, g, or t
  misc_feature (42)..(42): n is a, c, g, or t
  misc_feature (46)..(47): n is a, c, g, or t
  misc_feature (49)..(49): n is a, c, g, or t
  misc_feature (56)..(56): n is a, c, g, or t
  misc_feature (58)..(58): n is a, c, g, or t
  misc_feature (62)..(62): n is a, c, g, or t
  misc_feature (64)..(64): n is a, c, g, or t
  misc_feature (76)..(76): n is a, c, g, or t
  misc_feature (88)..(90): n is a, c, g, or t
  misc_feature (128)..(128): n is a, c, g, or t
  misc_feature (131)..(131): n is a, c, g, or t
  misc_feature (539)..(539): n is a, c, g, or t
gggaanttnggnggttgncacncccgccccagaattgttttngttnnanaactagnangagntntgcaagggagtntagagcagcccnnnttttacaccaaaccccccacccccactccagacaccanttngcaagaaaagaccccctagggccagtgcccttcaccccacccaagatacttgctcttccccaagaccaaggcaggagataaaaagccacaaagccccaaggttgtgaaaaccaggacttgggaccaggttggggttggaggtttccctctactggaggctcagggcatagcactactttatgaatggagaggctgctgcccagctacccagcactcacacacttcagtgccagtgatccctgccagcagctctgtgagctcatccccggacatggagcaggcacccaggccttgcactgcagccccaatgctgcccgtggcgatcatggatggcgggtacatggcaaaggtataatctgtagaacagagggccaaaaaggtctgagcatgctttttgaccaaggcctntcggtcacggggcagagagagccggtgcagaatgaaggccaggaaatcatgtgcaatacacagcagccaggtcccacttgagcttccctaggaccagcacctcccagtcccgcaactggcggggagagacagcgtggtcggtgtagatgcacagtttttcgatggtcaggggcgtggtctcgcgcagcttggaggccagcagcatgcagaccgcacccaggagctgcaactgcgcctttcgggtggggacgcaagacaggtagcgatccaggtagttcatggccagggggaagacttcctcctcacagcgctgctcctcacatacct

SEQ ID NO: 257991 - DNA, 947 bp, Homo Sapiens
  misc_feature (19)..(19): n is a, c, g, or t
gggattcggcgcgcgcgcngtgcggcgggcgggctggggatccgccgcgcagtgccagcgccacgcgccagacccgcgccccgcgctctccggcccgtcgcctgccttgggactcgcgagcccgcactcccgccctgcctgttcgctgcccgagtatggagctgctgtgttgcgaaggcacccggcacgcgccccgggccgggccggacccgcggctgctgggggaccagcgtgtcctgcagagcctgctccgcctggaggagcgctacgtaccccgcgcctcctacttccagtgcgtgcagcgggagatcaagccgcacatgcggaagatgctggcttactggatgctggaggtatgtgaggagcagcgctgtgaggaggaagtcttccccctggccatgaactacctggatcgctacctgtcttgcgtccccacccgaaaggcgcagttgcagctcctgggtgcggtctgcatgctgctggcctccaagctgcgcgagaccacgcccctgaccatcgaaaaactgtgcatctacaccgaccacgctgtctctccccgccagttgcgggactgggaggtgctggtcctagggaagctcaaatgggacctggctgctgtgattgcacatgatttcctggccttcattctgcaccggctctctctgccccgtgaccgacaggccttggtcaaaaagcatgcccagacctttttggccctctgtgctacagattatacctttgccatgtacccgccatccatgatcgccacgggcagcattggggctgcagtgcaaggcctgggtgcctgctccatgtccggggatgagctcacagagctgctggcagggatcactggcactgaagtggactgcctgcgggcctgtcaggagcagatcgaagctgcactcagggagagcctcagggaagcctctcagaccagctccagc

SEQ ID NO: 257992 - DNA, 996 bp, Homo Sapiens
  misc_feature (8)..(8): n is a, c, g, or t
  misc_feature (17)..(17): n is a, c, g, or t
  misc_feature (347)..(355): n is a, c, g, or t
  misc_feature (982)..(982): n is a, c, g, or t
ccagcacnccaacagtntcacagccatacacctgtagccctggagagccctctggagtgccactaagcagaggagggccgctgccacccacctcctgcctccaggaaccacaccacatctaagcctgaaggggcgtctgttcccccttcacaaagcccaagggatctggtcctacccatccccgcagtgtgcactaaggggcccggccagccatgtctgcatttcggtggctagtcaagctcctcctccctgcatctgaccagcagcgcctttcccaactctagctgggggtgggccaggctgatgggacagaattggatacatacaccagcattccttttgaacgnnnnnnnnngcaccctgggggctctcatgttttcaactgccaaaatgctctagtgccttctaaaggtgttgtcccttctagggttattgcatttggattggggtccctctaaaatttaatgcatgatagacacatatgagggggaatagtctagatggctcctctcagtactttggaggcccctatgtagtccgtgctgacagctgctcctagagggaggggcctaggcctcagccagagaagctataaattcctctttgctttgctttctgctcagcttctcctgtgtgattgacagctttgctgctgaaggctcattttaatttattaattgctttgagcacaactttaagaggacgtaatggggtcctggccatcccacaagtggtggtaaccctggtggttgctgttttcctcccttctgctactggcaaaaggatctttgtggccaaggagctgctatagcctggggtggggtcatgccctcctctcccattgtccctctgccccatcctccagcagggaaaatgcagcagggatgccctggaggtggctgagcccctgtctagagagggaggcaagcctgttgacacaggtctttcctaaggctgcaaggtttaggctggtggcccaggnccatcatcctactg

SEQ ID NO: 257993 - DNA, 807 bp, Homo Sapiens
cgcagtaccctacggtataaggtagcgaggctgggtggcgaattcggcacgagggtgggacctggctgctgtgattgcacatgatttcctggccttcattctgcaccggctctctctgccccgtgaccgacaggccttggtcaaaaagcatgcccagacctttttggccctctgtgctacagattatacctttgccatgtacccgccatccatgatcgccacgggcagcattggggctgcagtgcaaggcctgggtgcctgctccatgtccggggatgagctcacagagctgctggcagggatcactggcactgaagtggactgcctgcgggcctgtcaggagcagatcgaagctgcactcagggagagcctcagggaagcctctcagaccagctccagcccagcgcccaaagccccccggggctccagcagccaagggcccagccagaccagcactcctacagatgtcacagccatacacctgtagccctggagaggccctctggagtggccactaagcagaggaggggccgctgccacccacctcccctgcctccaggaaccaccaccaaatcctaagccctggaagggggcggtcctgggttccccccttttcacaaaagccaagggatctggtcctaacccatccccgccaggttgtgcactaaggggccggccaggcatgtctgcatttcggtggctagtcaagctcctcctccctgaatctgaccagcagcgcctttccaactctagctgggggtggtgcaggcttgatgggacagaattggatacataccaccagcattc

SEQ ID NO: 257994 - DNA, 801 bp, Homo Sapiens
  misc_feature (189)..(203): n is a, c, g, or t
  misc_feature (671)..(681): n is a, c, g, or t
gggggatctggtcctacccatccccgcagtgtgcactaaggggcccggccagccatgtctgcatttcggtggctagtcaagctcctcctccctgcatctgaccagcagcgcctttcccaactctagctgggggtgggccaggctgatgggacagaattggatacatacaccagcattccttttgaacgnnnnnnnnnnnnnnntgggggctctcatgttttcaactgccaaaatgctctagtgccttctaaaggtgttgtcccttctagggttattgcatttggattggggtccctctaaaatttaatgcatgatagacacatatgagggggaatagtctagatggctcctctcagtactttggaggcccctatgtagtcccgtgctgacagctgctcctagagggaggggcctaggcctcagccagagaagctataaattcctctttgctttgctttctgctcagcttctcctgtgtgattgacagctttgctgctggaaggctcattttaatttattaattgctttgagcacaactttaagaggacgtaatggggtccctggccatcccacaagtggtggtaaacccgggtggttgctgtttttcctccccttcctgcttactgggcaaaaggatcttttggtggcccagggagctgcctataaccctnnnnnnnnnnnccatggccctccctcctccctttggccccttctggcgccatttcttccaggaagggggaaaaatggcaaccaagggaattccccctggaaaagtggggcctttaaacccccctggttctt

SEQ ID NO: 257995 - DNA, 1587 bp, Homo Sapiens
  misc_feature (67)..(67): n is a, c, g, or t
  misc_feature (175)..(175): n is a, c, g, or t
  misc_feature (177)..(179): n is a, c, g, or t
  misc_feature (253)..(253): n is a, c, g, or t
  misc_feature (920)..(920): n is a, c, g, or t
  misc_feature (926)..(926): n is a, c, g, or t
  misc_feature (1057)..(1057): n is a, c, g, or t
  misc_feature (1168)..(1168): n is a, c, g, or t
  misc_feature (1170)..(1171): n is a, c, g, or t
  misc_feature (1177)..(1178): n is a, c, g, or t
  misc_feature (1253)..(1253): n is a, c, g, or t
  misc_feature (1261)..(1261): n is a, c, g, or t
  misc_feature (1270)..(1270): n is a, c, g, or t
  misc_feature (1286)..(1286): n is a, c, g, or t
  misc_feature (1290)..(1292): n is a, c, g, or t
  misc_feature (1294)..(1294): n is a, c, g, or t
  misc_feature (1319)..(1319): n is a, c, g, or t
  misc_feature (1323)..(1323): n is a, c, g, or t
  misc_feature (1330)..(1331): n is a, c, g, or t
  misc_feature (1343)..(1343): n is a, c, g, or t
  misc_feature (1348)..(1348): n is a, c, g, or t
  misc_feature (1389)..(1390): n is a, c, g, or t
  misc_feature (1407)..(1407): n is a, c, g, or t
  misc_feature (1452)..(1452): n is a, c, g, or t
  misc_feature (1454)..(1454): n is a, c, g, or t
  misc_feature (1461)..(1461): n is a, c, g, or t
  misc_feature (1476)..(1476): n is a, c, g, or t
  misc_feature (1486)..(1486): n is a, c, g, or t
  misc_feature (1493)..(1493): n is a, c, g, or t
  misc_feature (1505)..(1506): n is a, c, g, or t
atttatacgcagaatctgcgctcgcttctccgctccctcccccgtcagcccggggacggcgccggcncgggcccgcggctgtgcccggcaggatcgggtttatttattgcctctagcccggagccggggcggcctggggactgcacagttccctctgcccgagcccctccccttntnnncccaccccccaaagccggctgcttcccaggggcctgtcttccccaaacctcttaccagactctgggcggagctnccgacggtctggggtggaagtcggggacggaggcagaaaggtggtaaggcgccccaaggggccgaattctgcactacctcgcacggacccagtggggagagggtcgcggtggtggaggtcaccacctctgccctaaggtcggaaaggagccggagctgccagtctgaaactccctaccatcccagtagctctggaacccccttcctccaggggctatcctttctctccagggattcctctttccccagctccagacaaccccttactccaaggccccaggagccctttccctttagaataaattaaggaatctccagcttctactggatcccaggagaagaaaggtttgaaagatcacgtccctggcaagagccacagccctcagccaggtgatgggcacagggctgggtacaggtctatcacagtgccctggcttcacatctaaagagtccggatggccacagggtagagcagggacatgtgttcggctcccttaatgggtagcttgcggctggcatagtggtgcacaatttcagggacgctgctgaagggcgggctgttctggcccagcacatatttgtgttccttggttcgggacagcttcatgtgcatgaatccctggctgctcctgcaaaggctttggaaatccgctccttcttccactccncagggntggtcatactcctcagggggcctctcatcatcctctggcaggcggactcccggggccaggggccccctcaccttccggggtgcccccatcctcctctggctcataggggtgtgtcatacagaggcaagggntgagttgctgtctccttggagccccggatctcggccatcatcttttgagcctcatagggctccatgtagccatcattttcagggaccttctctggggctcctgaagctccngnngagcgnncgccagtctcctgaacatcaaacgggtccgcatagtcttctaggatagctagcctatcgctgttggcgggggtcngagatccntcatcagcngcggcgcgggggcccngggnnngncccgaataaaggaaataaaaaaaangtgngaggggnngcgtgggtaaanaaaanaaaggggtggtgagggggcggagccggacgaccccccggannaggggtcttcgaagtcngcgtcccgctgcagcctgtaggcggccaggatgtccgggggcggngnggggggngcggccggagagggngcaggggggnggtagtngggctggggganncccggcttgctgccccctccgccgccgccccccccgcggaagcccaggtgctcccggagccacttggctactccgccgctg

SEQ ID NO: 257996 - DNA, 1038 bp, Homo Sapiens
  misc_feature (13)..(14): n is a, c, g, or t
  misc_feature (16)..(16): n is a, c, g, or t
  misc_feature (21)..(21): n is a, c, g, or t
  misc_feature (33)..(33): n is a, c, g, or t
  misc_feature (50)..(50): n is a, c, g, or t
  misc_feature (55)..(55): n is a, c, g, or t
  misc_feature (57)..(58): n is a, c, g, or t
  misc_feature (60)..(60): n is a, c, g, or t
  misc_feature (63)..(63): n is a, c, g, or t
  misc_feature (66)..(66): n is a, c, g, or t
  misc_feature (71)..(71): n is a, c, g, or t
  misc_feature (87)..(87): n is a, c, g, or t
  misc_feature (94)..(94): n is a, c, g, or t
  misc_feature (145)..(145): n is a, c, g, or t
  misc_feature (176)..(176): n is a, c, g, or t
  misc_feature (178)..(178): n is a, c, g, or t
  misc_feature (207)..(207): n is a, c, g, or t
  misc_feature (857)..(868): n is a, c, g, or t
ttatttcatcccnngntaaantaatttctgtgnttccccctcacccttgnatttncnncnttnttntcatncccagcacccattccnacttaantctctttgaaatcttttttggagattttccttcagctacaaatgttccagnacaaccaatataactcctgaggggcaaagantntttcatatttatgtccctagtatctggtntggcgcctggcatatggcatttcagaatatgttcatagttgaaacagtaggatagatatttgtcatcttgacaagtagccctttgcaatttatacttgagttcactcctggtcaatggcacatggctggaaaatgcagaaagcaagttcacttacagcctgaggcttataaagcttgtaccgcgcctcccggcagtccaggaaaactgcaaaaaatgggaagtaaggccctggcaggcagacccggcatgtagccgctggccatcttgaatcctagggcatgaagttgccccaaagttcagcacttggttaagcctgatccctctggtttatcacaaagaataggatgggataaagaaagtggacacttaaataagctataaattatatggtccttgtctagcaggagacaactgcacaggtatactaccagcgtttggatattgatatatacatggcaaatctgaatattgttttatgagaggcctggcaatgggtaaaacaccaaacttgaaatcagaacataggtgcaaatggccactcctgtagtttcttttctgtaaaatgggatctggacgaatgataccaaacgtttctttctaacattgtattttataactctggcctatgattgtgttgtgtcttgcattnnnnnnnnnnnntttgagagtggtagaattacttctgttatctgaaatacctgagatgcactttaaactgttgaaatgtaagctctgagggcagggaccgtatcttatttactgttagtatccgttgcatctagtgtggtgcacctggcacacagtaggcactcaataaatatgtattgatt

SEQ ID NO: 257997 - DNA, 897 bp, Homo Sapiens
  misc_feature (54)..(54): n is a, c, g, or t
  misc_feature (56)..(56): n is a, c, g, or t
  misc_feature (843)..(843): n is a, c, g, or t
  misc_feature (853)..(854): n is a, c, g, or t
  misc_feature (879)..(879): n is a, c, g, or t
  misc_feature (890)..(890): n is a, c, g, or t
accacacggagtcgggggttggggagtgagcctggaggggtgagggggtgagcntnggcacccagcatgggcaggggacggaggcaaactcattcctcagaaaaggggtatcttccccaagaaaagcctggagggcacttgtggggggaggtggcaggcggggggagaggggtgggtcattgcccgctcccagcaccgaacaggaacttgcggatgtccctgggcgagcagctccggctcctcaaaggccgcaaagtggcccccacgaaccatgtaggaataggagatgagctttgggtacttgaacctcacccacttttcaggcgtgtgcaatagctcaaaagggaaggcagagaaagccagtgggcacatagaccttcatccgctcatgcttctgggtcatccagccctgtcccaggttctccttgtagaagcgctgggaggagatgatggtgcctgttgtccagtagagcatgacgttggtcagcaggtcgtccagggagaacttcctttccaggcctccatcctccaggtatcggaattccgtattggtccaggtggaaaacttctctagaatataggcagccagacccacaggagagtcattcagagcagagcctacggtgtcaggcttggtgcactggatgtgcatgtagccgctctccctcatcaggctgtagaataccttctccttgacagggtacagcagcgccacatccctctcagtgaggccaagaaacctcccgaaacgctgtcccaggaggagggtcagggtagagaagttgcttaaaaccaaagccatgttcaagtgcaggcctttcacgtggctgggcacaggtgggncatattagtnngatcagggaccccagtccctctttnaatgtgaatcntggaagc

SEQ ID NO: 257998 - DNA, 1331 bp, Homo Sapiens
  misc_feature (1085)..(1085): n is a, c, g, or t
  misc_feature (1088)..(1088): n is a, c, g, or t
  misc_feature (1098)..(1098): n is a, c, g, or t
  misc_feature (1146)..(1146): n is a, c, g, or t
  misc_feature (1151)..(1151): n is a, c, g, or t
  misc_feature (1186)..(1186): n is a, c, g, or t
  misc_feature (1210)..(1210): n is a, c, g, or t
  misc_feature (1230)..(1230): n is a, c, g, or t
  misc_feature (1250)..(1250): n is a, c, g, or t
  misc_feature (1254)..(1254): n is a, c, g, or t
attccagggatgagagatcgcgcgcctgcctccgccggagcctgcgagccgagaccgagccatgtggctagaaatcctcctcacttcagtgctgggctttgccatctactggttcatctcccgggacaaagaggaaactttgccacttgaagatgggtggtgggggccaggcacgaggtccgcagccagggaggacgacagcatccgccctttcaaggtggaaacgtcagatgaggagatccacgacttacaccagaggatcgataagttccgtttcaccccacctttggaggacagctgcttccactatggcttcaactccaactacctgaagaaagtcatctcctactggcggaatgaatttgactggaagaagcaggtggagattctcaacagataccctcacttcaagactaagattgaagggctggacatccacttcatccacgtgaagcccccccagctgcccgcaggccataccccgaagcccttgctgatggtgcacggctggcccggctctttctacgagttttataagatcatcccactcctgactgaccccaagaaccatggcctgagcgatgagcacgtttttgaagtcatctgcccttccatccctggctatggcttctcagaggcatcctccaagaaggggttcaactcggtggccaccgccaggatcttttacaagctgatgctgcggctgggcttccaggaattctacattcaaggaggggactgggggtccctgatctgcactaatatggcccagctggtgcccagccacgtgaaaggcctgcacttgaacatggctttggttttaagcaacttctctaccctgaccctcctcctgggacagcgtttcgggaggtttcttggcctcactgagagggatgtggagctgctgtaccccgtcaaggagaaggtattctacagcctgatgagggagagcggctacatgcacatccagtgcaccaagcctgacaccgtaggctctgctctgaatgacctctccctggtgggtctggctgcctataattctagagaagttttccaccctggaccaatacggaattccgataccntgngaggatggangcccctggaaaaggaaagttctcccctggggacgacccctgctgaccnaacgntcatgggctctactgggacaacagggcacccattncatctcctccccagcgcttctacnagggagaaacctggggaacnaggggcttggattgacccanaaanccatgaaccgggatggaagggtctatggtggcccacctgggctttctcttgcccttcccctttttgaagctaattgc

SEQ ID NO: 257999 - DNA, 2113 bp, Homo Sapiens
  misc_feature (26)..(26): n is a, c, g, or t
  misc_feature (55)..(55): n is a, c, g, or t
  misc_feature (157)..(157): n is a, c, g, or t
attcctccaccattaactgagctttncccagattactgtaactgaaaagtgtttnccaataggtttttcagccagggagaggaaggtggactttgtggatccctcatgtaaacatttccctggttgggctggatttcgaattaccagtgggcttctnggtgggtgctggttgaactgctcgttcttttatgggttctgttttgccagggagctgaaagggatctagaaccatctctgaaccaacagattcttcagccaggttccccgatggggtgggcaaaacatcatcatcaaagctgatgagatcgatgtccaccaagggcttgctctgcagaactggaactggggggttggctgggggcccttctcccagtgacttgtatgctttggcttgtgatgcccctgcgagtcggggaggaacagtgacaggtttcagtggagctgaagggtaggtggggttttctgaggaaacagatttcttcagcagcaaaggccgcggggcaggagttggcactttcttcccactatcagagctctcagccaggggccctcttcccggaatctcaggattaacacttcgtataaggccagggtttggtttctttggcaattcaggtttggttactgggatgcttcccgcttcttgcaggggagggtatggggtgagtccttccttggaggtcaccttgagtctgttctcagtcccagagtcccactctccaagaagctctgttagcagctggtttgggagctacagaaggtttccctgaggaaacagtaggctttggaggaagtgaacgtggagtaatttctggtttcttgggcagtcctgaggtttctatgtttgtctgaccctcaaacactttaattctggaaacaatactattttggctttgttctgtgttcataatgttcatcactgcctgactgtctgaggtgctagcgttgtccagcagagactggggccggcctggggatgactcctctcctacggctgctgggctgattttctgttgactttgctctttaatgtgagaatctctgggtattggtctgaggttgctttttgatcttggttttggcactggacatcttgtagcactggggttttctggacaattcggttcttcagaaatatcaaagacgattaaaggtgccacatttgttggaagattgccagacgagactgctgagaaaggctgaagaggcttgagaggtgcctgtagtgctgacgagaccaaaacaaaactttgaggcagatcgttgtctatttcttctgaaaagtcagtctgagttgcagaagtaatagtgtgccttggagtagcagcagcattattattatttgtagtattaacttgaacttggttgatttcttttataacttgttcataagatggtgggagctcagcaggaacccagctcaattaggcctccaagaccctgctgcagattgatgtagaaaatcccagtcctggggctggggttcctggaaaccacgaggctggcctcagtggctcagctgccacaatggtgatctctgggcgccttctatctcgatgaagttcacttctgaatagaagtccgagaagatctcttgattaccgctctaatggatgacaagggtccttggcttgaagaacgatgttctggtttatttcggttcgattgcgatctgcggccgagtggcccgagagccgcacggccccgggcacggcgtctggccaccaagttcgcggcgctcgcgtagctcttcctccgtcgtcctcccgccagccggccctcagccatgggcgaggcgcggggcgcagccgcgggatgccagcgagctgcaggccccggcagccccagaacgcctgcacccggcgccccacacacaccgccctcgggccggggggaaggcggctccacggagaggatggcgtcggcggcggctgtggaaatggccacctccgcgaactccacctgcagccggccgggcagcggcagggcgcgggccgagccgattccccgcctccttgcggcgtcccggcggcctcttaatcctggcctttcccactcccactcccgctctccgacgcgtgggtcgacgatatcccgaaacttccggaccgta

SEQ ID NO: 258000 - DNA, 889 bp, Homo Sapiens
  misc_feature (7)..(7): n is a, c, g, or t
  misc_feature (19)..(19): n is a, c, g, or t
  misc_feature (25)..(25): n is a, c, g, or t
  misc_feature (38)..(38): n is a, c, g, or t
  misc_feature (48)..(48): n is a, c, g, or t
  misc_feature (50)..(50): n is a, c, g, or t
  misc_feature (56)..(57): n is a, c, g, or t
  misc_feature (63)..(63): n is a, c, g, or t
  misc_feature (65)..(65): n is a, c, g, or t
  misc_feature (76)..(77): n is a, c, g, or t
  misc_feature (79)..(79): n is a, c, g, or t
  misc_feature (85)..(85): n is a, c, g, or t
  misc_feature (101)..(101): n is a, c, g, or t
  misc_feature (104)..(104): n is a, c, g, or t
  misc_feature (106)..(106): n is a, c, g, or t
  misc_feature (108)..(108): n is a, c, g, or t
  misc_feature (122)..(122): n is a, c, g, or t
  misc_feature (126)..(127): n is a, c, g, or t
  misc_feature (129)..(129): n is a, c, g, or t
  misc_feature (134)..(134): n is a, c, g, or t
  misc_feature (140)..(141): n is a, c, g, or t
  misc_feature (144)..(144): n is a, c, g, or t
  misc_feature (149)..(149): n is a, c, g, or t
  misc_feature (158)..(158): n is a, c, g, or t
  misc_feature (162)..(162): n is a, c, g, or t
  misc_feature (165)..(165): n is a, c, g, or t
  misc_feature (180)..(236): n is a, c, g, or t
  misc_feature (252)..(254): n is a, c, g, or t
  misc_feature (268)..(268): n is a, c, g, or t
  misc_feature (270)..(271): n is a, c, g, or t
  misc_feature (275)..(277): n is a, c, g, or t
  misc_feature (282)..(282): n is a, c, g, or t
  misc_feature (284)..(286): n is a, c, g, or t
  misc_feature (290)..(290): n is a, c, g, or t
  misc_feature (295)..(295): n is a, c, g, or t
  misc_feature (299)..(303): n is a, c, g, or t
  misc_feature (305)..(307): n is a, c, g, or t
  misc_feature (311)..(314): n is a, c, g, or t
  misc_feature (318)..(321): n is a, c, g, or t
  misc_feature (323)..(326): n is a, c, g, or t
  misc_feature (328)..(328): n is a, c, g, or t
  misc_feature (332)..(333): n is a, c, g, or t
  misc_feature (335)..(336): n is a, c, g, or t
  misc_feature (338)..(340): n is a, c, g, or t
  misc_feature (344)..(345): n is a, c, g, or t
  misc_feature (348)..(350): n is a, c, g, or t
  misc_feature (353)..(357): n is a, c, g, or t
  misc_feature (360)..(361): n is a, c, g, or t
  misc_feature (365)..(365): n is a, c, g, or t
  misc_feature (378)..(378): n is a, c, g, or t
  misc_feature (385)..(385): n is a, c, g, or t
  misc_feature (388)..(388): n is a, c, g, or t
  misc_feature (392)..(393): n is a, c, g, or t
  misc_feature (396)..(396): n is a, c, g, or t
  misc_feature (398)..(398): n is a, c, g, or t
  misc_feature (400)..(400): n is a, c, g, or t
  misc_feature (404)..(405): n is a, c, g, or t
  misc_feature (411)..(413): n is a, c, g, or t
  misc_feature (419)..(419): n is a, c, g, or t
  misc_feature (440)..(440): n is a, c, g, or t
  misc_feature (442)..(442): n is a, c, g, or t
  misc_feature (468)..(468): n is a, c, g, or t
  misc_feature (476)..(476): n is a, c, g, or t
  misc_feature (481)..(481): n is a, c, g, or t
  misc_feature (827)..(844): n is a, c, g, or t
cccgggngccccccccagnccgccngaaaagggccganccgggccaancnccaagnncccgcngngccgggcccgnncngcaggngcgccagcccggagcnccncnangcccagcgccaacncagnncnccggnggcccnncancgccnagcagaagncagnccnacagcggggccgaannnnnnnnnnnnnnnnnnnnnnnnnnnnnnnnnnnnnnnnnnnnnnnnnnnnnnnnncccggagcagggagcnnnaaaaaacacccacncnnccannnccccncnnncccnaacanaatnnnnncnnncccnnnncccnnnnannnnanaaanncnnannncccnnccnnngannnnnacnncccnagcggagaaaagngcccgcnggncggnnccncngngccnngggccnnnatgcanggcgagatcgccaccatcctngntggagacatcaaagttaagaaagaangggacccntaggntaccactgcctccaggctactgccctctgcccctttgccacccaccgctgccgcggataaattattccctccccgacccagcccagtgccacctctatctgtgtacatactcccttcttccacccagatgggtcccctggggtagatgcattgtgggtggggggagaaagcttgtggctcctgtccgagggggtgtttggggtcccttggcccctccagtttccctctgtcctccttggcttggctttgctgctgcttgtagttgggggagaggtgcccccctcctccttgagaagggacctcctgaaaactcgctctttataaacgaggcaaaagcatttaattnnnnnnnnnnnnnnnnnngctcccttctgctccttcaataaaccgaaagatgggttttttttg

SEQ ID NO: 258001 - DNA, 2138 bp, Homo Sapiens
  misc_feature (89)..(89): n is a, c, g, or t
  misc_feature (205)..(205): n is a, c, g, or t
  misc_feature (278)..(278): n is a, c, g, or t
  misc_feature (322)..(322): n is a, c, g, or t
  misc_feature (347)..(347): n is a, c, g, or t
  misc_feature (393)..(393): n is a, c, g, or t
  misc_feature (398)..(398): n is a, c, g, or t
  misc_feature (402)..(402): n is a, c, g, or t
  misc_feature (422)..(422): n is a, c, g, or t
  misc_feature (561)..(561): n is a, c, g, or t
  misc_feature (574)..(574): n is a, c, g, or t
  misc_feature (576)..(577): n is a, c, g, or t
  misc_feature (580)..(580): n is a, c, g, or t
  misc_feature (583)..(583): n is a, c, g, or t
  misc_feature (599)..(599): n is a, c, g, or t
  misc_feature (632)..(632): n is a, c, g, or t
  misc_feature (635)..(635): n is a, c, g, or t
  misc_feature (637)..(637): n is a, c, g, or t
  misc_feature (640)..(640): n is a, c, g, or t
  misc_feature (646)..(646): n is a, c, g, or t
  misc_feature (684)..(685): n is a, c, g, or t
  misc_feature (707)..(707): n is a, c, g, or t
  misc_feature (1768)..(1768): n is a, c, g, or t
  misc_feature (2037)..(2072): n is a, c, g, or t
tcaagcgcccacgtgctccccgagggccgctcgccagggcccccggcccttaagcacccggccaccaaggacctggcggcggcagcgancaggggccccagctgccgcccccgcaggcccagccccagccgtcagggaccggcggcggcgtgtcgggccaggaccgctatgacagggccacatcatcaggccgcctccccctgcnctcgcccgccctggagtacactctggggtcccgcctggccaatgggctgggccgtgaggaggccgtggctganggggcgcgaagggccttgcttggctccatgcctggcttgatgcnccctgggctgctggcagctgcagtntctggcctgggaagccgaggcctgacgctggcacccggcttgagtnctgcncgtnccctcttcggctccgatttngagaaagagaagcagcagaggaatgcggactgtctggcagaactgaacgaggccatgcgaggccgggcagaggaatggcacgggcgccccaaagcagtgcgggaacagctactggcgctgtccgcctgcgccccgttcnatgtgcgcttccngnnggntcncgggctggtggggcgngtgttcgccttcgatgctactgcccgtcctccnggntncgngttcgngctgaagctcttcaccgaatacccctgtggttccggcnntgtgtacgccggcgtcctggcngtggctcgccagatgttccccgatgctctgcgggagccgggcaaggcactggcttcttcgggcttcaagtacctcgaatatgaacgccggcatggatcaggagaatggcggcagcggggcgagctgcttaccgacggcgtccgcagcttccgcgagccagctcccgcggaggccctgccccagcagtacccagagccggcccctgcggctctctgtggcccacccccgcgagccccatcccggaacctggcgcccacgccgcgccgtcgcaaggcatcccccgagccggagggcgaggcggctgggaagatgaccaccgaggagcagcagcaacggcactgggtggcacccggcggcccgtactccgctgagacccctggtgtgccctcgcccattgccgccctgaagaatgtggccgaagccctgggccactcacccaaggaccctggcggaggcggggggcctgtgcgtgcagggggcgccagccctgcagcctcctccacggcccagccgccaacccagcatcgccttgtggcccgcaacggcgaagcagaagtcagtcccacagcgggggccgaagctgtcagcgggggtggcagcggcactggggcgacccctggggcccccctgtgctgtaccctgtgcaggggagcggctggaagacacccacttcgtccagtgcccctccgggcccggacacaagttctgctttccctgctcccgggaagtcatcaaggccaaggccccggccggggaggtgtactgcccgagcggagacaagtgcccgctggtcggctcctccgtgccctggggctttatgcaaggcgagatcgccaccatccttgctggagacatctcagctaacacagaacggaacccctaggctaccactgcctcctcggtactgacctctgcccctttgccacccaacgctgccgcggataacttatacgctccccgactgaacccgcagacaactctgtctgcgcacatagacgcttattcccaccagatgggtcacatgcctgaagatgattaaggggctggccctgaaggccganagtgagctggagagacaagaccaaaccctggatggcgttgcagcaactgtggacagggcaaccttgaccatcgacaagcaccacaggcggatgaagaggctgacctaggggcagaacgtccctgcattcctgtctcaccctgcacatccccctgagatggaaggctgggccgcaatgccagggctgcaaaaggcctgtggcccccccggagtgggccttcttctggaagggccctcaaaccggcggggccgcgataccacgcaagcgtnnnnnnnnnnnnnnnnnnnnnnnnnnnnnnnnnnnnattcgagaggtacgcggcgctcgtgaaccgctgccaaccacccagcccgccccacagacgcatact

SEQ ID NO: 258002 - DNA, 1108 bp, Homo Sapiens
  misc_feature (724)..(724): n is a, c, g, or t
agaggcagaagaggcctggaccttggcgcacacagacccaggaacagatgagcagggatgtctgcatccacacctggccgtgcacctactacctggagcccaagaggcgatgggttactggacagctgtcattaacatcgctgtcgctcaggttcatgactgacagcactggagagattctggtcagcttccccctctccagcatagttgagatcaagaaggaggcttcacattttatcttcagctccatcaccatcctggagaagggccatgccaagcactggttcagctccctgcggccaagtcgaaatgtggtcttcagcatcatcgagcatttctggagggagctgctgctgtctcagcctggagccgtggcagacgcatctgtcccaaggacccggggcgaggagctgacgggactcatggctggatcccagaaacgcctggaggacacggcgagggtcctgcaccaccagggccagcagctggacagcgtcatgagaggcctggacaagatggagtcagacctggaggtggcggacagattgctgacagaactggaatctcctgcttggtggccctttagctccaagctttggaagacaccaccggaaacaaagcccagggaagatgtctccatgaccagttgtgaaccctttgggaaagaagggatactgataaaaattcctgctgttatttcccacagaacagagtctcacgttanaaccaggaggctcacccgtccttgtgtctgggttggaaatacatgactccagttctttgctcatgcacaggtttgaaagagaagacgtggacgacatcaaggtccactcaccttacgaaattagcatccgccagcggtttattggaaagccagacatggcctatcgtttgatatctgccaagatgccagaggttatcccccattttagaagtggaagttcagccaagaagatggaggctggtagaaaaatgcattggtgcctccgaaggcgcaagaacctccttcccccgcaaaggaaaaactgctcaggtctggcaatgcaacatctggggctgaatgggcccgtaccctggcacccggaggccacccccaagaagaccaaga

SEQ ID NO: 258003 - DNA, 1470 bp, Homo Sapiens
  misc_feature (1238)..(1238): n is a, c, g, or t
aaggagcgaggcctgggtggcgaattcggcacgagggagagattctggtcagcttccccctctccagcatagttgagatcaagaaggaggcttcacattttatcttcagctccatcaccatcctggagaagggccatgccaagcactggttcagctccctgcggccaagtcgaaatgtggtcttcagcatcatcgagcatttctggagggagctgctgctgtctcagcctggagccgtggcagacgcatctgtcccaaggacccggggcgaggagctgacgggactcatggctggatcccagaaacgcctggaggacacggcgagggtcctgcaccaccagggccagcagctggacagcgtcatgagaggcctggacaagatggagtcagacctggaggtggcggacagattgctgacagaactggaatctcctgcttggtggccctttagctccaagctttggaagacaccaccggaaacaaagcccagggaagatgtctccatgaccagttgtgaaccctttgggaaagaagggatactgataaaaattcctgctgttatttcccacagaacagagtctcacgttaaaccagggaggctcaccgtccttgtgtctgggttggaaatacatgactccagttctttgctcatgcacaggtttgaaagagaagacgtggacgacatcaaggtccactcaccttacgaaattagcatccgccagcggtttattgggaaagccagacatggcctatcggtttgatatctgccaagatgccagaggttatccccattttagaagtgcagttcagcaagaagatggagctgttagaagatgcattggtgctcaaaagcgcaagaacctcttcccccgcagagaagagctgctcagtctggcatgcagcatcttgggctgatgggccgtaccctgcaccgtggagccacccgcaggagaccaggagggcacagcactgcacctgcagacaagcctgccagccctttctgaggcagatacccaggaactaacccagatcctgaggaggatgaaggggctggccctggaggccgagagtgagctggagagacaagacgaagccctgggatggcgttgcagcagctgtggacagggcaaccttgaccatcgacaagcacaacagggcggatgaagaggctgacctaaggggcagaacgtccctgcattcctggtctcaccctgcacatcccgctgagaatggagggnctggcggcagtgccagggctgcagaagcctgtggcccctccggaggggcctttcctccgggatggggctgctaactgtgggggctggctcctgcaccagggggcctccccaaggggtgcaccctgcctggctccccacttggctgtccctggctgctggggacagaaccccggccccatggttcctgcggatggcgctcaaaaaggggggaccatgggcggggaccccaagt

SEQ ID NO: 258004 - DNA, 1082 bp, Homo Sapiens
  misc_feature (10)..(10): n is a, c, g, or t
  misc_feature (12)..(12): n is a, c, g, or t
  misc_feature (21)..(21): n is a, c, g, or t
  misc_feature (24)..(24): n is a, c, g, or t
  misc_feature (26)..(26): n is a, c, g, or t
  misc_feature (40)..(40): n is a, c, g, or t
  misc_feature (44)..(44): n is a, c, g, or t
  misc_feature (46)..(46): n is a, c, g, or t
  misc_feature (50)..(50): n is a, c, g, or t
  misc_feature (54)..(54): n is a, c, g, or t
  misc_feature (59)..(59): n is a, c, g, or t
  misc_feature (73)..(197): n is a, c, g, or t
  misc_feature (460)..(461): n is a, c, g, or t
  misc_feature (519)..(519): n is a, c, g, or t
  misc_feature (540)..(817): n is a, c, g, or t
ttcagcttcntnaaccttgcnccncnacacttgaacaaanaatntntgtnggtntgggnttggaaggccccannnnnnnnnnnnnnnnnnnnnnnnnnnnnnnnnnnnnnnnnnnnnnnnnnnnnnnnnnnnnnnnnnnnnnnnnnnnnnnnnnnnnnnnnnnnnnnnnnnnnnnnnnnnnnnnnnnnnnnnnnnnnggtcaacggtcccagatgtagaacccctgccactgatccaccctcgttttacaggccacctgctcagagatgctgtcaccgatcatgaggtataaagcggcatcttgtggcctctagctcagcacaggcaggttttcctcatgtccttaaggaagagttcaagacatcttcctgattagaaggttactactctgtggtcatagcagcacctgtgtgtgcctctgttgtgcactgatcacactgtgctatggtctcacaggtgnnggaaggacactaggtgtcctctagctcagtgtagactcctcaggatttatcactgttnttaatttttttaatttaaatnnnnnnnnnnnnnnnnnnnnnnnnnnnnnnnnnnnnnnnnnnnnnnnnnnnnnnnnnnnnnnnnnnnnnnnnnnnnnnnnnnnnnnnnnnnnnnnnnnnnnnnnnnnnnnnnnnnnnnnnnnnnnnnnnnnnnnnnnnnnnnnnnnnnnnnnnnnnnnnnnnnnnnnnnnnnnnnnnnnnnnnnnnnnnnnnnnnnnnnnnnnnnnnnnnnnnnnnnnnnnnnnnnnnnnnnnnnnnnnnnnnnnnnnnnnnnnnnnnnnnnnnnnnnnnnnnnnnnntctgatttatcattgttgacagtgactcactggccggctctctcctctcgtcagatgatcccctgcgctagggaggccatggcaaagctgctctgtcatggctcccaaactggctttggaaaagggaagggcctatcctttttcattgattgtattgtcctttcttgattctattaataattaattaggaaaaagaaaagggaaagcaggggtggggttgggaagccatgacgccatctgggataccctggggctacttaggata

SEQ ID NO: 258005 - DNA, 1598 bp, Homo Sapiens
  misc_feature (1569)..(1569): n is a, c, g, or t
gcctcggagccgggactcgcgggcggcgggcgggggcgtcgctgcgcggctggccggtgaggccgcggcatggggcgagtgcagctcttcaagatcagcctgagccacggccgcgtcgtctacagccccggggagccgttggctgggaccgtgcgcgtgcgcctgggggcaccgctgccgttccgagccatccgggtgacctgcataggttcctgcggggtctccaacaaggctaatgacacagcgtgggtagtggaggagggttacttcaacagtaccctgtcgctggcagacaaggggagcctgcccgctggagagcacagcttccccttccagttcctgcttcctgccactgcacccacgtcctttgagggtcctttcgggaagatcgtgcaccaggtgagggccgccatccacacgccacggttttccaaggatcacaagtgcagcctcgtgttctatatcttgagccccttgaacctgaacaacatcccagacattgagcaacccaacgtggcctctgccaccaagaagttctcctacaagctggtgaagacgggcagcgtggtcctcacagccagcactgatctccgcggctatgtggtggggcaggcactgcagctgcatgccgacgttgagaaccagtcaggcaaggacaccagccctgtggtggccagtctgctgcagaaagtgtcctataaggccaagcgctggatccacgacgtacggaccattgcggaggtggagggtgcgggcgtcaaagcctggcggcgggcgcagtggcacgagcagatcctggtgcctgccttgccccagtcggccctgccgggctgcagcctcatccacatcgactactacttacaggtctctctgaaggcgccggaagctactgtgaccctcccggtcttcattggcaatattgctgtgaaccatgccccagtgagcccccggccaggcctggggctgcctcctggggccccacccctggtggtgccttccgcaccaccccaggaggaggctgaggctgaggctgcggctggcggcccccacttcttggaccccgtcttcctctccaccaagagccattcgcagcggcagcccctgctggccaccttgagttctgtgcctggtgcgccggagccctgccctcaggatggcagccctgcctcacacccgctgcaccctcccttgtgcatttcaacaggtgccactgtcccctactttgcagagggctccggggggccagtgcccactaccagcaccttgattcttcctccagagtacagttcttggggctacccctatgaggccccaccgtcttatgaagcagagctgcggcggcgtggaacccagcctgacccctgagagctgaccccgtgctgccttctccaggcaggcctggcctctgccctgggactggggcgcccagggcctcgtgccttctctcttggcctagcctggcccactcaggacctgcccagcctctgccagctcctctggcatccgccctcttctccctggggctggggtgggggtggcagggagctgggacctggagagacaactccntgtaaataaaacactttatttgtaaaaaa

SEQ ID NO: 258006 - DNA, 971 bp, Homo Sapiens
aggtagcgaggcctgggtggcgaattcggcacgagggcggcgggcgcagtggcacgagcagatcctggtgcctgccttgccccagtcggccctgccgggctgcagcctcatccacatcgactactacttacaggtctctctgaaggcgccggaagctactgtgaccctcccggtcttcattggcaatattgctgtgaaccatgccccagtgagcccccggccaggcctggggctgcctcctggggccccacccctggtggtgccttccgcaccaccccaggaggaggctgaggctgaggctgcggctggcggcccccacttcttggaccccgtcttcctctccaccaagagccattcgcagcggcagcccctgctggccaccttgagttctgtgcctggtgcgccggagccctgccctcaggatggcagccctgcctcacacccgctgcaccctcccttgtgcatttcaacaagtgccactgtcccctactttgcagagggctccggggggccagagcccactaccagcaacttgattcttcctccaaagtacagttcttggggctacccctatgaccccgctttcttcccccagaaaccccaccgccttatgaacagagctgcggcggcgtggaaccccagcctgaccccttgagagctgaccccgtgctgccttctccaggcaagcctggcctctgccctgggactggggcgcccagggcctcgtgccttctctcttgggctagcctgggccactcaggacctggccagcctctgccagctcctctggcatccgccctcttcttcctggggcctggggtgggagggggcaaggaaactggggaccggcaaaggaaactccctgtaaataaaaccaccctcctttgcagacaaaaaagaaatttaaacacggccctccccaaccaactccatttgaattgtttacgctacggcaaaagaacgcacgacac

SEQ ID NO: 258007 - DNA, 2036 bp, Homo Sapiens
  misc_feature (36)..(36): n is a, c, g, or t
cgcggcccggccatggagtcctacgacatcatcgcnaaccagcctgtggtcatcgacaacggttcgggggtgattaaagctggctttgcaggagaccagattcccaaatactgtttcccaaactatgtcgggcggccgaagcacatgcgggtgatggctggagccctggagggggacctcttcatcggaccaaaagcagaggagcaccgggggctgctgaccatccgctaccccatggagcacggcgtggtgcgagactggaacgacatggaacgcatctggcagtacgtctactccaaggatcagctgcagaccttctcggaggagcatcctgtgctcctcacggaggccccgctcaacccgagtaagaaccgggagaaggcggcagaggtgttctttgagaccttcaacgtgccggccctgttcatctccatgcaggctgtgctcagtctgtacgcaacaggacacacgacaggagtggttctagactcaggggacggggtcactcatgctgtgcccatctatgagggctttgccatgcctcactccatcatgcgggtggacattgccggccgcgacgtctcccgctacctccgactcctgctgcgcaaggaaggggttgacttccatacctcggctgagtttgaggttgtccggacaatcaaagagcgagcgtgctacctgtccatcaacccacagaaggatgaggctctggagacggagaaggtgcagtacacgttgccagacggcagcacgcttgatgtggggcctgcacgattccgggcccccgagctgctgttccagccggaccttgtgggggatgagagtgaggggctccatgaggtggtggccttcgccatacacaagtccgacatggacctgcgccggacgctgttcgccaacatcgtgctctcaggtggctcaacgcttttcaaaggcttcggagaccgattactcagtgaagtgaagaagcttgccccaaaggatatcaaaatcaagatctcagccccgcaggaacggctgtactccacatggattggcggctccatcctggcctcgctggacacttttaagaagatgtgggtgtccaaaaaggagtatgaagaggatggctcccgtgctattcatcgcaaaactttctagtgcccaaggagggcggggcatgttgggacgaaggggagggaggggagacagagcctttaaccctttttggtcttggctcgtatactaggcttagggtcccctgcatgccctgaacccctgggtgggtggcacagcagtgcccccctgcagccttcccctctacacaggacatgcacacacaagtaacattgagctgcatggacaggagccttgagctggcgtgtgggaattgagcgccatgtcaggctgttgtgggtatccccctggcagggccagctaggcctgtggttccctgctccgactctcagggctgcctccctgagctccagggccagaatgcctggatgcctgggtagccagtttggggagtgggctgcaaggggcagccagcagctcccactggtgtgtcactgcatccattgccacctcctgttcgtgacctgacagggtgacacagcccctttcacactctgtcctcctatcttcctgggtagatgccctggtgtagggctgagtactgaatggtcttccatccccagcaagggggtgcagcccagggtcaggcccttcagagccagggcagaggacgcacggtggctagagccgctgcactatccttttcagagcacttcatccacttgctcctccctctaccctcggcaccctgggtgggaaagggttgatgctcatcatttattgaggggaagccacttaataaggagtcagacctaaaagggggtgggggacattttcttacctcacccaagaaagaggtcgtcacttttgctgtggccagggccccacctccctctctcagatatgtacaataatttaacacggttgcctgaaaaaaacttttgtaaatcattatagtaataattatggacaaggcc

SEQ ID NO: 258008 - DNA, 777 bp, Homo Sapiens
  misc_feature (24)..(24): n is a, c, g, or t
  misc_feature (155)..(155): n is a, c, g, or t
ggggaacccatgtccctgcccccnaccaaagcccctgtcctgaaagtggaagcttcccccgccctgtgctcccctcccacagtccccggaaaagcccagcggcaaaaggcagctttgtccccagctctgcccaccctccctgcctcacagtggtncagggcccctcaggggcaaggacggcagggattggaacgagggctctggaaggactgttcagccctatgcctaagacccctatgctggggacactacaggcacacacaggaatagcagggccaccctcagagctcacacatccacgaacaaatgaaggctgaggaggtttctaaacctaaagtccatgagtgtgcacttcaatccaggaaggtcgggacttccttcagtttcaaaaaataaattctcccttccggtttggactgttgcaggctcgaggccattcaggagttgtccaccacctggtggggcagtgtgacagaggggccattggggaaggtggctagcttatcccgccccttcaagaagaaggtcagcagctcccccttccccttcacaaagatggggcctcgcctcacaaagcggaagccgtactctcggaggatgacttgggtttcttctaccacctgaatgttgcccatgacccccgtggactccatcctgctggctacattgactgtattgccccagatgtcgtagtgtggtttccgggctccgatgaccccagccagaaccccgcctttgttcatgcctatgcgcagcatgaagttattgaaggactgg

SEQ ID NO: 258009 - DNA, 1511 bp, Homo Sapiens
caaaccggaaggagaatttattttttgaaactgaaggaagtcccgaccttcctggattgaagtgcacactcatggactttaggtttagaaacctcctcagccttcatttgttcgtggatgtgtgagctctgagggtggccctgctattcctgtgtgtgcctgtagtgtccccagcataggggtcttaggcatagggctgaacagtccttccagagccctcgttccaatccctgccgtccttgcccctgaggggccctgaccactgtgagcaggagggtggcagagctgggacaaagctgcctttgccgctgggctttccgggactgtggagggagcacaggcggggaagctccacttcagacagggcttggtggggcaggacatggctcccattttgaagggaggtctccatgtggtccgagtgaggtgagacggccctcgtcctggtgttcctgatcatcttgaaaggttcttctggaactcctgtccccttagtcatgagaacagaaagtgcaatatttcctttcacctggcaggggaggggggatttatttctctgatgtgctcccagtgcagtgaaaacaatctattaggagaccagactcatatccaacttttctccttttcttgtaaatgaggcaaacacttgatgcaagggcttcgtacagaacagagtttcatgagatgctcgttgctcctcccatgaagtggataatacttccactccttgacatgtcacggtgacgtcagtgggaagagttgctgtgaggtccttatacagcaatctagcacagaacgggaaggactgaccccctggatccagtttgtaagtaaatgacagcaagttacacagtgggtttctctgcaagggcccagtcaggagggctgcaaagtcactctgaagccggtctgcctggtacttcctcccagagtaagcattcaggtactcgcagagactgaacaggaagtgctggatgttggtctgtaaatattttgcagctatctcttccaggggaatgaagactgggactgaatggtgatgtatccggagtggtttctgtatgacaaggtccacaaaataggaatcccaataggttcccctcaaaaagcagtactgatgcagacacaaactcctcggctggtcagtttaccactgaggcctgtaaaatgatatgcctgcagaatggctttcacattttccaatttctcttccaatgcttcttgctcattgatctccactgtttggttgggttctacattggcaatacatgctttcacggctggctcgccggtgccgcaccacagccctcagctcatctcgcagacgccttagtttatgaatcttggttccaagagcaccttcctgggcctgcacgctctgcagctcttcagactgtttacgggatctgctcacttgggtctctagcctttccaagtgagctaaaacacccaggccagaagcgagaattcccgccatccacgtcttcaaaaccaaaccaaccggtcccccc

SEQ ID NO: 258010 - DNA, 475 bp, Homo Sapiens
  misc_feature (24)..(24): n is a, c, g, or t
  misc_feature (30)..(30): n is a, c, g, or t
  misc_feature (46)..(46): n is a, c, g, or t
  misc_feature (69)..(69): n is a, c, g, or t
  misc_feature (79)..(79): n is a, c, g, or t
  misc_feature (107)..(107): n is a, c, g, or t
ctgtgagcaggaggttggcagagntggganaaagctgcctttgccnctgggctttccgggactgtgganggagcacagncggggaagctccacttcagacagggctnggtggggcaggacatggctcccattttgaagggaggtctccatgtggtccgagtgaggtgagacggccctcgtcctggtgtcctgatcatcttgaaaggttcttctggaactcctgtccccttagtcatgagaacagaaagtgcaatatttcctttcacctggcaggggaggggggatttatttctgaaagaaaaatatataaacagatcttctacatttatatttttaatcttctgttaaatacactttccgatattgccttgccttttgagctcttgctacagtcgcctttgctactgctttaagagaatttacaggtattgataaagaacaagactgttttattaaaagctttattcaacttgaa

SEQ ID NO: 258011 - DNA, 477 bp, Homo Sapiens
  misc_feature (22)..(22): n is a, c, g, or t
  misc_feature (64)..(64): n is a, c, g, or t
cccaaccataagggtccttagncaaaaggcctgaaaaatcccttcccaaaacccctccgttccnaaacccctgcccgtccccttttcccctgaagggcccctgaaccactgtgaaccaggagggtggcaaagctgggacaaaagctgcctttgccgctgggctttccgggactgtggagggagcacaggcggggaagctcccacttcagacagggcttggtggggcaggacatggctcccattttgaagggaggtctccatgtggtccgagtgaggtgagacggccctcgtcctggtgttcctgatcatcttgaaaggttcttctggaactcctgtccccttagtcatgagaacagaaagtgcaatatttcctttcacctggcaggggaggggggatttatttctctgatgtgctcccagtgcagtgaaaacaatctattaggagaccagactcatatccaacttttctctcgtgcc

SEQ ID NO: 258012 - DNA, 990 bp, Homo Sapiens
  misc_feature (71)..(71): n is a, c, g, or t
  misc_feature (214)..(214): n is a, c, g, or t
  misc_feature (224)..(224): n is a, c, g, or t
  misc_feature (242)..(242): n is a, c, g, or t
  misc_feature (246)..(246): n is a, c, g, or t
  misc_feature (249)..(249): n is a, c, g, or t
  misc_feature (572)..(572): n is a, c, g, or t
  misc_feature (664)..(664): n is a, c, g, or t
  misc_feature (964)..(964): n is a, c, g, or t
tctaaaagccaatttaataaattaataaacgcatgccagaaaaaataccaaattacaactgaaaaccaatnaataatttaacagaaaatgctgtgttgtacactttttattggtatggataacctttattaaagtaacaaatctgaaaacacattttgcttttgctggaaagaaagtactatgttagagaagaactaagagaaaccagagatcntttgtgaaangtaggcatgtgatatggnttanggnaatgggacagccagaggtgctgttttatccatttgtgtgtgcgtgtttgtacaagcatcagaaaccaatgacatagaccccaaaagcaaagtcacaacaggcttactctgtgaaacatgctggattacaagcacagactacccaggacgcagaggcggtgcaggcgcaggtttgttgtttcttctgtatggggtttccttgccagatagggggctaatcatgcaatagcttgagtttctctgaacgtgataaacacccaggattactagaaccagaaagcgtgtgttcactgttttacaagacagctgagcggtgctacaaanacaacagaaagttccttcactttaatctggttatatgcccaaacctctaatcaagaaataatgcagctacaggagcaaattaaattactatnagacattccttcatctgtgaaacatttcttttcccctcaaattaaaaatttaaaataaaatgtcttcgtttttgataagcagctccaccaccagtctctgataccgtatatcattcaatgcagccatggcgtctagttctggagatctcataagggtgggtccaaagacgattccaaggttctctgcattcataagattctccttttcgtggagggtcactctctttagatgtgccatgaggtaccggagggtttcgcagtgagcaggtggcagtagtttcagtgcttcatgaagggttncaattgctcatccggttccataattt

SEQ ID NO: 258013 - DNA, 498 bp, Homo Sapiens
  misc_feature (493)..(493): n is a, c, g, or t
aaatgcgaacttaggctgttacacaactgctggggtctgttctcgccgcccgcccggcagtcaggcagcgtcgccgccgtggtagcagcctcagccgtttctggagtctcgggcccacagtcaccgccgcttacctgcgcctcctcgagcctccggagtccccgtccgcccgcacaggccggttcgccgtctgcgtctcccccacgccgcctcgcctgccgccgcgctcgtccctccgggccgacatgagtggggaccacctccacaacgattcccagatcgaagcggatttccgattgaatgattctcataaacacaaagataaacacaaagatcgagaacaccggcacaaagaacacaagaaggagaaggaccgggaaaagtccaagcatagcaacagtgaacataaagattctgaaaagaaacacaaagagaaggagaagaccaaacacaaagatggaagctcagaaaagcataaagacaaacataaagncagag

SEQ ID NO: 258014 - DNA, 940 bp, Homo Sapiens
tggcctactggtccactccccccaccccacttcgcctgccgcggtcgggtccgcggcctgcgctgtagcggtcgccgccgttccctggaagtagcaacttccctaccccaccccagtcctggtccccgtccagccgctgacgtgaagatgagcagctcagaggaggtgtcctggatttcctggttctgtgggctccgtggcaatgaattcttctgtgaagtggatgaagactacatccaggacaaatttaatcttactggactcaatgagcaggtccctcactatcgacaagctctagacatgatcttggacctggagcctgatgaagaactggaagacaaccccaaccagagtgacctgattgagcaggcagccgagatgctttatggattgatccacgcccgctacatccttaccaaccgtggcatcgcccagatgttggaaaagtaccagcaaggagactttggttactgtcctcgtgtgtactgtgagaaccagccaatgcttcccattggcctttcagacatcccaggtgaagccatggtgaagctctactgccccaagtgcatggatgtgtacacacccaagtcatcaagacaccatcacacggatggcgcctacttcggcactggtttccctcacatgctcttcatggtgcatcccgagtaccggcccaagagacctgccaaccagtttgtgcccaggctctacggtttcaagatccatccgatggcctaccagctgcagctccaagccgccagcaacttcaagagcccagtcaagacgattcgctgattccctcccccacctgtcctgcagtctttgtcttttcctttcttttttgccaccctttcaggaaccctgtatggtttttagtttaaattaaaggagtcgttatcgtggtgggaatatgaaataaagtagaagaaaaggccatgaa

SEQ ID NO: 258015 - DNA, 1022 bp, Homo Sapiens
  misc_feature (226)..(327): n is a, c, g, or t
  misc_feature (333)..(343): n is a, c, g, or t
  misc_feature (483)..(494): n is a, c, g, or t
  misc_feature (520)..(530): n is a, c, g, or t
  misc_feature (567)..(578): n is a, c, g, or t
ggggtttcaagatccatccgatggcctaccagctgcagctccaagccgccagcaacttcaagagcccagtcaagacgattcgctgattccctcccccacctgtcctgcagtctttgtcttttcctttcttttttgccaccctttcaggaaccctgtatggtttttagtttaaattaaaggagtcgttatcgtggtgggaatatgaaataaagtagaagaaaaggcnnnnnnnnnnnnnnnnnnnnnnnnnnnnnnnnnnnnnnnnnnnnnnnnnnnnnnnnnnnnnnnnnnnnnnnnnnnnnnnnnnnnnnnnnnnnnnnnnnnnnngcccannnnnnnnnnnaacccacaaataacaaaccacacccccttcctgatcgaaccgccccgcacccagtaatgttgtggggggcgggccccttcgccccccaaaaaaaatttttccaacagacttttcgttggggcgggcggcccccccacagnnnnnnnnnnnncacggggatccattggctttctcccnnnnnnnnnnnccccgctataaacaatgcgtgtttgttcctctccccnnnnnnnnnnnnccagcgccggggcgggaaacccaagcggtcatacacaaaacactcccccacggggggctttggcgcgggcttctacccgggagctttctcacaaggggggacccccatcgcgcgagcgcctaaataataagtatcatatccccccccgcgctctggtcgccttttatcgcagaacaaggaggagggtgatatacattatataaacaatctttcccgccccacccaagaaaaaactctactcccacagagggtcgtgataataaacactggataccccgcccggcgcccttcatccccacctagtgggtcacatcgggtggaataaaatactcccccccacgcggtgggaagaaacgagcgcgcgaaacaaagaacagactctcctctttatgatcgccggcgctttatgcaactaaacaagccgggggcacgccctcctctccc

SEQ ID NO: 258016 - DNA, 1536 bp, Homo Sapiens
  misc_feature (656)..(656): n is a, c, g, or t
  misc_feature (664)..(664): n is a, c, g, or t
  misc_feature (674)..(675): n is a, c, g, or t
  misc_feature (678)..(678): n is a, c, g, or t
  misc_feature (683)..(684): n is a, c, g, or t
  misc_feature (686)..(687): n is a, c, g, or t
  misc_feature (693)..(693): n is a, c, g, or t
  misc_feature (696)..(697): n is a, c, g, or t
  misc_feature (700)..(700): n is a, c, g, or t
  misc_feature (702)..(702): n is a, c, g, or t
  misc_feature (705)..(705): n is a, c, g, or t
  misc_feature (707)..(707): n is a, c, g, or t
  misc_feature (712)..(712): n is a, c, g, or t
ctctccctctgtccctctgtccctctgaccctgcactgtcccagcaccatgggacccacctcaggtcccagcctgctgctcctgctactaacccacctccccctggctctggggagtcccatgtactctatcatcaccccgaacatcttgcggctggagagcgaggagaccatggtgctggaggcccacgacgcgcaaggggatgttccagtcactgttactgtccacgacttcccaggcaaaaaactagtgctgtccagtgagaagactgtgctgacccctgccaccaaccacatgggcaacgtcaccttcacgatcgccagccaacagggagttcaagtcagaaaaggggcgcaacaagttcgtgaccgtgcaggccaccttcgggacccaagtggtggagaaggtggtgctggtcagcctgcagagcgggtacctcttcatccagacagacaagaccatctacacccctggctccacagttctctatcggatcttcaccgttaaccacaagctgctacccgtgggccggacggtcatggtcaacattgagaacccggaaggcatcccggtcaagcaggactccttgtcttctcagaaccagattggcatcttgcccttgtcttggagacattccggaactcgtcaacatgggncagtgagnagatgcgagnntcntctgnnanntgcggnacnnaananatntnccctnagtttgaagagaaggagtacgtgctgcccagtttcgaggtcatagtggagcctacagagaaattctactacatctataacgagaagggcctggaggtcaccatcaccgccaggttcctctacgggaagaaagtggagggaactgcctttgtcatcttcgggatccaggatggcgaacagaggatttccctgcctgaatccctcaagcgcattccgattgaggatggctcggggaaggttgtgctgagccgaaaggtactgctggacggggtgcagaacccccgagaagaagacctggtggggaagtctttgtacgtgtctgccaccgtcatcttgcactcaggcagtgacatggaccaggcagagcgcagcgggatccccatcgtgacctctccctaccagatccacttcaccaagacacccaagtacttcaaaccaggaatgccctttgacctcatggtgttcgtgacgaaccctgatggctctccagcctaccgagtccccgtggcaatccagggcgaggacactgtgcagtctctaacccagggagatggtgtgggcaaactgagtttgaacacacactctagtcagaagcccttgagcattaccggtgcgcacgaagaagcaggagctcttgtaggtagagcaggctaccaggaccatgcaagttttgtcctacagcaccgggggcaactccaacatttacctgcatattttagtgttacgtacagagcttagaccccgggtagcacttgaactgaaatttcctcctgcgaatggtcccgcgcccacggaggccaagatcccgttctaccactaacccgg

SEQ ID NO: 258017 - DNA, 1044 bp, Homo Sapiens
  misc_feature (982)..(982): n is a, c, g, or t
  misc_feature (1018)..(1018): n is a, c, g, or t
  misc_feature (1025)..(1025): n is a, c, g, or t
  misc_feature (1028)..(1028): n is a, c, g, or t
  misc_feature (1042)..(1042): n is a, c, g, or t
ctctccctctgtccctctgtccctctgaccctgcactgtcccagcaccatgggacccacctcaggtcccagcctgctgctcctgctactaacccacctccccctggctctggggagtcccatgtactctatcatcacccccaacatcttgcggctggagagcgaggagaccatggtgctggaggcccacgacgcgcaaggggatgttccagtcactgttactgtccacgacttcccaggcaaaaaactagtgctgtccagtgagaagactgtgctgacccctgccaccaaccacatgggcaacgtcaccttcacgatcccagccaacagggagttcaagtcagaaaaggggcgcaacaagttcgtgaccgtgcaggccaccttcgggacccaagtggtggagaaggtggtgctggtcagcctgcagagcgggtacctcttcatccagacagacaagaccatctacacccctggctccacagttctctatcggatcttcaccgtcaaccacaagctgctacccgtgggccggacggtcatggtcaacattgagaacccggaaggcatcccggtcaagcaggactccttgtcttctcagaaccagcttggcgtcttgcccttgtcttgggacattccggaactcgtcaacatgggccagtggaagatccgagcctactatgaaaactcaccacagcaggtcttctccactgagtttgaggtgaaggagtacgtgctgcccagtttcgaggtcatagtggagcctacagagaaattctactacatctataacgagaagggcctggaggtcaccatcaccgccagtttcctctacgggaagaaagtggagggaactgcctttgtcatcttcgggatccaggatggcgaacagaggatttccctgcctgaatccctcaagcgcattccgattgaggatggctcgggggaggttgtgctgagccgaaagtaatgctggacggggtganaaccccgagcaaaaacctggtggggaagtcttgtangtgtctncancgtcatcttcactnag

SEQ ID NO: 258018 - DNA, 1489 bp, Homo Sapiens
  misc_feature (44)..(350): n is a, c, g, or t
atggacagccccgagtttcacctgtaaaaggcaggattatttgnnnnnnnnnnnnnnnnnnnnnnnnnnnnnnnnnnnnnnnnnnnnnnnnnnnnnnnnnnnnnnnnnnnnnnnnnnnnnnnnnnnnnnnnnnnnnnnnnnnnnnnnnnnnnnnnnnnnnnnnnnnnnnnnnnnnnnnnnnnnnnnnnnnnnnnnnnnnnnnnnnnnnnnnnnnnnnnnnnnnnnnnnnnnnnnnnnnnnnnnnnnnnnnnnnnnnnnnnnnnnnnnnnnnnnnnnnnnnnnnnnnnnnnnnnnnnnnnnnnnnnnnnnnnnnnnnnnnnnnnnnnnnnnnnnnnnnnnnnnnnnnnnnnaggcaggattatttgttaagcgggttgcagtgttctaccagaccccccaccctcaacccaagcccctggtctcactgggacttggccactgccaggagcgtctggcccttcacggcttcaggcccagcacagcgcgtgtcattctgggaaaacatcttgtctttttgggcctgaagccaacgatagaggtcgctcaggttctggtcacagatccaggggttgccggagatgtcgaagccatcccgcatgtcccagtttggctgccctagggatgcccagagaccctcgggcacgctggccagtgagttattggagaggtccagcatgtccagctgccgcaggccctggaaggcaccggctgccaccctggccagcttgttgccgttcaggaagaggtagcgcaggtccggctgcggcaagaggagatcttttcccagtacttgcaatttgttgccttctagatgtagccgttctaattgcagcggacccctcaggaggtcaggtggcaaggtctccaactggttctccccaaggtcaagggtgcgcaggagggtgaagttggccagcagcccggggggcagtttccggaggcggttcccagacaggtccagatgccccagagctttcaggccgtgtagccacgagacctccaggacctccagctggttttctttcaataccagggtgtccagggtggctgaggcctggaagaggcccgagggcagcccggtcagggcgtttcgggttagatccagcaccctcagctgcggcactggccgcaggaattcgggcgagaggctttccagcccattgctggagaggtgcaattcttggagcttagaggcgccctggaggaggttggctggcaggtgggtcaggttgaagaattccacggccaggtgcacggtgtcggctggcaggtagccggggatttcggcaggtggttgacaggagatggagctgccatggtctgagcggaacacctggcagtctttggggctcagggtgaccccccaggctgaggctgccaacagcagcagcaggaacagagttctagaaacatggggttgaatgccccctgggctttttggtcgctgtctgctccaagaggacatggtagctctgctcttttgcttcta

SEQ ID NO: 258019 - DNA, 1096 bp, Homo Sapiens
  misc_feature (987)..(987): n is a, c, g, or t
  misc_feature (1068)..(1068): n is a, c, g, or t
atcccaatggccccagggaaaaatgagggtctcttctcattgaccagaatcgaaagctgaggccagggagaagccagaacctggccagggccacacagcagtgaggcagtggaggaggcctcctgctccccagctcttgtctcctgagctctgagtggctggggctggggcttggttgccagggaagggtgggcagatggctagagagatcctggagcctcaggggagcaagttcaaccttgtggggagccctgaccccaggagagaggcaacagggttcacaccccagccgggccacgtgacacaggacatatcatgagcgtcttgttgttcatcgagcactcagtagaggtggcccatggcaaggcgtcctgcaagctctcccagatgggctacctcaggatcgctgacctgatctccagcttcctgctcatcaccatgctcttcatcatcagcctgagcctactgatcggcgtagtcaagaaccgggagaagtacctgctgcccttcctgtccctgcaaatcatggactatctcctgtgcctgctcaccctgctgggctcctacattgagctgcccgcctacctcaagttggcctcccggagccgtgctagctcctccaagttccccctgatgacgctgcagctgctggacttctgcctgagcatcctgaccctctgcagctcctacatggaagtgcccacctatctcaacttcaagtccatgaaccacatgaattacctccccagccaggaggatatgcctcataaccagttcatcaagatgatgatcatcttttccatcgccttcatcactgtccttatcttcaaggtctacatgttcaagtgcgtgtggcggtgctacagattgatcaagtgcatgaactcggtggaggagaagagaaactccaagatgctccagaaggtgggtcctgccgtcctacggagggaagccctgtctttgccatcgaagaccccagagggggcncccagcaccacccccattattcagagggtgttgaccttcgccaggggcccagccccagttttgggaaggggtgggagtttncttcataatcttgcttttttttgctttt

SEQ ID NO: 258020 - DNA, 2342 bp, Homo Sapiens
  misc_feature (1282)..(1282): n is a, c, g, or t
  misc_feature (1731)..(1740): n is a, c, g, or t
cgctatatgcttaccgctggacttactgcctttgcagcttggccatttctcactcggctgtggactcgagcaaagatgacctcactgagttggactttcttctctttgctcctggcagtgttcccactgatgccggttgtaggtcgaaagccagacatctctctagtgatgggtgcaggcttgctggttcttctgttatccctgtgtgttgtaacatctctcatgaaaagaaaagatagctttataaaggaagagctattggtacatctgttacaggtgctgagcacagtgctctccatgtatgttgtgtatagcactcagagtagtctactcaggaagcaaggactgcctctcatgaatcaaattattagctgggcaacattagcctcttccttggttgtgccactactgagttctccagttctctttcagcgattgttcagcatacttctttcattgatgtcaacctacctacttctaagcacagggtatgaagctctctttccactagtgttgtcttgtttgatgtttgtctggataaacatagaacaagaaactctacaacaatctggtgtttgctgtaaacaaaagctcaccagtatccagttctcttataatactgatataactcagtttcgacagctatatctggatgacatccgtagggcctttttccttgttttcttcttagtgacagcattttttggaactggaaatatagcttctattaacagctttgatcttgcctctgtctattgctttctgactgtgttcagtccttttatgatgggagccctgatgatgtggaagattttaatcccctttgttcttgttatgtgtgcttttgaagcagttcagttgactactcagttatcgtcaaaaagcctttttctcattgttctcgtcatatcagacattatggctttgcattttttcttcttggtcaaggattatggcagctggcttgatattgggacaagcatcagccactatgtgattgtcatgtccatgaccatctttttggtgttcctcaatggcctggcccagctgctcacaacgaagaaactcagactatgtggcaaacccaaaagtcacttcatgtgaggttgctgaagcaccattcagcatctggatcctgattctccttttaagctaaaatctcatcaaggcttcaataagaagatggatatggatatatagtatattctactcctgtaaggaaaatggtatttggaattccgaattgacaggttatctggaacaaaggagcttcttttttttnctaggttttgcaggcatgaaatagtgattatatctgtggaaaagcataggaaggcattctcctttttcatttttttcctttggctggcagctcttcccagtgatgttgagagcacctgcagcaatctggtccccagtcgcacaacttcccacatacccagaggagagcatatgcctgtgggggcagtgctgatggcatccagagtcattgctgtggctgagctggaaggaaatcaccaggtgccaccgtcaatatttatcagctttcagcactggttttgttagacagtcagggtgtattatttcaagagcttcaataaaaaaagtgtttgcaggtatttgtcatatttctttagtatgcaataatgctatcttatcctttttagtgctatttctcaggttttctcagtcaaccagctagatgcatgtgatgcatgtctatccttcacnnnnnnnnnncatttctggattttcctgggatttctgacaacacaaaagtagaaagtgcttggtatttctgtcttatacataggaaaacatttaaaataaatagtttttaattgtaggctcaacatctgttaccccatagctttttcgtatatggtttctttccctttgaatttcttttcactgtcatctattattttaacaggagttaaaatgaactcctgttaaactttctgacaatatcataagaattcatattaaaggtgttattctttctggttgtgagattctagcacaaaggcctaaaatcatcaaattagatttccatttgtaaacaaattctaatgggcaaaatatcttgagagcagtttttatatggattatccataaaatgacctttacatatccctgcagagttggccttttgcccgtggtgtgctagtagctttggctgatgctaagctttcctggtatgcgccctatttttaagaagtaattgcttttgaattaagttatagcattactaattcatgttaatgactaggaaaccctctgtaatttacaagatttttcaaattggtggggagtgaataaatacaatttaaaagagtcag

SEQ ID NO: 258021 - DNA, 1112 bp, Homo Sapiens
  misc_feature (1)..(1): n is a, c, g, or t
  misc_feature (3)..(3): n is a, c, g, or t
  misc_feature (7)..(7): n is a, c, g, or t
  misc_feature (16)..(16): n is a, c, g, or t
  misc_feature (28)..(28): n is a, c, g, or t
  misc_feature (37)..(37): n is a, c, g, or t
  misc_feature (40)..(40): n is a, c, g, or t
  misc_feature (48)..(48): n is a, c, g, or t
  misc_feature (111)..(111): n is a, c, g, or t
  misc_feature (1099)..(1099): n is a, c, g, or t
  misc_feature (1103)..(1103): n is a, c, g, or t
ngngggngcagcagangtgaaagctgcntcagagacnccncatgaagntggagctcgaacccgcgctccaagtacgagggctgcagaccttcgcccggacgtggcccgcanccccgtgcagccagcccgggcccccttccgccggcctgggcccctcgtcccaggcaaggtggccgccaccagcgtcatcacaatagtaaagtccaagacggatgcccgatcgtagggacgcgcgtctgcccaggcgggtctttgcggggccactaggcacatggcgaatttggctgccctgtccctctgtttccttctcttctctttcctccctctcttccccacccttctctcttccctgcaaagcacaacctgtaccccaggggcgccgggctgagcccctttgatctcgtaattgtcgtcgtgtgttttgtatgttgggattggtcagttcggcggtgacgtgggtcgccccaaccccttttgtacccagggccatgcaggcttggagtccagagttggtgctgtggggaacaaactagagagagtagccggagagagaaggagcaggcacgctgggcctcgcgtctccccgaccagtgacgcgctcccagtgttccctccactcccgagtggccacaggctcgcgggctgggaaggattcactctctttagccccaggggagcagctcagcttaccccagcatgaagagatgggctctgctctgagagtagggcgggcttgaaggccctgatgggtggaccaccagcctgggcgcagtggtgctgggggcgtgcagctgggcccaggggctgtgcactcaggcctgacccgttgcactgaacaagaccaaatcgctggttgtgcgcttaacgtgagggtgggtccagtgtgccctgcgatgggtcccgtgtcactgtttacatgacctatttgtgtggttatatagccctttatttaaaagagagaagttccttttacaaagttattaaattaattatatgtttaaaagttaaagaaaaaagagctgcagagtatttataaaactgtcttttagaaaaaaaacaagcaagaagaccatttgaccatatgaatggaaaagggaanaaantataataga

SEQ ID NO: 258022 - DNA, 993 bp, Homo Sapiens
  misc_feature (3)..(3): n is a, c, g, or t
  misc_feature (7)..(7): n is a, c, g, or t
  misc_feature (15)..(15): n is a, c, g, or t
  misc_feature (19)..(19): n is a, c, g, or t
  misc_feature (35)..(35): n is a, c, g, or t
  misc_feature (41)..(41): n is a, c, g, or t
  misc_feature (89)..(89): n is a, c, g, or t
  misc_feature (237)..(237): n is a, c, g, or t
  misc_feature (265)..(265): n is a, c, g, or t
  misc_feature (581)..(581): n is a, c, g, or t
ccncatntcaaacgncttngagctctgagccacancgtccnagggctcttattttcctctcccttgtcgccttcactctacaggagggnaagggcccagggagggattctccctttatcatcacctcagtttccttgaattatatttggggcaaagattgtcccctctgctgttctctggggccgctcagcacagaagaaggatgagggggctcagcggggggagctggcaccttcntggagcctccagccagtcctgtcctccntcgccctaccaagagggcacctgaggagactttggggacagggcaggggcagggagggaaactgaggaaatcttccattcctcccaacagctcaaaattaggccttgggcaggggcagggagagctgctgagcctaaagactggagaatctgggggactgggagtgggggtcagagaggcagattccttcccctcccgtcccctcacgctcaaacccccacttcctgccccaggtggcgcggggcactttgtacaaatccttgtaaataccccacaccctcccctctgcaaaggtctcttgaggacgtgccgctgntcactacggtttttaagttattacaccccgaccctcctcctgtcagccccctcacctgcagcctgttgcccaataaatttaggagagtccccccctccccaatgctgaccctaggattttccttccctgccctcacctgcaaatgagttaaagaagaggcgtgggaatccaggcagtggtttttcctttcggagcctcggttttctcatctgcagaatgggagcggtgggggtgggaaggtaaggatggtcgtggaagaaggcaggatggaactcggcctcatccccgaggccccagttcctatatcgggccccccattcatccactcacactcccagccaccatgttacactggactctaagccacttcttactccagtagtaaatttattcaataaacaatcattgaccc

SEQ ID NO: 258023 - DNA, 1077 bp, Homo Sapiens
  misc_feature (7)..(7): n is a, c, g, or t
  misc_feature (17)..(17): n is a, c, g, or t
  misc_feature (23)..(24): n is a, c, g, or t
  misc_feature (39)..(39): n is a, c, g, or t
gtacaanttcatgtgtntaaaanncttcacacgggcaanaacctcaccgtgcacttcgcaagagcaccagttcaagtgccctcagggcatccccgttttcggtacaaggaacatgaagatggctatatgcggctgcagctggttcgctacgagagtgtagagctgacacagcaactgctgcggcaaccacaagagggatcgggcctgggaacgtcgctgaacgagagcagcctgcagggcattattctagaaacagtgccaggggagccaggacgtaaggaagaggaagaggagggcaagggtagcgaagggacagccctctcagcctctcaggacaaccccagttctgtcatccacgtggtgaatcagaccaatgcccaaggccagcaagagattgtctactatgtgctgtctgaagccccaggggagcctcccccagcccctgagccaccttcagggggcatcatggaaaagcttcaaggaatagcttaggagccagagatccagatggtttgaaggccgcagagccagaccatttcttccccaggtcctgaagtttgagccaggcaagtggcagtgcccctagtgggcagccgttgccaatggatgcctttaggagtggtgccgagagcagtgtggtccactctggcctgggtttgcatcattctgcagactctaaagacttcccttttctgccagactacattttgtggggagcctgaggactctggatttctttgaaggggatccctggatgtgtgtgttcttgttaaagaggctgttatcaggcttaaccataaccctcaagatctgcttgacagtgattaaatccttagctcacatccattcccatctttcgggctccttaggcccaaggatggcatgtgactggtccctgcaagggtcctttctttgtcaccagccaaggcattgataaccaagtagccattttcctcttaaggtttcctctacaaccccaaggactttcatgattatcctcagggacaggattggaggcattgagcgtgtttattaacaaattgtttttggtaataaaataaatgcttggactcttaa

SEQ ID NO: 258024 - DNA, 1388 bp, Homo Sapiens
  misc_feature (90)..(386): n is a, c, g, or t
  misc_feature (389)..(402): n is a, c, g, or t
acatattaggcactcaaaaaagtttatggacaaatagaatagctgttggacaaataaacatagacattaactagagtaacaatcagtttnnnnnnnnnnnnnnnnnnnnnnnnnnnnnnnnnnnnnnnnnnnnnnnnnnnnnnnnnnnnnnnnnnnnnnnnnnnnnnnnnnnnnnnnnnnnnnnnnnnnnnnnnnnnnnnnnnnnnnnnnnnnnnnnnnnnnnnnnnnnnnnnnnnnnnnnnnnnnnnnnnnnnnnnnnnnnnnnnnnnnnnnnnnnnnnnnnnnnnnnnnnnnnnnnnnnnnnnnnnnnnnnnnnnnnnnnnnnnnnnnnnnnnnnnnnnnnnnnnnnnnnnnnnnnnnnnnnnnnnnnnnnnnnnnnnnnnnnnggnnnnnnnnnnnnnngtataaagagatttctagagtgtgcaggaagctgaagtggctggttctagagatgacagaattagctgtgagaaatcagagcccaaatctgggcaagaggaagcaccccagcttggttactagggggggaggaggcttgccaccaggggggataagtccaaggggggaacagacagagaacagttcctagagatttattataatctgtttcttctttggctttttgctttgccccatatgcacacatagtagagatttctataatctgcattcttctttggcttttgttttgccacatacacacacatactcaaataatcaagtggcctaaacacagagattagaaaccaatcagtaagaaatcagaagccctaccagtctacccctccccgaccctgcatctgatgtggagccatagtcaagtgcctaggaggaagacaagcttgaaggacgacccttaataaagagcttctaggaaagttcagagatctcagaagaacttggtgcacagccaaagcgctgacaaaggcctaggcgctagctttctagaacaactggaaaatagccacagctgccttcccagctttgcgtcacagaaagttaattacttgttgcatcatcagcactgtcagaatcatcatccaaatcatccatggcaggtggaggtctcttggtgctgaccttcttcaaaagctctgcataatgttccacatgagccagctccatctcttcatccccttcccagtctctccagttatcaaagtccacagacagccacactggcttgatatcctccttggtaagccgcggccaggccaccttttccttccattttctcacaaaacaagtaatagagcgggaagagcgcttatcctgggagtccttggagttcactttggcatagaactcaatctcattgtacaactccactccatcggcattcttgcagctgggcctgtcgtaccacaaggtccgggcgtgctgcc

SEQ ID NO: 258025 - DNA, 1947 bp, Homo Sapiens
  misc_feature (188)..(188): n is a, c, g, or t
tggccgctggagctcaggcggcgggcgcggctgggatggcgaagagcaacggagagaatgggccgcgcgcgcccgcggccggggaaagcctgtcgggaacccgggagagcctggcccagggccccgacgccgcaaccaccgacgaactcagctctctcgggtctgactcggaggccaacggcttcgcnagcgccgcatcgacaagttcggcttcatcgtgggctcgcagggcgccgagggcgcgctggaggaagtacccctggaggtgctgaggcagagggagtccaagtggctggacatgctcaacaactgggacaaatggatggccaagaagcacaaaaagattcgtctgcggtgccaaaagggcatcccgccttctctgcggggccgtgcttggcagtacctgtcaggaggcaaggtgaagttacagcagaaccctggaaagtttgacgagctggacatgtcccctggggaccccaagtggctggacgtgattgagcgtgacctgcaccggcagttcccattccatgagatgtttgtgtcccgggggggccacggccagcaggacctattccgtgtgctgaaggcctacacgctgtaccggcccgaggagggctactaccaggcccaggcgcccattgccgctgtcttgctcatgcatatgcctgctgagcaagccttctggtgcctggtacagatctgtgagaagtacctgcccggctactacagcgagaaactggaggcgatccagctggacggggagatccttttctcgctgttgcagaaggtgtcgccggtggcccacaggcacctcagccgtcagaagatcgacccgctcctttatatgacagaatggttcatgtgcgccttctcccgaaccttgccctggagctctgtgctgcgtgtctgggacatgttcttctgtgaaggggtcaagatcatcttccgggtggggctggtgctgctgaagcacgcgctgggctcccctgagaaggtcaaagcctgccagggccagtacgagaccatcgagcgactgcggagcctcagccccaagatcatgcaggaggcctttctggtccaggaggtggtggagttgcccatgacagagcgccagattgagcgcgaacacctcattcagctgcggcgctggcaggagacccggggtgagctgcagtgccgctccccgcccaggctgcatggtgccaaggctatcttggatgcagaacctggtccccggcctgccctacaaccttcaccatccatccgcctgcccctagatgcccccctccctggctccaaagccaagcccaagccacccaagcaggcccagaaggagcagcggaaacagatgaaggggagagggcagctggagaagcccccagccccaaatcaagccatggtggtggccgctgcaggagatgcatgtcccccacagcatgtgcccccgaaggactcagcccccaaggactcagcccctcaggatttggctccccaggtctcagcccaccaccgctcccaggagagcttgacgtcccaagagagtgaggacacctacttgtaaccctggcagctaaggcctccagggcggggtctccatataactacacggttcatgaactgacattccacatcctgcccaccctctgagggccaagctgcctggccactgggctgggctggagtctggctggtccaacacagattctgcctggtccaacacagattctgcctgagcctccttatttattttctttacagtggcactcaggctggcccagccagggcaggcagaagctagggcctggggggtggggcctccttcagccccctcctcctggggatgctccccagggttagggtgctggtgtgaggggaaagggtggggtgttctttgtgtaaaatagaaacatggttttgtacagaaataaacagccttgtatagagaaa

SEQ ID NO: 258026 - DNA, 1500 bp, Homo Sapiens
  misc_feature (1379)..(1379): n is a, c, g, or t
  misc_feature (1475)..(1475): n is a, c, g, or t
gggtgctggcgccatggaggccgagcggggtcccgagcgccggcctgcggacgtacagcccgggccagacgccggaggagggcgcgcaggccttggccgagttcgcggcgctgcacggcccggcgctgcgcgcttcgggggtccccgaacgttactggggccgcctcctgcacaagctggagcacgaggttttcgacgctggggaagtgtttgggatcatgcaagtggaggaggtagaagaggaggaggacgaggcagcccgggaggtgcggaagcagcagcccaacccggggaacgagctgtgctacaaggtcatcgtgaccagggagagcgggctccaggcagcccaccccaacagcatcttcctcatcgaccacgcctggacgtgccgtgtggagcatgcgcgccacagctgcagcaggtgcccgggctgctgcaccgcatggccaacctgatgggcattgagttccacggtgagctgcccagtacagaggctgtggccctggtgctggaggagatgtggaagttcaaccagacctaccagctggcccatgggacagctgaggagaagatgccggtgtggtatatcatggacgagttcggttcgcggatccagcacgcggacgtgcccagcttcgccacggcacccttcttctacatgccgcagcaggtggcctacacgctgctgtggcccctgagggacctggacactggcgaggaggtgacccgagactttgcctacggagagacggaccccctgatccggaagtgcatgctgctgccctgggcccccaccgacatgctggacctcagctcttgcacacccgagccgcccgccgagcactaccaggccattctggaggaaaacaaggagaagctgccacttgacatcaaccccgtggtgcacccccacggccacatcttcaaggtctacacggacgtgcagcaggtggccagcagcctcacccacccgcgcttcaccctcacccagagtgaggcggacgccgacatcctcttcaacttctcacacttcaaggactacaggaaactcagccaggagaggccaggcgtgctgctgaaccagttcccctgcgagaacctgctgactgtcaaggactgcctggcctccatcgcgcgccgggcaggtggccccgagggcccaccctggctgccccgaaccttcaacctgcgcactgagctgccccagattgtcagctacttccagcagcgggaaaggtggggcgaggacaaccactggatctgcaagccctggaacctgacgcgcagcctggacacccacgtcaccaagagcctgcacagcatcatccggcaccgagagagcacccccaggttgtgtccaagaacattgtaagacccgngatgtgccttgaaggagaccatggtaaagtaaaagattgacatccggtacatcgatgctgctgcggatcagtgaaggccccctacggattgtgcgngaatggaaggggaactggcttgcgg

SEQ ID NO: 258027 - DNA, 1525 bp, Homo Sapiens
  misc_feature (57)..(57): n is a, c, g, or t
  misc_feature (926)..(926): n is a, c, g, or t
  misc_feature (1031)..(1031): n is a, c, g, or t
  misc_feature (1492)..(1492): n is a, c, g, or t
tgcttccctccctgtgatgtctccagttgggccagcatctgtatgggggacctcctnccaggtactcaaaggccgtggaattctcctttcaacaggatgacatcggccagcacaccgaacatctggtagagcccagaagcctcattcacgcgccgcacgatggagctggtcagctgtgtgatggggagctcagtggcgggccaggtgacgctgtggtggcggtgctccaggagccggtgaacagcacgcactgtgtatcggaatccgtggatgaagcccccagcagatttccggtagtccaccgagtggctggcagtacccaggataaacagaccccggcttcctttggattcgtagctagctcgaatcagcgggtacttcttgccgaatgcatttcccgagttaagtctgagggacctgaggtctccaacgtagtgggtggcccaggacagacggacccgggagcggctgagcatatggataaagtttgtgacacccaagatgttctctgctgtctcaaaggccgagttcccacgacccaggatcagcacattctggcctacaaagtcctcagggtccacggacacggactcgtaaccctctgcatattcggagccagggaagtcaacctggttggggactgataaaccagtggctacaaagaggacgctgcactgatgcacctggcccttctggtcagttaggatgaagtagtggccattccaggcctgtcggtccttgtccagagtgacgtgggcgatggtggtgttgtactggacacggagccccagcgtgtccgcgaagtcacccaggtagcgcaccatgtcgcgggcgtcggggaagtaggcacgcgagtagtgtctgaagagcagccgggggtcgtggctgagcagagagttccagtcgggcggaggttgaactcggcnttagccttgcccgtgtaccgcttgttgatgctgatgagcttgcggtgccgcgggtagcgtgtgaagaagctgccgggccgcggggcccgctcgaacactgcgtantcgcgtccagcgcgctgcaggaagtaggccatctgcaggcccgcgggcccagcgcccagcacgcagtagtcccggcgcgggggcaccgacagcgctgggtgcagggcgatggccaggagcagccccgggggaccccacaacggggccgcagcggagaggcccatcctgcagcagatcagaggggtaaggcctcgcacccggcccggcggctgggagacacgaggcccagaaagaggcggggctgcgggaactctcactgcaatctgggtcacggccaggcccagaagccgtcctcagagctcatttgcccggactccaccgtttcaagctgggacttggggctccccggaatcccgagcccctccatcttatctccctcagggtctccttcctcaggggcaccggctccccgcttatgattgtagtaacctccaccctggggaaggagagcgtactccccnattttcccctaatttgagggtgcccaacatccc

SEQ ID NO: 258028 - DNA, 1663 bp, Homo Sapiens
  misc_feature (1481)..(1481): n is a, c, g, or t
  misc_feature (1490)..(1490): n is a, c, g, or t
agattggcccttgcctgggttctggccagcacctggggttctaggtggtggctctggcatgtaagtcgattgccatggtggctctgagagtggagcagaagcatcttgggtccttggggccagctctgctcgcaattagtgaagtcattgcctggggatggggccccacaagggacaaggaaaggctggtccaggagccaaaagacaaaatgttacctttcttttctagaaaattgtacaagctggagataaggaccttgatgggcagctagactttgaagaatttgtccattatctccaagatcatgagaagaagctgaggctggtgtttaaaagtttggacaaaaaaaatgatggacgcattgacgcgcaggagatcatgcagtccctgcgggacttgggagtcaaaatatctgaacagcaggcagaaaaaattctcaagagcatggataaaaacggcacgatgaccatcgactggaacgagtggagagactaccacctcctccaccccgtggaaaacatccccgagatcatcctctactggaagcattccacgatctttgatgtgggtgagaatctaacggtcccggatgagttcacagtggaagagacgcagaccgggatgtgggtggagacacctggtggcaggaagtggggccaagggcccgtatccagaacctgcacggcccccctggacaggctcaaggtgctcatgcaggtccatgcctcccgcagcaacaacatgggcatcgttggtggcttcactcagatgattcgagaaggaggggccaggtcactctggcggggcaatggcatcaacgtcctcaaaattgcccccgaatcagccatcaaattcatggcctatgagcagatcaagcgccttgttggtagtgaccaggagactctgaggattcacgagaggcttgtggcagggtccttggcaggggccatcgcccagagcagcatctacccaatggaggtcctgaagacccggatggcgctgcggaagacaggccagtactcaggaatgctggactgcgccaggaggatcctggccagagagggggtggccgccttctacaaaggctatgtccccaacatgctgggcatcatcccctatgccggcatcgaccttgcagtctacgagacgctcaagaatgcctggctgcagcactatgcagtgaacagcgcggaccccggcgtgtttgtgctcctggcctgtggcaccatgtccagtacctgtggccagctggccagctaccccctggccctagtcaggacccggatgcaggcgcaagcctctattgagggcgctccggaggtgaccatgagcagcctcttcaaacatatcctgcggaccgagggggccttcgggctgtacagggggctggcccccaacttcatgaaggtcatcccagctgtgagcatcagctacgtggtctacgaagaacctgaaaatcaccctgggcgtcagtcggggnggacggggnggagggcccgcccggccagggactcgctgatcctgggccgcagccttgggtggtgcagccatctcattctgtgaatgtgccactctaagctggcttgagccaagctgtgaaaaccctagacgcaccccaagggagggttgggaacagtttgcagccccggggcttggtcttct

SEQ ID NO: 258029 - DNA, 1001 bp, Homo Sapiens
  misc_feature (21)..(21): n is a, c, g, or t
  misc_feature (52)..(52): n is a, c, g, or t
  misc_feature (276)..(289): n is a, c, g, or t
  misc_feature (320)..(337): n is a, c, g, or t
  misc_feature (411)..(443): n is a, c, g, or t
  misc_feature (553)..(615): n is a, c, g, or t
  misc_feature (830)..(830): n is a, c, g, or t
  misc_feature (928)..(952): n is a, c, g, or t
attgcgggagtgatataaacntggactgagcgctccagaatgtaacggaacncagtggtgggtaaagccacggagaagtggataagtaagaatgttttacctctcaccgcacacagaaaaagggagtggtgataaagttagtagtaaaaataaatttttgtatcctgctatacacatcaaaaacagggcggtgagggcgcggggtgccgacacccaagggaaagaaaagtgttttcttctttctggcgacggcacaacaaaaaagaaagtgggaannnnnnnnnnnnnntgtttattttgggggaaagaaaggccccggnnnnnnnnnnnnnnnnnnacctggtgggggtggggaggaaaaaacacccttgtggtggggggagagaaaacacaggggggtgttctctcttnnnnnnnnnnnnnnnnnnnnnnnnnnnnnnnnnaaaatggggcgcccacaataatggtggtgtggggcccccgagagggaaggggggaaaacccttttttctaaacccccccggggggttcttaagaaagaggtggggggggnnnnnnnnnnnnnnnnnnnnnnnnnnnnnnnnnnnnnnnnnnnnnnnnnnnnnnnnnnnnnnnaaagggtttgcaaggggttagagacccggggggggaccccttccttggtttttggccccagtgcccggtccttccagctccccagttgggggcagtggggtgcagctcgggaccaatctgttcaccgctcttacttctggccacttccagcccccgaacccagagcccccagaactgcagcatcatgtaatctgggacctgccaggcaggggcgnggggtggaggcttcctgcgtcctcctcacctcatgcccaccccctgccctgcacgtcatgggagggggcttgaagccaaagaaaaataaccctttggnnnnnnnnnnnnnnnnnnnnnnnnntaagagaagttattttctacagggttttatatgaaggaaaaacacaagc

SEQ ID NO: 258030 - DNA, 1510 bp, Homo Sapiens
agatctgtgagcccagcgctgactgcgccgcggagaaagccagtgggaacccagacccataggagacccgcgtccccgctcggcctggccaggccccgcgctatggagttcctctgggcccctctcttgggtctgtgctgcagtctggccgctgctgatcgccacaccgtcttctggaacagttcaaatcccaagttccggaatgaggactacaccatacatgtgcagctgaatgactacgtggacatcatctgtccgcactatgaagatcactctgtggcagacgctgccatggagcagtacatactgtacctggtggagcatgaggagtaccagctgtgccagccccagtccaaggaccaagtccgctggcagtgcaaccggcccagtgccaagcatggcccggagaagctgtctgagaagttccagcgcttcacacctttcaccctgggcaaggagttcaaagaaggacacagctactactacatctccaaacccatccaccagcatgaagaccgctgcttgaggttgaaggtgactgtcagtggcaaaatcactcacagtcctcaggcccatgacaatccacaggagaagagacttgcagcagatgacccagaggtgcgggttctacatagcatcggtcacagtgctgccccacgcctcttcccacttgcctggactgtgctgctccttccacttctgctgctgcaaaccccgtgaaggtgtgtgccacacctggccttaaagagggacaggctgaagagagggacaggcactccaaacctgtcttggggccactttcagagcccccagccctgggaaccactcccaccacaggcataagctatcacctagcagcctcaaaacgggtcaatattaaggttttcaaccggaaggaggccaaccagcccgacagtgccatccccaccttcacctcggagggatggagaaagaagtggagacagtcctttcccaccattcctgcctttaagccaaagaaacaagctgtgcaggcatggtcccttaaggcacagtgggagctgagctggaaggggccacgtggatgggcaaagcttgtcaaagatgccccctccaggagagagccaggatgcccagatgaactgactgaaggaaaagcaagaaacagtttcttgcttggaagccaggtacaggagaggcagcatgcttgggctgacccagcatctcccagcaagacctcatctgtggagctgccacagagaagtttgtagccaggtactgcattctctcccatcctggggcagcactccccagagctgtgccagcaggggggctgtgccaacctgttcttagagtgtagctgtaagggcagtgcccatgtgtacattctgcctagagtgtagcctaaagggcagggcccacgtgtatagtatctgtatataagttgctgtgtgtctgtcctgatttctacaactggagtttttttatacaatgttctttgtctcaaaataaagcaatacccaaatttcgg

SEQ ID NO: 258031 - DNA, 420 bp, Homo Sapiens
acccccagatgccccagatgaaactgactggaaggaaaaagcaaagaaacagtttccttgcttgggaacccccaggtacaggagaggcagcatgcttgggctgaccccagcatctccccagcaaagacctcatctgtggagctgcccacagagaagtttgtagcccaggtactgcattctctcccatccctggggcagcactccccagaatgtgccagcagggggctgtgccaacctgttcttagagtgtagctgtaaaggcagtgcccatgtgtacattctgcctagagtgtagcctaaaggcagggcccacgtgtatagtatctgtatataagttgctgtgtgtctgtcctgatttctacaactggagtttttttatacaatgttctttgtctcaaaataaagcaatgtgtttttaca

SEQ ID NO: 258032 - DNA, 691 bp, Homo Sapiens
  misc_feature (22)..(22): n is a, c, g, or t
  misc_feature (35)..(35): n is a, c, g, or t
  misc_feature (57)..(57): n is a, c, g, or t
ccagggaagaggattaccttgntcctctttcaagncctttaatccgagccagcaggnccttctgcttgcctgctgccatactgtatgtaggaaagtgttctgtggctgctttgtgtcaagaaaagagcagtcactctcagaatcttgattccccatcagccaaagcaaaagatggctgctgctttgtaggcatgtgcctgcaagtgggaccttgctgggcattatatgccctgtgggggtttcagagaccctgaaagaggagggaggacccgcctccttgtctgcacaactgcatgcacttctctccccatcgctccacaacctgaaaccgagaaggagttgctgaccagtgcccaccccggcagcccgggaggaacacaggcagctcctttcccttcacgtggtctgcagagagcagggtgagctgccagctgcccctctccaccagggtaccctgtcttggtggttaggggccacttttcctttgaggctctagtggaggtggatgtccttctctgccaggcttggcacatgatgtgaagaataaatgcccaattcttactgttcaggtttgatgtggaatcacagctgcagtgatatatattttttatcagtgcttggttggttttaaataaagtgcacgctattttattatcttgttctgaataaaatgtatttactccaaaaaaaa

SEQ ID NO: 258033 - DNA, 1527 bp, Homo Sapiens
ccccaagccaggctccccggagccacaggtttctggccttgcagccaatcgttctctgacagaaggcctggtcctggacacaatgaatgacagcctcagcaagatcctgctggacatcagctttcctggcctggacgaggacccactgggccctgacaacatcaactggtcccagtttattcctgagctacagtagagccctgcccttgcccctgtgctcaagctgtccaccatcccgggcactccaaggctcagtgcaccccaagcctctgagtgaggacagcaggcagggactgttctgctcctcatagctccctgctgcctgattatgcaaaagtagcagtcacaccctagccactgctgggaccttgtgttccccaagagtatctgattcctctgctgtccctgccaggagctgaagggtgggaacaacaaaggcaatggtgaaaagagattaggaaccccccagcctgtttccattctctgcccagcagtctcttaccttccctgatctttgcagggtggtccgtgtaaatagtataaattctccaaattatcctctaattataaatgtaagcttatttccttagatcattatccagagactgccagaaggtgggtaggatgacctggggtttcaattgacttctgttccttgcttttagttttgatagaagggaagacctgcagtgcacggtttcttccaggctgaggtacctggatcttgggttcttcactgcagggacccagacaagtggatctgcttgccagagtcctttttgcccctccctgccacctccccgtgtttccaagtcagctttcctgcaagaagaaatcctggttaaaaaagtcttttgtattgggtcaggagttgaatttggggtgggaggatggatgcaactgaagcagagtgtgggtgcccagatgtgcgctattagatgtttctctgataatgtccccaatcataccagggagactggcattgacgagaactcaggtggaggcttgagaaggccgaaagggcccctgacctgcctggcttccttagcttgcccctcagctttgcaaagagccaccctaggccccagctgaccgcatgggtgtgagccagcttgagaacactaactactcaataaaagcgaaggtggacatgctgggctctgtggtttattggcgtctgattcctaaggcaccaggagaggctggaaaagaaagagggtgttgatggagacgatggtgatagggaagaggcaaggcctgaagttcacccaaagcagcagttggagcacttgcacaggcacacacttgacaacacaaattgccagttttcccagtgctagtcctgcacagctcacctcttttccctggcgtctctgaccttgttccttgggacctttggacctgctggttaacttaggccttttgagggttcttaataagacaagctcacgaggggtagggccccctgaacattagggcaggaagggcccagttacaggtgcttcattcccactgccatccccaccc

SEQ ID NO: 258034 - DNA, 1505 bp, Homo Sapiens
  misc_feature (205)..(205): n is a, c, g, or t
aaacgaattgggctgccaagggcccagaaaacccggtgggctcccggggagcccgggcttggggaacgtcctatatctggagggagaaagagttgccaaaaggggacggagatgaggtctaagggttctgaactgaggagccctttgcggtgattcaaggggggggagcactttgcaagggagtggtgctgagatccatcagccnccaggggggtcaggcaaggggtcagaggcaccctggggggtttgtactgggctgaaatccagtcccccttactttggctgggggcgtgagcctccaggatttcaggggttctggggaggacagatttgctcggggtggaggagatgggcagcgtttccttaatgggtgtcttaaaaggtcctcccacttcctgggagtagctgagctgggaggcagggtcagaggagtctgctgggaacgggagctctgcggcccagcgggaagtactgggcccctctgagaagagcagctccggctcatccacacagggaggcagtagatgctgtttcctccgagaccggctcctctccctcctctccctgtgttgaatcacaagcatttccgagacacaccgggttggggacctaagcccactgtaggacttcttgggtcttggggtgggagattgggacgaatcctcccaggagtgagatgattcctctttgaaagatggggccggggagggccactcttccaagggagggctctccactttgatgggtctcgctaagtgtggcatttcctccccaggctggatttcttcctccttgatagtctgaactggaagcaaaggagaaaacccttctccaaacaggagtttctcctctttccctggtcctgcagaagaaagaggagctatcccctcctcagctagcagcaccttgggggcaatgcggactcgcttgctatggcgggcaagctctgagctcatgagggaagccgccaggggcaatggcaccttcaccgagggctgcaacaccagtgactggttcaccgggaactggataggtaccaggtatgagctgacccgtggtagcagtggcttcatcttccgccgtgcgcccagggggagttcggttttgatggtcatgttccggcggagctctggattcggtcgtttctgctgctgtgattccaagtgctcgggcaattgtggagaccctgggtccagtggcttaaacacctggtccaatgtcaagtagcggttggcactggggtgaatggtccagaaggagaccttgccattggcagacgtctcccggacaaacatgtcgtgcagggaaaggttgtggcggatggagttcttccagcctggcttggcaatgtgcttaaagtagggaaagtggtcctcaatccacgtatagatgtctttcaaagtcatgcgcttccttctcagtgctgttgatggcgaattgtatcatggccatgtaagagtagcggacgcgggggtcgacgatatcctacactccggcctgtacca

SEQ ID NO: 258035 - DNA, 410 bp, Homo Sapiens
  misc_feature (19)..(19): n is a, c, g, or t
cagaagtcaattgaaaccncaggtcatcctacccaccttctggcagtctctggataatgatctaaggaaataagcttacatttataattagaggataatttggagaatttatactatttacacggaccaccctgcaaagatcagggaaggctggatttcttcctccttgatagtctgaactggaagcaaaggagaaaacccttctccaaacaggagtttctcctctttccctggtcctgcagaagaaagaggagctatcccctcctcagctagcagcacctgaaagggaaacagagataaggtgaaccaacggtcaccagacaggacgcacaaaaatatcacatacgggttctgatcctctttgtgtcgttttgaagtcttaaaatctattaaatatgagaatacgaaaa

SEQ ID NO: 258036 - DNA, 2016 bp, Homo Sapiens
gcctgggtggcgaattcggcacgaggggtcctcagcgtcttggcggcagttggtggaaccggagcttcgagtccgtccccggtgctgcctgcgcgttcacctgagtctcgctggagctcttctcgcccgcccacctcatctcaacccactttccgcggggagcggcgccaagctgggccttcctcggatcaggcgtcccctgaagtcggcacgcccctctgcgtcccccttcggtcccgctaggaccccgtccgggctgccgtcgcctcgtcgctatggcgcccaccatccagacccaggcccagcgggaggatggccacaggcccaattcccaccggactctgcctgagaggtctggagtggtctgccgagtcaagtactgcaatagcctccctgatatccccttcgaccccaagttcatcacctaccccttcgaccagaacaggttcgtccagtacaaagccacttccttggagaaacagcacaaacatgacctcctgactgagccagacctgggggtcaccatcgatctcatcaatcctgacacctaccgcatcgaccccaatgttcttctagatccagctgatgagaaacttttggaagaggagattcaggcccccaccagctccaagagatcccagcagcacgcgaaggtggtgccatggatgcgaaagacagagtacatctccactgagttcaaccgttatggcatctccaatgagaagcctgaggtcaagattggggtttctgtgaagcagcagtttaccgaggaagaaatatacaaagacagggatagccagatcacagccattgagaagacttttgaggatgcccagaaaatcaatctcacagcattacagcaaaccccgagtcacaccggtggaggtcatgcctgtcttccaagactttaagatgtggatcaatccatgtgctcaggtgatctttgactcagacccagcccccaaggacacgagtggtgcagctgcgttggagatgatgtctcaggccatgattaagggcatgatggatgaggaagggaaccagtttgtggcctatttcctgcctgtagaagagacgttgaagaaacgaaagcgggaccaggaggaggagatggactatgcaccagatgatgtgtatgactacaaaattgctcgggagtacaactggaacgtgaagaacaaagctagcaagggctatgaggaaaactacttcttcatcttccgagagggtgacggggtttactacaatgagttggaaaccagggtccgccttagtaagcgccgggccaaggctggggttcagtcaggcaccaacgccctgcttgtggtcaaacatcgggacatgaatgagaaggaactggaagctcaggaaacacggaaggcccagctagaaaaccacgaaccggaggaggaagaggaagaggagatggagacagaagagaaagaagctgggggctcagatgaggagcaggagaagggcagcagcagtgagaaagagggcagtgaagatgagcactccggcagcgagagtgaacgggaggaaagtgacagggacgaggccagtgacaagagtggcagtggtgaggaccagagcagcgaggatgaggcccggcctgcccgtgacaaagaggaaatctttggcagtgatgctgattctgaggaccatgccgactctgatgatgaggacagaggacaggcccaaggtggcagtgacaatgattcagacagcggcagcaatgggggtggccagcggagccggagccacagccgcagcgccagtcccttccccagtggcagcgagcactccgcccaggaggatggcagtgaagctgcagcttctgattccagtgaagctgatagtgacagtgactgagtcccagggcattcagggctggttcagacaccattattgtgagcagcaaagcacttttctagtggtctgtttgtgagcctttcacttgtttgttccccacccccaaacctttgctgttaataaagtcaacttctctttacttcc

SEQ ID NO: 258037 - DNA, 1650 bp, Homo Sapiens
  misc_feature (11)..(11): n is a, c, g, or t
  misc_feature (46)..(46): n is a, c, g, or t
  misc_feature (57)..(57): n is a, c, g, or t
  misc_feature (62)..(62): n is a, c, g, or t
  misc_feature (69)..(69): n is a, c, g, or t
  misc_feature (126)..(126): n is a, c, g, or t
  misc_feature (163)..(163): n is a, c, g, or t
  misc_feature (195)..(195): n is a, c, g, or t
  misc_feature (594)..(594): n is a, c, g, or t
  misc_feature (596)..(596): n is a, c, g, or t
  misc_feature (695)..(695): n is a, c, g, or t
  misc_feature (761)..(761): n is a, c, g, or t
  misc_feature (766)..(766): n is a, c, g, or t
  misc_feature (770)..(770): n is a, c, g, or t
  misc_feature (773)..(775): n is a, c, g, or t
  misc_feature (777)..(778): n is a, c, g, or t
  misc_feature (780)..(780): n is a, c, g, or t
  misc_feature (782)..(782): n is a, c, g, or t
  misc_feature (786)..(786): n is a, c, g, or t
  misc_feature (795)..(795): n is a, c, g, or t
  misc_feature (801)..(801): n is a, c, g, or t
  misc_feature (809)..(809): n is a, c, g, or t
  misc_feature (854)..(854): n is a, c, g, or t
  misc_feature (1580)..(1580): n is a, c, g, or t
gagccaacccnattcacctgcctaaaaccatggatatttgtactgnacccatgagcngcctntgacccncctggaccctgatgtgccgctgtggtcatgcaggaagcctcgcccatatctgcttantcactcccagcatgaccctcactcgggccaaggtggnagtgaacatccctaggaaaaggaaaggcaatnctctcagcatgaccgggccttggagcggttctatgaacagtggtcccaggctatccagcgccacatacactttgatgttgtaaagtgcatcctggtggccagcccaggatttgtgagggagcagttctgcgactacctgtttcaacaagcagtgaagaccgacaacaaactgctcctggaaaaccggtccaaatttcttcaggtacatgcctcctccggacacaagtactccctgaaagaggccctttgtgaccctactgtggctagccgcctttcagacactaaagctgctggggaagtcaaagccttggatgacttctataaaatgttacagcatgaaccggatcgagctttctatggactcaagcaggtggagaaggccaatgaagccatggcaancnacacattgctcatcagcgatgagctcttcaggcatcaggatgtagccacacggagccggtatgtgaggctggtggacagtgtgaaagagaacgcaggcnccgttaggatattctctagtcttcacgtttctggggaacagctcagccagttgactggggtagctnccatnctcngcnnncnngngnccgnactgtctgnccaagngggtgatnccagttctgaagaggattaatgattgaaacttaaaattgagacantcttgtgtttcctaaactgttacagtacatttctcagcagccttgtgacagaaagctgcaagaagggcactttttgattcatacagggatttcttatgtctttggctacaaaaagaaaatatgtgattggcaagacatgtatttaaacaataaactaaaaggaaataatctccacgtactaccatcttgattaaattgtgtaattttttataggaattatgagttatctgtagtacttggaaacagaaaatgtgtgtatttaaagacgatgcctatgcagtatattgtttgggatagattgcaaaatttcacactgcatgctttgaaacagttttccttagaaaaagcttttgctatcttatcctgtttacattatttctttattttaattctgcttggtgttcttgcattgcatttaatgatcccttttctccccacctccacacactacattttttttagatttaaatagttttactattttaaatgattgccgtacaattagtagacttgaagacaagttttaaatatttttcttcaaaggcttgttaaaccaatcatgttaaaaggaaattcttggttttggtttgttgttgttagcattagtcatatttgatttagagggtaacttaaatcagttatttttagctttttagaactttgatctgctaaggattgtcaaaataatctccttgaggcatcttttatttttaaaatgagaattanagaatgtgattttgccttgttatgtgggctaattaagtgggcaaagcttgggaagtcatttcccagtcct

SEQ ID NO: 258038 - DNA, 1190 bp, Homo Sapiens
  misc_feature (957)..(957): n is a, c, g, or t
  misc_feature (964)..(965): n is a, c, g, or t
  misc_feature (979)..(979): n is a, c, g, or t
  misc_feature (981)..(981): n is a, c, g, or t
  misc_feature (998)..(998): n is a, c, g, or t
  misc_feature (1001)..(1001): n is a, c, g, or t
  misc_feature (1026)..(1026): n is a, c, g, or t
  misc_feature (1032)..(1032): n is a, c, g, or t
  misc_feature (1035)..(1035): n is a, c, g, or t
  misc_feature (1048)..(1049): n is a, c, g, or t
  misc_feature (1053)..(1053): n is a, c, g, or t
  misc_feature (1078)..(1078): n is a, c, g, or t
  misc_feature (1087)..(1087): n is a, c, g, or t
  misc_feature (1091)..(1091): n is a, c, g, or t
  misc_feature (1094)..(1094): n is a, c, g, or t
  misc_feature (1096)..(1096): n is a, c, g, or t
  misc_feature (1098)..(1099): n is a, c, g, or t
  misc_feature (1113)..(1113): n is a, c, g, or t
  misc_feature (1115)..(1116): n is a, c, g, or t
  misc_feature (1123)..(1123): n is a, c, g, or t
  misc_feature (1128)..(1128): n is a, c, g, or t
  misc_feature (1133)..(1133): n is a, c, g, or t
  misc_feature (1144)..(1144): n is a, c, g, or t
  misc_feature (1155)..(1155): n is a, c, g, or t
  misc_feature (1166)..(1166): n is a, c, g, or t
  misc_feature (1168)..(1168): n is a, c, g, or t
  misc_feature (1176)..(1176): n is a, c, g, or t
cttcatttcgtcagcccgctgttgcgtgctgccagcgggaactgtgtaggggtagattttcgctgcagtgttccccgagcctgttagacgcagcgcgccgggagactgagagaggaaaggatagaggaagtgctgccctaggctgcatgagtcgaagcaagcgtgtttccttcccgccaggcaagtgcccttagaaaccgggccccgcccccttcctggcctgcattcccatcccctctcccggggcggaggtgaggacctccttggttcctttggttctgtcagtgagccccttccttggccatgaagctcgtgaggaagaacatcgagaaggacaatgcgggccaggtgaccctggtccccgaggagcctgaggacatgtggcacacttacaacctcgtgcaggtgggcgacagcctgcgcgcctccaccatccgcaaggtacagacagagtcctccacgggcagcgtgggcagcaaccgggtccgcactaccctcactctctgcgtggaggccatcgacttcgactctcaagcctgccagctgcgggttaaggggaccaacatccaagagaatgagtatgtcaagatgggggcttaccacaccatcgagctggagcccaaccgccagttcaccctggccaagaagcagtgggatagtgtggtactggagcgcatcgagcaggcctgtgacccagcctggagcgctgatgtggcggctgtggtcatgcaggaaggcctcgcccatatctgcttagtcactcccagcatgaccctcactcgggccaaggtggaaggtgaacatccctaggaaaagggaaaaggcaattggctctcagcatgaccgggcccttgggagcggttctatgaaacaggtgggtccaggctatccagcgccacatacactttgatgttgtaaagtgcatcctggtggccagcccaggatttgtgagggagngttctgnnctacctgtttcaanancagtgaagaccgacaanaantgctcctggaaaccggtcaaatttnttcagnacntgctcctcggacnnagtntcctgaaaaggcctttttgacctantgtggctancgcnttnananntaaactgctggggnannaaacctngatgnttttnaaatttaaacngacccggtcgngctttttggancnacaggggngagccatgagcatg

SEQ ID NO: 258039 - DNA, 1739 bp, Homo Sapiens
  misc_feature (290)..(290): n is a, c, g, or t
  misc_feature (854)..(854): n is a, c, g, or t
  misc_feature (1282)..(1282): n is a, c, g, or t
  misc_feature (1312)..(1312): n is a, c, g, or t
  misc_feature (1659)..(1669): n is a, c, g, or t
attgaaaaatgaaggggcatgccaagaactagcaggcaacagctgataaatttaagaaatgcagcactactttcagataagattgaatttaagactggaatataatcgaatcttaaatgagataaagagggatattatctgatgacaaaagatacagtttatttaagataatatgaaagtcatcatacaaaatagcaactataggatgaaggatttccagagctctgccctcatctccaagagtcgcttttctgtaatcctccggattattggctgtgagtgccattaanattttattttaatgctatattgtaaaaattaaatggcagaggatttcttaaatttatgccatgtaactgctttcctatgaagctctgttacttgcagagagccagccatctgcacttgaacaaatctgttaaaaacctgcctttcataaccctgacaatggaaatagttgccaaacaggtaaagattcagggtgacctctcctggagtgaaggaacgaggggttcggagggacctctcctggagtgaaggaacgagggtcgctgtcttgaagatgcggggtgtccctgcgcccccatctccgccgctgcgccctaactgtgtgttccccttctgtcctcagaggctgccggcgcggacccggacacaaggcgggcggcgactagtggcttcactggctgcctctcggcggtgcgcctcggccgcgctgctcccctgaaggcggcgctgcgccccagcggcccctcccgggtacacgtccgcggccacgtggcccctatggcccgctgcacggcggggtgcggcgtctggctccccggcttgggaactggcctccccgactcgcnggggggcgcaggtcgttctggaccagcggatgaaggagagcccttggttaatgcagacagaagagactctgctgtcatcggaggtgtgatagcagtggtgatatttattttgctttgcatcactgccatagccatacgcatctatcaacagagaaagttacgcaaagaaaatgagtcaaaagtctcaaaaaaagaagagtgctaggacagctctaaacagtgagctcgatgtgcaaaacgcagtccatgaaaaccagaaagagcgagtcttctgattggcagctgtggctgtctctatcatcgtgactgtggacttccctgctgttgccatcagggtgcacacagcaggtgcagtgctgtcacctggctgaagacctgcagcctcggagcctctgggagggtcctttcttccttggtgaaacacagtnctccacatcattgtccaaacaatgaattangtatggccattcatcactgttcagtagttttccccgcccaagggctttctgccaaaactgaagattgatcttgggtaataaattgggggggttttagatgagaaaatgacctttaaggctgtggccctaccttattttgtataaaggacagaaattttgtgttaaattgtaaagaacaaaatggcaccttaaaggtttttgggtcctggaaacatatttgggaaccccttgtttgggcccttggcgagattttaaaacacagaaaggttttgggactaccttactggcttttccatattctggaacccaaaccaaggggcctcttaaaatcacacctcttaatctcnnnnnnnnnnnaaaacacgccgtggaaccgggacacccaccctaatttggggggatcgcgtcttctaacagacggtctgaa

SEQ ID NO: 258040 - DNA, 1145 bp, Homo Sapiens
tcacagctaaacagactgctctgtgccgggagaggccctacagtgaagggaaaagtagacacttgattgtggactaatttgttcagtatttcccaaaaacttacagctaacaataatattaaacaggttttattagcatcttatacatctgacactctctcctaagcatccagtttattttctagtcacgggttacttactaaaagtctgtgtaacatgagctcacatcagattagaaaacatcaagtgggtagtatttttgaccgaattaaaatacaaaagaaattgcctatatcatgtatatgggctccaagggtagttcatacttcagcctcttcattcttttctgcttttgtcacctgttacagaaaatgatctataaaatcctcataaataagacatgagttttgcctgtaatgagtaggatgaaaaaaggccagtgccgcatgctatgaaacaatagcaactttacaggggaatccaaggtttgtgtgcacaaaaattataagcggcattttctgctatgctggaaaaactgaagtataaaacacaaatgaactaagcctttcaaggatgaggtatcaccaacactggtagctgtttaatatattcatcttacaactggatgctaaaaatgcaatcactgtaattaataaagttgaggaaaacacaaagattagctaacaggggtaaaagatcatttagagtaaaataaatgtgtaacattctctatgttctcaatcacctgggaaggcagtctatggaatatcaggaagtaagagttttcttgttttcaggaacatggaggtatatacacttcagaattcagaaggtaactggggctataaatagtaattaaaagaacaaaatagaagcaggggggttccattatgcacgctgtcgccattttcctgaaatcttgatgtttttgagcctctcctatttaaggacaaaaccatttagcacaaaacacaaacctcagaaagggtgccagctggaccacaaagcactgatgaaaaggcagagaggatatacttcccaaactttcattaggatgtaaaagccattttgaaaaagtctccactctatgtcaagttgaccggacgcgtgggtcgacgatatcccggaattccggaccggtacca

SEQ ID NO: 258041 - DNA, 1568 bp, Homo Sapiens
ggcctgggtggcgaattcggcacgaggccaacttgggaaagatgatcttgaaagaagagatggaaaagtcattgccgatccgaaggaaaacccgctctctgcctgaccggacacccttccatacctccttgcaccagggaacgtctaaatcttcctctctccccgcctatggcaggaccaccctgagccggctacagtccacagagttcagcccatcagggagtgagactggaagcccaggcctgcagaacggagagggccagagggggaggatggaccgggggaactccctgccctgtgtgctggagcagaagatctatccctatgaaatgctagtggtgaccaacaaggggcgaaccaagctgccaccgggggtggatcggatgcggcttgagaggcatctgtctgccgaggacttctcaagggtatttgccatgtcccctgaagagtttggcaagctggctctgtggaagcggaatgagctcaagaagaaggcctctctcttctgatggcccccacctgctccgggacggcccccttacccctgctgcttcagggtttttccccggcgggttgggaggggcaggaggtggggtggaaatagggtgggctcctttcctcaggtagagtggggggccaaaacctctgcagtccccggcagtgagctatggactttcttccccctcacaaggctgggggcctcctgctctcgtccctggccctccctgcacagggcaaagccagtctgggctctggcacacagagttcatgtttgcgccctctccctgcccctcaccccagagggtgaggaggaatgaggggcattggtggttaggccggttggctgtcttgaacagctggagggaagatgcaggggtgggaagcggccaggcagaaagagctccaggctcttgtgtcgcccacccagccctcccatactcactcctgacagctttcctgcactgcagcttcctgctcctctgactctagtgggaacaggccccagctcacctccggcagggaggtcacccctccacttcagcttgccctgacctccgctcgcaaaccccgagcttccaagccttttgctccagcctgcggcttccccagaagcctgggcttagggtggagatgccgcctacacacgatcctggccctccacctgcctccaggccacgaaatgggaattccagcactaagccaggcaccgggcagaagctgggccttccgcctcccttggatggggtcaagaggccaggcctggcacattttggagtgtcctggctaccagctctcacctacacccacgcacccccccacacactatgctctctcaagaatgtaatttattggggcccccccagctgctttcctcacctgcccctgccctaccttacacccccagcttgacttctttccagtccacgtgtgtatataatgatatctatatttttgcccaggtctgggtattgctcctgcccagaccctgacatccctttccactgtgtgtgtgaccatgctgggggagggggactctgcttggaattaaaaggttgcattgggtccct

SEQ ID NO: 258042 - DNA, 1842 bp, Homo Sapiens
  misc_feature (1038)..(1038): n is a, c, g, or t
  misc_feature (1461)..(1461): n is a, c, g, or t
ttcccgggatgcggccggtcttggatgaagcggcggccgtggtgagagcgtggggaagggtggggtgagggggcgaggccgcagctaggagcggcgaaactctcctcccctcggccccaccgcgtgggacggcgtgaacgtggtgtcggagggatgtcagccttctctgaggcggcgctagagaagaagctgtcggagttgagcaactcgcagcagagcgtgcagaccttgtccctgtggctcattcaccaccgtaaacactcgcggcccatcgtcaccgtgtgggagcgggagctgcggaaagccaaaccaaacaggaagcttacttttctctacctagccaatgatgtcatacagaacagcaagaggaaggggccagagtttacaaaagattttgcaccagttatagtggaggcttttaagcatgtttcaagtgaaactgatgaaagttgtaagaagcaccttggaagagtgttatctatttgggaagaaaggtctgtttatgaaaatgatgtattagaacaacttaaacaagctctgtatggtgataagaagcctaggaagcgaacttatgaacagataaaggtggatgaaaatgaaaactgttcctctctgggatctccaagtgaaccaccacagactctagatctcgttagagcattacaagatctggaaaatgcagcctcaggtgatgcagcagttcatcagaggatagcttctttacctgttgaagtacaagaagtatctctattagataaaataacagataaagaatctggagaaaggctttccaaaatggtagaggatgcgtgtatgttgctggcagattacaatggcagattggcggcagaaatagatgatagaaagcaactcactcgaatgttagcagattttcttcgttatcaaaaggaagcccttgcagagaaagagcataaattggaagagtacaagcgcaagctagccagagtttccctggtgcgcaaagaactcaggtcccggatccagagcctgccagacttatctcgattgcccaatgtnactggcagccacatgcacctgccctttgcgggagacatctacagtgaagattgatggaccagcctctttccaggtcccaggactttgcaagagatggagacagtgcagagagctctctggagtcacaatctgaacagattctcgggcgctccttctctccttccatcactacagtaagtaaaaggaccatagaggggaaccaggaatctgagaatcagctgtgctcaatagccaacctccctgtccagatgcagctattttggtatctcctatcacatgcactctgaatcagggtttttctataagaaatctttcagaatcagcaaaagtggggatgacccaggcatcttgatttgcaaaatcacaaaactaagttgtcagttatcactgtagatgagcaactcatctttttaaagtatagtnactgaactgattctgagaaatctttagagagaaaaaactcaacagtacaaattaactaattgggaaagttagaatgtcctttctgaatttttcattaaaaaaattacattatctgaaataacataaagctactaaactgctttgtattctattaagaaatagctcctaaggatgtagtcttgtttcatagttgttgcactatatcaaaacttaaaatgtaagcccagttcttctctgtatagaaaggaaacattgtgtaacttaatgaattatttatacagagcatttgttgccaactgttgttccagccatccacacaggagtctgttctgaggtggcaatagcacatgggaagatgaactttccctgtttgtttacccg

SEQ ID NO: 258043 - DNA, 877 bp, Homo Sapiens
  misc_feature (5)..(5): n is a, c, g, or t
  misc_feature (11)..(11): n is a, c, g, or t
  misc_feature (13)..(13): n is a, c, g, or t
  misc_feature (15)..(16): n is a, c, g, or t
  misc_feature (18)..(18): n is a, c, g, or t
  misc_feature (20)..(20): n is a, c, g, or t
  misc_feature (30)..(30): n is a, c, g, or t
  misc_feature (56)..(56): n is a, c, g, or t
  misc_feature (58)..(59): n is a, c, g, or t
  misc_feature (66)..(67): n is a, c, g, or t
  misc_feature (74)..(74): n is a, c, g, or t
  misc_feature (76)..(76): n is a, c, g, or t
  misc_feature (79)..(79): n is a, c, g, or t
  misc_feature (86)..(86): n is a, c, g, or t
tcatncatctntnanngnantttgttttanccctcaagagaaaagcatggagccgnanngctgctnnggtttgntntgnagccctnactcttttctccacatacagtgcagagagctgtctggagtcacaatctgaacagattatcgggcgctccttctctccttccatcactacagaaagtaaaaggaccatagaggggaaccaggaatctgagaatcagctgtgctcaaatagccaacctccctgtccagatgcagctattttggtatctcctatcacaggcactctgaatcagggtttttctataagaaatctttcagaattcagcaaaagtggggatgacccagggcatcttgatttgccaaaatcacaaaactaagttgtcagttatcactgtagatgagcaactcatctttttaaagtatagttactgaactgattctgagaaatctttagagagaaaaaactcaacagtacaaattaactaattgggaaagttagaatgtcctttctgaatttttcattaaaaaaattacattatctgaaataacataaagctactaaactgctttgtattctattaagaaatagctcctaaggatgtagtcttgtttcatagttgttgcactatatcaaaacttaaaatgtaagcccagttcttctctgtatagaaaggaaacattgtgttacttaatgaattatttatacagagcatttgttgccaactgttgttccagccatccacacaggagtctgttctgaggtggcaatagcacatgggaagatgaactttccctgtttgtttacccgttcttctttggctgtatctgatgacagtataagatgttcttaataaagttttatgttctttttgaa

SEQ ID NO: 258044 - DNA, 1287 bp, Homo Sapiens
  misc_feature (913)..(913): n is a, c, g, or t
  misc_feature (958)..(958): n is a, c, g, or t
  misc_feature (1043)..(1052): n is a, c, g, or t
  misc_feature (1146)..(1146): n is a, c, g, or t
  misc_feature (1243)..(1244): n is a, c, g, or t
  misc_feature (1249)..(1249): n is a, c, g, or t
  misc_feature (1251)..(1252): n is a, c, g, or t
  misc_feature (1264)..(1271): n is a, c, g, or t
gtggagcaaacccccttaacacaccagctgttgggaacagctgcccctaaatccattaaaccctcatctccctggtgctgaacagtctacactggcccaggaagctaacgtctgagccgcttggagagctttggtaaacagaagacactggaagcccactcggtcagcagctgggcatgaggatgtcaggggcctttggacttgaggaaggacagtccaggtgcatggaatcctaatgggcctcatgcagacactggaagcagcccagccccctgcccaataccacagccctggggtgtcccctgacattcctggaggtccctgggcaaatgcatttcctgcctgggttctcagggtaggagaacagagaaggctccaagggtgttgggagtgagccaggggctggtctggggagtgggtctcacgcactgctcaggttggcacgagggacctcccccatcccaacccagccccaagggtcccagcagggctctcagcatggctgttttgagggtacacaggtggctggagaggggtggggcagttgcatggtgggtggcaaagtgtgcatttagaagctgcttcgtggcgttaagaacggggggagagggaccagcactgtaacgttagaaataattccttcttgcagacttgaaaagcatcagtttccctcccacggctgggtttttgtgtctgaaatacatctaattctccaaactgcagcccctctcagccccgagcacctgagcgctggggaggcccttattgagctcagcctggagaggggagggtcgcacgggtcccgggggcaggtctcctgcactggctcttcccttctgccagcttggaatttggttctcatcctgccacaggggtgcgtttcctaaaaggcagccggagcagctcaaaggtnacaactgagatgcatttctaggcaggggcagggaaggcccacccnccttgcagccagttttctgtttctgtaaatagcagtgtatagagatggaagggcagcgtgggtgtatccacagatgggtttaggnnnnnnnnnnggatgttttctattacctcattcagcaactttatgtttcacaataactcaatgatgctttatttatattgtttgtactgtaattaaaaccattnacagacatttcactttgcttgttatttcatatgatcttgttttgattaaatatgccagtttgtattttcctgccttgggatttttttgtgtccgctnnacacnannctaagggaaaannnnnnnnttatgatgtgtaaagt

SEQ ID NO: 258045 - DNA, 1084 bp, Homo Sapiens
  misc_feature (16)..(16): n is a, c, g, or t
  misc_feature (39)..(40): n is a, c, g, or t
  misc_feature (76)..(76): n is a, c, g, or t
  misc_feature (650)..(650): n is a, c, g, or t
  misc_feature (665)..(665): n is a, c, g, or t
  misc_feature (674)..(676): n is a, c, g, or t
  misc_feature (680)..(680): n is a, c, g, or t
  misc_feature (684)..(684): n is a, c, g, or t
  misc_feature (686)..(686): n is a, c, g, or t
  misc_feature (694)..(694): n is a, c, g, or t
  misc_feature (697)..(697): n is a, c, g, or t
  misc_feature (709)..(710): n is a, c, g, or t
  misc_feature (712)..(714): n is a, c, g, or t
  misc_feature (718)..(721): n is a, c, g, or t
  misc_feature (728)..(728): n is a, c, g, or t
  misc_feature (1066)..(1066): n is a, c, g, or t
acaggtgggactatgnctctttgcacctacatatccagnngacatcccctcaattggttggcacctactacagganatccagaccaacttcattgacatggagaacatgttgacttgctgaaagagagacagaagtgaagaaccttcctggagcagcgccccttcgctttcagaagggccgtattgagtttgagaacgtgcacttcagctatgccgatgggcgggagactctgcaggacgtgtctttcactgtgatgcctggacagacacttgccctggtgggcccatctggggcagggaagagcacaattttgcgcctgctgtttcgcttctacgacatcagctctggctgcatccgaatagatgggcaggacatttcacaggtgacccagggcctctctccggtctcacattgggagttgtgccccaagacactgtcctcttttaatgacaccatcgccgacaatatccgttacggccgtgtcacagctgggaatgatgaggtggaggctgctgctcaggctgcaggcatccatgatgccattatggctttccctgaagggtacaggacacaggtgggcgagcggggactgaagctgagcggcggggagaagcagcgcgtcgccattgcccgcaccatcctcaaggcnccgggcatcattctnctggatgannnaacntcancnctggatanatntaatgagagggnnannnaggnnnntctgccnaaagtctgtgccaaccgcaccaccatcgtagtggcacacaggctctcaactgtggtcaatgctgaccagatcctcgtcatcaaggatggctgcatcgtggagaggggacgacacgaggctctgttgtcccgaggtggggtgtatgctgacatgtggcagctgcagcagggacaggaagaaacctctgaagacactaagcctcagaccatggaacggtgacaaaagtttggccacttccctctcaaagactaacccagaagggaataagatgtgtctcctttccctggcttatttcatcctggtcttggggtatggtgctagctatggtaagggaaagngccctttccgaaaaacat

SEQ ID NO: 258046 - DNA, 1143 bp, Homo Sapiens
  misc_feature (787)..(787): n is a, c, g, or t
  misc_feature (845)..(845): n is a, c, g, or t
ctataaaataggaccacacattgagtgcccgttccaaacccatgagccccaggcagatgagcaccaccagctgcagagctggactccctcgaggccacaggtagccactcaggaggcggagcttcctgccaaaatctcgccaggtagactgttgggctgctgaccgaacctggctcctttccacatcttggtcctcttcatgaacctgcaatgtataggactggggacgaagtccaggggcccagagacccaggacaaacagccctccagagaccacataccgcagaaccaacaggctaaactgaacctgctggcccaagtctgcccttgcccaccaccactgtgggctgttccaagacaccagggccaagttctcagctgcaaacgccacagtccagaggagcaggagaccagggctgtgcctgaacagtgatccagatgcccattgccagacgctgccgtgcctggctccgctccacgacaagcagccacaggccacaggcgccggccagactctccagcacggaggccagaagtagatagcttggcagtggggccccccgggcagtgcccacccggccagccaggccggccaggggcagcgccgcctgaagtgtggccagaagcagctgcagaacgtagggagagatgcgagggccggccccccaagacagcgaatcagcaccagcgggccgctcccggcgtctgcagggaagagccagcaccaaggccagagtccccagagcaatccgcgtcgagggaacgagcgtgaagaagaagcagggantcaggccatcctgcatccaggccggacccacgggccttcggcctcgcagtagttgccnacagtcaccatggcaatgcgtggacgccggccgaggctgcgggcactgcgggaccggaggccgggactggtcactcggagaggggcgcggacatccgggtgccttggctcacgtagccgctgggcgccaagctgcgggggtcccgggaaggaacgcacgtggaccaggcctcaccgcccactcccctagcgcacgcgccgccgccacgcactcacgcagggcacgtacgccgtctcagcacggccccgctggctctgggcccgggacccttctgccaactgcatcccgggaattccgg

SEQ ID NO: 258047 - DNA, 629 bp, Homo Sapiens
tcttcctggttgggccctgccctgagctgccaccgggaagccagcctcagggactgcagcgacccccaaacacccctcccccaggatgtcggaggagatcatcacgccggtgtactgcactggggtgtcagcccaagtgcagaagcagcgggccagggagctgggcctgggccgccatgagaatgccatcaagtacctgggccaggattatgagcagctgcgggtgcgatgcctgcagagtgggaccctcttccgtgatgaggccttccccccggtaccccagagcctgggttacaaggacctgggtcccaattcctccaagacctatggcatcaagtggaagcgtcccacggaactgctgtcaaacccccagttcattgtggatggagctacccgcacagacatctgccagggagcactgggggactgctggctcttggcggccatcgcctccctcactctcaacgacaccctcctgcaccgagtggttccgcacggccagagcttccagaatggctatgccggcatcttccatttccagctgtggcaatttggggagtgggtggacgtggtcgtggatgacctgctgcccatcaaggacgggaagctagtgttcgtgcactctgccg

SEQ ID NO: 258048 - DNA, 2463 bp, Homo Sapiens
cggctggaccggccggattcccgggatagatggtatgccggcatcttccatttccgctgtggcaatttggggagtgggtggacgtggtcgtggatgacctgctgcccatcaaggacgggaagctagtgttcgtgcactctgccgaaggcaacgagttctggagcgccctgcttgagaaggcctatgccaaggtaaatggcagctacgaggccctgtcagggggcagcacctcagagggctttgaggacttcacaggcggggttaccgagtggtacgagttgcgcaaggctcccagtgacctctaccagatcatcctcaaggcgctggagcggggctccctgctgggctgctccatagacatctccagcgttctagacatggaggccatcactttcaagaagttggtgaagggccatgcctactctgtgaccggggccaagcaggtgaactaccgaggccaggtggtgagcctgatccggatgcggaacccctggggcgaggtggagtggacgggagcctggagcgacagctcctcagagtggaacaacgtggacccatatgaacgggaccagctccgggtcaagatggaggacggggagttctggatgtcattccgagacttcatgcgggagttcacccgcctggagatctgcaacctcacacccgacgccctcaagagccggaccatccgcaaatggaacaccacactctacgaaggcacctggcggcgggggagcaccgcggggggctgccgaaactacccagccaccttctgggtggacaattcggcacgagggctggatgagacggatgacccggacgactacggggaccgcgagtcaggctgcagcttcgtgctcgcccttatgcagaagcaccgtcgccgcgagcgccgcttcggccgcgacatggagactattggcttcgcggtctacgaggtccctccggagctggtgggccagccggccgtacacttgaagcgtgacttcttcctggccaatgcgtctcgggcgcgctcagagcagttcatcaacctgcgagaggtcagcacccgcttccgcctgccacccggggagtatgtggtggtgccctccaccttcgagcccaacaaggagggcgacttcgtgctgcgcttcttctcagagaagagtgctgggactgtggagctggatgaccagatccaggccaatctccccgatgagcaagtgctctcagaagaggagattgacgagaacttcaaggccctcttcaggcagctggcaggggaggacatggagatcagcgtgaaggagttgcggacaatcctcaataggatcatcagcaaacacaaagacctgcggaccaagggcttcagcctagagtcgtgccgcagcatggtgaacctcatggatcgtgatggcaatgggaagctgggcctggtggagttcaacatcctgtggaaccgcatccggaattacctgtccatcttccggaagtttgacctggacaagtcgggcagcatgagtgcctacgagatgcggatggccattgagtcggcaggcttcaagctcaacaagaagctgtacgagctcatcatcacccgctactcggagcccgacctggcggtcgactttgacaatttcgtttgctgcctggtgcggctagagaccatgttccgatttttcaaaactctggacacagatctggatggagttgtgacctttgacttgtttaagtggttgcagctgaccatgtttgcatgaggcagggactcggtcccccttgccgtgctcccctccctcctcgtctgccaagcctcgcctcctaccacaccacaccaggccaccccagctgcaagtgccttccttggagcagagaggcagcctcgtcctcctgtcccctctcctcccagccaccatcgttcatctgctccgggcagaactgtgtggcccctgcctgtgccagccatggggctcgggatggactccctgggccccacccattgccaagccaggaaggcagctttcgcttgttcctgcctcgggacagccccgggtttccccagcatcctgatgtgtcccctctccccacttcagaggccacccactcagcaccaccggcctggccttgcctgcagactataaactataaccactagctcgacacagtctgcagtccaggcgtgtggagacgcctcccggctcggggaggccccggggctgggaacgcctgtgccttcctgcgccgaagccaacgccccctctgtccttccctggccctgctgccgaccaggagctgcccagcctgtgggcggtcggccttccctccttcgctccttttttatattagtgattttaaaggggactcttcagggacttgtgtactggttatggggagtgccagaggcactaggcttggggtggggaggtcccgtgttccatatagaggaaccccaaataataaaaggccccacatctgtctgtg

SEQ ID NO: 258049 - DNA, 923 bp, Homo Sapiens
atgtagcgaggcctgggtggcgaattcggcacgaggatcacccgctactcggagcccgacctggcggtcgactttgacaatttcgtttgctgcctggtgcggctagagaccatgttccgatttttcaaaactctggacacagatctggatggagttgtgacctttgacttgtttaagtggttgcagctgaccatgtttgcatgaggcagggactcggtcccccttgccgtgctcccctccctcctcgtctgccaagcctcgcctcctaccacaccacaccaggccaccccagctgcaagtgccttccttggagcagagaggcagcctcgtcctcctgtcccctctcctcccagccaccatcgttcatctgctccgggcagaactgtgtggcccctgcctgtgccagccatgggctcgggatggactccctgggccccacccattgccaagccaggaaggcagctttcgcttgttcctgcctcgggacagccccgggtttccccagcatcctgatgtgtcccctctccccacttcagaggccacccactcagcaccaccggcctggccttgcctgcagactataaactataaccactagctcgacacagtctgcagtccaggcgtgtggagccgcctcccggctcggggaggccccggggctgggaacgcctgtgccttcctgcgccgaaaccaacgccccctctgtccttccctggccctgctgccgaccaggagctgcccagcctgtgggcggtcggccttccctccttcgctccttttttatattagtgattttaaaggggactcttcagggacttgtgtactgggtttatgggggtgccacaaggactaggctggggggtgggggaaggcccccggttccttttaaagggacccccaaatataaaaaggcccccctttct

SEQ ID NO: 258050 - DNA, 592 bp, Homo Sapiens
  misc_feature (25)..(25): n is a, c, g, or t
  misc_feature (47)..(47): n is a, c, g, or t
  misc_feature (56)..(56): n is a, c, g, or t
  misc_feature (93)..(127): n is a, c, g, or t
  misc_feature (408)..(418): n is a, c, g, or t
gagacccttgcatcccctccctcanccctaggaaggccccctagggntgcccccanctcagtgtccccctgaactctttatttgcccttattnnnnnnnnnnnnnnnnnnnnnnnnnnnnnnnnnnnaaatagctattttgcttaaatttctacagtatgtaaaagtgaaaaaatgatgaagacgggtgcacctgtctgagtttggccctcatgtgagctgtgcccttccctctcctcatgcccccttccagcggcttctgccaaccatggggggctggaccaccatggccactgacccagcccctcagaatcccacactccaatcctttccatttcagtttagtcctaaaagttcatcacagggtctttctttctactccaggactggttttgtttttatatatatnnnnnnnnnnngtgaaaacaccaatgtgtgaaatgccttacaatgcccactggagaggcggggcggggtggggcaggatgccccactagggctcctacagagctgtggaatgtacctctccccaacactgttttgttagcgagcaccttttgaccagtaataaaaaaccttggctttggagttta

SEQ ID NO: 258051 - DNA, 603 bp, Homo Sapiens
aaaaaggcaaataaagagttcaggggacactgagatggggcacccctagggccctcctaggatgaggagggatgcaaggtctctggtgcccagggtcaccagcccaggctggcccaagggtttgttcattattgctgatttggggcctgggtctcagggcggggagcacctgcaggccctgcttcccagcccttcctggcctcttggggctagggagccacccaggctggctagggtgaggccagggactgctgccctcaaatccacatgggggttaccatcagtaccccctcctgcatctgtggatgggagctccagaaactctgtgctctgcctggctggggcagcccccttctgttttgggctctgtggggccttggcaggtgggggtgtgggcagctcagataccatcgaggacttgatatgttgagctacaaaattctcccaactcaaagcggtctggcttcctgatgtcttaaaaataaggggctcttgccaggacacttttgtggcaagaaagcacacttggaaagctgtctgctaagtgcggtactaaaaatatttactaaacatcatggctggaaagaaatggagatcattttt

SEQ ID NO: 258052 - DNA, 1065 bp, Homo Sapiens
gaggggaattaaattttagtcaaaatacaacaatttcccaaacctcgagagttctcagattcaggagtttgagaaccagaactgctatatccttccatgtcttgccttctttgttgaaccactccatccagatctgagaattcatcattgaaatccagaggcagagatgaagggcggtctgctcggaaactgttttcagcagaagatggattgggactgttaccaacacttgtattttctaagtgtccacacacagattttagtagtttgtaagttgaatctctggagagtaaggagacaaatatgtacctgtctgtgactgttgctatgatcagggcgtttggcactagaagagcagttttggttttctttattagggttaccgagaaagctggaatagagatctttgtgtcttttccaaagactttggaatgaaaacaaatccagttttctgatacaaagagctttccttggtatagtatttctttctgtagagcacaggtaaagcttcgcttcagtggttcctccgttgggacactaagaaacaacttgtgaaagtgcatattggccttgtactggctggaagatgaagacttttttctttcagtcttagggtcatttttgctttctgtttcacagtcgttcttatcacttgctaaagaggcaccatcaaaactggattttgaccataggctaatgattttcttctggtctggggagtccgcctccacagatggggtaggggattgggctgttggcgacctgcaggctttctttttctcctccacaccattctcagcctctgagctgaggaacaccgagctggggctgtctgtggagctgcgtgaggcctccacgttggccttccttgggctgcccggagtctcaaaccggaacaccgtgtcactagaaggcagccttttcttcaccattgtgcgcttattgacccgcaagtcaaggaacaaccttaaaagctcatttctgagtctcccaaataatatgaaaatctctgcgtttcagctttgtacagtccttgaattgcaggaagctctttcttcatgtccc

SEQ ID NO: 258053 - DNA, 273 bp, Homo Sapiens
  misc_feature (206)..(206): n is a, c, g, or t
aaaaccaaaactgctcttctagtgccaaacgccctgatcatagcaacagtcacagacagggtgagtatgcagccgagcgaagggcatctttgctttgtcctcctgctctgggctctgctgcctaaggggtctcttgccaaggaccaagactccaaaccataaaatatcatctcctgtgggtgaatcagggaaaattccataaggantaattttaaaaattattggcctgtaggacatttcatgtagtgctgtttccctttcacagggtgattt

SEQ ID NO: 258054 - DNA, 956 bp, Homo Sapiens
  misc_feature (108)..(108): n is a, c, g, or t
  misc_feature (894)..(894): n is a, c, g, or t
  misc_feature (919)..(919): n is a, c, g, or t
  misc_feature (930)..(930): n is a, c, g, or t
  misc_feature (935)..(935): n is a, c, g, or t
aaaaagcaggctggtaccggtccggaattcccgggatgcagcggacgtgagcgataatggcggatatggaggatctcttcgggagcgacgccgacagcgaagctaagncgtaaagattctgattctggatctgactcagattctgatcaagagaatgctgcctctggcagtaatgcctctggaagtgaaagtgatcaggatgaaagaggtgattcaggacaaccaagtaataaggaactgtttggagatgacagtgaggacgagggagcttcacatcatagtggtagtgataatcactctgaaagatcagacaatagatcagaagcttctgagcgttctgaccatgaggacaatgacccctcagatgtagatcagcacagtggatcagaagcccctaatgatgatgaagacgaaggtcatagatcggatggagggagccatcattcagaagcagaaggttctgaaaaagcacattcagatgatgaaaaatggggcagagaagataaaagtgaccagtcagatgatgaaaagatacaaaattctgatgatgaggagagggcacaaggatctgatgaagataagctgcagaattctgacgatgatgagaaaatgcagaacacagatgatgaggagaggcctcagctttccgatgatgagagacaacagctatctgaggaggaaaaggctaattctgatgatgaacggccggtagcttctgataatgatgatgagaaacagaattctgatgatgaagaacaaccacagctgtctgatggaagagaaaaggcaaaatcctgatgatggaaggccacaggcctcagatgaagaacacaggcattcagatgatgaagaggacaggatcataaatcagaatctgcaaaggcagtaatagtnagatgaagtttacgatgatacgcanattgcgattgntctgntcagagcggatgtgccctgag

SEQ ID NO: 258055 - DNA, 587 bp, Homo Sapiens
  misc_feature (20)..(20): n is a, c, g, or t
  misc_feature (26)..(26): n is a, c, g, or t
  misc_feature (41)..(41): n is a, c, g, or t
  misc_feature (43)..(44): n is a, c, g, or t
  misc_feature (60)..(60): n is a, c, g, or t
attgcaaaccctgagtacanttaggncccagtgttatgttntnnctcatacatgtcacanaatatctccttctcaccatctctgtcgaaagccatcctgacatcttcaattaggtcactaaatcctgatactcggtatagtccttcagaattaagacctctagactcaatctccctgatgcacatgtctaccaccattggccgcttagtggtatgtgctttcacgagcgtcgtaaggtcacagctgtacacctttttgacatgcttcaagtctggcttacagtcatttgggaccatcttggaacactgcttatgaacattcaaaccacaatctgcacatttcactccctgagcaatgagaccccacataaagttggcacagtattcacaccagtgtggccctctgaatgtatgcaccttgaaattgtgaatcttttcatattttggaatttgctcgttttctttcagagttgctcttctaacaagggatgtcaaccttttctctgacaccccatcctggcctgtagaatctctctcatcatgtgtctctttcaggactggcatatgttttttgtatgctggctctct

SEQ ID NO: 258056 - DNA, 720 bp, Homo Sapiens
aagtagcgaggcctgggtggcgaattcggcacgaggtgaagactctgtgcaaactggccgtgattcagtataacctagaccagtcctgtttgcctcatgatatcaggtgggagctgaatgccatgaccaccaacagcaatatcagtcgccccatcgtctcctcccatgggtaggaggaagtttctgccacctcccctcctgagcctgctgtcatcttcactgcccctgcccatctgtcacccacctgctcctttgacccctgggacttggtatacctccatgtggagttgttgggcgagaggtgttctctgtgctgtgaattcagtggggagctgtagcggggtgggggctaggttcctccccccttgggccgagggccccttccccttggtgctctgtccccatccacctcctttcagctgctcctgggcctcagctctgcccagggccagccaggttctgctgggaagggaagggaatggggagaagggagaagcaagcaatgtctgaacctcaggagcttccccctccctatttgcctatccccaccacgctgcttgaccctagggcccataaccgcgtcctgaaaaataaaggccgggaataaaaaagctggactcccctgggatgcccctagagccaggaggaaaaagcctaagggactgcctggggaacttacccaatcgcccccggaggctaatgggggtaattgggcccggc

SEQ ID NO: 258057 - DNA, 939 bp, Homo Sapiens
ggcctgggtggcgaattcggcacgaggggaagttaatcctgtgtcctttacctggaaaaaattgaaccgaaggggaaggggccatgtccccgccggcgccagtgctgctgtattgttggtgacaagattgtcctctttgggggtaccagtccatctcctgaggaaggcctgggagatgaatttgaccttatagatcattctgacttacacattttggactttagccctagtctgaagactctgtgcaaactggccgtgattcagtataacctagaccagtcctgtttgcctcatgatatcaggtgggagctgaatgccatgaccaccaacagcaatatcagtcgccccatcgtctcctcccatgggtaggaggaagtttctgccacctcccctcctgagcctgctgtcatcttcactgcccctgcccatctgtcacccacctgctcctttgacccctggacttggtatacctccatgtggagttgttgggcgagaggtgttctctgtgctgtgaattcagtggggagctgtagcggggtgggggctaggttcctccccccttgggccgagggccccttccccttggtgctctgtccccatccacctcctttcagctgctcctgggcctcagctctgcccagggccagccaggttctgctgggaagggaagggaatggggagaagggagaagcaagcagtgtctgagcctcaggagcttccccctccccctttgcctatcccctcccctctgcttgagccttgagccttgactgggagctgaaaggagttgcagctgttggcatgagacctccttctccccgtcttggggaggtggggaccagcagataaatcccacccttcctttgagctgtcgctgtactctgaagttcagccagctcagattttataaaaattaattaaaatctctaagaagggagc

SEQ ID NO: 258058 - DNA, 333 bp, Homo Sapiens
  misc_feature (312)..(312): n is a, c, g, or t
ttgcgagggcccctttccccttggtgcctctgtcccccatcccacctccctttcagctgcctccctgggcctcagctcctgccccagggccagcccaggttctgctgggaagggaagggaatggggagaagggagaagcaagcagtgtctgagcctcaggagcttccccctccccctttgcctatcccctcccctctgcttgagccttgagccttgactgggagctgaaaggagttgcagctgttggcatgagacctcctttctccccgtcttggggaggtggggaccagcagataaatcccacccttcctntgatgtcgctgtactctgaag

SEQ ID NO: 258059 - DNA, 668 bp, Homo Sapiens
  misc_feature (41)..(41): n is a, c, g, or t
  misc_feature (79)..(81): n is a, c, g, or t
  misc_feature (83)..(85): n is a, c, g, or t
  misc_feature (87)..(87): n is a, c, g, or t
  misc_feature (357)..(357): n is a, c, g, or t
caggcatgtccagcacctgcgccagtgctgctgtattgttngtgacaagattgtcctctttgggggtaccaggttagannntnnnanggaaggggctcagggaagtcactaatgggagagtgggaggtatttgaaaagggggtttcgtgggtagtttttgtcctactttcatctctcttttgatcccgacagtccatctcttgaggaaggcctgggagatgaatttgaccttatagatcattctgacttacacatttgggactttagtaagtatagttattcctgaaattgctcctgccatcaaggtccctgtctttgggtggtgatatccaggactggatcctttcctcacctttngaccatctcctttccacaaacttctcccttaaaggccctagtctgaagactctggtgcaaactggccgtgattcagtataacctagaccagtcctgtttgcctcatgatatcaggtacagcgagtggttggaagggagggattgagtgagggtgagtgagcagcacaggtgtgacctgattagcttggtttcagtatggaggagacagacatttttgttctgctggagatgtagtgtacttgtgggaaatgagatggaaggaggtgaattgacagccatcatataaaactgtcagcagaataaattatatg

SEQ ID NO: 258060 - DNA, 1074 bp, Homo Sapiens
  misc_feature (849)..(849): n is a, c, g, or t
  misc_feature (917)..(917): n is a, c, g, or t
  misc_feature (926)..(926): n is a, c, g, or t
  misc_feature (934)..(934): n is a, c, g, or t
  misc_feature (959)..(960): n is a, c, g, or t
  misc_feature (975)..(975): n is a, c, g, or t
  misc_feature (980)..(980): n is a, c, g, or t
  misc_feature (993)..(993): n is a, c, g, or t
  misc_feature (997)..(997): n is a, c, g, or t
  misc_feature (1020)..(1020): n is a, c, g, or t
  misc_feature (1032)..(1033): n is a, c, g, or t
  misc_feature (1040)..(1041): n is a, c, g, or t
  misc_feature (1045)..(1045): n is a, c, g, or t
  misc_feature (1051)..(1051): n is a, c, g, or t
  misc_feature (1053)..(1054): n is a, c, g, or t
  misc_feature (1060)..(1061): n is a, c, g, or t
tcccgggatgcgggaaacgagtttcaatccactttcctgaccccaaccatcctgcccactctccgcttccccgtcttgtacacccctaactcctgaggctcctccgaatcacgcgagtggaagcggacaagctcaagtggccgccatgtcagaggcttatttcccagtggagtcaggtgcgctggggcctgaggagaactttctttctttggacgacatcctgatgtcccacgagaagctgccggcgcgcacggagaccgccatgcctcgccttggcgctttcttcctgcaccggaccgcacgcgccgacaccgacaacgcggccccacaaggttccaagcttgaactacccttgtggctggcaaaaggactttttgacaacaagccacggatcctttccgcggaactccccaagatctaacaagaggcttgaaggactgagatcagtgcacatcccaatgtggtggacctccacaaaatggggccccatttctacgggtttggctcccagctcctgcattttgacagttccgagaatgcagacatttcccagtctctgctgcagacttttatcggacgttttcgccgcatcatggactcctcacagaatgcttacaacgaagacacttcagccctggtagccaggctagacgagatggagaggggcttatttcaaacagggcagaaaggactgaatgactttcagtgttgggagaaggggcaggcttctcagatcacagcttccaacctcgttcagaattacaagaagagaaaattcactgatatggaagactgaaagccggaagaacacagaatggctcctcacagacgtatccctccgtgtgttcnttgataggagctggttgaccttgtacagaacagaatcctgtcccatttcatggcttatttcctgtggncatagagantatagggnactggacatgctggaggatgtgggnntcctggctctgtganttttncaagaccgtccancctnctgaccaaagccaaggccctttnaccaagaaccanngcaaggnnaatnaagtcntnntaatannaatactgcatata

SEQ ID NO: 258061 - DNA, 972 bp, Homo Sapiens
  misc_feature (470)..(470): n is a, c, g, or t
  misc_feature (472)..(472): n is a, c, g, or t
  misc_feature (474)..(475): n is a, c, g, or t
  misc_feature (477)..(477): n is a, c, g, or t
  misc_feature (479)..(480): n is a, c, g, or t
  misc_feature (482)..(482): n is a, c, g, or t
  misc_feature (484)..(484): n is a, c, g, or t
  misc_feature (488)..(488): n is a, c, g, or t
  misc_feature (493)..(494): n is a, c, g, or t
  misc_feature (500)..(500): n is a, c, g, or t
  misc_feature (503)..(504): n is a, c, g, or t
cggaccgggacgcagagtctgcggacccggcgccgaggcggccacccgagacgcggcgcgcacgctccggcctgcgcagcccggcccggccatggcggccccccgcccgtctcccgcgatctccgtttcggtctcggctccggctttttacgccccgcagaagaagttcggccctgtggtggccccaaagcccaaagtgaatcccttccggcccggggacagcgagcctcccccggcacccggggcccagcgcgcacagatgggccgggtgggcgagattcccccgccgcccccggaagactttcccctgcctccacctccccttgctggggatggcgacgatgcagagggtgctctgggaggtgccttcccgccgccccctcccccgatcgaggaatcatttccccctgcgcctctggaggaggagatcttcccttccccgccgcctcctccggaggaggagggagggncngnngncnncntnccgnccccnnccgcgnccnnggagacggcgagcaggagcgacttggagaccgactctctgtcctccctgcttgatgacatgaagacgaatgatcctttccaaaccccggtggtcatctgcatctgtgccccccccagccggccactccattcactgtcgaagcaagagaatcccccctgcagcccggggggccacagcaacccctggattccctgcgaaagttccccttacaagctacccaattcacctgcctccacgaatccgaggatcagggttcacaaggcccgggcccccgggtcccctgatacaaatatgcaggcctctcaacccccagggcgcctaggtccccaactttcgacgctgcgcggatccccgataacccaccctgagtgatcctttttccgattaaacaacacgctcacccccccgggagatacacgactccgcgagattagccgcgagtacctattctccgccgaagtctcgtg

SEQ ID NO: 258062 - DNA, 871 bp, Homo Sapiens
  misc_feature (836)..(836): n is a, c, g, or t
tgtctccctcgctcagcctcgcttcccgcactgtaagatgaggcagttgcagaggaggcctcggacgtcctgtgaccctcggcccacactcccccttgggtggccctggcagggctggctaggtgcgttccctgcagaccacgggaagccctgtgcttgcctgggtcagggctaagctgtgccccctagaggagggaggaggactgcagattcttggtcgagaagaatgaagaggatttctgtgtttgctgagcagccattgtggagggttacccgcctccactttcccgttgcccatttcactgccaccagctcctcttcctctgctcgaacctatgagtcccagcctcactggcggcctcagacatgctcaggagtgacggggacagagggaggccgctgagttgcccgttagaactcttactgctgcgccagtgacccaggtggagagggaccctgaaccaaacagaacgtgtgctaattttccgaactccaaactgtacactcatattcatttttaaattgtatttttccaaacttcaaaaaggacgatgagcgtgggggataggaaacaaaacctgtaaacgttgtgaatgggctcagtggactctgggaccaaaccttctgtaatctctaaaacaatgggaccaagagctggatggaacctggagtcaaaaagaactgcttcagtccccgctgtaccgcctgcctagctgtgggagcaggcagggcgcctgggagcctgcgttttctggaccgttccatgggactcatccctacctcacagggctgttgtgaggtgttgtgtgactgcgtgtcctgcaaacgcccaagcntcgtgcccagccagcggtgggcacccaataaacgc

SEQ ID NO: 258063 - DNA, 1696 bp, Homo Sapiens
cgtgacgcagcccgggtctcagggaacatggcggcgctggtgagacccgcgaggtttgtcgtgcgaccgttgctgcaggtggtccaggcttgggaccttgacgcgaggcgctgggtccgggcgctgcggcggagcccagtgaaagtggtgtttccttccggagaggtggtggaacagaagcgcgctcctgggaagcagccccgcaaggcaccatctgaggccagtgcccaggagcaacgagagaaacaaccgctcgaggagtccgcatcccgcgctcccagcacctgggaagagtctgggcttcgctacgataaagcttatcccggggacaggaggctgagcagtgtaatgacaatagtaaagtccaggccatttcgggaaaaacaagggaagatcctgctggaaggtcgcaggctcatttcagacgctctcaaggctggagctgtgccaaaaatgttcttctttagccgtctagaatacctaaaggagttgccagtcgataagctgaaaggtgtcagcctcattaaggtgaaatttgaggatatcaaggattggtccgacctcgtaacgccacaaggaataatggggatttttgccaagcctgaccatgttaagatgacatatccaaagactcagcttcagcattcactgcctttattattgatttgtgacaatctccgtgaccctgggaacctggggacaattctgagatctgcagctggggcaggctgcagcaaagtgttactcaccaaaggctgtgtggatgcctggggagcccaaagtgctccgggcgggtatgggcgcacatttccggatgcccattatcaataatctggaatgggaaaccgtgcccaattacctgccccctgacactcgggtctatgtggctgacaactgtggcctttatgcccaggctgagatgtctaataaagctagtgaccatggctgggtgtgtgatcaacgagtgatgaagtttcacaagtatgaggaagaggaagatgtagaaaccggagccagtcaagattggctgcctcatgttgaggttcagagttacgactcggactggacagaggcgccggcagctgtggtgattggcggggagacctacggcgtgagcctggagtccctgcagctggccgagagcactggtggcaagaggctgctgatccccgttgtgcctggtgtggacagcctcaactcggccatggcggcaagcatcctgcttttcgaagggaaaagacagctgcgggggagggcggaggacttgagcagggacaggagttaccactgaggacgcagaagtgacttctgcttgaggacgtctgcagctcctcctacaccagcacactggtgggaggctggcggagtcagtgactatggcccccacgttcaggaggaaggtgtgatgccgtcatacagttacaggaaaaataagaacttcctcagaaagaacaggtccgaattcttcctgtcgcgtcactgattttgaggttcttttttctcttggtgacaataggtgacccacgtggctctgtgtgtttttaaaaattgtccaccaagaagcactttgtgcccagaaagttcctgaagcatcatcctggcagggaggcgcctgctccaccagctggtgggtgtttgtaatcgccaagcaccagctataggtaacagccacatcactcacagctgatcactggtt

SEQ ID NO: 258064 - DNA, 1923 bp, Homo Sapiens
  misc_feature (25)..(25): n is a, c, g, or t
gcggcggcgacagagcgagcgcggncgcggggccaccatgggggcccagctcagcacgttgggccatatggtgctcttcccagtctggttcctgtacagtctgctcatgaagctgttccagcgctccacgccagccatcaccctcgagagcccggacatcaagtacccgctgcggctcatcgaccgggagatcatcagccatgacacccggcgcttccgctttgccctgccgtcaccccagcacatcctgggcctccctgtcggccagcacatctacctctcggctcgaattgatggaaacctggtcgtccggccctatacacccatctccagcgatgatgacaagggcttcgtggacctggtcatcaaggtttacttcaaggacacccatcccaagtttcccgctggagggaagatgtctcagtacctggagagcatgcagattggagacaccattgagttccggggccccagtgggctgctggtctaccagggcaaagggaagttcgccatccgacctgacaaaaagtccaaccctatcatcaggacagtgaagtctgtgggcatgatcgcgggagggacaggcatcaccccgatgctgcaggtgatccgcgccatcatgaaggaccctgatgaccacactgtgtgccacctgctctttgccaaccagaccgagaaggacatcctgctgcgacctgagctggaggaactcaggaacaaacattctgcacgcttcaagctctggtacacgctggacagagcccctgaagcctgggactacggccagggcttcgtgaatgaggagatgatccgggaccaccttccacccccagaggaggagccgctggtgctgatgtgtggccccccacccatgatccagtacgcctgccttcccaacctggaccacgtgggccaccccacggagcgctgcttcgtcttctgagggccgggcacggtcacacggccacccgccccgcgcaccccacgccctgttcacgctcacccggtcacctccccacatcgcacactggggccccgggttcagcctggcctgcccgtgccctggtgaatcacctggctgagcagttcccctggagccccttcgggagcagggctgtgtcccagatgggccacggctgagccttcagagtacgtcctgcctggcacttactggtccttaccagagacgcccagccccatccctgtcctcatgacccctcgtccaccccccacacacactataaggctgagggctgccagcagccccgtctgcccaccattcccggccgtggaccatagtcgggatgtcagcagacacacatgggcagcccaaagctgcaggtgccagggcccaccccagcctcgcctgtcacccccactcccgcctcagggccaggcccaggcctcaccacctgacgctgcatgagacattgacaccagaaagccctcttgggggcactgctccctaccccagggccctggccagccgggagcttggctctcctctggctagagtgggaagagggggctggccatggggccctcccagaacctcagcatttccttccagcccatccaaacactgaggcagccttggggaaccccgagctggggggttggcagcccactgcaccgcctcagggttttggggtcctgggctggggccaccatccctgatggcagaactcccacaaccacatgtatttattcctctgtcctaaaccgtcccctccttccctcacccccagcacagggggattctgagcagtgcctcttgtctgagggacatatcagtgacctcgacgttgcctttagactacagttgtgttagcctcttgcgtattggctttttcagagtcatttatgagcagatagacaacacaaagtaaaccttggcctacttttacacaaggctccaaccaa

SEQ ID NO: 258065 - DNA, 1372 bp, Homo Sapiens
  misc_feature (1222)..(1222): n is a, c, g, or t
ggtcgccacggtaacgcgcgcgggcaggtgtccgaccatgagcgtccgggtcgcacgggtagcgtgggtcaggggcttgggcgccagctaccgccgcggcgcctcgagcttcccggtgcctccgccgggcgcccagggtgtagcggagctgctgcgagatgcgaccggggcggaggaggaggcgccctgggcggcgacggagcggcgaatgccgggccagtgctccgtgctgctcttcccgggccagggcagccaggtggtgggcatgggccgcggtctgctcaactacccgcgcgtccgcgaactctacgccgccgcccgccgcgtgctgggctacgacctgctggaactgagcctgcacgggccgcaggagaccctggaccgcaccgtgcactgtcagcccgcgatcttcgtggcatcgctggccgctgtcgagaaactacatcacctgcagccctcggtgattgagaactgtgttgctgctgctggattcagtgtgggagagtttgcagccctagtgtttgccggagccatggaatttgctgaaggtttgtatgcagtgaaaatccgagctgaggccatgcaggaagcttcagaagctgtccccagtgggatgctgtctgtcctcggccagcctcagtccaagttcaacttcgcctgtttggaagcccgggaacactgcaagtctttaggcatagagaaccccgtatgtgaagtgtccaactacctctttccagattgcaggggtgatttcaggacaccaagaggctctacggtttctccagaagaattcctctaagtttcatttcagacgcaccaggatgttgccggttagtggcgcattccacacccgcctcatggagccagccgtggagcccctgacgcaagctttaaaggcagtcgacattaagaagcctctggtttctgtctactccaacgtccacgggcatagatacagggatcccgggcacatccacaagctgctggcccagcagctggtctccccagtgaagtgggagcagacgatgcatgccatatacgaaaggaaaaagggcagggggttcccccaaactttcgaagtaggccctggcaggcagctgggagccatcctgaagagctgtaacatgcaggcctggaagtcctacagcgccgtggatgtgctgcagaccctcgaacatgtggacctggaccctcaggagcccccgagatgactgcagggggnctcaaatgccaatgaccccctctgtcctcctgaggagaggctgtaggctgtgcctgtcgccccctaccttcctaatggctcctcctctgaggagtgaaagggatttgtttgcaacgtgctttgaaggccacataaaaagccctaaaaatg

SEQ ID NO: 258066 - DNA, 1137 bp, Homo Sapiens
ctggcttcaggctgttggcaaaggcgtgcaggtgcttcagcagcaggcgcaccaccaacacatgctcctcagtaggcgtgaacgactcttggtaggcgtggagggcctggaggctgggttgggcggggctgtagagggcgctggagacactgagtcggtagtgcagaacctccagcttggcatgaggggactgcattttttgatacatctccaaggaatagtgatgaagccacatttcaacaaaaacctggagcagagtttctgacctccagatctcgtgggaggcggggtctgcattcacagacgtctgatgagagatgtgtcgctttaggaggctagtgtggtggaggccataggaagcaaagggtatggctggtgtcctgggaggtggtgaggggctggtcccccctgggctggaggagagtggtgggggcacactgccttcggtgggcaggaaccatgacaggtacctgtccaccaggatgaaataggcacagtctgaagtacggacgtggagggacacaggaagtggcttctgagtgatgaggctcaaggcaaagaagaatatgtaatactcgaacggattcagggccaagttcagaccaaggcccccagtaggggtgaactggaccttgttgtggtacagaggactgtcagggaggatgcactcctggatggacgccttcacaggaccaggcaagtaggagacaggaaagtcgaacttatagtcttcagcttgaagcttataaaccaacttcatcattgggccaccagggtcgagaaattccatcacgatgctgtactccacaggattcacgcgcccctgtaagcagcggaggttccagccaacgaggacaccatctaggctgccaaaaatgctttctaccagccatgggaagatggtgtgcagctcctttgctggaaagtcctcaatgactttaaccaagtcttggcactgctgtgcaaagggcttatttatagagtcagctttcaggctagccagtagaaagctgggctgctgcaggtgagggaacgccatagcagcctccagtggagagttgaaaatggccttcttagcaaaccactgtgggatccatagcgtcgctcgcctcagagatggaagccgccattccgcca

SEQ ID NO: 258067 - DNA, 1184 bp, Homo Sapiens
ggacagtaactacaacggtttaaggtagcgaggcctgggtggcgaattcggcacgaggaacagcctgaagccagagcaggcctcaccctccgcccactcccacgccaccagccccctggaggagttcaaacgggctgctgtcccgaggttcgtccagcagaaactctacctcttcttgcagcattgctttggccactggcccctggacgcatcgttcagagctgtcctggagatgtggctgagctacctgcagccgtggcggtacgcgcctgacaagcaggctccgggcagcgactcccagccccggtgtgtgtcggagaaatgggcaccctttgtccaggagaacctgctgatgtacaccaagttgtttgtgggctttctgaaccgcgcgctccgcacagacctggtcagccccaagcacgcgctcatggtgttccgagtggccaaagtctttgcccagcccaacctggctgagatgattcagaaaggtgagcagctattcctggagccagagctggtcatcccccaccgccagcaccgactcttcacggcccccacattcactgggagcttcctgtcaccctggccaccagcggtcactgatgcctccttcaaggtgaagagccacgtctacagcctggagggccaggactgcaagtacaccccgatgtttgggcccgaggcccgcaccctggtcctgcgcctcgctcagctcatcacacaggccaaacacacagccaagtccatctccgaccagtgtgcggagagcccggctggccactccttcctctcatggctgggctttagctccatggacaccaatggctcctacacagccaacgacctggaacgagatgggggcagacagtgtcccggaagacagatgaatacctgggaggaagggccctgggagtacctggcgccaagatattccgggctcagcgaaagcgcaggctcacgcaagttccccttcgccttgggccccacccagggatggaaatggaaaaaagccacctccccgactggaattttggggtgaggcacgaactattccttaacgccccctggggcgggtaccacatcatctatgggggttgccaaagttttataaattgagatacccaggggggacccccggaagttgaagcccattccgaaggtttttgagtactccccaccttggt

SEQ ID NO: 258068 - DNA, 994 bp, Homo Sapiens
  misc_feature (776)..(776): n is a, c, g, or t
acggacgcgaggcctgggtggcgaattcggcacgagggctacctgcagccgtggcggtacgcgcctgacaagcaggctccgggcagcgactcccagccccggtgtgtgtcggagaaatgggcaccctttgtccaggagaacctgctgatgtacaccaagttgtttgtgggctttctgaaccgcgcgctccgcacagacctggtcagccccaagcacgcgctcatggtgttccgagtggccaaagtctttgcccagcccaacctggctgagatgattcagaaaggtgagcagctattcctggagccagagctggtcatcccccaccgccagcaccgactcttcacggcccccacattcactgggagcttcctgtcaccctggccaccagcggtcactgatgcctccttcaaggtgaagagccacgtctacagcctggagggccaggactgcaagtacaccccgatgtttgggcccgaggcccgcaccctggtcctgcgcctcgctcagctcatcacacaggccaaacacacagccaagtccatctccgaccagtgtgcggagagcccggctggccactccttcctctcatggctgggctttagctccatggacaccaatggctcctacacagccaacgacctggacgagatggggcaagacagtgtccggaagacagatgaatacctggagaaggccctggagtacctgcgccagatattccggctcagcgaagcgcagctcaggcagttcacactcgccttgggcaccacccaggnatgagaatggaaaaaagcaactccccgactgcatcgtgggggtgaggacggaactcatccttacgccccctgggggcgggtacccagatcattcaatggggcttgcgaaaagttttgaaaatttgaagaacccaaggggggaccccggaagcttgcaaccccattccgggaacctatgtaaaatccccaagcttgggtcccccccacctccttttagg

SEQ ID NO: 258069 - DNA, 3276 bp, Homo Sapiens
  misc_feature (1957)..(1957): n is a, c, g, or t
  misc_feature (2665)..(2832): n is a, c, g, or t
  misc_feature (2843)..(2858): n is a, c, g, or t
  misc_feature (2893)..(2949): n is a, c, g, or t
  misc_feature (2966)..(3014): n is a, c, g, or t
  misc_feature (3126)..(3147): n is a, c, g, or t
  misc_feature (3172)..(3221): n is a, c, g, or t
cactcccacgccaccagccccctggaggagatcaaacgggctgctgtcccgagcatcgtccagccaaaactctacttcttcttggcccactcctacgcccactgccccctggacgaatcgatcaggagctgctctggagatgtgcgtcagctacctgtctacctcttcttgcgccactgataagcacgctccgccctgcgactaccagtcccagtgtgcatagagatgtggctgagctacctgcagccgtggcggtacgcgcctgacaagcaggctccgggcagcgactcccagccccggtgtgtgtcggagaaatgggcaccctttgtccaggagaacctgctgatgtacaccaagttgtttgtgggctttctgaaccgcgcgctccgcacagacctggtcagccccaagcacgcgctcatggtgttccgagtggccaaagtctttgcccagcccaacctggctgagatgattcagaaaggtgagcagctattcctggagccagagctggtcatcccccaccgccagcaccgactcttcacggcccccacattcactgggagcttcctgtcaccctggccaccagcggtcactgatgcctccttcaaggtgaagagccacgtctacagcctggagggccaggactgcaagtacaccccgatgtttgggcccgaggcccgcaccctggtcctgcgcctcgctcagctcatcacacaggccaaacacacagccaagtccatctccgaccagtgtgcggagagcccggctggccactccttcctctcatggctgggctttagctccatggacaccaatggctcctacacagccaacgacctggacgagatggggcaagacagtgtccggaagacagatgaatacctggagaaggccctggagtacctgcgccagatattccggctcagcgaagcgcagctcaggcagttcacactcgccttgggcaccacccaggatgagaatggaaaaaagcaactccccgactgcatcgtgggtgaggacggactcatccttacgcccctggggcggtaccagatcatcaatgggctgcgaaggtttgaaattgagtaccagggggacccggagctgcagcccatccggagctatgagatcgccagcttggtccgcacactctttaggctgtcgtctgccatcaaccacagatttgcaggacagatggcggctctgtgttcccgggatgacttcctcggcagcttctgtcgctaccacctcacagaacctgggctggccagcaggcacctgctgagccctgtggggcggaggcaggtggccggccacacccgcggccccaggctcagcctgcgcttcctgggcagttaccggacgctggtctcgctgctgctggccttcttcgtggcctctctgttctgcgtcgggcccctcccatgcacgctgctgctcaccctgggctatgtcctctacgcctctgccatgacactgctgaccgagcgggggaagctgcaccagccctgaaggtgtcagctgccttcagagcaggctggagggatttgccacacagccccacccttgggctgagaggacctgggaagcccctccaggaagggaacacggtcatcctcgggcttctggagcggggttcctgcagccgcagaggcatctggaggaaacgcaaccaagaaaggaaggcaggtgggccccagcaaaggagtagctgccaggggctcaacagctacgctctgtgacagcgcagagctcagcgccggccctttccctccctccgccaaggactcacggccaagccagctctccggggccttttttccactgcccatttggctactctgctgcaccaagcttgggagccagcctgccaacagccacctgggcctggcctccccactggctggccttgaggttgccagagtgggttgtggcgcttcctctctctgtgtggganccaggacagtggcttaagtctccactccaggaaagaatcaaagtttctagagttgtgagaaaaccagagagtggctgtcctgattcttcactgtgaggggcgttcttcatgttctccccagctgttccaagactgggccgtagaattccatgtttcaggagcctaagaccctcccagagcccaggggcttcaccgcagaccccaagccattgagcacatcacccaaagcagtggccaacatcgcggacccctgtgccttgtcacagatgggtgctggtcctcaggcgttggggacactgctgggtcgatggggtcggattctgccagtttctgctctgcagccaaagatggtcagaagcattgtcacttcagtaacatcaagtgctcaaagacatggcaaccgttcagtggtacttaagtattcaaaatatacaactacagattctctgacagaaaccagcacggggtcttcaccttcattcaccccacaggcgacatgcgagggagaacagcatctcagtggtgatttccaaaccaagcctttgttttcggtgtggggttttgggggtttgctttaatgtttttgaaattgtaaatgttgggctttgtattttgatgtaaactgagaataatggcattttagggcctgtgaccaaaaatgaagcttgtaacgaccatggatctgaataaacatgtccttgcttctgnnnnnnnnnnnnnnnnnnnnnnnnnnnnnnnnnnnnnnnnnnnnnnnnnnnnnnnnnnnnnnnnnnnnnnnnnnnnnnnnnnnnnnnnnnnnnnnnnnnnnnnnnnnnnnnnnnnnnnnnnnnnnnnnnnnnnnnnnnnnnnnnnnnnnnnnnnnnnnnnnnnnnnnnctttttggggnnnnnnnnnnnnnnnnaaaaatttttaaaaactctttttgggggcccgggnnnnnnnnnnnnnnnnnnnnnnnnnnnnnnnnnnnnnnnnnnnnnnnnnnnnnnnnngaggtgtcattcccccnnnnnnnnnnnnnnnnnnnnnnnnnnnnnnnnnnnnnnnnnnnnnnnnngggaggcgggggggattttgggtctccaccaagaggggccccccggtcgcctttattaaattatccccccccgcggccaaacttggggaaagagggtgaacatattaaccannnnnnnnnnnnnnnnnnnnnnaccaccgcggaaaatatacttaaannnnnnnnnnnnnnnnnnnnnnnnnnnnnnnnnnnnnnnnnnnnnnnnnngcacgaaaagcgcggcaaaaaaacgtcctttttttggcccccctttaaataaaaa

SEQ ID NO: 258070 - DNA, 550 bp, Homo Sapiens
cgcgtaccgccacggctgcaggtagctcagccacatctccaggacagctccgaacgatgcgtccaggggccagtggccaaagcaatgctgcaagaagagatagagtttctgctgcacgaacctcgggacaacagcccgtttgaactcctccagggggctggtggcgtgggagtgggcggagggtgaggcctgctctggcttcaggctgttggcaaaggcgtgcaggtgcttcagcagcaggcgcaccaccaacacatgctcctcagtaggcgtgaacgactcctgggaatgatggaactgctgttttttgtactgctccaaggatatagtgatgcaactgcgcatttctgcaacaacctggagcaaactctctcatgtccagatctggcggcattttttgatccgtctcacaggaatagtgatgagagcatgtttctctcaaagacccggatgagaggtacacacctccagatctcgtgggaggcggggtctgcattcacagacgtctgatgagagatgtgtcgctttaggaggctagtgtggtggaggc

SEQ ID NO: 258071 - DNA, 2321 bp, Homo Sapiens
  misc_feature (10)..(10): n is a, c, g, or t
  misc_feature (28)..(28): n is a, c, g, or t
  misc_feature (37)..(37): n is a, c, g, or t
  misc_feature (76)..(76): n is a, c, g, or t
  misc_feature (90)..(90): n is a, c, g, or t
  misc_feature (292)..(296): n is a, c, g, or t
  misc_feature (302)..(305): n is a, c, g, or t
  misc_feature (308)..(308): n is a, c, g, or t
  misc_feature (310)..(310): n is a, c, g, or t
  misc_feature (313)..(313): n is a, c, g, or t
  misc_feature (325)..(325): n is a, c, g, or t
  misc_feature (332)..(332): n is a, c, g, or t
  misc_feature (575)..(575): n is a, c, g, or t
  misc_feature (1058)..(1058): n is a, c, g, or t
  misc_feature (1444)..(1444): n is a, c, g, or t
  misc_feature (1487)..(1487): n is a, c, g, or t
cccctggtcngagcacttgacacccagngcttccctngggcccctcgaggcaagaggtcaccccctttccagggcngagccacacccccntctcagctctgggcagggtcccgtctccgaggttactggatcagctccatcctgggacaaggaaagaggactgacccacagaccagagcccctcagatctccggctgcagggccacaacggtgggcagaggtagagagcgggccagggtgcagggcagaagtgtccgagtccaagtccacatccaggtctgctccctccccnnnnntcctcnnnnccnanccncccacccacccncccccancctcaggaagctgctgtgggtcccacatccaaggagaaagcccctgcccatgctcatgtggttgccctttggcccactggagccgccagtctgaaacacccctcaaggcatcaggaaccgaggagagggaaggcaacagcacacccaccccggctccagcttcttgccagatatggctgctggccttgggcgcccacagattcacacgcaccacatcacatgtgccctgacatatgaacacgnggagtgcacgctcatccacacgtgcccacacacacccacgggtgaacacaagactccaggcagcttttctcatttgacacctggtggttgtccctgcccagcctggtggcacactggctctgcctctcctcttagacctgtgggtctcaagcagtgaaccaagacagccccctacctccaggctgagcagctctaaccactgagacctctccctttgagtctcccggggtcccggccccagcgcgtcctccagaaagccctgggacagaagagagcccaaggctgacactcccttgggtcggcctgggacagacaggggaactccgcaggggaacccctttggcatctaggaccccacagtcaggtcccagtggagagtgcagtagccagaagaggacaggaggaccaaggtaggcccagggacacttgtgcccagactcctacacatggcaagcacatgtacacacatgtttgtgcatgcantacatgcgtgtagattctcctgaaggcgaggggtcctaggccagaagtctgtgaccataggagtgtgggaggtgcctctcgaggaaaccaggccagctgtggaagggtgcaggcccaagcccctccacaggctctcaggggctgctgggcagcacctcactgctcaatctccaggctgccaggtggcttcggtggctctgggggcttgaagctgaggacttcctggtaagtgagctccttccactcctccagcgtgcgctccttggcctcaacgctctcatcatatggctcggcctctggctcatcctcggggtcgtggtactggctgaagtagccgtgggccagtgcctcagctgcactgaccctctggtcactgtccagcaccnagcatccttccaaggaggtctatggccagggggttggctccancggaagatgctgctcaggtccttctggggcatggggggcagggactggatatatgtccgggcgtgttctgaggagatttttgccagaacctcagggctgggtgtgcccaccacttccatgatgcgcttcagctggtcaatgtagtcgcttcccgggaagagggccttgccctggagcagctcagccatgatgcagcccacggaccagatatccactgtttggttgtaatgcatccagttgagcatgatctcaggtgcccggtaccagcgcgtggccacatagccggtcatctcctcgtccgcctggcgcgccagcccgaaatccaggatcctgagctcacagtcctcgttcacagccacgttgctgggcttcaggtcccggtggatgatcccggccgagtggatgtacttcagcccgcgcagcagctggtaaaccaggaattgaacgtgctcgtcgctcagcgcctggcacttgacgatgttgttcaggtcggcgcccatcagggtggtcaccaagtacacttcgctgaagtcctcgatggacgtggccggcgtgaagacgtccagaagcccgatgacgttctcgtgcttcaggtgcttgagcagccgcagctcccggtacgttctgcgcgcgtggatcagcgactggaaggggcgcgacagcttcttcaccgccaccttctggcgcagccgggcgtcgtaggccgaacagacggagccgtaggcgccggagcccaccgggcgcagcccctgcagccgctgcggcacctcccacacggtcttgttcagctcctgccggtagaagccggcgcgagggcccgacatgtccggagca

SEQ ID NO: 258072 - DNA, 1376 bp, Homo Sapiens
  misc_feature (135)..(143): n is a, c, g, or t
acaaacttgttttaataaaacagagattttggcggatgagttatgattgacaaatgaacaggttagtccagtcaataaaataagaaaatcttcgtttcgggcaaatttgaagaaatctggtgatgaagaggaggnnnnnnnnngggtatttcgccaataggatctgaaagaagaaaagggttaagccgaggtaaaaaaagcagaagattcagattctgatgataacataaaaagagaaaaacgtatggactttctgtcagattttgagataatgttgcaacaaaaaaagagcatgagtggcaagcgcaaaaggaaccccgatggtggcacctttattagtgatgcaaaaaacgtcgtgagtgccatgatcgtcaagatgaataaacctgctgaggaagacagacagttgaacaatcaaaaaaagccagcactgaaaaaattaactttactgcctgctgtagttatgcaccttaagaagcaggaccttaaagaaacattcattgacagtggtgtgatgtctgccatcaaagaatggctctcacctctaccagataggagtttgcctgcactcaagatccgggaggagctgctgaagatcctgcaagagctgcctagtgtgagccaggagaccctgaagcatagtgggattggacgagcagtgatgtatctctataaacaccccaaggagtcaaggtctaacaaggacatggcagggaaattaatcaatgagtggtctaggcctatatttggtcttacctcaaactacaaaggaatgacaagagaagaaagggagcagagagatctagaacagatgcctcaacgacgaagaatgaacagcactggtggtcagacacccagaagagacctggaaaaggtgctgacaggagaggagaaggctcttagacctggagatcctggattctgtgcccgtgcaagggtcccaatgccttcaaacaaggactatgttgtcaggcccaaatggaatgtggaaatggagtcatccaggtttcaggcgacctccaagaagggtatcagtcgactggataaacagatgagaaagttcacagatataaggaaaaaaagcagatctgcacacgcagtgaaaatcagcattgagggcaacaaaatgccattgtgaccttgcctggaatgtgtccccatctctactctaagaaatgcgcaatggactctttggagaaagaagatattttaaaacatttttagtgtgtctgtaaatggttcagcgtgtatcagatgttgtcataggactcacatttctctcagttatatttaaaaccgttgtgtactttgtacaaaggaatactagtcatacttctataaactttacacaataaaatttcattctggttttaaaa

SEQ ID NO: 258073 - DNA, 737 bp, Homo Sapiens
ctttccttgcatatacacgcaagggattatatgggaagagaagccatatgaagtaaggattgtgggaaagcattcagctagcctggttccttttatggacatgaatagactcacactggaaggaagcactatgaatgcaagcaatgtggcaaaactttcacattttccagttcttttcgatatcatgaaaggactcacactggggagaaaccctatcaatgtaagcagtgtgggaaagccttcattccttttacttcttttcaatgtcatgaaaggactcacacgggagagaaaccctatgagtgtattctagttcccttcaatatcatgaaaggactcacactggagagaaaccctatgaatataagcaatgtgggaaagccttcagatcagcctcgcaccttcaaaggcatggaaggactcacactggagaaaaaccctatgaatgtaagcagtatgggaaagccttcagacctgacaagattctttgaatacagataatgaatgtaaacaattaactgtttataataactgtatactaacaaatgatattctttttaaataagaagctataatatcccattggtgtcatgtattagatcagccttatactgttaaattgttattatttggacattgtgagtcagtataaccatgtggataaaatgccagacatctttttattcgaaaattttacttttcatgcttctgtacttacatttttatctcaaccttaa

SEQ ID NO: 258074 - DNA, 854 bp, Homo Sapiens
  misc_feature (292)..(292): n is a, c, g, or t
  misc_feature (296)..(296): n is a, c, g, or t
  misc_feature (302)..(303): n is a, c, g, or t
  misc_feature (308)..(308): n is a, c, g, or t
  misc_feature (310)..(310): n is a, c, g, or t
  misc_feature (324)..(324): n is a, c, g, or t
  misc_feature (332)..(332): n is a, c, g, or t
  misc_feature (336)..(336): n is a, c, g, or t
  misc_feature (351)..(351): n is a, c, g, or t
  misc_feature (394)..(394): n is a, c, g, or t
  misc_feature (401)..(401): n is a, c, g, or t
  misc_feature (411)..(411): n is a, c, g, or t
  misc_feature (426)..(427): n is a, c, g, or t
  misc_feature (430)..(430): n is a, c, g, or t
  misc_feature (433)..(433): n is a, c, g, or t
  misc_feature (439)..(439): n is a, c, g, or t
ttttcacctcgaccttttttatttgcattttttaaaaacaattaaattagaatacaaatattagaaaacagcggccttcagctgcccgtgcggcggggaggggccgagctgcgcacgggctgcgggctctgcagtgagactgaactgccctcggccagatgcacgtccctttctttagacctgaaatgatattgcttcctgactaggagttctgtttatacaaaggaaaattctgggctggggaggacaaaagcaaaacagaccgcaggcagcggtgttggagaaccagganaagncggaannccgcntnaaccccggtctccnggggggcngggngggtgcccagctgtnggctcctgaaggcagagccctggtagctcccccagttgttggnccctgangccaagggcntgggtggggcctgcnnggngcngggaangcctggggacaggaaggaggcccctggtctggtcctgctggaaaagtgaggctcccgggggacagggtgccgggccagcctcgtacccgtcggaaaaccaagagcaaaaaggagaggaatcaacccaaaccgagagccggggtggccggggtccctgctgccccttgggaagcgaccgcaacccatgccccaaggaccggggtatggtgacggcggcggcggcggcagctgtggacatctgtggacatctgtactgttccgtagggaagttaacctgaattggaattaccgaggtagctggctagaaaactgagacccccccacgccacacggtgccgcaccctgggccccgccttccccgggggttcctgaccacacgccgggtcttcaaaataccaaattattgcactttcaa

SEQ ID NO: 258075 - DNA, 793 bp, Homo Sapiens
caatggggtcgccaaacaacaaatggagaaaaaaagttttacttccttgcattcttctacctttaaatagcaaagtaccactaccaccaccacctcttgcccccttccctcttttcttaaacttctggcatttcagagctcagcaggctacccctggtttctggagagttgggctaggcctgaagctccccctcccccacctctgctaggcagcccaggcctggtctgggagacagcccctcaccctgcctgggctcttggccaagcggccttggatggatgaagtcagagaggtggggtgagggtgagcttactcagggcccccagaggaagccctcagcctctgccctccccccacacagggcgggagcccaggcctgttcctggcaactgtggctgcagctgtgctcctgctccctcctggaatgtgcgacaagcccaaatgttccggggaggcggccggggcagggggcttagaagtgctaatatggttctgtgttttgcctgaaacgataccaggttcccctgaatagcaactttacaaggtccatgtgggagggaccaacccagatgccctgctgagtgtccctgaaaccatggcagctccatctgtcaagatggcaggggccggagtgagggggctgctggcttaacagcaggcatctgggcaggccagtcctcaaagcagctcctgaaggtctgtgttgcactgtcaccagtctcaagctatgcctctaatttcaccagggatattgactaagaagacaataaaatctttttctttgtgtaataa

SEQ ID NO: 258076 - DNA, 615 bp, Homo Sapiens
  misc_feature (11)..(11): n is a, c, g, or t
  misc_feature (194)..(194): n is a, c, g, or t
aacccaacaanctgccccagaaacaaggtcccctgtccccgccctgtgtgggggaaagggccaaaagcctgaaggccttccctctgggggccccctaaataaactcacccccaacccaacctctctgacttcatcccatcccaaagccgccttggcccaagaagccccaggcagggtgaaggggctgtctcccnagacccagccctgggctgcctaagcaagaggtgggggagggggagcttcagccctagccccaactctccagaaacccaggggtagcctgctgagctctgaaatgccagaagtttaagaaaagagggaagggggcaagaggtggtggtggtagtggtactttgctatttaaaggtagaagaatgcaaggaagtaaaactttttttctccatttgttgtttggcgaccccattggagaattcccaggaggcatgcaggatgacatcatgttttacaactgagaaatctcagtaattctgtaaaatggagtccctgcctgctccatgttcctgatggaagctgctttgtatttatgtgcttaaagctgtattttatgtcacatttaaatgagggtttaataatcttaattatctaccaaaagta

SEQ ID NO: 258077 - DNA, 438 bp, Homo Sapiens
  misc_feature (43)..(43): n is a, c, g, or t
  misc_feature (50)..(50): n is a, c, g, or t
  misc_feature (93)..(93): n is a, c, g, or t
gccgccttccccggaaacatttgggcttgtcgcaacattcccngaaggancaaggaacacaagcttcagccacaagctgcccaggaacaaggnccctgtcccggccctgtgtggggggagggcagaggctgagggcttcctctgggggccctgagtaagctcaccctcaccccacctctctgacttcatccatccaaggccgcttgaccaagagcccaggcagggtgaggggctgtctcccagaccaggcctgggctgcctagcagaggtgggggagggggagcttcagcctagcccaactctccagaaaccaggggtagcctgctgagctctgaaatgccagaagtttaagaaaagagggaagggggcaagaggtggtggtggtagtggtactttgctatttaaaggtagaagaatgcaaggaagtaaaactttttc

SEQ ID NO: 258078 - DNA, 448 bp, Homo Sapiens
  misc_feature (392)..(392): n is a, c, g, or t
  misc_feature (400)..(400): n is a, c, g, or t
aggcgggaacccccagcctgttcccctggaagctgtggctgcaagctgtgctccctgctcccctccccggaatgtgccgacaaagccccaaatgttcccggggaggcggccggggcagggggccttagaagtgcctaatatggttcctgtgttttgccctgaaacgatacccaggttcccctgaatagcaactttacaaggtccatgtgggagggaccaacccagatgccctgctgagtgtccctgaaaccatggcagctccatctgtcaagatggcaggggccggagtgagggggctgctgcttaacagcaggcattctgggcaggccagtccttcaaagcagctcctgaaggtctgtgttgcactgtcaccagtctcaagctatgcctcntaatttcnccagggatattgacttaagaagacaataaaatctttttctttgtgtaa

SEQ ID NO: 258079 - DNA, 1652 bp, Homo Sapiens
agcgggcttggatccccaggagtacacggcgagagtgtttcgaaggcacgcgcggggtaaaggaaacgtaccaaataagatggaggggctaagacaaaatagaggagtgcgttttaaacaaggaagtataataaagagtgaagacctaactgggagatagtggcaggctggaagggggacgaactaacaccactgtgactgggccctggatcgtgctctaacggggacaggcctaaaggcacgactaaggttccctggtaaaggcagattaagctggtcaccctccaaccaccaagagcggactttggtcttataagagacaccctctagattaacacggcgtcttatagggacagtggacaaggttcttcatctcagacagtgtcgggacgtggtaccttctgcaaggaactgaagtctgtccctgacttcatcgcttcctccctgagagggaccaggcctgcagtggggcatgggagtctctcgcaggtcatcatggacgactggtttgtatggtctggtgaacctggggcatggggtgtaacgtgggggccaggcactggggtagaggtgggcaaaggacagccaggggcggggccaagagcagggagcacagggggctgggctgggctgcagggctgcaggggcagcactggggaagggggtggtggccggcgtggggcccacctggaggtgggtgaggtggcatcagaggtgggcggcaaagggcgtgcagggcaatttccaagaggtggctggtcggtgggcagggcgctgctgcagtcctcgatgaaaataggattcacaaaccacaggcggtcatttcctaccgacagctcgatttcacaggcacagtttgcgtcacgggctgtgggcctgaggctggagactagggggaatccgggggcccggtctcttgggggctctgctggcttccctctttcttgtggaggattcagcgaggagtcccagaaacccagacccaggttggcgatggtctcaaggtccgtgaagctgctggcctcaaggatggcctggggtagccgcagtgtgaagggcagtaagtctctactgacacagtagaacgcaatcaatctgaagatgtcctcaaacacaagagccgagccttccaggtacaatatcgacttttcttccttaatggtgtattcgagcacctcggccgagctttcgttcagagaaggaaagtggacacagagcaccagctgcttcgagctgctgtcccggcgaaccaggaacatcccagccaccacccggtgcaggatcctggccacctctgcctggcccagactcagctgcagccacaccgggcatgttttgatgagcttctccaggatgctgatgccccggcggtgaggaaggcagtttttcgggttggctggcagacaaagccgcatgccatcttcctcttcctcttcctctcctttgccaacaactggaaccggacccgtggggtccccgcgcgcgggcgccccggcgtgtcggatcatgccgccggcagctccgggacggggaacggaggcgctcaggcgccgggccgcgcggaacgcggagtcccgggcgcccgcatgtccctggctctggccctctggaagggccaggccgccgctgccgccgcgctctggggcatcccg

SEQ ID NO: 258080 - DNA, 1086 bp, Homo Sapiens
  misc_feature (449)..(510): n is a, c, g, or t
  misc_feature (934)..(934): n is a, c, g, or t
  misc_feature (939)..(939): n is a, c, g, or t
  misc_feature (965)..(969): n is a, c, g, or t
  misc_feature (974)..(974): n is a, c, g, or t
  misc_feature (1029)..(1029): n is a, c, g, or t
  misc_feature (1068)..(1069): n is a, c, g, or t
  misc_feature (1079)..(1079): n is a, c, g, or t
gcgagcggccggagcggacggcagacggggcgggcggcgtcagggtcgcagcgtctacagctgctcgggggcggtttcttggcggaggcttggccggctcctctctcccggctccgcggcggctgcgaaggcggcggctcctgccctctcgctttccctctcgcgtctctggctgcagaaagaagcttccggttctgaggtcctggaggtgccatttccctctctgttgaagcaaaggccggggcagacctcctagtgaaaggaaagcaagccaggatggatatttacgacactcaaaccttgggggttgtggtctttggaggattcatggttgtttctgccattggcatcttcctggtgtcgactttctccatgaaggaaacgtcatatgaagaagccctagccaaccagcgcaaggagatggcgaaaactcaccaccagaaagtcgnnnnnnnnnnnnnnnnnnnnnnnnnnnnnnnnnnnnnnnnnnnnnnnnnnnnnnnnnnnnnncctaatgggaagatacctgatcatgatccagccccaatgtgactgtcctccttcgagaaccagtgcgggctcctgctgtggctgtggctccaaccccagtgcagccccccattatcgttgctcctgtcgccacagttccagccatgccccaggagaagctggcctcctcccccaaggacaaaaagaagaaggagaaaaaagtggcaaaagtggaaccagctgtcagctctgtagtgaattccatccaggttctcacttcgaaggctgccatcttggaaactgctcccaaggaggtgccgatggtggtggtgcccccagtgggtgccaagggcaacacaccagccactggcactactcagggcaaaaaggcggaagggactcagaatcaaagcaaaaaggctgaaggagccccaaaccagggcanaaagnagagggaccccaaaccagggcaaaannnnnaaggnacccaaaccaagggaaaaggagagggaccccaaccaggcaaaaggagaggacccnaacaaggcaaaaggggggggccagaacagggaaaggtanncacccaacangggaaaa

SEQ ID NO: 258081 - DNA, 2422 bp, Homo Sapiens
  misc_feature (859)..(859): n is a, c, g, or t
gggacgtcacgtgagagtgggcggagggggtggaggtttgtctccgctgtttcatctctatggctgtcagaggtgggcggctttgaccgagaggctgctggagctcgtgtttggacgcgatgtttcgtctgaactcactttctgctttggcagaactggctgtgggttctcgatggtaccatggaggatcacagcccatccagatccggcgaagactaatgatggtggctttcctgggagcatctgcagtaactgcaagtactggtcttttgtggaagagggcccatgcagaatctccaccatgtgtagacaacctaaaaagtgacatcggtgataaagggaagaataaagatgaaggggatgtttgtaaccatgagaaaaagactgcagatcttgcccctcacccagaagagaaaaagaagaaacgttctggattcagagacagaaaagtgatggaatatgagaataggattcgagcctactccacgccagacaaaatcttccgatattttgccaccttgaaagtcatcagtgagcctggtgaagcagaagtgtttatgacaccagaagattttgtgcgatccgataacacccaatgaaaaacaaccagaacacttggggtctggatcaatatataataaaacgctttgatggaaagaaaatttcccaggaaacgagaaaaatttgctgatgaaggcagtatattttacaccctttggagaatgtgggctcatatccttttcagactacattttcctcacaactggttcttttccactcctcagagaaaattttgaaattgccttcaagatgtttgatttgaatggagatggagaagtagatatggaagaatttgaanaggttcagagcatcattcgctcccaaaccagtatgggtatgcgccacagagatcgtccaactactggcaacaccctcaagtctggcttgtgttcagccctcacaacctacttttttggagctgatctgaagggaaagctgacaatcaaaaacttcctcgaatttcagcgtaaactgcagcatgatgttctgaagcttgagtttgaacgccatgaccctgtggatgggagaattactgagaggcagtttggtggcatgctacttgcctacagtggggtgcagtccaagaagctgaccgccatgcagaggcagctcaagaagcacttcaaagaaggaaagggtctgacatttcaggaggtggagaacttctttactttcctaaagaacattaatgatgtggacactgcattgagtttttaccatatggctggagcatctcttgataaagtgaccatgcagcaggtggccaggacagtggctaaagtggagctctcagaccacgtgtgtgatgtggtgtttgcactctttgactgtgatggcaatggcgaactgagcaataaggaatttgtttccatcatgaagcaacggctgatgagaggcctggaaaagcccaaagacatgggtttcactcgcctcatgcaggccatgtggaaatgtgcacaggaaactgcctgggacttcgctttacccaaacagtaaccccacactgcaagaggggacccctccacccccagtaccctggaccccctccgcagagtctcggcagagccctttgtgctgctgcttctggaagtagtcccccttcctcccgggatgacctcaggactctgtcggtttcccctctttacccttccccgtccccgtgttctgctgggctctgattctgcccaatgagtatccccataggttctcaaaaacatgaacaagtctgtaaagctcagacatttgtcagcctcaacagcaccacccattcaagcatcctgtggataaagaattcagggaaccatccacacacctgccaaccctgggaagcatccagttctcaaatcgtttttgctatggatttatactaacaagaacattccttgacttccctcctgctggtgttttaaagccacaagtagggaagatatctggcaggcagaaagaagtctgtgatgataaacaatgatgaggatgacctaggcaccctacgctagtgtgagaagcctgcgccccaggaaggatctgtgttagtccctgggatggctccaaggcctgctctaggaaggcagcatgctcagtgggaacacagcaagattcagaatttaaagtagttgcttcatggctctgtgcactcccttttcttcctcgcagcctccctaagatgactccagtgtgaccctgtgcttagtgagcaatagtgattgagctcatgttccctgcaagtgccatttcctctccaggatgggcctctaaagctgaggcctggctcagagcctgtttgccctctgtcttaaacaattgtaaatatcacttaaattataaccatttgcaataaacatccccaaagttaccaaaaaaa

SEQ ID NO: 258082 - DNA, 985 bp, Homo Sapiens
  misc_feature (50)..(67): n is a, c, g, or t
ggcctgggtggcgaattcggcacgagggagagagagaactagtctcgagnnnnnnnnnnnnnnnnnngtgaaaaaccaaacctcaaaaagccactttaattccggcctaacagcgccaggtgcaatgtctggggacagactctgggtacaatgctgtgtggcgaccactcactcacacacggctccaagaaggcccccaaggggggacttaccttcagggggctgagccaagggggaaaggggtggccccagaacaggggaaggggcaggcatggggggaaaaggtgctacttcttggcaaaggagatcttcatggcgttgttctgcgtgatcttaaagccctgcagggcatcgcgagctgcccctgcctgtacctcattgtcaaactccacgaaggcgatgtcatgccgcccgggtaccagacggacctccttgaagccagggaactgattgaaaagcatggacagcatgagctcgttggtctcctctggcaggttggtgaggaacaagatgtgattcggtggattctcagaaagaggctgggcagggggcatctgtcctggcataagctgctgcgggggcatggcccctggtgggatctggccaggtgcaaggcctggcggggggatcataccagggggcggcatgtagggcggctggcccggcatgtggtgcataatgcggggcgcctgagtcatcggcggcatgcccgggacaggcccctggacagcccccaccacgggggtgggctcccccgccttggacagccttcttggtggccggggtctcctggctccttggccttcctcttctccccgcttgcgggccggctccacgaaggggccctttcttcttgggaatgaaatcctgagtcggccttggcaatactgggataccccatagggtttgtccataaaaaacggaaacacctgtcctggaaccgcccaggcccttgtgtggcgcgctcccctgaacccccccttgg

SEQ ID NO: 258083 - DNA, 489 bp, Homo Sapiens
  misc_feature (45)..(45): n is a, c, g, or t
  misc_feature (185)..(185): n is a, c, g, or t
ggagccccaagagccaggagaccccggccaccaagaaggctttcnaaggcgggggagccaacccccgtggtgggggctgtccaggggcctgtcccggtaagccaggtcccggagaccaaccctcccactgccagaccttcctcagccacaatggactggctttgggacagggtggggagagttcntccccttggggcttcagacccctcctttccatttctttatagagatgtgtttctctctctcgttttggggggtattgagcacctagatgatgctatctcctttcgaaactcttgttccctccttgtgactgtttctcaaggtctttcttcatggctatgacttggtttcgctctctccgtggccttgattttgtcgcctgtgtcttgtaactcattgtgcatgtagaaaatccaagtgtctactaagcaactgttaggattaataagtgaacttaaatttagaaagatcgctggatataaaggc

SEQ ID NO: 258084 - DNA, 772 bp, Homo Sapiens
aaatggtttctaattaaaggattgtgacatttaatagccgttgcttgctcttgtcttgctcccttctctctcgaaacttgttaagaaataactcaatattctggcttttccactttaaatgtcatactgaccagcccgtgtatgccagcctcgatctcatcgttttctttaaccggtccaactccctttggcgtcccagtcaagataatatctccttcttccaaggttatgatcttagaaacatagctgatgatgtaggggatggaaaaaatcatggaggatgtctcaccctcctgtctgagttcgccgttgaccttgagccagagcttcagcttgtgagggtcagggatcttctccttgggcacgaacgcgctgaccgggcaggacgccgtgaagctcttcgccagagtccagggcagccccttcttcttgcactcgttctgcacgtcccgggcggtcatatccaggcacagggcatagccgcccacgtagtccatggccgcggcctcggggactgcgcggcagcgcttgcccatcaccacgcccagctccagctcgtggtgcaggttgcgagtgtacgcgggcatgaggatgggcgagccctcgggcgcgtaggccgtggacggcttcaggaacagcacgggctcgctcaacaccgcgctgcgcatctccctgacgtggtccgcgtagttcctccccacgcagacgatgttctttccccactcccagaagcgggacaatggcctggatgctgccatgattcccatcaagt

SEQ ID NO: 258085 - DNA, 1353 bp, Homo Sapiens
  misc_feature (23)..(23): n is a, c, g, or t
  misc_feature (54)..(54): n is a, c, g, or t
  misc_feature (1286)..(1295): n is a, c, g, or t
cagcctgcaaagcaaaatgggangaaagcaacctccaaagtgccctctgcaccncattttgttcaccccaatgatcatgccaatcgagaggctgaattaaagaagaagtgggttgaggagatgagggagaagcagcaagccgcccgggagcaagaaagacaaaaacgcaggaccattgagagctactgtcaggatgtcctaagacgccaggaggagtttgagcataaggaggaagttttgcaggaattaaatatgtttcctcagctggatgacgaggccacgaggaaggcttattacaaggagttccgtaaggtggtggaatactctgatgtgattctggaagtcctggatgccagagacccattaggctgccgctgcttccaaatggaggaggctgtcctgcgagcacaaggcaacaagaagctggtcctggtcttgaacaagattgacctggtccccaaggaggttgtggagaaatggctggattaccttcggaatgagttgccaaccgtggctttcaaggccagtacccagcatcaggtcaaaaacctgaatcgttgcagtgtgccagtagatcaggcctctgagtcactgctgaaaagcaaagcctgctttggagctgaaaacctcatgagggttctggggaactattgccgccttggtgaagtgcgcacccacattcgtgtgggtgttgtgggtcttcccaatgttgggaagagcagcctgatcaatagcctgaagcgcagccgcgcatgcagcgtgggagctgttcctggaattaccaaattcatgcaggaggtctacctggacaagttcatccggctcttggatgctccaggcattgtcccagggcccaactcagaggtgggcaccatcctgcgtaactgcgtccacgtgcagaagctggcagaccctgtgaccccagtggagaccatcctgcagcgctgcaacctggaggagatttccaactattatggcgtctctgggttccagaccactgagcactttctgacggcagtggcccaacgtttgggggaagaagaagaagggaggcttcatatagtcaggaacaggcggccaaagcttgtcctagctgactgggtgagcgggaagaacagctttttataccaccaacagacacttacactcttggccaccaatttaaaggctgagatcggtaaagaaaatgacccagggcttttgcatcctggggtactgagcagggccatggagacacccatggatggcttggcacccggagaaaattatgagccggttgggggcannnnnnnnnnttgtaaaggggaacaagatggtccatttttccgcgaaccaaaaaagcagaggcccctg

SEQ ID NO: 258086 - DNA, 1131 bp, Homo Sapiens
  misc_feature (251)..(277): n is a, c, g, or t
gtgttagtgcttccgggttgcagccagggaagcctccgcggtggtgcaagtggaacccaagccttgaggtttcagtgagtagggggccgacgtgagctttagcgtccccctttagcctccctcttcgattccttgaagaccctggtgcagcttagcaagagggcccaggatttttggatccccagccctgtgacaagggttcctgtccagtttccccctcccaggatttcgactcagttcagcgaagtcannnnnnnnnnnnnnnnnnnnnnnnnnnaaggcttagagcacagccccgaggcgccgtctaccaggccccgtcccctcccccggctcctgtcggtcagcactgaaaccccgtccctgctccaggcctccttctctggggtccaaggtcccatacaggcctctgcctcggccgcaggcccttcagtcaccgtcgcctcgtctccctgactgtccgcaggcctgggcagcatggccgtattccggtcgggtctcctggtgctgacgacgccgctggcctccctagcccctcgcctggcctccatcctgacctcggcggcccggctggtgaatcacacactctatgttcacctgcagccgggcatgagcctggagggcccggctcagccccagtccagccccgtgcaggccacgtttgaggttcttgatttcatcacgcacctctatgctggcgccgacgtccacaggcacttggacgtcagaatcctactgaccaatatccgaaccaagagcacctttctccctcccctgcccacctcagtccagaatctcgcccacccgccagaagtcgtgttgacagatttccagaccctggatggaagccagtacaacccggtcaaacagcagctagtgcgttacgccaccagctgttacagctgttgtccgcgactggcctcggtgctgctatactccgattatgggataggagaagtgcccgtggagcccctggatgtcccttacctccacgatcaggcagcttccccgtggcggtctccaagcccgggcgtggtaaaaccgggcccgtccgggccgttgacgcctgaacgccacacggttgctcaggtggtgtctggccgacctgtggggcgttccctctttgccatc

SEQ ID NO: 258087 - DNA, 2082 bp, Homo Sapiens
agtgcttccgggttgcagccagggaagcctccgcggtggtgcaagtggaacccaagccttgaggtttcagcctgggcagcatggccgtattccggtcgggtctcctggtgctgacgacgccgctggcctccctagcccctcgcctggcctccatcctgacctcggcggcccggctggtgaatcacacactctatgttcacctgcagccgggcatgagcctggagggcccggctcagccccagtccagccccgtgcaggccacgtttgaggttcttgatttcatcacgcacctctatgctggcgccgacgtccacaggcacttggacgtcagaatcctactgaccaatatccgaaccaagagcacctttctccctcccctgcccacctcagtccagaatctcgcccacccgccagaagtcgtgttgacagatttccagaccctggatggaagccagtacaacccggtcaaacagcagctagtgcgttacgccaccagctgttacagctgttgtccgcgactggcctcggtgctgctatactccgattatgggataggagaagtgcccgtggagcccctggatgtccccttaccctccacgatcaggccagcttcccccgtggccgggtctccaaagcagccggtgcgtggctactaccgtggcgctgtcggtggcacgtttgaccgcctgcacaacgcccacaaggtgttgctcagtgtcgcgtgcatcctggcccaggagcagcttgtggtgggagtagcagacaaagatctgttgaagagcaagttgctccctgagctgctccaaccttatacagaacgtgtggaacatctgagtgaattcctggtggacatcaagccctccttgacttttgatgtcatccccctgctggacccctatgggcccgctggctctgacccctccctggagttcctggtggtcagcgaggagacctatcgtggggggatggccatcaaccgcttccgccttgagaatgacctggaggaacttgctttgtaccagatccagctgctgaaggacctcagacatacagagaatgaagaggacaaagtcagctcctccagcttccgccagcgaatgttggggaacctgcttcggcctccatatgaaaggccagagctccccacatgtctctatgtaattgggctgactggcatcagtggctctgggaagagctcaatagctcagcgactgaagggcctgggggcgtttgtcattgacagtgaccacctgggtcatcgggcctatgccccaggtggccctgcctaccagcctgtggtggaggcctttggaacagatattctccataaagatggcatcatcaacaggaaggtcctaggcagccgggtgtttgggaataagaagcagctgaagatactcacggacattatgtggccaattatcgcaaagctggcccgagaggagatggatcgggctgtggctgagggaaagcgtgtgtgtgtgattgatgccgctgtgttgcttgaagccggctggcagaacctggtccatgaggtgtggactgctgtcatcccagagactgaggctgtaagacgcattgtggagagggatggcctcagtgaagccgcggctcaaagccggctgcagagccagatgagcgggcagcagcttgtggaacagagccacgtggtgctcagcaccttgtgggagccgcatatcacccaacgccaggtggagaaagcctgggccctcttgcagaagcgcattcccaagactcatcaggccctcgactgaaaagttctcagtggggccagactggctcctggagctgacaagcgaccccgtggtgaggagaaatgggggccttgatgctcaccctggttcaggcccagaggtccaagctatactgtgcaggacatggccaggcctggtggacacaggaagcctacccaacacgctggtatttggccaacactgaggatgtggttcatggggggagcagtcccctccccactcttgcccatgggtgactcttacccacagctgactagggccagcgcaaatactggaacctgtaacagaattaaaggtgaatgttcag

SEQ ID NO: 258088 - DNA, 1579 bp, Homo Sapiens
  misc_feature (280)..(280): n is a, c, g, or t
  misc_feature (298)..(298): n is a, c, g, or t
  misc_feature (315)..(315): n is a, c, g, or t
  misc_feature (365)..(365): n is a, c, g, or t
  misc_feature (368)..(368): n is a, c, g, or t
  misc_feature (386)..(386): n is a, c, g, or t
  misc_feature (454)..(454): n is a, c, g, or t
  misc_feature (527)..(527): n is a, c, g, or t
  misc_feature (548)..(548): n is a, c, g, or t
  misc_feature (1263)..(1263): n is a, c, g, or t
ccaggacaacgggcgtcgccggcgccgtgtgacttcgggctgtgggctcgctcgcggctcttcggccatggttttctcaaacaatgatgaaggccttattaacaaaaagttacccaaagaacttctgttaagaatattttccttcttggatatagtaactttgtgccgatgtgcacagatttccaaggcttggaacatcttagccctggatggaagcaactggcaaagaatagatctttttaactttcaaacagatgtagagggtcgagttgtggaaaanatctcgaagcgatgcggnggattcctgaggaagcncagcttgcgaggctgcattggggttggggattcctccctgaagacctttncanagaactgccgaaacattnaacatttgaacctcaatggatgcacaaaaatcactgacagtgcgtctgctctttttcagcacgtgttntagccttagcagattctgttccaagctgaaacatctggatctgacctcctgtgtgtctattacaaacagctcnttgaagggtatcagtgagggntgccgaaacctggagtacctgaacctctcttggtgtgatcagatcacgaaggatggcatcgaggcactggtgcgaggttgtcgaggcctgaaagccctgctcctgaggggctgcacacagttagaagatgaagctctgaaacacattcagaattactgccatgagcttgtgagcctcaacttgcagtcctgctcacgtatcacggatgaaggtgtggtgcagatatgcaggggctgtcaccggctacaggctctctgcctttcgggttgcagcaacctcacagatgcctctcttacagccctgggtttgaactgtccgcgactgcaaattttggaggctgcccgatgctcccatttgactgacgcaggttttacacttttagctcggaattgccacgaattggagaagatggatcttgaagaatgcatcctgataaccgacagcacactcatccagctctccattcactgtcctaaactgcaagccctgagcctgtcccactgtgaactcatcacagatgatgggatcctgcacctgagcaacagtacctgtggccatgagaggctgcgggtactggagttggacaactgcctcctcatcactgatgtggccctggaacacctagagaactgccgaggcctggagcgcctcgagctgtacgactgccagcaggttacccgtgcaggcatcaagcggatgcgggctcagcttcctnatggcaaagtccacgcctactttgctcccgtcacccccaccgacagcagtggcagggagtggacagcgactgtgcaggtgctgggtcattctctgacagcagctgcctgggcccaaggggtgatgaggcatcttttcctttagagacctgggttttcctgaccggattcacataacccattttggtgttttccattggaaaggctttacagggaaaagacttcttgtgtgatggaggtacttttggggatagtttcaacctttatttggctgggaaaaatcaaaacaaccttgggtagataaacaagacaggggct

SEQ ID NO: 258089 - DNA, 1807 bp, Homo Sapiens
  misc_feature (31)..(31): n is a, c, g, or t
aaaggcaaataaaataagtttattgggatgntaaccccatcataaattgaggagcatccatacaggcaagctataaaatctggaaaatttaaatcaaattaaattctgcttttaaaaaggtgccttaagttaaccaagcattttgataacacattcaaatttaatatataaaaatagatgtatcctggaagatataatgaagaacatgccatgtgtataaattcagaatacgctttttacacaaagaactacaaaaagttacaaagacagccttcaggaaccacacttaggaaaagtgagccgagcagccttcacgcaaagcctccttcaaagaagtctcacaaagactccagaaccagccgagtctgtgaaaaaggaattccaggttttcatcaggctgaaattagttacaaatgaaggagattaactcgggtgtgctgaaaatctcagcctcagcatccctgggaaaagcgcctccaagagttccggcttcagggagccttgttgcagtaccggaccggtctcatcagcacaaccaaagtggaaagaaacaactgctcacccgtcctcggggctccgtgtactttcaacacaccgtggacaggggaggaaatgggttctgcttgctgaccaccagcttctgatgctgatgcgatatgtagcctttgacgtgtcccatgtatatcaagttagccagaatacactgaacttcgtcaatgtccacgtcctccacctgcatgaacttcaaggcaaccagaaaagcatccagagacagctggtgtgttttcagtaacaaatacactttcttaaagaggttcctgtaggtgatgatcttcagcttctccaggatgaggaagattccgcagcgaatgaagaaggcctcgtgcttcgccagcgcctcgtgcagcagcagcaggttgccctcgctcacagctctggttacttccgcaaactgcatcaggtgatactttttcaggagctccacagtgggcatgtgacccaatagcatttttactggaagcaaatagatcagaatcatccttttgttcttctgactagaacggtgacaatgctcaaaggcaaatgacaggtactcctcagcttgcttaaaatcgctgtcaaacatagccttgcgtccaacgtagtatttgtatgttactctctgtgcagtgctgtaatcgtctttcaggtttgagctgtcaattgctctaattaggggtttacataaatggagtttgttgatcttgaagtagattttaaacagctggttcaccagaaacagcatgccccacttcttagagtcctctataccagcacgggtgtcgctggcacagacccggaaacagctcatcagtaactctgctgctttttccaacatgtccccaactttgctttttcctttctttaccaactgttgatctgcattattggcaaacactcgaaggtcaagcgctactgcatacatgacaggcagagcccagttttcttctttgtgggcctggaatgctcgcaagaatgattggactatcacggtctggcacttgtatgcctctatgaagtcatgattccccactgcataagtgcaccttaaatgagctgcaaacatttcatcataagggggttccaagacttgttgacacttctcctctggagaggccatttgaagtcgtgggtttgcaacatgaggatgtttaaaagacaccaactctgcacaagatgctccatctctgctgtcgatggcttcgtacacctgctgcaggtactggttaatggtaatgtgcgccatgggagcgccgccgaacggccc

SEQ ID NO: 258090 - DNA, 908 bp, Homo Sapiens
ggtaattagagcaattgacagctcaaacctgaaagacgattacagcactgcacagagagtaacatacaaatactacgttggacgcaaggctatgtttgacagcgattttaagcaagctgaggagtacctgtcatttgcctttgagcattgtcaccgttctagtcagaagaacaaaaggatgattctgatctatttgcttccagtaaaaatgctattgggtcacatgcccactgtggagctcctgaaaaagtatcacctgatgcagtttgcggaagtaaccagagctgtgagcgagggcaacctgctgctgctgcacgaggcgctggcgaagcacgaggccttcttcattcgctgcggaatcttcctcatcctggagaagctgaagatcatcacctacaggaacctctttaagaaagtgtatttgttactgaaaacacaccagctgtctctggatgcttttctggttgccttgaagttcatgcaggtggaggacgtggacattgacgaagttcagtgtattctggctaacttgatatacatgggacacgtcaaaggctacatatcgcatcagcatcagaagctggtggtcagcaagcagaacccatttcctcccctgtccacggtgtgttgaaagtacacggagccccgaggacggcctgatgaaaacctggaattcctttttcacagactcggctggttctggagtctttgtgagacttctttgaaggaggctttgcgtgaaggctgctcggctcacttttcctaagtgtggttcctgaaggctgtctttgtaactttttgtagttctttgtgtaaaaagcgtattctgaatttatacacatggcatgttcttcattatatcttccaggatacatctatttttatatattaaatttgaatgtgttatc

SEQ ID NO: 258091 - DNA, 2416 bp, Homo Sapiens
tccatttgcttcattttctaagaacttattgctaattcttcataaatgcaccacaagagccataaaattgctttgtcatttgctatttaatgttcaaacattgaaagtaattgatttcttccgagacacctctttccttggagactttcaccctcccggtctgggctagactgaatgcccacaagacctactgtgtggctgatgcgtgggatctccctttgcttccttcccgtgttggagcccattttctagatccttcacttctttgttcttggtttgcttcgtcatttggtggaatacattcccagcagctgcctgagtggggaagcaggggaaatatccctacacaggcagtttttcgaggtatgactgaaaaatgcctttatttagccttacacttgattgactgtttggctaaatataggattttgtgtttaaaataattttccatcagcttttggaagacactacttcactgtattgtggtattcagttgttgctactgaaaatctcaataccatctgattcctgtttctttgcatggaacctaatttttctcctccctgcaacattttaaaattgtctctttttccccagtgttctgaaaaagaaactttttatatagaaattcctttagttttggaaatatttcttatattactccttagatactgtcttctcttcacttttctctggtatatatttctaaagccactatttgttagatgttaaaccctggatgaatactctagttttatttgtctccactcatctctttattatattatttactttctagatttcctcaactgtacctttcaatgcttccattatatctttcatttctgctatcttatttctaaaagctcctgtttttactttaatagcatcctgcttatgtctcactgattccataaaaagttcttttatataaggatattttgattctactgaagttttcttctgctcccttcattgtctgcttcctccaggactttgttctttttgctctgatctctgtctcaatttggaagctttcctcaaatgtccagttatccttggatgggttttcatatttaagattgaggcagtaagcagctgtttgaaagctctgctgcacaggcaggcctgatgactgtagtctcctcttgtgcaagcatgttaaattccaagaacagtgctatgtggtaaagttccatggcttcttctgccctggtcatgtttggcttccctgcgacgagagcctgaacttcactgagactccccacagaggggctacagtgcaaaacagagaggtccaccacgtcggtatacatacagtgtaatatcactgttgcatatttttttggtataatggactcatctaatataattcttgtgggagtcctcaaagttcggtctgtgatttcttcaccagttcgtatcctcctttgtaataaatttcgaaaaaatggggaccgtgcagaaataacagccttgtgggctttgagctcttcatctaaacagttctgatttccaccaaaagcttcaaccagttcagagtctgaagaaaaactaaggacgacatcataataacacatgtaatcaaagagtccacgcatatctacatcaagggaatttggtgttccaaattcttcactaagctgaacaaggatatcgacattttgaaaccttgagtcctccattccaaactctcctgtataaaggtagtgtaacaaagcagaaaacatgggcatatcaataccagctgtattgatgtccattattatctctgccccatactctggtgaggaagaaagcagtgttttaaaaaatggacaccttgctgccaaaatggcacgatgaacaggaaaacaagtttcttgaaatattaagtctacatcagtacaatacttgtactcataaagatcagccatatctttctgcaatgtccgggcttctggtctagccaaactggcttgtagagaaagctcctttaatgctgatgttccctcatattcctccactaatgcattgacatctctaacatcccacccagagaggagttctcgcatctgcttggcatgatcggcagacctattagatttccgacgcttaataaacttctttttgagggtggcaagaccagaggttctcttttttttgtcttgtggtttctcatggccatggtcaaggctatacaactttgattcgcaaccatagccttgctgagaataggatgaggtccctataaaagtctgttgggcctgtgaatttccccctaccctcggggaacatgaatgaggataattagatgcattagcacccattttcttcagtcactcaggcattccgtctgcgggttcttcagagtataatcccagaggcctttatgaaccttcaaccctggatccagcagcctcttttcatccatttc

SEQ ID NO: 258092 - DNA, 1173 bp, Homo Sapiens
  misc_feature (513)..(514): n is a, c, g, or t
tggaggctttccccctccccaggcttccctcagggctacggtggcccgccacagttcagttttggctacgggcctccacctccaccgccagatcagtttgcccctccgggggttcctcctccaccagccactcccggggcagcacctctggctttcccaccgcctccgtctcaggctgccccggacatgagcaagcccccgacagctcagccagacttcccctatggtcagtatggttacgggcaggacttgagtggcttcggacagggcttctcagaccccagccagcagcctccttcctacgggggtccctccgtgccagggtcggggggcccccccgccggcggcagcggctttggacgagggcagaaccacaacgtgcaagggttccacccctaccgacgctagcccgcggcgccgcgacgtctgcacggcccagacccaggattccaaacttgtgaactcgtgacaatcacaaacttggcggcaaagtggcgactcaaccttgggggnngcggggggagggcgcgaggcttttggagcggctgtgggtgtcgtctggactgaggtttttaaatatttctttctctaacccatcagcacaataaaaaaaagtcactggttcaacaacagggtttaaaaaaaatgtcttcagctttaattcaaaacttcaggtttctttttcttccttttttttggaaattattttcctgagccttttgttttacggtatattgtaaacttttatgttaaagaaaaaatatacatttacaaattgtgagatttttaagagaaattttctacgatgtaaactggcttattttttaatttaaaacggggtttccgccggacactggtggagggggtgcgctgttagtcccctcgctcctggctttgggggttgggacttggtggtccagaaactctgggagcttctagaagaaatctactgagtgtatttctgttttttgtttaattccttgcttttgtcgactgacctgcttggtagtgtctgaggtgaactgtgggggttgcgcacagccagccgcgtggatcccacgcagcgctgaaccgaaccgagtaggaagcctttctccccaggcacgtggcttcagggcgtttcccatgagccagtttgacccggttgaataaagaggaggccttgggataaaa

SEQ ID NO: 258093 - DNA, 978 bp, Homo Sapiens
  misc_feature (283)..(283): n is a, c, g, or t
  misc_feature (399)..(399): n is a, c, g, or t
ccagtctagccaggagcgtgagagcccagacacaggaagggggcggtgcccgggctgtgcccaggctgttgccagagccagcactaaagtagaggcggtcccaggaggtcctggtcgggagccagagggcctccgccaggcaggaggccaggaggctgaggagctcctccaggaggggctcaagcccgtcctagagaaatgtgataactaggttggggctggggaggcagcccagcgcgagtcctccccgggcaaataggctccgagggccccggggcctccntctcctcctctcaggcagcagggccctggagacaggcggaggcggggccagggccggtccctcaccccacatcgggatcggggccccccacttccccccaaggggccctgcccacncaccaccttcccggtgacccagatgaccacatttaacaccaaatggggtggggggaggcgcccctccagtgccaggggcacgtgctgtgagcttcctgggagcccaggttgtgctcactgctctcccgtatcgtgagcaccacctctgctttccctgcgtagatctaggccaggggctgcttgtttttgtggagccgtgtgtgttcttctctgagcagctcctccccagaggaccccagcgcagtcccgggagatggcggaaagaaggcaccagggcacagtggacactcatcccgtgacagcgatggtgaccatgactgtgggagaaagaacaggacccgggatggagtggggctgtctgaggttccccagtgaactttgtgctttggcgttccacccctgttgttacttgttactgagtttcctagacctggggtgggtgttcccccaggaggaggggggtcccgacctgtgtcctgtggtggccatttgcagcttctgtgttgtgattcccttctcttcaaccggtttcaagtacatatctctcttcaataaatttcattcagtgttccaaaaaaa

SEQ ID NO: 258094 - DNA, 399 bp, Homo Sapiens
  misc_feature (328)..(328): n is a, c, g, or t
  misc_feature (362)..(362): n is a, c, g, or t
ccacccaggtagcacgcctctgggccaaggacaatgctgtgagcttcctgtgagcccaggctctgctcactgctgtcccgcgtcatgagcaccacctctgctttccctgtgtagatctaggccagtggtgcttgttcttgtggagctgtgtgtgttcttctctgagcagctcctccccggagtcccccagcacagtcccagggagatgacaggaaggaagcaccaggggcaagggcgggacgttcaccctgtgaaccacgatgggtgaccgtgactgtgggaggaagaactggacccagggacagagcggggctgccctgcctgaggntcccgaggacttttgttgcttttggtgtttccanccctgtttgtttattcattgaattcagtttttccttt

SEQ ID NO: 258095 - DNA, 1117 bp, Homo Sapiens
  misc_feature (8)..(8): n is a, c, g, or t
  misc_feature (15)..(15): n is a, c, g, or t
  misc_feature (26)..(26): n is a, c, g, or t
  misc_feature (29)..(29): n is a, c, g, or t
  misc_feature (32)..(32): n is a, c, g, or t
  misc_feature (45)..(45): n is a, c, g, or t
  misc_feature (47)..(47): n is a, c, g, or t
  misc_feature (51)..(51): n is a, c, g, or t
  misc_feature (66)..(66): n is a, c, g, or t
  misc_feature (72)..(72): n is a, c, g, or t
  misc_feature (80)..(80): n is a, c, g, or t
  misc_feature (88)..(88): n is a, c, g, or t
  misc_feature (95)..(95): n is a, c, g, or t
  misc_feature (99)..(100): n is a, c, g, or t
  misc_feature (102)..(102): n is a, c, g, or t
  misc_feature (104)..(105): n is a, c, g, or t
  misc_feature (114)..(114): n is a, c, g, or t
  misc_feature (120)..(120): n is a, c, g, or t
  misc_feature (124)..(124): n is a, c, g, or t
  misc_feature (146)..(146): n is a, c, g, or t
  misc_feature (196)..(196): n is a, c, g, or t
  misc_feature (253)..(253): n is a, c, g, or t
  misc_feature (265)..(265): n is a, c, g, or t
ggcgcctntccgaantttcttgggantcnttnccgtgagcaaaangnacancagactgaggaattntgctcnctgcaccncacacgcnacaccanccanntntnnccaggtgcnaccagntcantgcgcatgtccgtgctgtgtgnacgctctgtgtctcctgaacacggcagccctgctatcacaccttggcttngagatcattgggagtgagcagatgtgggggtgccagccaggctggccgcactccatnacttggactgcntgccttgggacccgcttcccacctgctgcggtcaccatggtggcgagcacagcaaccccaagtgtccagagcactgccccatgcccaccctgcatacccaggtccagagggtccgtccaccacagcagccccaggtggagggctggtctccctggggctccccagtgctctgccctggctgtgggggtggagggaccttgccaggatgaaccccccagtcccaggcaccctctagctccctcagccgaacagcaccctgcatctgggggattaaagcagtcgctgacccccgtccccagcgggcccgggccctcactccctgaaccacacggggtttatttgcggatgttccctggagaggtcgctttgtgaagaaaccatcagcaggctgtgagcatcgccaggctgctgtgggggcgggaccagcctcagtgtcaagggcccgcccactgacccagccgtacctattcgtccacggtgccccgtagcagcaggtcctgcagccaaatctgtctcccttcatgggcctcccagggaaggaggaagccctgctgtgcagacacctctgtggccccccaggggtgtgagcggcctggggagggggccgtggcactgaggccgaaagtgcctgccagacggcacggtctgggtgcgggtgttccctgtgagcccgagtccgcttcaggaggggagcctgcaggtgccggctggtgaggggatgacgcgctgtgggtgggaggaggcagcgcccatctcagcagcaccaggactgcctgggactccctggcaacccagcaccggggaagccgtcagctgctgtgacaataaaacctgccccgtgtctggaaaaaa

SEQ ID NO: 258096 - DNA, 1144 bp, Homo Sapiens
cccactgtcagcacctcttctgtgtggtgagtggaccgcttaccccactaggtgaagatgtcagcccaggagagctgcctcagcctcatcaagtcctcggcagcctgatcttctgcttcggcatctggatcctcatcgacaagaccagcttcgtgtcctttgtgggcttggccttcgtgcctctgcagatctggtccaaagtcctggccatctcaggaatcttcaccatgggcatcgccctcctgggttgtgtgggggccctcaaggagctccgctgcctcctgggcctgtattttgggatgctgctgctcctgtttgccacacagatcaccctgggaatcctcatctccactcagcgggcccagctggagcgaagcttgcgggacgtcgtagagaaaaccatccaaaagtacggcaccaaccccgaggagaccgcggccgaggagagctgggactatgtgcagttccagctgcgctgctgcggctggcactacccgcagaactggttccaagtcctcatcctgagaggtaacgggtcggaggcgcaccgcgtgccctgctcctgctacaacttgtcggcgaccaacgactccacaatcctagataaggtgatcttgccccagctcagcaggcttggacacctggcgcggtccagacacagtgcagacatctgcgctgtccctgcagagagccacatctaccgcgagggctgcgcgcagggcctccagaagtggctgcacaacaaccttatttccatagtgggcatttgcctgggcgtcggcctactcgagctcgggttcatgacgctctcgatattcctgtgcagaaacctggaccacgtctacaaccggctcgctcgataccgttaggccccgccctccccaaagtcccgccccgcccccgtcacgtgcgctgggcacttccctgctgcctgtaaatatttgtttaatccccagttcgcctggagccctccgccttcacattcccctggggacccacgtggctgcgtgcccctgctgctgtcacctctcccacgggacctggggctttcgtccacagcttcctgtccccatctgtcggcctaccaccacccacaagattatttttcacccaaacctcaaataaaccccccgcgtttttggta

SEQ ID NO: 258097 - DNA, 1424 bp, Homo Sapiens
agtagcgaggcctgggtggcgaattcggcacgaggggcaaccacactagtttaggtgatgttctgcaccctgaacacccacaaagtggacatggacaagctcctggggggccagatcgggctggaggacttcatcttcgcccacgtgaaggggcagcgcaaggaggtggaggtgttcaagtcggaggatgcactcgggctcaccatcacggacaacggggctggctacgccttcatcaagcgcatcaaggagggcagcgtgatcgaccacatccacctcatcagcgtgggcgacatgatcgaggccattaacgggcagagcctgctgggctgccggcactacgaggtggcccggctgctcaaggagctgccccgaggccgtaccttcacgctgaagctcacggagcctcgcaaggccttcgacatgatcagccagcgttcagcgggtggccgccctggctctggcccacaactgggcactggccgagggaccctgcggctccgatcccggggccccgccacagtggaggatctgccctctgcctttgaagagaaggccattgagaaggtggatgacctgctggagagttacatgggtatcagggacacggagctggcggccaccatggtggagctgggaaaggacaaaaggaacccggatgagctggccgaggccctggacgaacggctgggtgactttgccttccctgacgagttcgtctttgacgtctggggcgccattggggacgccaaggtcggccgctactaggactgcccccggaccctgcgatgatgacccgggcgcaacctggtgggggcccccagcagggacactgacgtcaggacccgagcctccagcctgagcctagctcagcagcccaaggacgatggtgaggggaggtggggccaggccccctgccccgctccaatcggtaccatcccctccctggttcccagtctggccggggtccccggcccccctgtgccctgttccccacctacctcagctggatcaggcacagggaggggagggatcagccaaattgggcggccacccccgcctccaccactttccaccatcagctgccaaactggtccctctgtctccctggggccttgggttctgtttgggggtcatgaccttcctagtttcctgacgcagggaatacaggggagagggttgtccttccccccagcaaatgcaataatgccctcacccctcctgagaggagccccctccctgtggagcctgttacctccgcatttgacacgagtctgctgtgaaccccgcaacctcctccccacctcccatctctccttccaggcccatccctggcccagagcaggagggagggagggacgatggcggtgggtttttgtatctgaatttgctgtcttgaacataaagaatctatctgctgttag

SEQ ID NO: 258098 - DNA, 1101 bp, Homo Sapiens
  misc_feature (166)..(166): n is a, c, g, or t
  misc_feature (259)..(259): n is a, c, g, or t
  misc_feature (305)..(305): n is a, c, g, or t
  misc_feature (328)..(328): n is a, c, g, or t
  misc_feature (571)..(571): n is a, c, g, or t
  misc_feature (573)..(573): n is a, c, g, or t
  misc_feature (589)..(589): n is a, c, g, or t
  misc_feature (645)..(645): n is a, c, g, or t
  misc_feature (778)..(778): n is a, c, g, or t
  misc_feature (1056)..(1056): n is a, c, g, or t
aacagtgagcatgcgctggacgatagaagtacagcccaatgtagagtacaaatgcaggttgtacagcagttagagctacagcttgcaaaagacaaagaacgcctgcaagccatgatgacccacctgcatgtgaagtctacagaacccaaagccgcccctcagcccnttgaatctggtatcaagtgtaactctctccaagtccgcatcggaggcttctccacagagcttacctcatactccaacgaccccaaccgccccncctaactccccgtcacccaaggcccctctgtcatcacaaccaccangcatgcacaccggtgggacccantccgcaggcggtactcagacaaatacaacgtgcccatttcgtcagatattgcgcagaaccaagaattttataagaactgcagaagttatgaccaccatttacatatgcatctttaattaggcaggccattctcgaatctccagaaaagcagctaacactaaatgagatctataactggttcacacgaatgtttgcttacttccgacgcaacgcggccacgtggaagaatgcagtgcgtcatantnttagtcttcacaagtnttttgtgcgagtagaaaacgttaaaggggcagtatggacagtggatgaagtagaanttcccaaaaacgaaggccacaaaagatcagtggtaaccctttcccttattaaaaacatgcagagcagccacgccttactgcacacctctcaaatgcagcttaacaggcttcaatggctgagaatagtataccntctatacactaccgcttccatgggaaatcccactctgggcaacttagccagcgcaatacgggaagagctgaacggggcaatggagcataccaacagcaacgagagtgacagcagtccaggcagatctcctatgcaagccgtgcatcctgtacacgtcaaagaagagcccctcgatccagaggaagctgaagggcccctgtccttagtgacaacagccaaccacagtccagattttgaccatgacagagattacgaagatgaaccagtaaacgaggacnatggagtgactatcggggcgggccaaccccgagaatgaagattgg

SEQ ID NO: 258099 - DNA, 1140 bp, Homo Sapiens
  misc_feature (4)..(4): n is a, c, g, or t
  misc_feature (286)..(286): n is a, c, g, or t
  misc_feature (673)..(673): n is a, c, g, or t
  misc_feature (715)..(715): n is a, c, g, or t
  misc_feature (778)..(778): n is a, c, g, or t
  misc_feature (872)..(872): n is a, c, g, or t
  misc_feature (907)..(907): n is a, c, g, or t
  misc_feature (909)..(909): n is a, c, g, or t
  misc_feature (913)..(913): n is a, c, g, or t
  misc_feature (922)..(922): n is a, c, g, or t
  misc_feature (927)..(927): n is a, c, g, or t
  misc_feature (934)..(934): n is a, c, g, or t
  misc_feature (979)..(979): n is a, c, g, or t
  misc_feature (1001)..(1015): n is a, c, g, or t
  misc_feature (1018)..(1018): n is a, c, g, or t
  misc_feature (1024)..(1024): n is a, c, g, or t
  misc_feature (1027)..(1028): n is a, c, g, or t
  misc_feature (1030)..(1030): n is a, c, g, or t
  misc_feature (1044)..(1044): n is a, c, g, or t
  misc_feature (1047)..(1047): n is a, c, g, or t
  misc_feature (1052)..(1053): n is a, c, g, or t
  misc_feature (1074)..(1074): n is a, c, g, or t
  misc_feature (1079)..(1079): n is a, c, g, or t
  misc_feature (1086)..(1087): n is a, c, g, or t
  misc_feature (1091)..(1091): n is a, c, g, or t
  misc_feature (1094)..(1094): n is a, c, g, or t
  misc_feature (1109)..(1109): n is a, c, g, or t
  misc_feature (1113)..(1113): n is a, c, g, or t
  misc_feature (1118)..(1118): n is a, c, g, or t
  misc_feature (1129)..(1129): n is a, c, g, or t
tacngaaggaaaaagatacattgaaaatataggaacatacacataaaagacaatgtcatatttaaagtataatcacaataaagagaaagggagctgtaggtcctatggcatccattctgatgacatcccataattgttccttatattccattgtgaagaaggggcagaaaaagattcatctgtccttcagatgacgatacctgtcatttttcttttctaccttagtcacttggcagtgttggtgcatttgagcagatcttcagtcatgaatggaaggaaagaagcncacaagtacagttatggtcaaatgaggtagaaacagtcatctgttaagtagtgctgaaaccacactcctgaccatttccttctttattattgttttcacttagtaattcaacaaattgtttatgcccacggtgttcaaaatgcacagcagtaccagatggctggactcagataagatgcacacaaaagtgataaattaccctagattcgacattttcctatttaaggcttgatggaattgtcatcagagaaggtaaacagaatcaaagtaatttagttggccatgccctagattttaagattttgagctatatgaaatggaaattaagttttgataatgaactctagcttctgagacaaggtggggctatgtgaaggcttctttgtnacaagatccttctaagaatggcatttaaattaaatgtaaaancactgtagatcttcagatattaatctgatagaccagattcataaggtgttggacacctttganagatccttttactagaacatgtggcatacagtagtggaaaagaaccgtaactcctcaagatagatgagcaggggcaaaagtgtgttatcatttngaggcagaatacagtgtggcttatgttctcacttncncctnggaaggggnaaaanaggctanaatttcttgtcttgtgcatggtccggttaggtgggctagttcccngttctctattgagatagatcannnnnnnnnnnnnnnganaggggnccnncngtgcccaggcgggnggnagtgnncaacccgcccccggacccccnccccnggtcaannattnccncccagccccaggagngggntaggnaaaatccgggnattttgttttt

SEQ ID NO: 258100 - DNA, 816 bp, Homo Sapiens
gcactgtggtacttggcaggggctgtcttaggtaaaagggtagttgtggagctacagtctgaagaacatagcttgggctcaagttcaaatgagccatctttttcctttgcgtttttcttgactgaaggtgagatgttatttgtggcatgtgaactgtggcaggtgggaataatcctgcccttgagagaaaggatctccagcctcccagaagcctgctgtgctttcgtcccacagctttctgcccattgtttcttactagtttcttgaattgttcttgtggacttttcctcagggatacattggcctgcaggtcccagttcacatgtagtcccctgctcaccattggagaatcagctcactgctctctagaaacgtggcgttggtgaacggaccatgcttccgtagctctgacctgggcagcttggacctggtcatcctctactgccatacctttccctgggggcttgaacacagaacagggagatggacaaccacttcaaagaaagacccaccgaatgcagtttctgcttgactgactgggcctgcagctcccttctcctgggacttagaggtggccagatttaaggcccctctactcatccaactccctcttcactggtactcccaatcaatcaaagaacctcaaaatttaaactgatgtggatgggaatatgggaattagggtgggggtgggggatgaagggaagaaatcactgtgctttgttcggcctggtgtgcaaggatggttggtggttttcctgcattgtatcttttcttactgtttctttaataaatgggatgagagggcaaaaaaaa

SEQ ID NO: 258101 - DNA, 1747 bp, Homo Sapiens
  misc_feature (87)..(111): n is a, c, g, or t
tggttcaggggctagaaaagagcgtcgatgccggcggcagtgatgagtcctaggaggcgctggctctttggcggctcggaggagcgnnnnnnnnnnnnnnnnnnnnnnnnngtggcccctttgcagatgtattgctgtccttgaatattagcccatttgaaaacgcctgggaagttcagccatcagtatgtccaagtacaaacttattatgttaagacatggagagggtgcttggaataaggagaaccgtttttgtagctgggtggatcagaaactcaacagcgaaggaatggaggaagctcggaactgtgggaagcaactcaaagcgttaaactttgagtttgatcttgtattcacatctgtccttaatcggtccattcacacagcctggctgatcctggaagagctaggccaggaatgggtgcctgtggaaagctcctggcgtctaaatgagcgtcactatggggccttgatcggtctcaacagggagcagatggctttgaatcatggtgaagaacaagtgaggctctggagaagaagctacaatgtaaccccgcctcccattgaggagtctcatccttactaccaagaaatctacaacgaccggaggtataaagtatgcgatgtgcccttggatcaactgccacggtcggaaagcttaaaggatgttctggagagactccttccctattggaatgaaaggattgctcccgaagtattacgtggcaaaaccattctgatatctgctcatggaaatagcagtagggcactcctaaaacacctggaaggtatctcagatgaagacatcatcaacattactcttcctactggagtccccattcttctggaattggatgaaaacctgcgtgctgttgggcctcatcagttcctgggtgaccaagaggcgatccaagcagccattaagaaagtagaagatcaaggaaaagtgaaacaagctaaaaaatagtctttctcaactgttggctaagaagaaatgcaaaagaagtggcataggagtgtgttatgggtgctgaactctctctctttttccccgattttccagagctaggctgtggagtagagtttgtataggtaactaggtaacttattgtggcccagataaggctttaggatgcctcagtgcttatgtcatagccttatgagttagctttcttgctagccccctagtcggtcaccaaactagtaactagtggggcttaatgaaggtcataagtttctgagatgggagagcaacaagtagagatgaagttaaaggtatttatcattcaagaaatcattattgagtcaccattgacaggcactattctaatcagtagttcactttaatatttaataagattttctgggataacagtaagggatattagataatataccgtatgtatttattactagtcttttcctctaggaaaagggatactttgataattaaggccagaggcccattagttgagaaagtcacagatatatttctccaagaaagccaacaaccaccaccacaatgacagaaatgacaacaaggccctttaacttgtcttctagtttagagacatccttcatttgacatttagtagaattcctctttggccacaagaataagcagcaaataaacaactatggctgttgaggttctcattttggtttgttttaattttttgaactttgggtacctgtaattagtttaaaaataaagttcctgataataaagtgactgaaaatggcaaaa

SEQ ID NO: 258102 - DNA, 640 bp, Homo Sapiens
  misc_feature (159)..(159): n is a, c, g, or t
  misc_feature (161)..(161): n is a, c, g, or t
  misc_feature (177)..(177): n is a, c, g, or t
  misc_feature (182)..(182): n is a, c, g, or t
  misc_feature (195)..(195): n is a, c, g, or t
  misc_feature (245)..(245): n is a, c, g, or t
  misc_feature (255)..(255): n is a, c, g, or t
  misc_feature (274)..(274): n is a, c, g, or t
aagaagaaacattatgagcaaataattttattgttctctagctcccaaacttttaatatcaaataaaattaaacatattgttttgaagtagttttctgaccagttgtaccaggaaagatatgggaatacttataaaatgctagttataaaataaaacananggccgacaccattganaacanaggagcacttaantgacttacacctctatctttatagcgttcggaagtgatagggtcattatnatcaatatancggggtctcaactgaaganacagagataactgaggaaaaatccaatacaataaaagcaaatgaaagataaacaagagttagcttagaacaatgacttgcacatcctataaactcattacactggattcagtactagtgattttataccatcatctgaatcctcacattttctaaacgtaccttcacttctttactaacaccttttataaggttggaatgagacttgatgatcaacaaagaggcataagatatccatcccacaaaaccaataacaacattgacgcccaaaaagaatctgtcatatgtgtgataataggacaatcctttcaatgcaagatgaattagctccttgcaaagggagaccacttcatcaaactttctgtgt

SEQ ID NO: 258103 - DNA, 963 bp, Homo Sapiens
  misc_feature (18)..(18): n is a, c, g, or t
  misc_feature (20)..(20): n is a, c, g, or t
  misc_feature (32)..(32): n is a, c, g, or t
  misc_feature (39)..(39): n is a, c, g, or t
  misc_feature (41)..(42): n is a, c, g, or t
  misc_feature (45)..(45): n is a, c, g, or t
  misc_feature (51)..(51): n is a, c, g, or t
  misc_feature (63)..(63): n is a, c, g, or t
  misc_feature (78)..(79): n is a, c, g, or t
  misc_feature (95)..(95): n is a, c, g, or t
  misc_feature (104)..(104): n is a, c, g, or t
  misc_feature (107)..(107): n is a, c, g, or t
  misc_feature (115)..(115): n is a, c, g, or t
  misc_feature (142)..(142): n is a, c, g, or t
  misc_feature (146)..(146): n is a, c, g, or t
  misc_feature (148)..(148): n is a, c, g, or t
  misc_feature (167)..(167): n is a, c, g, or t
aagacagaagtgaaatgnanttatatttggangattcgnannttnggatgnatttgaaatgtnaagaagaggagaaanntgttgtgattcatagnaatggattntanaatggaanaaaacgggtacaaaactgtgaatgagnttgnanattcagttaaagaatgatnagagatgtgcaaactatatatccctttttgtccacacaatgcaaggagaatatgacagccacctcccttggcccttccagggtacaatacgccttacaattcttgatcagtctgaagaacatgtaaggcaaaaccacgaagagataatggatgccaaaccagagctgcttgctttccagcgacccacaatcccacggaacccaaaaggttttggctatgtaacttttatgcatctggaagccctaagacaaagaactttcattaaggatgacacattattagtgcgctgtgaggcctccacccgctttgacatgggtagccttcggagggagggttttcagccacgaagtactgatgcaggggtatagcttgccctaactagctcaaaaacaactacctggagaaaacagtgcctttccttgccctgttctcaataacatgcaaacaaacaagccacgggaaatatgtaatatctactagtgagtgttgcttagaggggtaacttactatttcttcctgttacaaatgatctgaggcagttttttcctgggaatccacacgttccatgctttttcagaaatgttaggcctgaagtgcctgtggcatgttgcagcagctattttgccagttagtatacctctttgttgtactttcttgggcttttgctctggtgtattttattgtcagaaagtccagactcaagagtactaaacttttaataataatggattttccttaaaacttcagtctttttgtagtattatatgtaatatattaaaagtgaaaatcactaaaa

SEQ ID NO: 258104 - DNA, 1051 bp, Homo Sapiens
  misc_feature (262)..(262): n is a, c, g, or t
  misc_feature (577)..(577): n is a, c, g, or t
  misc_feature (624)..(624): n is a, c, g, or t
  misc_feature (825)..(825): n is a, c, g, or t
  misc_feature (829)..(829): n is a, c, g, or t
  misc_feature (851)..(851): n is a, c, g, or t
  misc_feature (861)..(861): n is a, c, g, or t
  misc_feature (866)..(866): n is a, c, g, or t
  misc_feature (869)..(869): n is a, c, g, or t
  misc_feature (871)..(871): n is a, c, g, or t
  misc_feature (889)..(889): n is a, c, g, or t
  misc_feature (893)..(893): n is a, c, g, or t
  misc_feature (897)..(897): n is a, c, g, or t
  misc_feature (899)..(899): n is a, c, g, or t
  misc_feature (902)..(902): n is a, c, g, or t
  misc_feature (906)..(906): n is a, c, g, or t
  misc_feature (920)..(920): n is a, c, g, or t
  misc_feature (926)..(927): n is a, c, g, or t
  misc_feature (937)..(938): n is a, c, g, or t
  misc_feature (957)..(957): n is a, c, g, or t
  misc_feature (959)..(959): n is a, c, g, or t
  misc_feature (961)..(962): n is a, c, g, or t
  misc_feature (975)..(977): n is a, c, g, or t
  misc_feature (983)..(983): n is a, c, g, or t
  misc_feature (986)..(986): n is a, c, g, or t
  misc_feature (992)..(992): n is a, c, g, or t
  misc_feature (1002)..(1002): n is a, c, g, or t
  misc_feature (1017)..(1017): n is a, c, g, or t
  misc_feature (1030)..(1030): n is a, c, g, or t
  misc_feature (1044)..(1044): n is a, c, g, or t
gggatgcagcggggaaggaggatggcggatatcatcgcaagactccgggaggacgggatccaaaaacgtgtgaaacaggaagagccgaggagagcccccggactttcaagatgggaccaaggccacgttccactaccggacgctgcacagtgacgacgagggcaccgtgctggacgacagcacgggctcgtggcaagcccatggagcccatcattggcaagaagttcaagcagcctgtgtgggagaccatcgtgtgcaccangcgagaaggggagattgcccagttcctctgtgacatcaagcatgtggtcctgtacccgctggtggccaagagtctccgcaacaccgcggtgggcaaggaccccctggagggccagcggcactgctgcggtgttgcacagatgcgtgaacacagctccctgggccatgctgacctggacgccctgcagcagaacccccagcccctcatcttccacatggagatgctgaaggtggagagccctggcacgtaccagcaggacccatgggccatgacagacgaagagaaggcaaaggcagtgccacttatccaccaggngggcaaccggttgtaccgcgaggggcattgtgaaggaggctgctgcnaagtactacgatgccattgcctgcctcaagaacctgcagatgaaggaacagcctgggtcccctgaatggatccagctggacaagcagatcacgccgctgctgctcaactactgccagtgcaagctggtggtcgaggagtactacgaggtgctggaccactgctcttccatcctcaacaagtacggacgacaacgtcaatgncttnttcaagtggggcaaggccactntgccgtgtgnatttnttntnaggccaggctgactttgncaantgcngntgntggnccagccctggcgcntgtggnngcgagagcgnnggccctgatgcacggatcngnannggacgagaggtcnnncccggnacnggggtnttctccattnaaagagactttgccnggcttactgcaanccactgctgagtgnatccccc

SEQ ID NO: 258105 - DNA, 1071 bp, Homo Sapiens
ccctcaaccaaaatggcgctagctcggaagctgccgaggtgctaggagttgccgaagcaagtccggaagctaccgagcgagtccggaagttgccgaaagggagcagcggggaaggaggatggcggatatcatcgcaagactccgggaggacgggatccaaaaacgtgtgatacaggaaggccgaggagagctcccggactttcaagatgggaccaaggccacgttccactaccggacgctgcacagtgacgacgagggcaccgtgctggacgacagccgggctcgtggcaagcccatggagctcatcattggcaagaagttcaagctgcctgtgtgggagaccatcgtgtgcaccatgcgagaaggggagattgcccagttcctctgtgacatcaagcatgtggtcctgtacccgctggtggccaagagtctccgcaacatcgcggtgggcaaggaccccctggagggccagcggcactgctgcggtgttgcacagatgcgtgaacacagctccctgggccatgctgacctggacgccctgcagcagaacccccagcccctcatcttccacatggagatgctgaaggtggagagccctggcacgtaccagcaggacccatgggccatgacagacgaagagaaggcaaaggcagtgccacttatccaccaggagggcaaccggttgtaccgcgaggggcatgtgaaggaggctgctgccaagtactacgatgccattgcctgcctcaagaacctgcagatgaaggaacagcctgggtcccctgaatggatccagctggacaagcagatcacgccgctgctgctcaactactgccagtggcaagctggtggtcgaggagtactacgaggtgctgggaccactgctcttccatcctcaaaaaacaacgtcaaggcctacttcaagcgggggcaggccccacgcggcccgtgtggaatgcccaggaggcccaggctgactttgccaaagtgctggagctgaacccagccctggcgcctggggtgaacccaaaacttgcggccctggaaggacggattcggcaaaaagaacaaaag

SEQ ID NO: 258106 - DNA, 1076 bp, Homo Sapiens
  misc_feature (192)..(192): n is a, c, g, or t
  misc_feature (862)..(870): n is a, c, g, or t
  misc_feature (916)..(916): n is a, c, g, or t
  misc_feature (973)..(973): n is a, c, g, or t
  misc_feature (975)..(976): n is a, c, g, or t
  misc_feature (978)..(978): n is a, c, g, or t
  misc_feature (980)..(980): n is a, c, g, or t
  misc_feature (983)..(983): n is a, c, g, or t
  misc_feature (986)..(988): n is a, c, g, or t
  misc_feature (990)..(990): n is a, c, g, or t
  misc_feature (993)..(993): n is a, c, g, or t
  misc_feature (1001)..(1001): n is a, c, g, or t
gagcatgtgacctgcgtacagagcatcttggacgaattccttcaaacgtatggcagcctcatacccctcagcactgatgaggtagtagagaagctggaggacattttccagcaggagttttccaccccttccaggaagggcctggtgttgcagctgatccagtcttaccagcggatgccaggcaatgccatnggtgaggggcttccgagtggcttataagcggcacgtgctgaccatggatgacttggggaccttgtatggacagaactggctcaatgaccaggtgatgaacatgtatggagacctggtcatggacacagtccctgaaaaggtggacatcttcaataaggagctactgctaatccccatccacctggaggtgcattggtccctcatctctgttgatgtgaggcgacgcaccatcacctattttgactcgcagcgtaccctaaaccgccgctgccctaagcatattgccaagtatctacaggcagaggcggtaaagaaagaccgactggatttccaccagggctggaaaggttacttcaaaatgaatgtggccaggcagaataatgacagtgactgtggtgcttttgtgttgcagaactgcaagcatctggccctgtatcagccattcagcttcacccagcaggacatgcccaaacttcgtcggcagatctacaaggagctgtgtaactgcaaactcactgtgtgagcctcgtaccccagaccccaagcccataaatgggaagggagacatgggagtcccttcccaagaaactccagttcctttcctctcttgccctcttcccactcacttcccctttgggttttcatattttaaatgtttcaatttctgtannnnnnnnnctttgagagaatacttgttgatttctaatgtgcaggggatggctanagaaaagcccctttcttcctctgtttgcaggggagtgtggccctgtggcctgggtgnannananaanaannnanaanaaagtgcngggagcaggaaataagtgctgggggtggtgggcggacaataggatcactgcctgccagatcttcaaacttttatt

SEQ ID NO: 258107 - DNA, 1246 bp, Homo Sapiens
tctgtctggcggcggcagcatggcggcgggggcggctgaggcagctgtagcggccgtggaggaggtcggctcagccgggcagtttgaggagctgctgcgcctcaaagccaagtccctccttgtggtccatttctgggcaccatgggctccacagtgtgcacagatgaacgaagttatggcagagttagctaaagaactccctcaagtttcatttgtgaagttggaagctgaaggtgttcctgaagtatctgaaaaatatgaaattagctctgttcccacttttctgtttttcaagaattctcagaaaatcgaccgattagatggtgcacatgccccagagttgaccaaaaaagttcagcgacatgcatctagtggctccttcctacccagcgctaatgaacatcttaaagaagatctcaaccttcgcttgaagaaattgactcatgctgccccctgcatgctgtttatgaaaggaactcctcaagaaccacgctgtggtttcagcaagcagatggtggaaattcttcacaaacataatattcagtttagcagttttgatatcttctcagatgaagaggttcgacagggactcaaagcctattccagttggcctacctatcctcagctctatgtttctggagagctcataggaggacttgatataattaaggagctagaagcatctgaagaactagatacaatttgtcccaaagctcccaaattagaggaaaggctcaaagtgctgacaaataaagcttctgtgatgctctttatgaaaggaaacaaacaggaagcaaaatgtggattcagcaaacaaattctggaaatactaaatagtactggtgttgaatatgaaacattcgatatattggaggatgaagaagttcggcaaggattaaaagcttactcaaattggccaacataccctcagctgtatgtgaaaggggagctggtgggaggattggatattgtgaaggaactgaaagaaaatggtgaattgctgcctatactgagaggagaaaattaataaatcttaaacttggtgcccaactattgtaagaaatatttaattacattgggagcagttcatgatttagtcctcagaaatggactaggaatagaaaattcctgctttctcagttacatgttttgtgtatttcacaatgtcgtgctaaataaatgtatgttacatttttttcccaccaaaaatagaatgcaataaacatcttcaaattattaacaaaaa

SEQ ID NO: 258108 - DNA, 572 bp, Homo Sapiens
  misc_feature (27)..(27): n is a, c, g, or t
  misc_feature (52)..(52): n is a, c, g, or t
  misc_feature (552)..(552): n is a, c, g, or t
cgggggcggctgaggcagctgtagcgnccgtggaggaggtcggctcagccgngcaggtttgaggagctgctgcgcctcaaagccaagtccctccttgtggtccatttctgggcaccatgggctccacagtgtgcacagatgaacgaagttattggcagagttagctaaagaactccctcaagtttcatttgtgaagttggaagctgaaggtgttcctgaagtatctgaaaaatatgaaattagctctgttcccacttttctgtttttcaagaattctcagaaaatcgaccgattagatggtgcacatgccccagagttgaccaaaaaagttcagcgacatgcatctagtggctccttcctacccaggcgctaatggaacatctttaaaggaagattcttcaacctttcgctttggaaggaaatttgacttcatggctggccccctggcatggctgttttatggaaagggaactccttcaaggaaccacgctgtgggtttttcaggcaaggcaggtgggttgggaaatttttttcaccaaacataattatttncagtttaggcagtttttgga

SEQ ID NO: 258109 - DNA, 1882 bp, Homo Sapiens
  misc_feature (70)..(70): n is a, c, g, or t
  misc_feature (97)..(97): n is a, c, g, or t
  misc_feature (106)..(106): n is a, c, g, or t
aaaaaagcaggctggtaccggtccggaattcccgggatcgctgcactgcgaggccgacgcagctggaganaagttaggcaggtcctagggagggcangctcgagtnctgggcccgcctccccgcgggactgtaggcccgggggctccgcctcgtcgcagcggcagaagtgatgccaccaaaaagaaatgaaaaatacaaacttcctattccatttccagaaggcaaggttctggatgatatggaaggcaatcagtgggtactgggcaagaagattggctctggaggatttggattgatatatttagctttccccacaaataaaccagagaaagatgcaagacatgtagtaaaagtggaatatcaagaaaatggcccgttattttcagaacttaaattttatcagagagttgcaaaaaaagactgtatcaaaaagtggatagaacgcaaacaacttgattatttaggaattcctctgttttatggatctggtctgactgaattcaagggaagaagttacagatttatggtaatggaaagactaggaatagatttacagaagatctcaggccagaatggtacctttaaaaagtcaactgtcctgcaattaggtatccgaatgttggatgtactggaatatatacatgaaaatgaatatgttcatggtgatataaaagcagcaaatctacttttgggttacaaaaatccagaccaggtttatcttgcagattatggactttcctacagatattgtcccaatgggaaccacaaacagtatcaggaaaatcctagaaaaggccataatgggacaatagagtttaccagcttggatgcccacaagggagtagccttgtccagacgaagtgacgttgagatcctcggctactgcatgctgcggtggttgtgtgggaaacttccctgggaacagaacctgaaggaccctgtggctgtgcagactgctaaaacaaatctgttggacgagctcccccagtcagtgcttaaatgggctccttctggaagcagttgctgtgaaatagcccaatttttggtatgtgctcatagtttagcatatgatgaaaagccaaactatcaagccctcaagaaaattttgaaccctcatggaatacctttaggaccactggaccttttcccacaaaaggacagagtataaatgtccatactccaaacagtcaaaaagttgattcacaaaaggctgcaacaaagcaagtcaacaaggcacacaataggttaatcgaaaaaaaagtccacagtgagagaagcgctgagtcctgtgcaacatggaaagtgcagaaagaggagaaactgattggattgatgaacaatgaagcagctcaggaaagcacaaggagaagacagaaatatcaagagtctcaagaacctttgaatgaagtaaacagtttcccacaaaaaatcagctatacacaattcccaaactcattttatgagcctcatcaagattttacccagcccagatatattccaagaagtcaagatctcccatcctggtataaatacactcccacagtcagcacggggatcacagacttagaaagttcaactggactttggcctacaatttcccagtttactcttagtgaagagacaaacgcagatgtttattattatcgcatcatcatacctgtccttttgatgttagtatttcttgctttattttttctctgaagatgataccaaaattccttttgataattttttaagtttccagctcttcaccgaaatgttgtattcttatttcagtgtttccttccagacatttttaaggtaattggctttaaaaagagaacatattttaacaaagtttgtggacactctaaaaaataaaattgctttgtattagaattt

SEQ ID NO: 258110 - DNA, 432 bp, Homo Sapiens
  misc_feature (334)..(334): n is a, c, g, or t
  misc_feature (350)..(350): n is a, c, g, or t
  misc_feature (413)..(413): n is a, c, g, or t
ttcggcacagctaggaatagatttacagaagatctcaggccagaatcgtacctttaaaaagtcaactgtcctgcaattaggtatccgaatgttggatgtactggaatatatacatgaaaatgaatatgttcatggtgatataaaagcagcaaatctacttttgggttacaaaaatccagaccaggtttatcttgcagattatggactttcctacagatattgtcccaatgggaaccacaaacagtatcaggaaaatcctagaaaaggccataatgggacaatagagtttaccagcttgggatgcccacaagggagtaggccttgttccagacgnaagtgaacgttggagnattcctcggcttactgcatggctgcggtgggttgtgtggggaaatttcctggggcaacagganacttgaagggacctgtggg

SEQ ID NO: 258111 - DNA, 1207 bp, Homo Sapiens
aagtagcgaggcctgggtggcgaattcggcacgagggttcatccggatccggcctaatcgtgaaggagaccgggaagccatcgtggcagctttgttgacgaggaccttcactgaccatgtgatgctgttcacgcaaaccaagaagcaggcccaccgcatgcacatcctcctggggctcatggggctgcaggtgggtgagctccatggcaacttgtcacagacgcagcggctggaggccctccggcgttttaaggatgaacagattgacatcctcgtggccactgatgtggcagcccgtggacttgacattgagggggtcaaaacggtaatcaacttcacaatgcctaataccatcaaacattatgtccaccgggtggggcgaacagcacgtgctggcagggctgggcgctcagtctctctggtgggagaagatgagcggaagatgctgaaggagattgtaaaagctgccaaggcccctgtgaaggccaggatacttccccaagatgtcatcctcaaattccgggacaagattgagaaaatggagaaagatgtgtatgcagttctgcagctagaggcggaggaaaaagagatgcagcagtcagaagcccagatcaatacagcaaagcggctcctggagaaggggaaggaggcagtggtccaagagcccgagaggagctggttccagaccaaagaagagaggaagaaggagaaaattgccaaagctctgcaggaatttgacttggccttaagaggaaagaagaaaaggaagaagtttatgaaggatgccaaaaaaaagggggagatgacagcagaggaaaggtctcagtttgaaatcctcaaggcgcagatgtttgctgaacggctagcgaagaggaatcgcagagccaagcgggcccgagcaatgcccgaggaggagccagtgagaggtcctgccaagaagcaaaagcaggggaagaaatctgtatttgatgaagaactcaccaacacaagcaagaaggccctgaaacagtatcgagctggcccttcctttgaagaaaggaaacagttgggcttgccccaccagagacgaggaggaaactttaaatctaaatccagatacaagaggaggaagtagctgtcgtggcctgaagaaattcatgggggcagcccttaaatcccttccatgtgggaagacatcctggctggtctgtcttttctccatttgttt

SEQ ID NO: 258112 - DNA, 2160 bp, Homo Sapiens
  misc_feature (1978)..(1978): n is a, c, g, or t
  misc_feature (2038)..(2096): n is a, c, g, or t
ggggtgacgcatggtacttgcgcaaagacgacgaggaggctgcgaaaagttaagggccggaccgcaggctgtgctcgcttccggaagtggcttctgcgacaacatgcttgcggacctcggcttaatcggaaccataggcgaggatgacgaggtgccggtggagcccgagtctgactccggggacgaggaagaggaggggcccattgtgctgggcagacgacaaaaagctttggggaagaaccgcagtgctgatttcaaccctgatttcgttttcactgagaaggaggggacgtacgatggcagctgggccctggctgatgtcatgagccaactcaagaagaagagggcagccactacattagatgagaagattgagaaagttcgaaagaaaaggaaaacagaggataaagaagccaagtctgggaagttggaaaaggagaaagaagcaaaggaaggctctgaaccaaaggagcaggaagaccttcaagagaatgatgaggaaggctcagaagatgaagcctcggagactgactactcatcagctgatgagaacatcctcaccaaagcagatacactcaaagtaaaggatcggaagaagaagaagaagaaaggacaggaagcaggaggattttttgaagatgcatctcagtacgatgaaaacctctcgttccaggacatgaacctttcccgccctcttctgaaggccattacagccatgggcttcaagcagcccaccccgatccagaaggcgtgcatacctgtgggtctattggggaaggacatctgtgcctgtgcagccacttgggacaggtaaaactgccacctttgccctgcctgtataggagcgtctgatttataaaccccgccaggctccagtcacccgcgtgctggtgctagtgcccacccgagagctgggcatccaggtgcactctgtcaccagacagctggcccagttctgcaacatcaccacctgcctggctgtgggcggcttggatgtgaagtctcaggaagcagctcttcgggcagcgcctgacatcctcatcgccaccccaggccggctcatcgatcacctccacaactgcccttccttccacctgagcagcatcgaggtgctcatcctggacgaggctgacaggatgctggatgagtactttgaggagcagatgaaggagatcatccgaatgtgttcccaccaccgccagaccatgctcttctcggccaccatgacagacgaggtgaaagatctggcttctgtctccttgaagaatcctgtccggatatttgtgaacagcaacacagatgtggctcccttcctgcggcaggagttcatccggatccggcctaatcgtgaaggagaccgggaagccatcgtggcagctttgttgacgaggaccttcactgaccatgtgatgctgttcacgcaaaccaagaagcaggcccaccgcatgcacatcctcctggggctcatggggctgcaggtgggtgagctccatggcaacttgtcacagacgcagcggctggaggccctccggcgttttaaggatgaacagattgacatcctcgtggccactgatgtggcagcccgtggacttgacattgagggggtcaaaacggtaatcaacttcacaatgcctaataccatcaaacattatgtccaccgggtggggcgaacagcacgtgctggcagggctgggcgctcagtctctctggtgggagaagatgagcggaagatgctgaaggagattgtaaaagctgccaaggcccctgtgaaggccaggatacttccccaagatgtcatccctcaaattccgggacaagattgagaaaatggagaaagatgtgtatgcagttctgcagctagaggcggaggaaaagagatgcagcagtcagaagcccagatcaatacagcaaagcggctcctggagaaggggaaaggaggagtggtccaaaacccccaaaggacctggtttccggaccnagaagaaaagggagaaggagaaaattgccaaagctccggaggaattttgattgggccttnnnnnnnnnnnnnnnnnnnnnnnnnnnnnnnnnnnnnnnnnnnnnnnnnnnnnnnnnnngacccccaaaggaaaggcctcagttttgaaattcctcaagggccaaatgttttgcctgaacgga

SEQ ID NO: 258113 - DNA, 932 bp, Homo Sapiens
  misc_feature (3)..(3): n is a, c, g, or t
  misc_feature (6)..(6): n is a, c, g, or t
  misc_feature (11)..(11): n is a, c, g, or t
  misc_feature (14)..(14): n is a, c, g, or t
  misc_feature (20)..(20): n is a, c, g, or t
  misc_feature (25)..(25): n is a, c, g, or t
  misc_feature (67)..(67): n is a, c, g, or t
  misc_feature (79)..(79): n is a, c, g, or t
  misc_feature (123)..(123): n is a, c, g, or t
  misc_feature (271)..(271): n is a, c, g, or t
  misc_feature (436)..(436): n is a, c, g, or t
  misc_feature (821)..(821): n is a, c, g, or t
  misc_feature (904)..(904): n is a, c, g, or t
agnacnaatcnccngctgcngtaanagaaccaaagacaaataaattgattgtaccggatatgataanacttagtagagntttggaaagagatataattcccagaatcccaatgttcgatgggngatatcgctgatttagtagaagctaaaaagttgcttaaggaagccgtagtgttaccaatgtggatgcccgaattctttaagggcattaggagaccatggaaagctcgattttattctccagccaccatatttattgatgagatagacnccatctgtagtcgccgagggaccttctgaagaacatgaaagcaagcagaagggtgaaagcggcgctgctggttcagatggatggtgttggaggcacttctgaaaatgatgacccttccaaaatggttatggttctggcagctactaattttccctgggatatagntgaggctttaagacgacgccttgagaaacgaatctatattcctttgccgtcagcaaaaggcagggaggagctattacgaataagtctacgtgagttggaattggctgatgatgttgaccttgcaagtatagcagaaaacatggaaggttattcaggtgcggacattaccaacgtgtgcagggatgcgtccttgatggcaatgagaaggcgcattgaaggtttgactccagaggaaatccgaaatctttccaaagaagaaatgcacatgcctacaactatggaggatttcgagatggctttaaaaaaggtttctaagtcagtgtctgctgcagacattgaaagatacgagaaatggatatttgagtttggatcatgctaaattctnacatgtaaactgtgagaaatgtgccttaagtgtttgaatattaaatgcagtaattcattgtactgagtgctatattttttttnactttcataatggtaagattttttaaaa

SEQ ID NO: 258114 - DNA, 1503 bp, Homo Sapiens
  misc_feature (1198)..(1198): n is a, c, g, or t
  misc_feature (1285)..(1285): n is a, c, g, or t
tcccgggatgcgacgccccgcgtgcgccagagtcgccgaggtcgtccccggcaccggaagtgaccctggcgggtttgtcttcaaattctcggcgagcaggagccgcgccggcaggtggtgttgacgattgaactgggcagtactggggccgtgagcggagagcaaagtgggctggactgggtcaggccctccttcctcgctgccgggatctccactccgccaatcccctgtgcctggcgttgggcggtttcccgaggagcttgggccgccgcagcttacagtcgaacatgagtcttcttatgattagtgagaatgtaaaattggctcgtgaatatgcattgctgggaaactatgactctgcgatggtctattatcagggagttcttgaccaaatgaacaagtatctgtactcagtcaaagatacatacctccagcagaaatggcaacaggtttggcaggaaataaatgtggaagctaaacatgttaaagatatcatgaaaacactagagagctttaaactagacagcactcccttgaaagcggcacagcatgaccttccagcttctgagggagaagtctggtccatgcctgtacctgttgaacgaagaccctcaccaggacctagaaaacgccaatcttctcagtacagtgaccctaaatcacatggtaatcgtccaagtacaactgtcagagttcaccgttcatctgcacagaatgttcacaatgacagagggaaagctgttcgttgtcgtgaaaagaaagaacagaataaaggaagagaggaaaagaacaaatcacctgctgcagtaacagaaccagagacaaataaatttgatagtaccggatatgataaagacttagtagaagctttggaaagagatataatttcccagaatcccaatgttcgatgggatgatatcgctgatttagtagaagctaaaaagttgcttaaggaagccgtagtgttaccaatgtggatgcccgaattctttaagggcattaggagaccatggaacaggagtactgatggtcggcccacctggcacggggaagacgctccttgctaaagcagtagctacagaatgcaagacaacattcttcaatgtctcttcatcaactttgacttccaaatacagaggagaatctgagaagcttgttcgtcttctgtttgaaatggctcgattttattctccagccnaccatatttattgatgagatagactccatctgtagtcgcgaggactctgagacatgagcagcagagggtgaagcgactgctggtcanaggatggggtggagtactctgaaatgagaccctccaaatggtatggtctgcagctactattttcccgggaattgaagaagctttaagaccaacccttaaaaacgaactttattccctttgccgtccccaaaaggcagggggggactttttcccaaaaaagccaccgggaatttgaaattggctaaaagagttgacccctgccagttatccaaaaaacc

SEQ ID NO: 258115 - DNA, 766 bp, Homo Sapiens
catcatcagccaattccaactcacgtagacttattcgtaatagctcctccctgccttttgctgacggcaaaggaatatagattcgtttctcaaggcgtcgtcttaaagcctcatctatatcccagggaaaattagtagctgccagaaccataaccattttggaagggtcatcattttcagaagtacctccaacaccatccatctgaaccagcagctccgctttcacccttctgcttgcttcatgttcttcagaagtccctcggcgactacagatggagtctatctcatcaataaatatggtggctggagaataaaatcgagccatttcaaacagaagacgaacaagcttctcagattctcctctgtatttggaagtcaaagttgatgaagagacattgaagaatgttgtcttgcattctgtagctactgctttagcaaggagcgtcatccccgtgcccaggtgggccgaccatcagtactccctgttgcgaatataatagcctcagcagaggatttatctgccattgtttatccatggtctcctaatgcccttaaagaattcgggcatccacattggtaacactacggcttccttaagcaactttttagcttctactaaatcagcgatatcatcccatcgaacattgggattctgggaaattatatctctttccaaagcttctactaagtctttatcatatccggtactatcaaatttatttgtctctggttctgttactgcagcaggtgatttgttcttttcctc

SEQ ID NO: 258116 - DNA, 1916 bp, Homo Sapiens
  misc_feature (1000)..(1000): n is a, c, g, or t
  misc_feature (1162)..(1162): n is a, c, g, or t
  misc_feature (1195)..(1195): n is a, c, g, or t
  misc_feature (1208)..(1208): n is a, c, g, or t
  misc_feature (1214)..(1214): n is a, c, g, or t
  misc_feature (1298)..(1298): n is a, c, g, or t
  misc_feature (1337)..(1337): n is a, c, g, or t
tttgtatgctaagactttgctaaagtttatcagcagaagaagctttggggccaagactatggggctttctagatatagaaacatgtcatctgtaaacagagacagtttgacttcctgtctattcctctcttccctcctctgtttggatgcccttccagttttgcacattcagtgtaatgttggctgtgggtttgtcatggctagctctcatcattttggcacttctgactagaagggcaagaggggccagtgttgttgttacctgaaaggtaagtgcagcccacaaaaatgcagtgaagaagaagatgtattatgcatatgtttaagttaatacaattgagatatatttagcagacagaatcaatagagttgatgagtgactgactggatgtgtggggagtttatatcactcccaggtttttgacttgggcaaccgggcactcatgaaggaaaaagaggatccagggagaggaacttttctgaggactggggtagggctgaacagctgcattcgaggctggtggagggtgggctgggcatgggatgcacaaatggaaattccactgggtctgcagctcacacataggcatgaccagcatagagatagagaggccccagtgctgctgagtaactgtgattccccaggtgatggcatcagctgagaagggaaggaagcccatgagaggacactgaagaaggagtgagcagacaataagaagcccacagaagacagagaaggaacaactagagggagaagccaaggcaggcgtgtgtagtaagacataggaactgagggagaggacatttcaagatggtggggatgccatacaacaggactatgtgatggtttttggctgtgtccataggaagtcacaacaggcaagggaaagaaaccagaacccagtcatggagttaagaagtgagtcagagagtagatgggtagggacagtgaggtaaggcctctttctaaggaagtttggctgaaggatagactagctgnacacatgctggctgtgtggggtagagggaggaatgatggagggtagaagagccttgagcctgcgagaagagtctcttagaatagagaagctgaagttaaagttgtggaagagagtggggataactgagtgacagataatcaggagaagaaaaggagatccanactcatgacagagagatgacctttgccaagagnacagccgtctttnacggtnacagagaggtaggacaaaatgagtggtgttcaagaattggtttgtagcacaatatttcaactatgtcctttaaaaagtttctcnacagacactacccaaagcagtgcttcactacagtggcanacagacctgaaaattttcatctgaagcagcagagtgcactgcagaggcaggtcaccaaccagtgtggaggctaaaagcgggcctctttggggattccaggtggaagtgttggacatctgtagtattcctggtctcgaatcatcctgatattcttcattttgttattcacattggactaggcaggaacaaagatcaccacaactggctcgccttcaactatgttagatggcaacttgccttcagtatggtgaaacacatcagttaagaccggggttgtgcatggcaggactttctacaaggacacccagtctccttaataaacatgagatgctctctttccagaatttctcttgcctgacacagcataggaagatgctgaacggccacacagtgatccattggtcagtggtgacataaggaggtcagaaggggaggagtgaggagaagtagggaagactaggtggttgtaggcctccttcatctgttcattggctgtggcattaggccagctactctttgcacttctgtaaagtgagacggtcgatcttgtctgcctctctagtcgacctgcaggcatgc

SEQ ID NO: 258117 - DNA, 571 bp, Homo Sapiens
  misc_feature (63)..(63): n is a, c, g, or t
  misc_feature (300)..(300): n is a, c, g, or t
  misc_feature (378)..(378): n is a, c, g, or t
  misc_feature (389)..(448): n is a, c, g, or t
  misc_feature (534)..(534): n is a, c, g, or t
  misc_feature (542)..(542): n is a, c, g, or t
acatgctggctgtgtggggtagattgaggaatgatggagggtaggagagccttgagcctgcangaagagtctcctagaatagagaagctgaggttaaagttgtggaagacagtggggataactgagtgacagataatcaggagaagaaaaggagatccagaatcatgacagagagatgacctttgccaagagcacagccatctttcactgtcacagagaggtaggacaaaacgattggtgttcaagaattggtttgtagcacaatattttaactatgtcctttaaaaagtttctccacangacactacccaaagcagtccttcactacagtggcatgacagacctcgaaaattttcatctgaagcagcagagtgaacntgcagagtcannnnnnnnnnnnnnnnnnnnnnnnnnnnnnnnnnnnnnnnnnnnnnnnnnnnnnnnnnnnttttgcctggaatcccaaagtgtcagatttactgaagaatatttcattgtaattactttttatactttataggtcaagagctctgntttaaagncaaaatttattgaatatactttttccacc

SEQ ID NO: 258118 - DNA, 1264 bp, Homo Sapiens
  misc_feature (1158)..(1158): n is a, c, g, or t
  misc_feature (1164)..(1164): n is a, c, g, or t
  misc_feature (1166)..(1166): n is a, c, g, or t
  misc_feature (1226)..(1226): n is a, c, g, or t
  misc_feature (1249)..(1249): n is a, c, g, or t
tggggtctggtcgtgggcaggatggtgcccagaagggggttaggttgtcccagtgaaaattctgttgccccgtctcaaccccatctgactaccccagactctgcctgcctcagatctcagactatcctgattaatctggggaagaacagagccagggaaagaatggtggggacccctgtacttgggggagacacacctgcatcttcctcctgccacagatggaggccctcaggatctgacaccctcttgtcccaacaccagttagccctataccctaactcactccaccccattttctccggctgcctggccgggtttctacctctcgtcaccggagctgatcactgtcagttttgtaccgatttagaaataacaataataatgaagattctaggaatggcatgagggattgatgggggacttggagggaggaacaagtggtgccctgtcccctgctcccctggccaaagaaagctgtccttgaggctgagccctcagccctggcctggtggggggacagcaaggttcccttgttataagaggggcagagaggacaactccgctttggccaacctagccaaggctgcagcatatagaccaggaaatcaggtagcccacactggtgatggagcagagtctgggggaagggtcgtgggtggggaatttatcaccaacatccattgtagggggaatctatgattctgcttccccagcggattcccactctgtccaccaagtggggcgtagcacagccttcacagcaaccgccctgaccttgggcagtctagtgttcctgcattctagtccctgctgtcctgcaggactttgggcaagtgacctgccctctgtgagcctccctctgaaacagaggaggtggctccccttccccacaccttagagtggctgggagggtaacaaagagggcctgcccctttagtctcctgcacccctgccccctggttcaccagagggagcggatgaaggatggcagcatctcacatgccccatcaccaactctaaggcacctggggtgagggggcggagcccaggcctctggctgctcccctgtgggagccattggaatgtatcccctgacaggcccccttccgcctccacctcaacccaggtcttggatttcaggtccctccacccccattntgagtntntgtccttctccttccacccgctcccagggtttcccaccacagggtctggaagtgtgtgtnacgcccattgagctgttacccgnagtcagattaaaaat

SEQ ID NO: 258119 - DNA, 1759 bp, Homo Sapiens
gccgggctcttggtacctcagcgcgagcgctcaggcgtccggccgccgtggctatgttcgtgtccgatttccgcaaagagttctacgaggtggtccagagccagagggtccttctcttcgtggcctcggacgtggatgctctgtgtgcgtgcaagatccttcaggccttgttccagtgtgaccacgtgcaatatacgctggttccagtttctgggtggcaagaacttgaaactgcatttcttgagcataaagaacagatcaaattactcattaaacaagatgatgaccttgaagttcccgcctatgaagacatcttcagggatgaagaggaggatgaagagcattcaggaaatgacagtgatgggtcagagccttctgagaagcgcacacggttagaagaggagatagtggagcaaaccatgcgcgaggaggcagcggcgagagtgggaggcccggagaagagacatcctctttgactacgagcagtatgaatatcatgggacatcgtcagccatggtgatgtttgagctggcttggatgctgtccaaggacctgaatgacatgctgtggtgggccatcgttggactaacagaccagtgggtgcaagacaagatcactcaaatgaaatacgtgactgatgttggtgtcctgcagcgccacgtttcccgccacaaccaccggaacgaggatgaggagaacacactctccgtggactgcacacggatctcctttgagtatgacctccgcctggtgctctaccagcactggtccctccatgacagcctgtgcaacaccagctataccgcagccaggttcaagctgtggtctgtgcatggacagaagcggctccaggagttccttgcagacatgggtcttcccctgaagcaggtgaagcagaagttccaggccatggacatctccttgaaggagaatttgcgggaaatgattgaagagtctgcaaataaatttgggatgaaggacatgcgcgtgcagactttcagcattcattttgggttcaagcacaagtttctggccagcgacgtggtctttgccaccatgtctttgatggagagccccgagaaggatggctcagggacagatcacttcatccaggctctggacagcctctccaggagtaacctggacaagctgtaccatggcctggaactcgccaagaagcagctgcgagccacccagcagaccattgccagctgcctttgcaccaacctcgtcatctcccaggggcctttcctgtactgctctctcatggagggcactccagatgtcatgctgttctctaggccggcatccctaagcctgctcagcaaacacctgctcaagtcctttgtgtgttcgacaaagaaccggcgctgcaaactgctgcccctggtgatggctgcccccctgagcatggagcatggcacagtgaccgtggtgggcatccccccagagaccgacagctcggacaggaagaacttttttgggagggcgtttgagaaggcagcggaaagcaccagctcccggatgctgcacaaccattttgacctctcagtaattgagctgaaagctgaggatcggagcaagtttctggacgcacttatttccctcctgtcctaggaatttgattcttccagaatgaccttcttatttatgtaactggctttcatttagattgtaagttatggacatgatttgagatgtagaagccattttttattaaataaaatgcttattttagggctccaaaacacacacaaac

SEQ ID NO: 258120 - DNA, 300 bp, Homo Sapiens
  misc_feature (299)..(300): n is a, c, g, or t
cttcgtcttaaataacaagatcccatggagttaaaatgaagtttgacatcatgaaaatgaaaataacccacaaaaaaattgccgctgtttgcatactggggacatggcaagcgatgtaaactgccttccctggcattcttctgacacaaatcctcgagtttcacaatgtttgcagccatttccagagttaacatactaggttagaatgagggaaaggtgacagttttgaaacagaccgaagagactggccaaaagctagggcatggggagaatgtgaaggtatgcaaaagcctaccccnn

SEQ ID NO: 258121 - DNA, 1113 bp, Homo Sapiens
  misc_feature (330)..(365): n is a, c, g, or t
taatctatgggaaaatgaagaagagaaagtggaaatttttcatcctttgcgactagttcgggatccactgtcacctgctgtaagacagaaagaaactgtgaaaaatgacctgcctgtaaatgaagctgcaattagaaaaatagctgcccttgaaaatgagctgacttttcttcgctctcagattgcagcaattgtggaaatgcaggaactgaaaaatagtacaaattctagttcctttggcttgagtgacgagcgcattagtttgggtcagctgtcatcatcgcgggctgcccatctgagtgtggacccagatcagcttccaggttcagnnnnnnnnnnnnnnnnnnnnnnnnnnnnnnnnnnnnagttttcatctctccagccaccgtgttttcctcccgtacaaccaggatctaataatatttgtgactcagataatccagcaactgaaatgagcaaacagaacccggctgctaataagaccaattatagtcatcattcaaaaagccagagaaataaagatattccaaacatgttggacgttctaaaggatatgaataaggttaagcttcgtgcaattgagcggtcacctggcggtagacccattcataagaggaaaagacagaattcacattgggatccagtttctttaatatctcatgcacttaaacagaaatttgcatttcaagaagatgattcttttgagaaagagaatagatcttgggaatcttccccattttctagtccagaaacttcaaggtttggacatcacatttcacagtcagaaggacagcgaactaaagaagaaatggtcaacacaaaagctgttgaccaaggtatcagcaacacaagccttctaaactcaaggatttaaactcaacttaaggttgagctttaaacttccaaaacttcttcctggatgataaattattcttagaaactgatttggactgttaaaggctaaaagtagatgtatttaaagactcttcttgacacattttgcctacacttgctatgtaaatatgtatgcctgtcatttttgtttcctttgttcctttttacgtttatactctgttcttctgtacatagagcttaaaataaacattctttttg

SEQ ID NO: 258122 - DNA, 1759 bp, Homo Sapiens
ggatggcaccttcctctgtcagaatggccaacatggtaccatccgtgttgtggcccagggcctgctggactctgctggtctgctgtctgctgaccccaggtgtccaggggcaggagttccttttgcgggtggagccccagaaccctgtgctctctgctggagggtccctgtttgtgaactgcagtactgattgtcccagctctgagaaaatcgccttggagacgtccctatcaaaggagctggtggccagtggcatgggctgggcagccttcaatctcagcaacgtgactggcaacagtcggatcctctgctcagtgtactgcaatggctctcagataacaggctcctctaacatcaccgtgtacaggctcccggagcgtgtggagctggcacccctgcctccttggcagccggtgggccagaacttcaccctgcgctgccaagtggaggatgggtcgccccggaccagcctcacggtggtgctgcttcgctgggaggaggagctgagccggcagcccgcagtggaggagccagcggaggtcactgccactgtgctggccagcagagacgaccacggagcccctttctcatgccgcacagaactggacatgcagccccaggggctgggactgttcgtgaacacctcagccccccgccagctccgaacctttgtcctgcccgtgacccccccgcgcctcgtggccccccggttcttggaggtggaaacgtcgtggccggtggactgcaccctagacgggctttttccagcctcagaggcccaggtctacctggcgctgggggaccagatgctgaatgcgacagtcatgaaccacggggacacgctaacggccacagccacagccacggcgcgcgcggatcaggagggtgcccgggagatcgtctgcaacgtgaccctagggggcgagagacgggaggcccgggagaacttgacggtctttagcttcctaggacccattgtgaacctcagcgagcccaccgcccatgaggggtccacagtgaccgtgagttgcatggctggggctcgagtccaggtcacgctggacggagttccggccgcggccccggggcagccagctcaacttcagctaaatgctaccgagagtgacgacggacgcagcttcttctgcagtgccactctcgaggtggacggcgagttcttgcacaggaacagtagcgtccagctgcgagtcctgtatggtcccaaaattgaccgagccacatgcccccagcacttgaaatggaaagataaaacgagacacgtcctgcagtgccaagccaggggcaacccgtaccccgagctgcggtgtttgaaggaaggctccagccgggaggtgccggtggggatcccgttcttcgtcaacgtaacacataatggtacttatcagtgccaagcgtccagctcacgaggcaaatacaccctggtcgtggtgatggacattgaggctgggagctcccactttgtccccgtcttcgtggcggtgttactgaccctgggcgtggtgactatcgtactggccttaatgtacgtcttcagggagcaccaacggagcggcagttaccatgttagggaggagagcacctatctgcccctcacgtctatgcagccgacagaagcaatgggggaagaaccgtccagagctgagtgacgctgggatccgggatcaaagttgggcgggggcttggcttgtgccttcaggatttccgcaccaattaaaggcctttcaaactccctaaaaaa

SEQ ID NO: 258123 - DNA, 2084 bp, Homo Sapiens
  misc_feature (863)..(863): n is a, c, g, or t
  misc_feature (1232)..(1240): n is a, c, g, or t
  misc_feature (1894)..(1894): n is a, c, g, or t
cagatccagtggcccggagggcctgagctaaatccgcagacctgggtaacacgaggaagggctccggatatctttggtgacttgtccactccagtgtggcatcatgtggcagctgctcctcccaactgctctgctacttctagtttcagctggcatgcggactgaagatctcccaaaggctgtggtgttcctggagcctcaatggtacagggtgctcgagaaggacagtgtgactctgaagtgccagggagcctactcccctgaggacaattccacacagtggtttcacaatgagagcctcatctcaagccaggcctcgagctacttcattgacgctgccacagtcgacgacagtggagagtacaggtgccagacaaacctctccaccctcagtgacccggtgcagctagaagtccatatcggctggctgttgctccaggcccctcggtgggtgttcaaggaggaagaccctattcacctgaggtgtcacagctggaagaacactgctctgcataaggtcacatatttacagaatggcaaaggcaggaagtattttcatcataattctgacttctacattccaaaagccacactcaaagacagcggctcctacttctgcagggggcttgttgggagtaaaaatgtgtcttcagagactgtgaacatcaccatcactcaaggtttggcagtgtcaaccatctcatcattctttccacctgggtaccaagtctctttctgcttggtgatggtactcctttttgcagtggacacaggactatatttctctgtgaagacaaacattcgaagctcaacaagagactggaaggaccataaatttaaatggagaaaggaccctcaagacnaaatgacccccatcccatgggggtaataagagcagtagcagcagcatctctgaacatttctctggatttgcaaccccatcatcctcaggcctctctacaagcagcaggaaacatagaactcagagccagatcccttatccaactctcgacttttccttggtctccagtggaagggaaaagcccatgatcttcaagcagggaagccccagtgagtagctgcattcctagaaattgaagtttcagagctacacaaacactttttctgtcccaaccgttccctcacagcaaagcaacaatacaggctagggatggtaatcctttaaacatacaaaaattgctcgtgttataaattacccagtttagaggggnnnnnnnnncaattattcctaaataaatggataagtagaattaatggttgaggcaggaccatacagagtgtgggaactgctggggatctagggaattcagtgggaccaatgaaagcatggctgagaaatagcaggtagtccaggatagtctaagggaggtgttcccatctgagcccagagataagggtgtcttcctagaacattagccgtagtggaattaacaggaaatcatgagggtgacgtagaattgagtcttccaggggactctatcagaactggaccatctccaagtatataacgatgagtcctcttaatgctaggagtagaaaatggtcctaggaaggggactgaggattgcggtggggggtggggtggaaaagaaagtacagaacaaaccctgtgtcactgtcccaagttgctaagtgaacagaactatctcagcatcagaatgagaaagcctgagaagaaagaaccaaccacaagcacacaggaaggaaagcgcaggaggtgaaaatgctttcttggccagggtagtaagaattagaggttaatgcagggactgtaaaaccaccttttctgcttcaatatctaattcctgtatagctttgttcattgcatttattaaacaaatgttgtataaccaatactaaatgtactactganttcgctgagttaagttatgaaactttcaaatccttcatcatgtcagttccaatgaggtggggatggagaagacaattgttgcttatgaaagaaagctttagctgtctctgttttgtaagctttaagcgcaacatttcttggttccaataaagcattttacaagatcttgcatgctactcttagatagaag

SEQ ID NO: 258124 - DNA, 501 bp, Homo Sapiens
  misc_feature (54)..(54): n is a, c, g, or t
  misc_feature (60)..(61): n is a, c, g, or t
  misc_feature (482)..(482): n is a, c, g, or t
gaatattgaaagactcttgtggcagtcaggaataaggtgacggtggccacggantggtcnngaaattgtgaaggagaactcaatgtaaacaccaggcaggggaagggcgggactggtattgctcagcctggcaattcgtggtttctaaggtgtcacagggcctcggtgagaccaactttattactgagcatggccttcaagagaggaaattcttgtatcgccagagcttattctcacgatcatgtcaccaagtaatttactgagcatggccttcaagagaggaaattcttatatcgccagagcttagttctcacgatcatgtcaccaagtaatcagacttcacaaagagagaacatggaggtcatgggtcgggaaagggccgatatggacttctagctgcaccgggtcactgagggtggagaggtttgtctggcaccttactctccactgcgtcgacttggcagcgtcatgagtagctcagngcatgcttagatgaggtct

SEQ ID NO: 258125 - DNA, 716 bp, Homo Sapiens
  misc_feature (183)..(202): n is a, c, g, or t
aaaaacttttggggagcacgggagaaaagaagcaaatgccaggtagagaaaggtggcattcactacaaaaactgcatctatgaaaaataccattatgcaaaaatattttaaccttcacaccgttcaagagaaaaatgtttaaaacacacgggagacaggttggtaccaccatcagttagggtnnnnnnnnnnnnnnnnnnnngggaggccacaataaaaacaaaccaacgggcataggcaaataaacatttgagtatccccctggtggtggtagaaatctgtgtgtgactttttttcctctaatatcaattttacagaacagaaatagtattttaaaatagtaaaagctaataaaatatgaattatataaagtagtaacacttggtatagttggagtgtaggaatgaatattcatgaaatgtttcttagtgcttttccttccctaattcatacaatcaatgtatttggaatacttacatattataaaataaactatacctcttcaagaggtatcctgttctgtaagatcacatgtttttattgcaggtcaatataatactgccagagacagaaaatacccccttatcagtcccttagtgcctctttctgtttgtggcatggtgagaaaacccatgctgaaaagattgtactttgtgatcccaatcagagggatggagctaatctttttgttgttgaaataaaatgaatttatgaga

SEQ ID NO: 258126 - DNA, 1650 bp, Homo Sapiens
  misc_feature (1630)..(1630): n is a, c, g, or t
tggcccagaaagtgaacaccttgggggccactaaggcagccctgctaggggagacgctccaacctgtcttctctctgtctcctggcagctctcttggcctcctagtttctacctaatcatgtccctggtggaggccatcagcctctggaatgaaggggtgctggcagcggacaagaaggactggaagggagccctggatgccttcagtgccgtccaggacccccactcccggatttgcttcaacattggctgcatgtacactatcctgaagaacatgactgaagcagagaaggcctttaccagaagcattaaccgagacaagcacttggcagtggcttacttccaacgagggatgctctactaccagacagagaaatatgatttggctatcaaagaccttaaagaagccttgattcagcttcgagggaaccagctgatagactataagatcctggggctccagttcaagctgtttgcctgtgaggtgttatataacattgctttcatgtatgccaagaaggaggaatggaaaaaagctgaagaacagttagcattggccacgagcatgaagtctgagcccagacattccaaaatcgacaaggcgatggagtgtgtctggaagcagaagctatatgagccagtggtgatccctgtgggcaggctgtttcgaccaaatgagagacaagtggctcagctggccaagaaggattacctaggcaaggcgacggtcgtggcatctgtggtggatcaagacagtttctctgggtttgcccctctgcaaccacaggcagctgagcctccacccagaccggaaaaccccagagatcttcagggctctggaaggggaggctcaccgtgtgctatttgggtttgtgcctgagacaaaagaagagctccaggtcatgccagggaacattgtctttgtcttgaagaagggcaatgataactgggccacggtcatgttcaacgggcagaaggggcttgttccctgcaactaccttgaaccagttgagctgcggatccaccctcagcagcagccccaggaggaaagctctccgcagtccgacatcccagctcctcctagttccaaagcccctggaagaccccagctgtcaccaggccagaaacaaaaagaagagcctaaggaagtgaagctcagtgttcccatgccctacacactcaaggtgcactacaagtacacggtagtcatgaagactcagcccgggctcccctacagccaggtccgggacatggtgtctaagaaactggagctccggctggaacacactaagctgagctatcggcctcgggacagcaatgagctggtgcccctttcagaagacagcatgaaggatgcctggggccaggtgaaaaactactgcctgactctgtggtgtgagaacacagtgggtgaccaaggctttccagatgaacccaaggaaagtgaaaaagctgatgctaataaccagacaacagaacctcagcttaagaaaggcagccaagtggaggcactcttcagttatgaggctacccaaccagaggacctggagttttcagaaaggggatataatcctggtgttatcaaaggtgaatgaagaatggctggaaggggagtgcaaagggaagtggncattttcccaaagttttgtt

SEQ ID NO: 258127 - DNA, 1623 bp, Homo Sapiens
  misc_feature (200)..(200): n is a, c, g, or t
  misc_feature (569)..(582): n is a, c, g, or t
  misc_feature (977)..(977): n is a, c, g, or t
  misc_feature (998)..(998): n is a, c, g, or t
  misc_feature (1161)..(1161): n is a, c, g, or t
  misc_feature (1164)..(1164): n is a, c, g, or t
  misc_feature (1193)..(1193): n is a, c, g, or t
  misc_feature (1228)..(1228): n is a, c, g, or t
  misc_feature (1231)..(1231): n is a, c, g, or t
  misc_feature (1258)..(1258): n is a, c, g, or t
  misc_feature (1260)..(1260): n is a, c, g, or t
  misc_feature (1262)..(1262): n is a, c, g, or t
  misc_feature (1264)..(1264): n is a, c, g, or t
  misc_feature (1277)..(1277): n is a, c, g, or t
  misc_feature (1281)..(1281): n is a, c, g, or t
  misc_feature (1284)..(1284): n is a, c, g, or t
  misc_feature (1287)..(1288): n is a, c, g, or t
  misc_feature (1291)..(1291): n is a, c, g, or t
  misc_feature (1294)..(1294): n is a, c, g, or t
  misc_feature (1299)..(1301): n is a, c, g, or t
  misc_feature (1305)..(1305): n is a, c, g, or t
  misc_feature (1310)..(1310): n is a, c, g, or t
  misc_feature (1314)..(1315): n is a, c, g, or t
  misc_feature (1352)..(1352): n is a, c, g, or t
  misc_feature (1356)..(1356): n is a, c, g, or t
  misc_feature (1449)..(1449): n is a, c, g, or t
  misc_feature (1452)..(1453): n is a, c, g, or t
  misc_feature (1610)..(1613): n is a, c, g, or t
aggtatcagaggatttaattgaagaattttaattcagagtgtgatacacactgtggccctgatactgcacgacaagaatatttgggtaactcattaagacaggaatcagacttgaaaaaatcccacctcgtcagataattcaagctctcatcatggtgaaaataaacaaaaatctgactgttgatccctgtgacattttngggtggagttgataatcagcaaagactgctacacattgtctggcctcacaggtggtaagtcaaggcatgccaatttagtaagagttgtagaactggtaaaagaaaatatattctgttgattgacataataatttgctcttcttattgctttagaaaaagattattttaatgtggtggtattactaatgatctgccaaggtggtactactaaatatcttcacatgaatggtcatgtgcttagattaaatttgaattacaggtaattatttgctgcaatttgctcaactaacagtagtgggtaggcacttctagcatatcaagtcttgttcagaaagtttcaaaatataagaatcagattccattttatgnnnnnnnnnnnnnngttatcacaaaactatttcatatatacacagtgatacagcaatattaccattaaagcaagaataatttccattatttactaccttgaccagtttcaacagggtggcttcattttacttgtcataagatgtatatcagtacatttgaaaccattcccttcactcagatgcctctgtattgtgctaagcaaaatactttctagccaagtcttttctaaacagaggaaaatcaactgcagtatgtgatctcaccaaataaaaactcaaacttaaccctggctcctataaattaggatttaaagaagtaaaatgtcctgataatcttctggtattaggcatgaacattttaatctagtttttattcctcccagttactttaatctgcatgtggccgganttagagtacacttcccccacngattatggtctctttattgcagagatgctaggctgataattaggtccgattttctgagagcaaccgtttgcaggtgaagtaataagagcaccacaccggccgggcaaagcgcctttgccgaggatttgccttccagcacattaaaactctagaagctctcccngcngatctgcagcatctggtacctaaagggantttcatctttaattctaaatgtatgaacgtaaaangcngggattgaaagttgatgtggaatgggngngngnatttgtttgtgcnaccncanacnnccngcntagcnnntctnagatngtgnngggtatatttaaatcatattttacttcgaatgtgacngagntcaatattatttaatgtgattttaaaatgcagtgggtctagatgagattaacctgtttcaaggtaaaatagatgtcatcatttactcccttcngannagctttttcttttattccattaacctttggttgtctctgaagtactatttattgcaggaaaatcagttctaaaagttggttccagggtatcatgaaaatgttaaattaaataatttctagtctgcttttacaaaacagcaatatggaggaaagagtnnnnaccatgttat

SEQ ID NO: 258128 - DNA, 658 bp, Homo Sapiens
aaaaaatccacctcgtcagataattcaagctctcatcatggtgaaaataaacaaaatctgactgttgatccctgtgacattttgggtggagttgataatcagcaaagactgctacacattgtctggcctcacaggtggttggaagctgtgtactgtgggtgttacccactttgtcctaaagatttggtttatcccgaaatatttccagctgaatatctgtattctacacctgaacagctttcaaaaaggctccagaatttctgcaagagaccagatattataagaaaacatctctataagggtgaaatcgctccgttttcttgggcagccctacatggtaaattcaggtctctgcttacaacagaacctagggaagatttgtgacagatggggctaagtcacaaacttgcagcctaaggcagaatctgaagaactttccagagtgtgcccatatttacctgatcagagagaaaagaaaatctgcagaggaagctgagcctggctgcttgtcatagctgacacagagccatctgccacaaacctgtggcggcttcagatctccaatccctgccaccaccccaactcaaattaaatacagattcctagagacgttatgatggttacacatgtcctcggcatcacatgtaggagactgttc

SEQ ID NO: 258129 - DNA, 1007 bp, Homo Sapiens
  misc_feature (31)..(31): n is a, c, g, or t
  misc_feature (70)..(70): n is a, c, g, or t
  misc_feature (94)..(94): n is a, c, g, or t
  misc_feature (103)..(103): n is a, c, g, or t
  misc_feature (121)..(121): n is a, c, g, or t
  misc_feature (156)..(156): n is a, c, g, or t
  misc_feature (762)..(774): n is a, c, g, or t
  misc_feature (783)..(848): n is a, c, g, or t
  misc_feature (850)..(850): n is a, c, g, or t
  misc_feature (856)..(856): n is a, c, g, or t
  misc_feature (858)..(858): n is a, c, g, or t
  misc_feature (864)..(864): n is a, c, g, or t
  misc_feature (871)..(871): n is a, c, g, or t
  misc_feature (883)..(883): n is a, c, g, or t
  misc_feature (890)..(890): n is a, c, g, or t
  misc_feature (895)..(895): n is a, c, g, or t
  misc_feature (904)..(904): n is a, c, g, or t
  misc_feature (907)..(907): n is a, c, g, or t
  misc_feature (911)..(911): n is a, c, g, or t
  misc_feature (913)..(914): n is a, c, g, or t
  misc_feature (916)..(941): n is a, c, g, or t
  misc_feature (944)..(944): n is a, c, g, or t
  misc_feature (946)..(947): n is a, c, g, or t
  misc_feature (953)..(954): n is a, c, g, or t
  misc_feature (958)..(958): n is a, c, g, or t
  misc_feature (961)..(961): n is a, c, g, or t
  misc_feature (967)..(967): n is a, c, g, or t
  misc_feature (971)..(972): n is a, c, g, or t
  misc_feature (974)..(974): n is a, c, g, or t
  misc_feature (979)..(979): n is a, c, g, or t
  misc_feature (991)..(991): n is a, c, g, or t
  misc_feature (993)..(993): n is a, c, g, or t
atggcgtggcctttctgacactcctgggcgnccccatgggtgagctgaattctgcctctggactagcccntttccagccaattccactgatccngtgaaggcngcccaatttgagccaccnggacgtcaaatgattgccatcagaaagagacaacntgaagaaaccaacaatgactatgaaacagctgacggcggctacatgactctgaaccccagggcacctactgacgatgataaaaacatctacctgactcttccccccaacgaccatgtcaacagtaataactaaagagtaacgttatgccatgtggtcacactctcagcttgctgagtggatgacaaaaagaggggaattgttaaaggaaaatttaaatggagactggaaaaattcctgagcaaacaaaaccacctggcccttagaaatagctttaactttgcttaaactacaaacacaagcaaaacttcacggggtcatactacatacaagcataagcaaaacttaacttggatcatttctggtaaatgcttatgttagaaataagacaaccccagccaatcacaagcagcctactaacatataattaggtgactagggactttctaagaagatacctacccccaaaaaacaattatgtaattgaaaaccaaccgattgcctttattttgcttccacattttcccaataaatacttgcctgtgacattttgccactggaacactaaacttcatgaattgcgcctcaggatttttcctttaacatcnnnnnnnnnnnnngacagagtnnnnnnnnnnnnnnnnnnnnnnnnnnnnnnnnnnnnnnnnnnnnnnnnnnnnnnnnnnnnnnnnnngntttagngnttctcntgctccnccccccgtagcngggattnaggcntgtgccacngancccncnnannnnnnnnnnnnnnnnnnnnnnnnnntanannaggttnncaangtnggccgncganncnaactncggccccacgancnccccccggccccca

SEQ ID NO: 258130 - DNA, 395 bp, Homo Sapiens
  misc_feature (341)..(341): n is a, c, g, or t
  misc_feature (361)..(361): n is a, c, g, or t
  misc_feature (380)..(380): n is a, c, g, or t
aaatgctttcctgcagccacctggacgtcaaatgattgccatcagaaagagacaacctgaagaaaccaacaatgactatgaaacagctgacggcggctacatgactctgaaccccagggcacctactgacgatgataaaaacatctacctgactcttcctcccaacgaccatgtcaacagtaataactaaagagtaacgttatgccatgtggtcacactctcagcttgctggttgggatgacaaaaagagggggaattgttaaagggaaaattttaaatgggagactgggaaaaatttcctgaggcaaacaaaaccacctggggccctttaggaattaggnttttaactttggcttaaaantacaaacacaaggcaaaanttcacggggttctta

SEQ ID NO: 258131 - DNA, 1754 bp, Homo Sapiens
  misc_feature (1613)..(1613): n is a, c, g, or t
  misc_feature (1645)..(1645): n is a, c, g, or t
  misc_feature (1742)..(1742): n is a, c, g, or t
agagtttccaggatggcttctgcatcaacttctaaatataattcacactccttggagaatgagtctattaagaggacgtctcgagatggagtcaatcgagatctcactgaggctgttcctcgacttccaggagaaacactaatcactgacaaagaagttatttacatatgtcctttcaatggccccattaagggaagagtttacatcacaaattatcgtctttatttaagaagtttggaaacggattcttctctaatacttgatgttcctctgggtgtgatctcgagaattgaaaaaatgggaggcgcgacaagtagaggagaaaattcctatggtctagatattacttgtaaagacatgagaaacctgaggttcgctttgaaacaggaaggccacagcagaagagatatgtttgagatcctcacgagatacgcgtttcccctggctcacagtctgccattatttgcatttttaaatgaagaaaagtttaacgtggatggatggacagtttacaatccagtggaagaatacaggaggcagggcttgcccaatcaccattggagaataacttttattaataagtgctatgagctctgtgacacttaccctgctcttttggtggttccgtatcgtgcctcagatgatgacctccggagagttgcaacttttaggtcccgaaatcgaattccagtgctgtcatggattcatccagaaaataagacggtcattgtgcgttgcagtcagcctcttgtcggtatgagtgggaaacgaaataaagatgatgagaaatatctcgatgttatcagggagactaataaacaaaatttctaaactcaccatttatgatgcaagacccagcgtaaatgcagtggccaacaaggcaacaggaggaggatatgaaagtgatgatgcatatcataacgccgaacttttcttcttagacattcataatattcatgttatgcgggaatcttaaaaaaaagtgaaggacattgtttatcctaatgtagaagaatctcattggttgtccagtttggagtctactcattggttagaacatatcaagctcgttttgacaggagccattcaagtagcagacaaagtttcttcagggaagagttcagtgcttgtgcattgcagtgacggatgggacaggactgctcagctgacatccttggccatgctgatgttggatagcttctataggagcattgaagggttcgaaatactggtacaaaaagaatggataagttttggacataaatttgcatctcgaataggtcatggtgataaaaaccacaccgatgctgaccgttctcctatttttctccagtttattgattgtgtgtggcaaatgtcaaaacagttccctacagcttttgaattcaatgaacaatttttgattataattttggatcatctgtatagttgccgatttggtactttcttattcaactgtgaatctgctcgagaaagacagaaggttacagaaaggactgtttctttatggtcactgataaacagtaataaagaaaaattcaaaaaccccttctatactaaagaaatcaatcgagttttatatccagttgccagtatgcgtcacttggaactcntggtgaattactacattagatggaaccccagnatcaagccacaacagccgaatccagtggagcagcgttacatggagctcttagccttacgcgacgaatacataaaagcgcttgagggactgcagctcngccactctgcca

SEQ ID NO: 258132 - DNA, 343 bp, Homo Sapiens
  misc_feature (40)..(40): n is a, c, g, or t
  misc_feature (43)..(43): n is a, c, g, or t
  misc_feature (52)..(52): n is a, c, g, or t
  misc_feature (58)..(58): n is a, c, g, or t
  misc_feature (63)..(63): n is a, c, g, or t
  misc_feature (82)..(91): n is a, c, g, or t
  misc_feature (106)..(106): n is a, c, g, or t
  misc_feature (114)..(114): n is a, c, g, or t
ctccctccccattgttgtacctaagcaaagaggcccagtnttntgagcttgnttttantgggngagtgttcttattttgggnnnnnnnnnnatttccacaaccttntaaccaanattcaagtccaggaccaaggctcagggatgagtgggagagatgggttatactgtccctggagcttcatcatgattgcctgagaagacagatgctcatcatggctggaatgaaggtatccttcagtaaactttgctttcctaagaaaattcttcagtttctgataagtcatccctatttttatcttgatcaaggctttctacagttacataataaaatgaaatgctgtcc

SEQ ID NO: 258133 - DNA, 1455 bp, Homo Sapiens
gccatgcagcagcgggtcctggagctcatccctcagatcgccaatgagcagctgacagaggagctgctcatcgtcaatgacaatctcaacaatgtgttcctgcgccatgaacggtttgaacggttccgaacaggccagaccaccaaggccccaagtgaggccgagccggcagctgacctgatcgacatgggccctgacccagcagccaccggcaacctctcatcccagctggcaggaatgaacctgggctccagcagtgtgagagctggcctgcagtctctggaggcctctggtcgactggaagatgagtttgacatgtttgcgctgacacggggcagctcactggctgaccaacggaaagaggtaaaatacgaagccccccaagcaacagacggcctggctggagccctggacgcccggcagcagagcactggcgcgatcccagtcacccaggcctgcctcatggaggacatcgagcagtggctgtccactgacgtgggtaatgatgcggaagagcctaagggggtcaccagcgaaggtaaatttgacaaattcctggaagaacgggccaaagccgcggaccgattgcccagcctctccagcccctcagctgaggggcccccgggtcccccatctggcccagcgccccggaagaagacccaggagaaagatgatgacatgctgtttgccttatgagtgtggggtctggcaccctgcagcccaggtccccactgctctcacacccttaggctgggacctccctccctcctctggtgttaaggctgctttgggggtggcttgttaccccttttcctcctctttgaagacggagctgccccagctgtggctgggggtgtggaggcagtgggatgaactgggggacaggtctgcgctgcagtgggatctggctgctctgcctcctttcccaccccagctgaccatgagactttgctgagaagtggaggccccaggacaggctggctggctggctggctgcttgacccagtgtgactctccttcactgagtgataccctgctccgggcccatgccccaaggagcccttcagagcccacactgccagtcgaggcctggctggaggctggccacagtggaaattctgccgagcctcttgtcccttccctgctctgctgcatggggccccatggctttggctggccactgagggtagggtgtggaggtgtggaggccccctgaggagctgcggcggcccaggtacgaagctgcaactctgccgcgcagtgggcgagatctcatcagccccaggctgcaagtgaggcttcaggggatgctggggccccacttgccctccgctggcttgccctccatccttcctctgttcctttgggccgggcacacagcactggggctcccctcttgggtgacctcttggccgggagaagtgcctttttgttccccatttaaggttggaatcc

SEQ ID NO: 258134 - DNA, 1054 bp, Homo Sapiens
  misc_feature (43)..(43): n is a, c, g, or t
  misc_feature (1017)..(1017): n is a, c, g, or t
  misc_feature (1035)..(1035): n is a, c, g, or t
  misc_feature (1049)..(1049): n is a, c, g, or t
cggtaccggtccggaattcccgggatcgcgcccggcgccgggnccgaagccgggagccgccgccatgggggcctgcctgggagcctgctccctgctcagctgcgcgtcctgcctctgcggctctgccccctgcatcctgtgcagctgctgccccgccagccgcaactccaccgtgagccgcctcatcttcacgttcttcctcttcctgggggtgctggtgtccatcattatgctgagcccgggcgtggagagtcagctctacaagctgccctgggtgtgtgaggagggggccgggatccccaccgtcctgcagggccacatcgactgtggctccctgcttggctaccgcgctgtctaccgcatgtgcttcgccacggcggccttcttcttctttttcaccctgctcatgctctgcgtgagcagcagccgggacccccgggctgccatccagaatgggttttggttctttaagttcctgatcctggtgggcctcaccgtgggtgccttctacattcctgacggctccttcaccaacatctggttctacttcggcgtcgtgggctccttcctcttcatcctcatccagctggtgctgctcatcgactttgcgcactcctggaaccagcggtggctgggcaaggccgaggagtgcgattcccgtgcctggtacgcaggcctcttcttcttcactctcctcttctacttgctgtcgatcgcggccgtggcgctgatgttcatgtactacactgagcccagcggctgccacgagggcaaggtcttcatcagcctcaacctcaccttctgtgtctgcgtgtccatcgctgctgtcctgcccaaggtccaggacgcccagcccaactcgggtctgctgcaggcctcggtcatcaccctctacaccatgtttgtcacctggtcagccctatccagtatccctgaacagaaatgcaaccccatttgccaaccagctgggcaagagacagtggggcaggcccgagggtatgagaccagtgtgggatncccacattgtggcctcanatctcctctgtganctctc

SEQ ID NO: 258135 - DNA, 1446 bp, Homo Sapiens
  misc_feature (1305)..(1305): n is a, c, g, or t
ccgggatccgaagccgggagccgccgccatgggggcctgcctgggagcctgctccctgctcagctgcgcgtcctgcctctgcggctctgccccctgcatcctgtgcagctgctgccccgccagccgcaactccaccgtgagccgcctcatcttcacgttcttcctcttcctgggggtgctggtgtccatcattatgctgagcccgggcgtggagagtcagctctacaagctgccctgggtgtgtgaggagggggccgggatccccaccgtcctgcagggccacatcgactgtggctccctgcttggctaccgcgctgtctaccgcatgtgcttcgccacggcggccttcttcttctttttcaccctgctcatgctctgcgtgagcagcagccgggacccccgggctgccatccagaatgggttttggttctttaagttcctgatcctggtgggcctcaccgtgggtgccttctacattcctgacggctccttcaccaacatctggttctacttcggcgtcgtgggctccttcctcttcatcctcatccagctggtgctgctcatcgactttgcgcactcctggaaccagcggtggctgggcaaggccgaggagtgcgattcccgtgcctggtacgcaggcctcttcttcttcactctcctcttctacttgctgtcgatcgcggccgtggcgctgatgttcatgtactacactgagcccagcggctgccacgagggcaaggtcttcatcagcctcaacctcaccttctgtgtctgcgtgtccatcgctgctgtcctgcccaaggtccaggacgcccagcccaactcgggtctgctgcaggcctcggtcatcaccctctacaccatgtttgtcacctggtcagccctatccagtatccctgaacagaaatgcaacccccatttgccaacccagctgggcaacgagacagttgtggcaggccccgagggctatgagacccagtggtgggatgccccgagcattgtgggcctcatcatcttcctcctgtgcaccctcttcatcagtctgcgctcctcagaccaccggcaggtgaacagcctgatgcagaccgaggagtgcccacctatgctagacgccacacagcagcagcagcagcaggtggcagcctgtgagggccgggcctttgacaacgagcaggacggcgtcacctacagctactccttcttccacttctgcctggtgctggcctcactgcacgtcatgatgacgctcaccaactggtacaagcccggtgaagacccgggaagatgatcagcacgtgggaccgnccggggtgggtgaaaaatctgtgcccaagctgggcaaggcctgccccctctacctgggggaccctggtaacccccactccctcctggcgcaacccgcgaacttcagctgaaggaagccttacaagcctgccaatctggggg

SEQ ID NO: 258136 - DNA, 942 bp, Homo Sapiens
ccgccgccatgggggcctgcctgggagcctgctccctgctcagctgcgcgtcctgcctctgcggctctgccccctgcatcctgtgcagctgctgccccgccagccgcaactccaccgtgagccgcctcatcttcacgttcttcctcttcctgggggtgctggtgtccatcattatgctgagcccgggcgtggagagtcagctctacaagctgccctgggtgtgtgaggagggggccgggatccccaccgtcctgcagggccacatcgactgtggctccctgcttggctaccgcgctgtctaccgcatgtgcttcgccacggcggccttcttcttctttttcaccctgctcatgctctgcgtgagcagcagccgggacccccgggctgccatccagaatgggttttggttctttaagttcctgatcctggtgggcctcaccgtgggtgccttctacatccctgacggctccttcaccaacatctggttctacttcggcgtcgtgggctccttcctcttcatcctcatccagctggtgctgctcatcgactttgcgcactcctggaaccagcggtggctgggcaaggccgaggagtgcgattcccgtgcctggtacgcaggcctcttcttcttcactctcctcttctacttgctgtcgatcgcggccgtggcgctgatgttcatgtactacactgagcccagcggctgccacgagggcaaggtcttcatcagcctcaacctcacctttctgtgtctgcgtgtccatcgctgctggcctgcccaaggtccagggacgcccagacccaactccgggtctgcctgcaagccctccggtcatcacccctctacaaccatggtttggccccctggttcagcccctatcccggtatcccctgaaacagaaaattggcaacccccaattttggccaaaccccaagcttggg

SEQ ID NO: 258137 - DNA, 1553 bp, Homo Sapiens
  misc_feature (1271)..(1324): n is a, c, g, or t
  misc_feature (1337)..(1375): n is a, c, g, or t
gaggagtgcgattcccgtgcctggtacgcaggcctcttcttcttcactctcctcttctacttgctgtcgatcgcggccgtggcgctgatgttcatgtactacactgagcccagcggctgccacgagggcaaggtcttcatcagcctcaacctcaccttctgtgtctgcgtgtccatcgctgctgtcctgcccaaggtccaggacgcccagcccaactcgggtctgctgcaggcctcggtcatcaccctctacaccatgtttgtcacctggtcagccctatccagtatccctgaacagaaatgcaacccccatttgccaacccagctgggcaacgagacagttgtggcaggccccgagggctatgagacccagtggtgggatgccccgagcattgtgggcctcatcatcttcctcctgtgcaccctcttcatcagtctgcgctcctcagaccaccggcaggtgaacagcctgatgcagaccgaggagtgcccacctatgctagacgccacacagcagcagcagcagcaggtggcagcctgtgagggccgggcctttgacaacgagcaggacggcgtcacctacagctactccttcttccacttctgcctggtgctggcctcactgcacgtcatgatgacgctcaccaactggtacaagcccggtgagacccggaagatgatcagcacgtggaccgccgtgtgggtgaagatctgtgccagctgggcagggctgctcctctacctgtggaccctggtagccccactcctcctgcgcaaccgcgacttcagctgaggcagcctcacagcctgccatctggtgcctcctgccacctggtgcctctcggctcggtgacagccaacctgccccctccccacaccaatcagccaggctgagcccccacccctgccccagctccaggacctgcccctgagccgggccttctagtcgtagtgccttcagggtccgaggagcatcaggctcctgcagagccccatccccccgccacacccacacggtggagctgcctcttccttcccctcctccctgttgcccatactcagcatctcggatgaaagggctcccttgtcctcaggctccacgggagcggggctgctggagagagcggggaactcccaccacagtggggcatccggcactgaagccctggtgttcctggtcacgtcccccaggggaccctgcccacttcctggacttcgtgccttactgagtctctaagactttttctaataaacaagccagtgcgtgtaccnnnnnnnnnnnnnnnnnnnnnnnnnnnnnnnnnnnnnnnnnnnnnnnnnnnnnnaaaactcgaggcnnnnnnnnnnnnnnnnnnnnnnnnnnnnnnnnnnnnnnncatggccatagctgtttcctgacccacctttcttgaacaaagggtaaaatctgccgggcctcccccaaaaggaggccgaaataaatttccgaaaaagccagggtaaacctggcatttaatgaaatcggtttggaaaaaccccggaaattttaaacccgcccataaatgagagcggggc

SEQ ID NO: 258138 - DNA, 2026 bp, Homo Sapiens
  misc_feature (553)..(553): n is a, c, g, or t
  misc_feature (643)..(643): n is a, c, g, or t
agtagcttctctgggcctggcagagcctcccggcatggtgctcaaggccttcttccccacgtgctgcgtctcggcggacagcgggctgctggtgggacggtgggtgccggagcagagcagcgccgtggtcctggcggtcctgcactttcccttcatccccatccaggtcaagcagctcctggcccaggtgcggcaggccagccaggtgggcgtggccgtgctgggcacctggtgccactgccggcaggagcccgaggagagcctgggccgcttcctggagagcctgggtgctgtcttcccccatgagccctggctgcggctgtgccgggagagaggcggcacgttctggagctgcgaggccacccaccggcaagcgcccactgcccccggtgcccctggtgaggaccaggtcatgctcatcttctatgaccagcgccaggtgttgctgtcacagctacacctgcccaccgtcctgcccgaccgccaggctggagccaccactgccagcacggggggcctggctgccgtcttcgacacggtagcacgcagtagngtgctcttccgcagtgaccgctttgatgagggccccgtgcggctgagccactggcagtcggagggcgtggaggccagcatcctcgcggantgggccaggcgagcctcgggacccatttgtctgctgttggccagcctgctgtcgctggtctcagctgtcagtgcctgccgagtgttcaagctctggcccctgtccttcctcgggagcaaactctccacgtgcgaacagctccggcaccggctggagcacctcacgctaatcttcagtacacggaaggcggagaaccctgcccagctgatgaggaaggccaacacggtggcctctgtgctgctggacgtggccctgggcctcatgctgctgtcctggctccacgggagaagccgcatcgggcatctggccgacgccctcgttcctgtggctgaccacgtggccgaggagctccagcatctgctgcagtggctgatgggtgctcccgccgggctcaagatgaaccgtgcactggaccaggtgctgggccgcttcttcctctaccacatccacctgtggatcagctacatccacctcatgtcccccttcgtggagcacatcctttggcacgtgggcctctcggcctgcctgggcctgacggtggccctgtccctcctctcggacattatcgccctcctcaccttccacatctactgcttttacgtctatggagccaggctgtactgcctgaagatccatggcctgtcctcactgtggcgtctgttccgggggaagaagtggaacgttctgcgccagcgcgtggactcctgttcctatgacctggaccagctgttcatcgggactctgctcttcaccatcctgctcttcctcctgcctaccacagccctgtactacctggtgttcaccctgctccggctcctggtggtcgccgtgcagggcctgatccatctgctcgtggacctcatcaactccctgccgctgtactcactgggtcttcggctctgccggccctacaggctggcgggctggcgtggaagttccgtgtcctccggcaccaagccagcaagcccctccccctcctgatgcagataaacccactgccctacagccgcgtggtgcacacctaccgcctccccagctgtggctgccaccccaaagcactcctggggcgccctgtgccgcaagctgttccttggggagctcatctacccctggaggcagagaggggacaagcaggactgagggaactgctggctcgcctggcaccaccacacggccacagccagccatctgctctgccagggtggcaccagctcagcgtggcgcatgtcctgtgctttgtgggacgctgctgtgtgctcctgaacacggcaggccctgcaatcacaccttgggcttggaggtcattgggacgtgagacgatgtggggggttggccaacaagttgcccgctcccttatggctggctgcttgggaccggttccac

SEQ ID NO: 258139 - DNA, 861 bp, Homo Sapiens
  misc_feature (657)..(657): n is a, c, g, or t
  misc_feature (714)..(714): n is a, c, g, or t
  misc_feature (777)..(777): n is a, c, g, or t
tgctttctgcaacttcatgagggcatggagagaagggattaacacagaactgaatttctgctgaagttagaggacatctaagaatgcactgagagaacagtctgcccttgtaggcagtgcactccccgtcaattacattggtcaagagaagggacgtttgcatctggggtgagacccgaccaagtgcgctcccccaacgtccgggtctggtttctttaatgcctccaaaaatcttgtgacccagccaacagcttcattaaaaaagctgtttcttaggttacacaattgactcatatactaaatatgtttttggaagaaaccaaagaaagtgaagacaagagttctcagcagccccttcaccctgtaaggccagcgagggcagccattgtcccgtgtccccaggtgagtcctgcttatggagctggatggaccagcggagctgagagtcaggtctggctagcaggccagtggagggaggccagcgggacacagaacagaggtggagacagtggccaccacaggagccccccagctgggcacagggtgaccaccccagggtcccccgagctctgtaagggactgcccctccatggatgtcctggccccacagagaggaccacagcatcactcaccatctagggggacgccaggcccgtncctgttctcagcctctccttgggtctcctgggccgaagctgtgtgatcctctgcctncttccctgggggaggacgctcagtgggatcatctgtcacaagtctgcctgtcgtcttgtggtntgtggtctgtttggctgacgtcactgaagaaggaccacacacacagttgggtttttcaggcaccggaaatcctttcccctttgc

SEQ ID NO: 258140 - DNA, 983 bp, Homo Sapiens
  misc_feature (413)..(522): n is a, c, g, or t
  misc_feature (584)..(705): n is a, c, g, or t
  misc_feature (708)..(708): n is a, c, g, or t
  misc_feature (722)..(722): n is a, c, g, or t
  misc_feature (742)..(742): n is a, c, g, or t
  misc_feature (756)..(756): n is a, c, g, or t
  misc_feature (784)..(784): n is a, c, g, or t
  misc_feature (801)..(801): n is a, c, g, or t
  misc_feature (804)..(804): n is a, c, g, or t
  misc_feature (806)..(806): n is a, c, g, or t
  misc_feature (821)..(821): n is a, c, g, or t
  misc_feature (827)..(827): n is a, c, g, or t
  misc_feature (834)..(834): n is a, c, g, or t
  misc_feature (836)..(836): n is a, c, g, or t
  misc_feature (842)..(842): n is a, c, g, or t
  misc_feature (857)..(857): n is a, c, g, or t
  misc_feature (859)..(859): n is a, c, g, or t
  misc_feature (861)..(862): n is a, c, g, or t
  misc_feature (878)..(878): n is a, c, g, or t
  misc_feature (882)..(882): n is a, c, g, or t
  misc_feature (903)..(903): n is a, c, g, or t
  misc_feature (907)..(907): n is a, c, g, or t
  misc_feature (914)..(915): n is a, c, g, or t
  misc_feature (931)..(931): n is a, c, g, or t
  misc_feature (936)..(936): n is a, c, g, or t
  misc_feature (939)..(939): n is a, c, g, or t
  misc_feature (945)..(945): n is a, c, g, or t
  misc_feature (948)..(948): n is a, c, g, or t
  misc_feature (953)..(953): n is a, c, g, or t
  misc_feature (960)..(960): n is a, c, g, or t
  misc_feature (981)..(981): n is a, c, g, or t
accttgctctacttgtccctggcagttgacaaaagagcctggccctgcacgtccctccctggcccccgcatccttccctttgatgtcagcaagactgatggttgagttgcctttcttgcagatgtacacttattcatgctctgagtagatgctaattgctagtgacaaaaatatgagtaagataggaattttggcccccagaatcttacttgtaaaacatatgggaacctgacatggaaaccacaggaatgtcaggcctccagggcaggaatttttgtctgtctattccctaatatttacctgtcccctaaaacagcaccagcacatggtaggtacttggtcaatatgagctgttaatgaatgatattgtatatgggctttatcattggctgggtttactctaactgttctcnnnnnnnnnnnnnnnnnnnnnnnnnnnnnnnnnnnnnnnnnnnnnnnnnnnnnnnnnnnnnnnnnnnnnnnnnnnnnnnnnnnnnnnnnnnnnnnnnnnnnnnnnnnnnntgggttcgggcggttctcttgtctcagcctcccaagtagctgataggcatgtgccaccatgnnnnnnnnnnnnnnnnnnnnnnnnnnnnnnnnnnnnnnnnnnnnnnnnnnnnnnnnnnnnnnnnnnnnnnnnnnnnnnnnnnnnnnnnnnnnnnnnnnnnnnnnnnnnnnnnnnnnnnnnnnatnagccaccatgcccngcctagttctctgttttttnacctcttgagcagnggccgccaaccttttttggcatcagggnccagtttcacggaaganaananttccttggatggggngggggntggttcntnatgaantgttacacttcaaanancnngctttagatttttatntgantttgcgggcttggctggtggntccncctgtannccagcacttgggtggngaggnggntggatnctnaggtnggattcnagacagcctgacaaaaagganaa

SEQ ID NO: 258141 - DNA, 1484 bp, Homo Sapiens
  misc_feature (929)..(929): n is a, c, g, or t
  misc_feature (939)..(939): n is a, c, g, or t
  misc_feature (945)..(945): n is a, c, g, or t
  misc_feature (984)..(984): n is a, c, g, or t
  misc_feature (1006)..(1006): n is a, c, g, or t
  misc_feature (1110)..(1110): n is a, c, g, or t
  misc_feature (1164)..(1164): n is a, c, g, or t
  misc_feature (1167)..(1167): n is a, c, g, or t
  misc_feature (1234)..(1234): n is a, c, g, or t
  misc_feature (1248)..(1248): n is a, c, g, or t
  misc_feature (1277)..(1277): n is a, c, g, or t
  misc_feature (1315)..(1315): n is a, c, g, or t
  misc_feature (1388)..(1388): n is a, c, g, or t
  misc_feature (1404)..(1404): n is a, c, g, or t
cgcagagttcaaatcggctgcggtgggcgaggagcagctgtgctggcggctgtgctcggccttagtggtgtcggggtctagtggacagagaagactcttggccaggcagatggcttctcggtggcagaacatggggacctccgtgcgccggagatctctccagcaccaggagcagctggaggacagcaaggagctgcagcctgtggtcagccatcaggagacctctgtaggggccctggggtccctgtgcagacagttccaaaggaggctgcccctgagagccgtcaacctcaacctccgcgcagggccctcctggaaacgcctggaaaccccagagccaggtcagcagggcctccaggctgcagctcgctcagctaagagtgctttgggtgccgtgtcccagagaatccaggagtcctgccaaagtggcaccaagtggctggtggagacccaggtgaaggccaggaggcggaagagaggagcacagaagggcagtggatccccaactcacagcctgagccagaagagcacccggctgtctggagccgcccctgcccactcagccgcagacccctgggagaaggagcatcaccgcctctctgtccggatgggctcacatgcccacccattacggcgatcaaggcgggaggctgccttccggagccctactcctcaacagagcccctctgctctcccagcgagtctgacagtgacctagagcctgtgggggcgggaattcagcatctccagaagctgtcccaagagctagatgaagccattatggcggaagagagtggtgacatcgtctctctcattcatgactgaggaagtgcctgcaggaaacaagccctgtctgaccgccaaggcttcatactcaaggatgtctatgcttccccgtgagcttcctggaaaaaaccccccgggagtcntcagtacccntgggcnattgttaaaaagcacttaacaaggggcccagagcccccngctccagccacatctggacccntcagtgactgcctgccatagcctgagagtgtcttggggagcccttgcagagggggagaattgttccttctgctttcctaggggactcttgggcttagaaactcntcgtacacttgaccttgagccttctatttgcctcatctataacatgaagtgctngcntcagatatttgagagctcttagctctgtacccgggtgcctggtttttggggagtcatccgcagagtnactcacccactgtntttctggtgccaaggctcttgagggcccnactctcatccctcctttccctaccagggactcggaggnaggcataggagatatttccaggtcttacgaccctgggctcacgggtacctatttatatgctaggcagagtcantgtggttgtgccaggnggggtagccctgttcaagagcaatttctgccctttgtaaattatttaagaaacctgctttgtcatttttttagaaagaaa

SEQ ID NO: 258142 - DNA, 1556 bp, Homo Sapiens
  misc_feature (7)..(7): n is a, c, g, or t
  misc_feature (11)..(11): n is a, c, g, or t
  misc_feature (14)..(19): n is a, c, g, or t
atagtcntcantannnnnnagcgtgttatctaggaaagtcacacgctggtttctttctaataaaatgacaaagcaggtttcttaaataatttacaaagggcagaaattgctcttgaacagggctacccctcctggcacatccacagtgctctgcctgagcatataaataggtacccgtgagcccagggtcgtaagcctggaaatatctcctatgccttcctccgagtccctggtagggaaaggagggatgagagtggggccctcaagagccttggcaccagaaacacagtgggtgagtgactctgcggatgactccccaaaaaccaggcacccgggtacacagctaagagctctcaaatatctgatgctagcacttcatgttatagatgaggcaaatagaaggctcaaggtcaagtgtacgatgagtttctaagctcaagagtcccctaggaaagcagaaggaacaattctccccacctctgcaagatctccccaagacactctcaggctatggcaggcagtcactgatgggtccagatgtggctggagcaggggggctctgggccccttgctagtcaggtccttgttagcagtggcccaggggtactgacgactcccgggggttttttccaggaagctcacggggaagcatagacatccttgagtatgaagccttggcggtcagacagggcttgtttcctctcttccgccataatggcttcatctagctcttgggacagcttctggagatgctgaattcccgcccccacaggctctaggtcactgtcagactcgctgggagagcagaggggctctgttgaggagtaggggctccggaaggcagcctcccgccttgatcgccgtaatgggtgggcatgtgagcccatccggacagagaggcggtgatgctccttctcccaggggtctgcggctgagtgggcaggggcggccccagacagccgggtgctcttctggctcaggctgtgagttggggatccactgcccttctgtgctcctctcttccgcctcctggccttcacctgggtctccaccagccacttggtgccactttggcagggctcctggattctatccaatataaggacgtcttcctgacagcagctctcatttgacagcaaatcccctctaactggaccttctcggcagctcctgaagtttatcccctgggacacggcacccaaagcactcttagctgagcgagctgcagcctggaggccctgctgacctggctctggggtttccaggcgtttccaggagggccctgcgcggaggttgaggttgacggctctcaggggcagcctcctttggaactgtctgcacagggaccccagggcccctacagaggtctcctgatggctgaccacaggctgcagctccttgctgtcctccagctgctcctggtgctggagagatctccggcgcacggaggtccccatgttctgccaccgagaagccatctgcctggccaagagtcttctctgtccactagaccccgacaccactaaggccgagcacagccgcagcacagctgatcc

SEQ ID NO: 258143 - DNA, 1483 bp, Homo Sapiens
  misc_feature (1426)..(1426): n is a, c, g, or t
cccgggctatgtaaagcggccgggctcgggttgtgccaccgctggactcccgtgtccctccgcgcaggcgggcggccccggagcgctggtgccggcagaggcggcgacggtggcgcccctcctcatcatgaacagaggcttctcccgaaaaagccacacattcctgcccaagatcttcttccgcaagatgtcatcctcaggggccaaggacaagcctgagctgcagtttcccttccttcaggatgaggacacagtggccacgctgctagagtgcaagacgctcttcatcttgcgcggcctgccaggaagcggcaagtccacgctggcacgggtcatcgtggacaagtaccgtgatggcaccaagatggtgtcggctgacgcttacaagatcacccccggcgctcgaggagccttctccgaggagtacaagcggctcgatgaggacctggctgcctactgccgccgccgggacatcagaattcttgtgcttgatgacaccaaccacgaacgggaacggctggagcagctctttgaaatggccgaccagtaccagtaccaggtggtgctggtggagcccaagacggcgtggcggctggactgtgcccagctcaaggagaagaaccagtggcagctgtcggctgatgacctgaagaagctgaagcctgggctggagaaggacttcctgccgctctacttcggctggttcctgaccaagaagagctctgagaccctccgcaaagccggccaggtcttcctggaagagctggggaaccacaaggccttcaagaaggagctgcgacaattcgtccctggggatgagcccagggagaagatggacttggtcacctactttggaaagagacccccaggcgtgctgcattgcacaaccaagttttgtgactacgggaaggctcccggggcagaggagtacgctcaacaagatgtgttaaagaaatcttactccaaggccttcacgctgaccatctctgccctctttgtgacacccaagacgactggggcccgggtggagttaagcgagcagcaactgcagttgtggccgagtgatgtggacaagctgtcacccactgacaacctgccgcgggggagccgcgcccacatcaccctcggctgtgcagctgacgtaaaggccgtgcagacgggccttgacctcttaaagattctgcggcaggagaagggggggcaccccaagcgaagaggtgggcaagctaagccggggcaagctctattcctggggcaatgggcgctggatgctgaccctggccaagaacatggaggtcagggccatcttcccgggatactacgggaaaaggcaaacctgtgcccccgcaagggtagccgggaggggggcgcctttgcagtcctgccccatcatatgagtgttctccccaccacttatgccccctanaaagggaaaggggacagggaaacctggccccctgtttggatcccttggtttggggac

SEQ ID NO: 258144 - DNA, 1660 bp, Homo Sapiens
  misc_feature (51)..(60): n is a, c, g, or t
  misc_feature (96)..(105): n is a, c, g, or t
  misc_feature (145)..(163): n is a, c, g, or t
  misc_feature (263)..(263): n is a, c, g, or t
  misc_feature (339)..(351): n is a, c, g, or t
  misc_feature (355)..(355): n is a, c, g, or t
  misc_feature (381)..(396): n is a, c, g, or t
  misc_feature (399)..(451): n is a, c, g, or t
ggcggcgccccaaaggggggtgtttcaacaaagccccccttctctcccacnnnnnnnnnnctgcccacccctgtttgtgaggtcccctcccaatannnnnnnnnntattatttttatgggaagagcgttccttttgtgtttcctnnnnnnnnnnnnnnnnnnnttgtttttgtgggggtgttatttttctgcgaattccccccctccttacccctcgttttttccttttttgtgccgatggcccctctcgtttaaggggggtngcaatttcgggggcccgccccctttacccgccctcctgttgttcttcctccttcccgccgcccccttttaggaaannnnnnnnnnnnnggcnaagaaagggaggggcatgttgtttcnnnnnnnnnnnnnnnnggnnnnnnnnnnnnnnnnnnnnnnnnnnnnnnnnnnnnnnnnnnnnnnnnnnnnngcattgtttcctgtgggcccctatcacagtccccccctttttctctagcgcgtgggcccaggggtgcgggacaaaacaaaaacccccggaaatagggggcggaagtgtattggggccgcgcggttttctcccccaccccagaggaccagaggttggttcccagtggggggtgggccaggtcttgttgcccacattcaatttgggccccgcaatctggcaagttgggtggcttggctttagctcccacccggggcccccagtcgttttggggggtcacaaagaggggcagagatggtcagcgtgaagcccttggagtaacgatttctttgacacctgttgtggaggcgtactctttaaccccgggagctctccggtagtcgcaaaacttggttgtccaatgcagcacgcttgggggtctctttccaaaggtaggtgaccaagcccatcttctccgtgggctcatccccagggacgaattgtcgcagctccttcgtgaagcccttgtggttccccagctcttccaggaagacctggccggctttgcggagggtctcagagctgcttcttggtcagggaaccagccgaagtagagcggcaggaagtccttctccagcccaggcttcagcttcttgcaggtcatcagccgacatgctgccactggttcttctccttgagctgggcacagtccagccgccacgccgtcttgggctccaccagcaccacctggtactggtactggtcggccatttcaaagagctgctccagccgttcccgttcgtggttggtgtcatcaagcacaagaattctgatgtcccggcggcggcagtaggcagccaggtcctcatcgagccgcttgtactcctcggagaaggctcctcgagcgccgggggtgatcttgtaagcgtcagccgacaccatgcttggtgccactcatcggtacgttgtccatcgatgagcccgtgccatgcgtggacttgccgcttcctggcaggccgcgcaagatgaagagcgtcttgcactctagcagcgtggccactgtgtcctcatcctgaaggaagggaaactgcagctcaggcttgtccttggcccctgaggatgacatcttgcggaagaagatcttgggcaggaatgtgtggctttttcgggagaagcctcgaacgcgtgggtcgacgatatcccaaagcattccggaccgtaccagcctgctta

SEQ ID NO: 258145 - DNA, 1685 bp, Homo Sapiens
  misc_feature (872)..(872): n is a, c, g, or t
ctctttgaacctggcccccccttaagcccgccaggcttcccttttttgtggggacatggccaagcaaggtcagcaaattgtgcaagaggattaattgcctttggggatgtgtaaaagacaggcccatgggcaacaagccccgtcctgcctgtcctgtcgttctggccgagggtccagttctcaaaggccaccagcccctgcttcttgtgaggaccaacaggtcccccttcttgaaggccaggagggtggtgtcatctgtggccttcctgtcctgcagggccatggcgaaaatggacctctccttcaggcccccaggaacagggccaccagctcagcgatggccacactgctgggtgacacaaactcgtactcctcatgcatcgtggagagcagcagcctctgcccgccctgggcctccctgttggtggccagacccatgacctctgggaaagagagttccagcagcatcttctcctgctggtccaggaagcaaagccccttccagttatcagccaagatcagctgcgtcttgggcaggcgggggcctgagagtgtgatgacttcgaagagccgggagaagagcagcggccactgcaggcgggcggcgtccaccacctgctctcgcacggccagtggtgtgacttgcttctgagtgtatggggccttggcgcaggcggcagtgacgaggctcgcccacctgtctgggggcttggtcctgtacagcttgtgggggatgcagctgggcagcagctcctggacagccttgctctctgctgaggcgccgagctgcacgtagcagtgccgggccagcagctcaaccagctcttcctccttctcgaagctgtactcgccagaccagactcctcggaggncttggcggtaaataagctcggtgctgacagggtcctcccggggagtcgtgccagggggtgaagaattccttcccggaagtagatgcgccagggtgactggcgcttgctctcgcccctctcctgggccatctgctcacaccgggcgatggcatccatcatgtggtcgcgcccgctgcccagggaccagaacttgtcgtacacggcgacctggagggagaagcccaggtggtcgctgaggccctgcttgtgagcgatgtgcatgcacatttcccgagatgtggaggctgagtccacggggacggttaggctctctccagtggccaagatgacttggatggggatgtgcttcttggacttgacagcctgcagctccagccaggtggggggctccgcacgcaccccattggcataggtgcgtctcaggcgctcggcacagaaggggccgtaggtcgccggcccttggccgatgaagttcagtagatacttcatgaacctctctgagggtgggaagcagccgaggcagaggctgagcaggatccagccccgggccaggctgcttgttttgaagttctccgagagctgcttgcagatctggcagtaaatctcatccctgaaagacacagaccattaggagagtaggctgggggctggaggaggagaggagacaggggtacctgggcacacagctcttgtgcacctctgagaggtcccatatgcagggcacctctccagcgccggggccctgcccagcctcctcctctctcaggacagtgccaccaggctctgcatccctactcgattcctctcccatgg

SEQ ID NO: 258146 - DNA, 1070 bp, Homo Sapiens
  misc_feature (43)..(61): n is a, c, g, or t
  misc_feature (834)..(834): n is a, c, g, or t
  misc_feature (845)..(845): n is a, c, g, or t
aacgaataggagtgtcccttgtgggcggcgcgggggcggggtnnnnnnnnnnnnnnnnnnngcctggtgtggcgaattcggcacgaggatgcaccccagtgctggaggtcagcgtggcggctttggtagcccaggtggcggcagtggtggcatgagcaggggccggggccggagggacaacgaactcatcggccagaccgtgcgcatctcccaggggccctacaaaggctacatcggtgtggtgaaagatgccacagagtccacggcccgtgtggagctgcactccacctgccagaccatctctgtggaccgtcagcggctcaccacggtgggctcacggcgcccgggcggcatgacctcgacctatgggaggacgcccatgtatggctcccagacgcccatgtatggctctggctcccgaacacccatgtacggctcacagacacccctccaggatggtagccgcaccccacactacggctcacagacgcccctgcatgatggcagccgcactcctgcccagagtggggcctgggaccccaacaaccccaacacgccgtcacgggctgaggaagaatatgagtatgctttcgatgatgagcccaccccgtccccgcaggcctatgggggaacccccaatccccaaacacctggctaccccagacccctcgtccccacaggtcaacccacaatacaacccgcagacgccagggacgccggccatgtacaacaccagaccagttctctcccctatgctgcccccctccccaaaagggtcctaccagcccagcccccgccccccagagctaccaccaggggggcgccaaggccagncaagctaccanaaatacccactcccccgcccagttaccaacctaaaccgtcgcccatgggcctaatcagggtagccccagcccgaagcccggtgggctacagtccctagtgaaccctgggagctcccctcccctggggggttaaaccccacacacgccaagggtcagggcatccaagcagaacttccacgcggctgggggaaaccacctggccattccagggtgagggtgcgcggt

SEQ ID NO: 258147 - DNA, 2203 bp, Homo Sapiens
tgaataatagaacaaccctgtgcagttaaaaagcaggctgtacggtccggaattcccgggatatcgtcgaacccacgcgtccgaataccttcattgtgcggatggaggagactttcgttatcctgttctctgaacctcaccatgcatgagctgaaggtgctcccccgggacctgcagctctgctcagagacagcatcaggtgttggatgttgggggccaggatgaatgcggcgcgacgctggtgcagtctggatccccagactgtgggttgtcggcggtgcgactaggaacggggagaccgttccgaggtgcatgaatctatgtactgcgcaaggtggtgactgtcagacagtcacggctgtgacccggaagaaggacaaccgcgtttgcgtgtggccttgtgactcagagcagaacaggcgatccatgtgaaaagacgattcgtttaaagggtcaatgtgaatggccccccactccagggccgagcaatggggagattcagccatctcttccgaaggcttacgccttcctacattgcaaagaaactggtaggagaacgggggcgtgtatgtctgcgagaccgccacctggtgctggctgggggctcaaaagcaccgtgatgtgaccaactttcaccgtgggtggcttttgcgcctatgagtccccggatcagcagccccatgcaccccagtgctggaggtcagcgtggcggctttggtagcccaggtggcggcagtggtggcatgagcaggggccggggccggagggacaacgaactcatcggccagaccgtgcgcatctcccaggggccctacaaaggctacatcggtgtggtgaaagatgccacagagtccacggcccgtgtggagctgcactccacctgccagaccatctctgtggaccgtcagcggctcaccacggtgggctcacggcgcccgggcggcatgacctcgacctatgggaggacgcccatgtatggctcccagacgcccatgtatggctctggctcccgaacacccatgtacggctcacagacacccctccaggatggtagccgcaccccacactacggctcacagacgcccctgcatgatggcagccgcactcctgcccagagtggggcctgggaccccaacaaccccaacacgccgtcacgggctgaggaagaatatgagtatgctttcgatgatgagcccaccccgtccccgcaggcctatgggggaacccccaatccccaaacacctggctacccagacccctcgtccccacaggtcaacccacaatacaacccgcagacgccagggacgccggccatgtacaacacagaccagttctctccctatgctgccccctccccacaaggttcctaccagcccagccccagcccccagagctaccaccaggtgggcgccaagccccagcaggctacccagaatacccactccccagccagctaccaccctacaccgtcgcccatggcctatcaggctagccccagcccgagccccgttggctacagtcctatgacacctggagctccctcccctggtggctacaacccacacacgccaggctcaggcatcgagcagaactccagcgactgggtaaccactgacattcaggtgaaggtgcgggacacctacctggatacacaggtggtgggacagacaggtgtcatccgcagtgtcacggggggcatgtgctctgtgtacctgaaggacagtgagaaggttgtcagcatttccagtgagcacctggagcctatcacccccaccaagaacaacaaggtgaaagtgatcctgggcgaggatcgggaagccacgggcgtcctactgagcattgatggtgaggatggcattgtccgtatggaccttgatgagcagctcaagatcctcaacctccgcttcctggggaagctccctggaagcctgaagcaggcagggccggtggacttcgtcggatgaagagtgatcctccttccttccctggcccttggctgtgacacaagatcctcctgcagggctaggcggattgttctggatttccttttgtttttccttttagttttccatcttttccctccctggtgctcattggaatctgagtagagtctgggggagggtccccaccttcctgtacctcctccccacagcttgcttttgttgtaccgtctttcaataaaaagaagctgtttggtctaaaa

SEQ ID NO: 258148 - DNA, 2810 bp, Homo Sapiens
  misc_feature (271)..(271): n is a, c, g, or t
  misc_feature (279)..(301): n is a, c, g, or t
  misc_feature (526)..(526): n is a, c, g, or t
  misc_feature (2334)..(2456): n is a, c, g, or t
gcaggctggtaccggtccggaattcccgggatccgagcgccgccatggctctgctgtccgagggcctggacgaggtgcccgccgcctgcctgtcgccgtgcgggccgcccaacccgaccgagctgttcagcgagtcacggcgcctggctctggaggagctggtggcgggcggccccgaagccttcgcggccttcctgcgacgcgagcgcctggctcgtttcctgaaccccgatgaggtgcacgccattctgcgcgcggcggagaggccggnagaggagnnnnnnnnnnnnnnnnnnnnnnncgaggactcgttcggctcctcgcacgactgctcttcgggcacctacttccccgagcagtcggacctggagccaccgctgttggagcttggctggcccgccttctaccagggcgcctaccgcggcgccacgcgtgtcgagacgcacttccagccccgcggcgctggcgaaggtggcccctacggctgcaaggacgctctgcgccagcactccgctcggcgcgagangtgattgcagtggtcatggacgtgttcacagacatcgacatcttcagagacctgcaagaaatatgcaggaaacagggagttgctgtgtatatccttctggaccaggctctcctctctcaatttctggatatgtgcatggatctgaaagttcatcctgaacaggaaaagttaatgacagttcggactatcacaggaaatatctactatgcaaggtcaggaactaagattattgggaaggttcacgaaaagttcacgttgattgatggcatccgcgtggcaacaggctcctacagttttacatggacggatggcaaattaaacagcagtaacttggtaattctgtctggccaagtggttgaacactttgatctggagttccgaatcctgtatgcccagtccaagcccatcagccccaaactcctggtctcacttccagagcagcaacaagtttgatcacctcaccaaccgaaaaccacagtccaaggagctcaccctgggcaacctgctgcggatgcggctggctaggctgtcaagtactcccaggaaggcggacctggacccagagatgcccgcagagggcaaggcagagcgcaagccccatgactgtgagtcctctactgttagtgaggaagactacttcagcagccacagggacgagctccagagcagaaaggccattgacgctgccactcaaacagagccaggagaggagatgccagggctgagtgtgagtgaggtgggaacacaaaccagcatcaccacagcatgtgctggtacccagactgcagtcatcaccaggatagcaagctctcaaaccacgatttggtccagatcgaccactactcagactgacatggatgagaacattctctttcctcgaggaactcaatctacagaagggtcaccagtctcaaaaatgtctgtatcgagatcttccagtttgaagtcttcctcctctgtgtcttcccaaggctctgtggcaagctccactggttctcccgcttccatcagaaccactgacttccacaatcctggctatcccaagtacctgggcaccccccacctggaactgtacttgagtgactcacttagaaacttgaacaaagagcggcaattccacttcgctggtatcaggtcccggctcaaccacatgctggctatgctgtcaaggagaacactctttactgaaaaccaccttggccttcattctggcaatttcagcagagttaatttgcttgctgttagagatgtagcactttatccttcctatcagtaactgctccgtgttcagactcctggtttcttccaggcttacagtggacatcatcagcttcctgctttaaaaaatatcttatgtccctaattgcctttcttttacctgactttgtcacctttgttgtctttgaattctttaggctgcatattattttacatgctttgttttgtcatgtatataccaggtattggttttatggtttaaacactatggatacagggggtttgttttgcacaattttaatagtcatgcactacataatgatgtttttggtcaatgacagaccacgtatatgttggcagtctcataagattataatactgtatttttactatacccttttctgtgtttagatacaaataccattatgttacagttgcctacagtattcagtgcagtaacatgatgtacaggtttgtagcctgttttgcatttttcttaggttgtatgctcttctgttttaaaggtttgaatcaccagcatttttgtgatcaaaatcctatttagaaaaaataaaactactttctgtttnnnnnnnnnnnnnnnnnnnnnnnnnnnnnnnnnnnnnnnnnnnnnnnnnnnnnnnnnnnnnnnnnnnnnnnnnnnnnnnnnnnnnnnnnnnnnnnnnnnnnnnnnnnnnnnnnnnnnnnnnnncctttcattttggcccgcgggcccaaaaaggaaggggaacttggcctaaaattgtttcctaggaaaatcttggttttgccgtccgcgcttgctttctaaaaattattaaaacccccggtgtggagcgcgaggggtctccaaaaaaatccaaaagggaagttcttaagtgtttttcctggaaaaaaaccccccgggaagccacaagggggtgttttttccccaaataaaaaccacccccgggggattaaccggaggtatttgtaaaaaatcttttaaggggttttctggccggacttgttaaagcctctcccaacgcgggggtttgtaaacccgggaacttcaccaacaagactt

SEQ ID NO: 258149 - DNA, 1527 bp, Homo Sapiens
  misc_feature (125)..(125): n is a, c, g, or t
  misc_feature (1125)..(1125): n is a, c, g, or t
tataacatacagcttgatgtcctttctatgcattaaaaccaaacaaaataaaggcatttttaccatcacataagaaatgagaatacacacgcacacaatttaaagtgataattatcttggcgganggagcgaaggtgggggcgttacaggatgagatatgacagaagttattgttagagtcctagttttgaagttgggtagtaagctcattggtgctcgtgacattattaaaagaaacaaataataggggatgcgtgcatccatgaggagaaacgtggcatgaacaataggtataaattctaactctcacctccgctgtgaatgaggcaaagatctacagcacatttacttgatcacacagtctgtgaaacaaagacacgttagggccacggtgggctgtgacaactctagtctcacctcgatgagtcaggttaaaaaggatattgacacttctcttccttaagtaattttcagctatgagtgtgaagttataggtttcttgtgagtcttgagttatttgccaattacaccagtttttgtgtgtacaaagtttcttttccccagaaaatgattcaaataaagtgtagctttgggaaggttgtttagaccaccccaaggcagtgtccgtcccaggatcccaagtacagtgcaaagtcttgaagtcctcggtttcacaagaaaagtccttgggctcctcaagtacttttgagacaaaaagaacgatgcctttcatgccttcactgacatttccttgacttgcctcacaatagatatttgtccctttattcctaatgaaaggcacactattcaagttgaatgcagttacatgtggatcaagttgttctccatgaatctgtttcccttccaaataacaggatacattattttgaatgttccgagaaacgtaacaaatggtaacattggtgccttcttccaccagcttatctttagggaaaacgaacaatatatcctgtccagtagaatcttgtacactgacttcctcccaggaactccagttgctccagaaatttggctcagggaacttggcatcgtccaccaaactctttattcttacaaagtgtgtggcacattccaaagggagctctagatgtcccagcgtccaantgcagaacctggttccactgtcacagtggtgctgtaattccccacccagatgacattggatgtttcaatcctactgatctggatctgaaataccattttcaattcctgatgataaggaaggttgtggacagtccattgtaagtgcaaactctgacgcgtagaattggtggaaactttaagtgatacaggagtcaatggtaaacgttcagccaagacttcactctggtaagtcctcaaggacagcaatgttaagaagaatgttgtctgaaagactgcaaatagagccatcagttctggttttgccgcgggcgaagggctccacgagccgggccgagtcctcggcggcgcgtggggcgcgggtgcgggctccggggcggacgtgcagaggcggcccgggccggg

SEQ ID NO: 258150 - DNA, 418 bp, Homo Sapiens
gatcacaggcccagccagagcctgtcgggagaagaccagactctttacttgcagtaggcaccagaggtgggaaggatggtgggattgtgtacctttctaagaattaaccctctcctgctttactgctaattttttcctgctgcaaccctcccaccagtttttggcttactcctgagatatgatttgcaaatgaggagagagaagatgaggttggacaagatgccactgcttttcttagcactcttccctcccaaaaaccatcccgtagtcttctaatacagtctctcagacaagtgtctctagatggatgtgaactccttaactcatcaagtaaggtggtactcaagccatgctgcctccttacatcctttttggaacagagcacggtataaataataaactaataataatatgccaa

SEQ ID NO: 258151 - DNA, 1444 bp, Homo Sapiens
  misc_feature (708)..(708): n is a, c, g, or t
  misc_feature (1007)..(1007): n is a, c, g, or t
  misc_feature (1043)..(1043): n is a, c, g, or t
  misc_feature (1067)..(1068): n is a, c, g, or t
  misc_feature (1081)..(1081): n is a, c, g, or t
  misc_feature (1115)..(1115): n is a, c, g, or t
  misc_feature (1131)..(1131): n is a, c, g, or t
  misc_feature (1152)..(1152): n is a, c, g, or t
  misc_feature (1158)..(1158): n is a, c, g, or t
  misc_feature (1171)..(1171): n is a, c, g, or t
  misc_feature (1188)..(1188): n is a, c, g, or t
  misc_feature (1192)..(1192): n is a, c, g, or t
  misc_feature (1208)..(1208): n is a, c, g, or t
  misc_feature (1212)..(1212): n is a, c, g, or t
  misc_feature (1230)..(1230): n is a, c, g, or t
  misc_feature (1232)..(1232): n is a, c, g, or t
  misc_feature (1250)..(1250): n is a, c, g, or t
  misc_feature (1285)..(1285): n is a, c, g, or t
  misc_feature (1328)..(1328): n is a, c, g, or t
  misc_feature (1367)..(1367): n is a, c, g, or t
  misc_feature (1414)..(1414): n is a, c, g, or t
gcaaaatttaataccatgggttaacacaatatcaaaatattaaacttttcaagcacatgaaagtcaccttctgaaagacaaactgggctttttttataactacctgtgtgtaacttaataaaattacttccctcaacaatatctgacactgatcttgatactagttagaaagtctgatgtaagatgatgacatctcaacgtcagtgatttaggagattatcttcagaattcatcagaggaccaatcgtcatcttcatcccttacttctcggtatctccctgaagactccccttctggattataactccgcattttaatattcagtctttcagctaatttttgcgctgcgagctttgcttgcatctcctcataattctgtttctgctgtttctgaagtgccaaggattcttctatggagagcagctgcgtgggcatatggtgaagtggtagaagccgagctgctgtgatgtcatcaagatgctgcttatccctgcgccgccgctcttctgaggaaataggagacccactcttctggcaatgactagatgaatcattttgtcgaaaaggtaacacattggttttaaatttacgcagctggggcactgggtttttggctcgcatttctagcacttccatgtaatgaggtttcttctcagtcccactggaaaggcctgtcaagttcttagtacttgcgttttcttctgactnttgttcaccttggtccgcaatggtgatcctctgtaacctgtcaataaacaggttgtcaaagctgctggaagtatcttccgcttgacttgaaacacgatgccgcgggtgatgctcactagcttcagatgaaggtggtaccctgtctctattgctggaagctgggcccttattcactgtgtactcaacctctgaagtctcttcatcaccttcaagattaggacgtccaagtccctggttttgtgaggtttgagatgacttgattttatctacagaggaacatccaggaactagtgatgaantatcaagtatcgggtcagaattctgggccttatctntacccacatcaacttctgcaattnntttttgccttagnttacagtctaaactaacaggtttaaacagttcantttttcttctaacttnttcacattctgcaatagcagntttcantttggcaaaagantcaaagatttttttacntttntcgggcaatttgcaantgantttttctttgcgcaaaantntctcctggcgcttcaacntttcccgcagctccaccaaacttccctgcgccaantcctcgggagcttggggctcgaagccgcggggcagcgagcacnttctgcgcgggctgaggctggcgcggcggcgggcactcngcttcctcggcaggccccgctactagcgccggatccgcggacggcgntgactccggggcacgagcgggagtcgccat

SEQ ID NO: 258152 - DNA, 1598 bp, Homo Sapiens
  misc_feature (592)..(592): n is a, c, g, or t
  misc_feature (594)..(594): n is a, c, g, or t
  misc_feature (733)..(733): n is a, c, g, or t
  misc_feature (803)..(803): n is a, c, g, or t
  misc_feature (911)..(915): n is a, c, g, or t
  misc_feature (917)..(917): n is a, c, g, or t
  misc_feature (919)..(919): n is a, c, g, or t
  misc_feature (923)..(923): n is a, c, g, or t
  misc_feature (925)..(926): n is a, c, g, or t
  misc_feature (928)..(931): n is a, c, g, or t
  misc_feature (942)..(944): n is a, c, g, or t
  misc_feature (946)..(946): n is a, c, g, or t
  misc_feature (948)..(948): n is a, c, g, or t
  misc_feature (952)..(953): n is a, c, g, or t
  misc_feature (956)..(956): n is a, c, g, or t
  misc_feature (960)..(960): n is a, c, g, or t
  misc_feature (964)..(964): n is a, c, g, or t
  misc_feature (966)..(966): n is a, c, g, or t
  misc_feature (968)..(969): n is a, c, g, or t
  misc_feature (971)..(971): n is a, c, g, or t
  misc_feature (982)..(982): n is a, c, g, or t
  misc_feature (988)..(988): n is a, c, g, or t
  misc_feature (994)..(994): n is a, c, g, or t
  misc_feature (1000)..(1000): n is a, c, g, or t
  misc_feature (1004)..(1004): n is a, c, g, or t
  misc_feature (1015)..(1015): n is a, c, g, or t
  misc_feature (1038)..(1039): n is a, c, g, or t
  misc_feature (1041)..(1041): n is a, c, g, or t
  misc_feature (1043)..(1043): n is a, c, g, or t
  misc_feature (1046)..(1046): n is a, c, g, or t
  misc_feature (1057)..(1057): n is a, c, g, or t
  misc_feature (1061)..(1061): n is a, c, g, or t
  misc_feature (1063)..(1063): n is a, c, g, or t
  misc_feature (1074)..(1074): n is a, c, g, or t
  misc_feature (1087)..(1087): n is a, c, g, or t
  misc_feature (1096)..(1096): n is a, c, g, or t
  misc_feature (1099)..(1100): n is a, c, g, or t
  misc_feature (1103)..(1103): n is a, c, g, or t
  misc_feature (1107)..(1108): n is a, c, g, or t
  misc_feature (1111)..(1112): n is a, c, g, or t
  misc_feature (1114)..(1114): n is a, c, g, or t
  misc_feature (1118)..(1118): n is a, c, g, or t
  misc_feature (1131)..(1131): n is a, c, g, or t
  misc_feature (1133)..(1133): n is a, c, g, or t
  misc_feature (1137)..(1140): n is a, c, g, or t
  misc_feature (1143)..(1143): n is a, c, g, or t
  misc_feature (1146)..(1146): n is a, c, g, or t
  misc_feature (1150)..(1150): n is a, c, g, or t
  misc_feature (1161)..(1161): n is a, c, g, or t
  misc_feature (1170)..(1170): n is a, c, g, or t
  misc_feature (1176)..(1176): n is a, c, g, or t
  misc_feature (1179)..(1179): n is a, c, g, or t
  misc_feature (1181)..(1181): n is a, c, g, or t
  misc_feature (1225)..(1226): n is a, c, g, or t
  misc_feature (1228)..(1228): n is a, c, g, or t
  misc_feature (1231)..(1231): n is a, c, g, or t
  misc_feature (1243)..(1243): n is a, c, g, or t
  misc_feature (1254)..(1254): n is a, c, g, or t
  misc_feature (1256)..(1256): n is a, c, g, or t
  misc_feature (1260)..(1260): n is a, c, g, or t
  misc_feature (1267)..(1267): n is a, c, g, or t
  misc_feature (1289)..(1289): n is a, c, g, or t
  misc_feature (1295)..(1295): n is a, c, g, or t
  misc_feature (1302)..(1302): n is a, c, g, or t
  misc_feature (1318)..(1318): n is a, c, g, or t
  misc_feature (1320)..(1320): n is a, c, g, or t
  misc_feature (1560)..(1560): n is a, c, g, or t
  misc_feature (1568)..(1568): n is a, c, g, or t
  misc_feature (1575)..(1575): n is a, c, g, or t
  misc_feature (1582)..(1582): n is a, c, g, or t
  misc_feature (1594)..(1594): n is a, c, g, or t
  misc_feature (1596)..(1597): n is a, c, g, or t
gggaggtcacaatcacattgagccaaaacgcatccagtgttttctccagttacaaataaaacgaatatgcccatgctgctaccacatcctcaccagcatttcctaaaaggccttttaagagcacctttccgatgttaccacttcatctttcactcaagtactcatctcggatcaggaatcccatgtgctcagccgtttaattctcttggactccattgtacaaagtggatgctgctgtcagatggcttaaagagaaaattatgtgtacaaacaaccttaaaggaccacacagaaggactttctgacaaagagcaaagatttgtggataaactttatactggtttaatccaagggcaaagggcctgtttagcagaggccataactcttgtagaatcaactcacagcaggaaaaaggagtaagcccaggtgcttcttcagaaagtattactttaccacagagaacaagaacaatcaaataaaggaaaaccactagcatttcgagtaggtcagtcttttttgtgtgtattctcagtaaatatttttacaaattctctgtattctgttttttaaaaaaaagtctaaatagtttgcnancgaatggcgacttttttcacaatatttggatgaattttaaatgagttttcctggcaaatattagttttgttaagttgaaaaaattgccatgacatttgaaccaaggctatgtattttaagaaaataatataagattttnactttggcaagaatcttgctctggatcccaggacagaaatattcataggaagaactactagattgtcggngccccctggtgctggaaaatcaacatttatagaatattttggaaaaatgcttactgagagagggcacaaattatctgtgctagctgtggacccttcttcttgtactannnnngnancacncnnannnnaaaaaacccgnnncncngccnntcnccanaganangnncncatacatcagnccatcnccaacnagaggnactntaggaggcgtnacaaggaccacaaatgaagctanncngntgngtgaaggagcngganangacataattcntattgaaaccgtnggtgtgggncanncgnagtnngcnntncctnacatggttcacangnctgnnnnacnacngccnccagcaggagnacatgagcnccaggntcncnaaaggggcataatcgagatggcagatctggtagctgtaaccaanncnganggagacttgatngtgccagcccnangganacaagcngaatatgtgagtgcactgaaantactcngcaaacnttcacaagtctggaancnaaaggtaattcgtatttctgcccgaagtggagaggggatctctgaaatgtgggataaaatgaaagatttccaggacctaatgcttgccagtggggagctgactgccaaacgacggaagcaacagaaagtttggatgtggaatctcattcaggaaagtgtgttagagcatttcaggacccaccccacagtccgggaacagattccacttctggaacaaaaggttctcatcgggcggccctntccccagnactagcngcagacntcttgttaaagngnnt

SEQ ID NO: 258153 - DNA, 416 bp, Homo Sapiens
gtctttaaaattgttgtaaatctctgtatgcactttgcttttttattaaacgtactccaaggtgagtcttgactctttagtgtaggacaagattgtacactaacaccagcatggacctgcttttcattgtgtctgaaatgtgagccacgtagtgtcggcctgctgtgaagttaacattgccaggacgattcttctacagaaataatttcaatttttttcagtatttagtagtgaaagatattaatacattaatggtaatacatttctggtttaatataaattaaggatgttttctagttgtgcatgaatgctggcaacttagtaagttttgacaattgtttaaatatgtaatgttaagcttaggtttaaaaaagtaaagctggtaaactgggtctttgtcatttgctttaaaaaaa

SEQ ID NO: 258154 - DNA, 859 bp, Homo Sapiens
  misc_feature (15)..(15): n is a, c, g, or t
  misc_feature (33)..(33): n is a, c, g, or t
  misc_feature (38)..(38): n is a, c, g, or t
  misc_feature (41)..(41): n is a, c, g, or t
  misc_feature (73)..(73): n is a, c, g, or t
  misc_feature (101)..(101): n is a, c, g, or t
  misc_feature (120)..(120): n is a, c, g, or t
  misc_feature (122)..(122): n is a, c, g, or t
  misc_feature (143)..(143): n is a, c, g, or t
  misc_feature (147)..(147): n is a, c, g, or t
  misc_feature (149)..(149): n is a, c, g, or t
  misc_feature (155)..(155): n is a, c, g, or t
  misc_feature (157)..(157): n is a, c, g, or t
  misc_feature (159)..(159): n is a, c, g, or t
  misc_feature (163)..(163): n is a, c, g, or t
  misc_feature (179)..(179): n is a, c, g, or t
  misc_feature (186)..(194): n is a, c, g, or t
  misc_feature (232)..(233): n is a, c, g, or t
  misc_feature (235)..(235): n is a, c, g, or t
  misc_feature (240)..(241): n is a, c, g, or t
  misc_feature (243)..(243): n is a, c, g, or t
  misc_feature (251)..(251): n is a, c, g, or t
  misc_feature (254)..(254): n is a, c, g, or t
  misc_feature (257)..(257): n is a, c, g, or t
  misc_feature (261)..(261): n is a, c, g, or t
  misc_feature (265)..(265): n is a, c, g, or t
  misc_feature (272)..(272): n is a, c, g, or t
  misc_feature (275)..(275): n is a, c, g, or t
  misc_feature (279)..(279): n is a, c, g, or t
  misc_feature (301)..(301): n is a, c, g, or t
  misc_feature (309)..(309): n is a, c, g, or t
  misc_feature (315)..(315): n is a, c, g, or t
  misc_feature (318)..(318): n is a, c, g, or t
  misc_feature (324)..(324): n is a, c, g, or t
  misc_feature (335)..(335): n is a, c, g, or t
  misc_feature (349)..(350): n is a, c, g, or t
  misc_feature (388)..(388): n is a, c, g, or t
  misc_feature (405)..(405): n is a, c, g, or t
  misc_feature (477)..(477): n is a, c, g, or t
  misc_feature (497)..(497): n is a, c, g, or t
  misc_feature (521)..(536): n is a, c, g, or t
  misc_feature (574)..(594): n is a, c, g, or t
  misc_feature (718)..(756): n is a, c, g, or t
tctaggcccccgctnaaaaacgtgaacaggagnactgnacngcagttggcagtaactgtgggcaacgtcaccntcattttaacaaactttaaggaaaaaantggctcctcatcaaaatcntnatcaaaagtgacctccagtgnaggntnaccacngnanaacnagagcagctcggggtnaaagagnnnnnnnnngggctcctcccgttcctccacgcgccaagggcgacatnncngcagnnangggtgaanctnccngcantggnacagggnatngggnagactatgactcggggtatganattcaaancccccnccngcccangccgcttgcanccctggagaggacnncgacctcttagtgatgctgccaggataatttctgcttnccatgggcctctggccnccaaggaatttcgcaccctgacgataactcttgacacttttatgtattccattgttttatatgattttcctnacaatcatttataattggangggctcctgaatctactttttatnnnnnnnnnnnnnnnntctgctgtgcacaattttccatgtacattaccactggnnnnnnnnnnnnnnnnnnnnnccggtggggagggctgggagagggagggaacttttatttattgtgttaacaaactccatcctttcagcatatccttttaagtttagttctttcttccagttatactatgtactatcagttttgnnnnnnnnnnnnnnnnnnnnnnnnnnnnnnnnnnnnnnngggttatttgaaaccaatccatggcaaacgctggtgcttgatacactgtgaagtgaatacaacattgaacagttacagatctgggacagtcccttctatgaaa

SEQ ID NO: 258155 - DNA, 734 bp, Homo Sapiens
  misc_feature (717)..(717): n is a, c, g, or t
cctaaaaaggagaagaaggagaaagttgaaaagcaggacaaagagaaacctgagaaagacaaggaaattagtcctagtgttaccaagaaaaataccaacaagaaaaccaaaccaaagtctgacattctgaaagatcctcctagtgaagcaaacagcatacagtctgcaaatgctacaacaaagaccagcgaaacaaatcacacctcaaggccccggctgaaaaacgtggacaggagcactgcacagcagttggcagtaactgtgggcaacgtcaccgtcattatcacagactttaaggaaaagactcgctcctcatcgacatcctcatccacagtgacctccagtgcagggtcagaacagcagaaccagagcagctcggggtcagagagcacagacaagggctcctcccgttcctccaagccaaagggcgacatgtcagcagtcaatgatgaatctttctgaaattgcacatggaattgtgaaaactatgaatcagggtatgaaattcaaaacctccacctgcccatgctgcttgcatccctggagaatcttctgtggacatcgacctcttagtgatgctgccaggataatttctgcttgccatgggcatctggccaccaaggaatttcgcaccctgacgattactcttgacacttttatgtattccattgttttatatgattttcctaacaatcatttataattggatgtgctccntgaatctactttttata

SEQ ID NO: 258156 - DNA, 2357 bp, Homo Sapiens
  misc_feature (2174)..(2176): n is a, c, g, or t
  misc_feature (2181)..(2181): n is a, c, g, or t
  misc_feature (2183)..(2183): n is a, c, g, or t
  misc_feature (2185)..(2186): n is a, c, g, or t
  misc_feature (2199)..(2199): n is a, c, g, or t
  misc_feature (2249)..(2249): n is a, c, g, or t
ggcctgggtggcgaattcggcacgaggccaaggcggagcaggccaaagtgaagaaggcccttctgcagaaaaatgtagagtgtgcccgtgtgtatgccgagaacgccatccgcaagaagaacgaaggtgtgaactggcttcggatggcgtcccgcgtagacgcagtggcctccaaggtgcagacagctgtgactatgaagggggtgaccaagaatatggcccaggtgaccaaagccctggacaaggccctgagcaccatggacctgcagaaggtctcctcagtgatggacaggttcgagcagcaggtgcagaacctggacgtccatacatcggtgatggaggactccatgagctcggccaccaccctgaccacgccgcaggagcaggtggacagcctcatcatgcagatcgccgaggagaatggcctggaggtgctggaccagctcagccagctgcccgagggcgcctctgccgtgggcgagagctctgtgcgcagccaggaggaccagctgtcacggaggttggccgccttgaggaactagccgtgccccgccggtgtgcaccgcctctgccccgtgatgtgctggaaggctcctgtcctctccccaccgcgtcttgcctttgtgctgaccccgcggggctgcggccggcagccactctgcgtctctcacctgccaggcctgcgtggccttagggttgttcctgttcttttaggttgggcggtgggtcctgtgtcctggtgttgagtttctgcaaatttctgggggtgatttctgtgactctgggcccacagcggggaggccaagaggggccctgtggactttcacccagcactgtgggggccttcagactctggggcagcagacatgctgcttcccatcagccagagggggtcagggctgccctgttgccaaacaactccctgaggcctctccgcaccacctcagcgggcaggaggtcccaccatgtggacagacatagcccaaggaggcaccacaggtctatgtgtgctgggggatgtcaggtgccacccaacgctgtcctggtggtatttacaatgacatcctcctcctccatcactccaggggtggtgtctcggccgcccctaccagctggctgagccccctggcctcctgcgctccctcacttccctcagttcccaaagctgcccagtccatggggacagaaccgtcactcagatccacattcaagtgtgcccaccctgcagtcttcatcctcactcagctgctgcctctggaggtgcctttggccacatgtgctgtgctgtttgtctcctcgacagggagcctgtccaccagcaggctgcggtcccagcgggtgcgtctgcagctcctccccttgggcagcctggttctcccggaggacctttccttggggccctgcttcatgacgatgctgcctgtgtcaccctctaccatctgtaaacaactgggtgccttccccgaccacaccccaatgccttcccagcttggaagccaaggcagctgatgaagggagctcaggagagccgtcttcagctgggctggggttggggctgctgtgaggaaaacctgccattgtggccctggagagtcaccagcagctcttgggaaggacttgctgggaggctgagagaggctttgggcacagcctgctgtcttttccatttcctaaagtttacttcattgtcttgaggcttccaggttttgtttttgtttttgccaaagtagaaaaggcaggtggtgggcggctggcagggagtgcgggtccccgcccctcttcagtcctgccctcccctcctcagtcctgcccaccccgtgcagcccatgctgaggctgcagtggtgtcgtgggtgttacgtgcaggaacgtggagaccctgacgtgggctcactgcgtttggttttcttttcagaacttgggagcccccagggaggggctagtgttggtaggtcctagacgtggttccctccagcctccccaaaatcaaccctggtgttgagagaacgtccttctgtccatcgtgggtaacagccttggggagggtgcagagctctgcagagccatgggccaggtggggctgcctcagtcctgtccccttgggcactgaggagaggggcccattcacctttctcctagaatgctggtgtacataaacaaatggatccctggcannntcacnantnnataaaaacttaanaacatgtcgggcgccttcgggccctcgaaaagctttctaagaccatgcgntttggcgcgccggcccccataaggaaagtggacccgggtccataacggggtctccaaggcaaatccggggccatgaactaagggggctgggattccctcaccaataaa

SEQ ID NO: 258157 - DNA, 1136 bp, Homo Sapiens
  misc_feature (1019)..(1019): n is a, c, g, or t
  misc_feature (1035)..(1035): n is a, c, g, or t
  misc_feature (1045)..(1046): n is a, c, g, or t
  misc_feature (1064)..(1064): n is a, c, g, or t
  misc_feature (1068)..(1069): n is a, c, g, or t
  misc_feature (1083)..(1084): n is a, c, g, or t
  misc_feature (1087)..(1087): n is a, c, g, or t
  misc_feature (1100)..(1100): n is a, c, g, or t
  misc_feature (1102)..(1102): n is a, c, g, or t
  misc_feature (1119)..(1119): n is a, c, g, or t
  misc_feature (1123)..(1123): n is a, c, g, or t
  misc_feature (1127)..(1127): n is a, c, g, or t
  misc_feature (1132)..(1132): n is a, c, g, or t
acaaaaaagcaggctggtaccggtccggaattcccgggatgccggcgcggggacgcgggtttctgcctcaggccctgccctgctctactctgcgctctctgcccgcgccgccgccgcctcagcctcggccctgcgctgcgcgcccggcccgtgctgccatggcctgccgcccgcgaagccgccgaggcatcagagccgctgcgacggtgacgccagcccgccgtcccccgcgcgatggagcctgggacggaagcgcagagccgacggcaggcgctggaggcccgaagacgccgaggaggcagagcaccgcgacgccgagcgcagacccgagagctttaccactcctgaaggccctaaaccccgttccagatgctctgactgggcaagtgcagttgaagaagatgaaatgaggaccagagttaacaaagaaatggcaagatataaaaggaaactcctcatcaatgactttggaagagagagaaaatcatcatcaggaagttctgattcaaaggagtctatgtctactgtgccggctgactttgagacagatgaaagtgtcctaatgaggagacagaagcagatcaactatgggaagaacacaattgcctatgatcgttatattaaagaagtcccaagacaccttcgacaacctggcattcatcccaagacccctaataaatttaagaagtatagtcgacgttcatgggaccagcaaatcaaactctggaaggtggctctgcatttttgggatcctccagcggaagaaggatgtgatttgcaagaaatacaccctgtagaccttgaatctgcagaaagcagctccgagcccccagaccagctctcaggatgactttgatgtgtactctggcacacccaccaaggtgagaaacatggacagtcaagtggaggatgagtttgatttggaagcttgtttaactgaacccttgagagacttctcagccatgagctaactgcccctggcggcaaggaagagaacagctctccccgactaggtgganggtggcaggcacaaanatgtgtgtgnnttgtactggtgttttctntagnntcattagtcatgcnnatnttttgcttatttntnagaaattaatttatganaggngaantttgntgtt

SEQ ID NO: 258158 - DNA, 1214 bp, Homo Sapiens
aaagagcgaggcctgggtggcgaattcggcacgaggcccaagacccctaataaatttaagaagatagtcgacgttcatgggaccagcaaatcaaactctggaaggtggctctgcatttttgggatcctccagcggaagaaggatgtgatttgcaagaaatacaccctgtagaccttgaatctgcagaaagcagctccgagccccagaccagctctcaggatgactttgatgtgtactctggcacacccaccaaggtgagacacatggacagtcaagtggaggatgagtttgatttggaagcttgtttaactgaacccttgagagacttctcagccatgagctaactgccccctggcggccaggaagagaaacagctcctccccgactaggtggaaggctggccaggcaccaagcatgtgtgtgcacttgtacctggtggtttctctgttagcagtccattagctcatgctgaattatttttgccttactttcttaagaaacattaattttatgtatagtgagtatattttgcatgttttaaattgtaaatggagctaagtccaagaaagtacttgaagctctcttccagcgagcttaattgcgtaatccctgttgtcctccagggtaagctgacacgtctacataactggttttccacaggcatcttcagttattgcttgtcaggtggactgttttggatttaaccatgtaatccatgggaccaattgagagtcagctacttttataggcatcaaagtattctcagacacctttaatatctttatggaaacttaatttttggccttttatcaatatgtcataacagcattctgaagtcagacattgttaaattgagctattaaactaatgagttttatgtaagttatatggtcttaatttggtacttgtaaatagcactagttagactctttagaatactccaagagttagggcagcagagtggagcgatttagaaagaacattttaaaacaatcagttaatttaccatgtaaaattgctgtaaatgataatgtgtacagattttctgttcaaatattcaattgtaaacttcttgttaagactgttacgtttctattgcttttgtatgggatattgcaaaaataaaaaggaaagaaccctctttcactgactggggctgttgccaggtgggccagctgccgtgagagctgacatggttgggagggtcagaaaaa

SEQ ID NO: 258159 - DNA, 633 bp, Homo Sapiens
gcgcaggcagtgctcgcggcggcggcgacggcggcgggaggttcggttgtcgcccgttggccgcgcggcgccgcgctcggcggccgccattgcagcttgttttcacttgctttttaaagacagaaagctcatggtgcaaattgttatttccagtgcgagggctggaggcctggcagaatgggtgctgatggagctacagggggagatcgaggctcgctacagcactggattagctggaaacctcctgggagacctacattacaccactgagggaatccctgtgctgatcgtggggcatcatatcctgtatgggaaaatcatccacctggagaaaccttttgcagtccttgtcaaacacactcctggggatcaggactgtgatgagcttggccgcgagactggcacccggtacctggtgacagcactcatcaaagacaagatccttttcaaaacccgccccaagcccattatcaccagcgtccccaagaaagtatgaaagaacctcggattttccctagagagcggccaactccttggactcgtgctccgctgccacctcgaggacggctcgacggttccctgggaccacaggggggtcctgttctgaacacaggccacccactgggtgtgaac

SEQ ID NO: 258160 - DNA, 1094 bp, Homo Sapiens
  misc_feature (810)..(833): n is a, c, g, or t
taaagaaagcaaaccttttataatatgactttcaatatacagccttactttaattcagtctgattccattacatttttgttattttgtattggtcctaaaaatttaaaaagaattgtatttctatatatagaactgcctgcataaatccacttcaaccttcataaaatggttacattagtgtgtgatcttgcaaaactaataattttcaaacttttgaacttagaatgaaatgtaaatttaatacaaatagtctgactatgtacaagagaaggtaaagttttcaattctcgtattatcagaaacatcataaagaaagctagatttataacacacttctattcctatgtgcatctgaagtatgtacaataaaacaccaacacagctttcatgtgtcaataggggaagtgcaagcaagaatgacttgaagtatccaataaagcaatctctatagaccccaaaatcaggctaaaaactgcaaacagctgactgcatccttgccagttctcaaagaaaaatttcatcactaaaaaataggtgtcaaattcactgaaaaactaagttgggttctttcattaaacctgggaataatgtaacatcaagtatttactatttttgcaagagaaataaaattggcagttccatttttacattacttaagaaaaatttaagagtgtttgaagaactgggacaagacattccaaacctacgacctaaaaatgaagcaagggatacatactgtccttcagcacatttccccacctgatacagagaaatttaccattagaatattagctgtgtgtggcaaggcnnnnnnnnnnnnnnnnnnnnnnnnaatcagacactgtcccagtctgttgacaaggacaaaaaggctctgaataggtcaccatcttcaattctgaataaatttcatatttaagaattctcaaatgcttaaaatggtggtcttttcagctacccatcctaagaagtcaagtacaagcatgcaagtaaattcacaggcacagaggatccatgttaaaaacagttaaggtagctgtgatgcaacaccaacaatttgaatggccctgacacactcaaaatattatcttaa

SEQ ID NO: 258161 - DNA, 1100 bp, Homo Sapiens
aacgacctggatgactacgagaagcacttcacggtcatgaactatgacccggatgtggtgctgaagcaggtgcactgtgaagaggtcatccccgagtttgagaagcaatacccagaatttccctggacggacgtccaggctgagatcttccgggccttcacggagctgttccaggtggcctgtgccaagccaccacccctgggcctctgcgactacccctcatcccgggccatgtatgccgtcgacctcatgctgaagtgggacaacggcccagatggaaggcgggtgatgcagccgcagatcctggaggtgaacttcaaccccgactgtgagcgagcctgcaggtaccaccccaccttcttcaacgacgtcttcagcaccttgtttctggaccagcccggtggctgccacgttacctgccttgtctaggcactcgctgtccccaaaacctgtgcttggggcaggattccaacctcagttctctgagctgcttctgcaaaggcccccatgtccctccccacaccggccctggggctgattgtgggcggtggagcgccagacagaaaaggattccaatgagaacttcaggttaaagtcagatgccacctaccagggtctacagtcaaaatgttggctttttcttatttttaatgtatgggagaaaaatgtaaaattccagttcttttctaattgtgtttctgaaattaggagtcagctgccagcgtttttgtgtggctgcagtgtgcctgggcccagctcacgggcagtgggtggacctaactgcccaggcaggcgagagctacttccagagccttccagtgcatgggagggcagggctaggtgtagcggtgtctcctctttgaaattaagaactatctttcttgtagcaaagctgcacctgatgatgctgcctctcctctctgtgttgtctgggcccttgtttacaagcacgcgttacccttcctgaggggagccatgctctagcccctggagggcctgttgcaggggcagggcgggcccgttgcctttggcagctcctggagagctgtggacatgcagtcccccgaagttcgtgctgcaataaaggccatcttctctta

SEQ ID NO: 258162 - DNA, 891 bp, Homo Sapiens
ggcctgggtggcgaattcggcacgagggggctctatgcgacaggggcccaggaacagcctgaggccaccacccagcaagcccgccttatcacccattccagctcacccagaaccttcaccagcaaacctcctgctgaggtcctggcaggaggccaccgtcttgttaccgtttccttttcgtttgctgagggtcacagaccccaacagggaaatcagtatctgtcttcccagtggttgccctgctcgccgggcactccacggggtcccgcccttgtgtgagatgggccaggatccttcggcaaggggcgcctggggctggggctgattgtgggcggtggagcgccagacagaaaaggattccaatgagaacttcaggttaaagtcagatgccacctaccagggtctacagtcaaaatgttggctttttcttattttttaatgtatgggagaaaaatgtaaaattccagttcttttctaattgtgtttctgaaattaggagtcagctgccagcgtttttgtgtggctgcagtgtgcctgggcccagctcacgggcagtgggtggacctaactgcccaggcaggcgagagctacttccagagccttccagtgcatgggagggcagggctaggtgtagcggtgtctcctctttgaaattaagaactatctttcttgtagcaaagctgcacctgatgatgctgcctctcctctctgtgttgtctgggcccttgtttacaagcacgcgttaccccttcctgaggggagccatgctctaacccctggagggcctgttgcaagggcaaggccggcccgttgccttttggccctcctggaaaagctggggaatgcccgcccccctaatttccggctgcaaaaaagggcatctttctcctt

SEQ ID NO: 258163 - DNA, 1630 bp, Homo Sapiens
  misc_feature (1593)..(1593): n is a, c, g, or t
tcacgggagcgccggcggctgagaatccgcgttgttccgtgttgggggcggcatggagcgggagccgggcgccgcgggagttcgccgggctctgggccgccggctggaggcggtgctggcgagccgcagtgaggccaacgccgtgttcgacatcctggccgtgctgcagtctgaggaccaggaggagatccaggaagcagtccgcacgtgcagccgtcttttcggggccttgctggagcggggagagctgtttgtgggccagctgccctctgaggagatggtcatgacagggtcccagggagccacacggaagtacaaggtgtggatgagacaccgctatcacagctgctgcaatcgcttgggagagctcctgggccacccctcctttcaggtcaaggagctggccctcagcgcactcctgaagttcgtgcagctggaaggagcgcaccccctggagaagtccaagtgggaaggcaactacctgttcccccgagagctcttcaagttggtggtgggaggcctgctgtctcctgaggaggaccagagcctgctcctgtcccagttccgggagtacctggactacgacgacacccgctaccacaccatgcaggcagccgtggatgccgtggcccgggtcactggccagcaccccgaggtgccccccgccttttggaacaatgccttcacgctgctgtctgccgtgagcctgccccgccgggagcccaccgtctccagcttctatgtgaagcgggcggagctgtgggacacctggaaggttgctcacctgaaggagcacaggagggttttccaggccatgtggctcagcttcctcaagcacaagctgcccctcagcctctacaagaaggtgctgctgattgtgcatgacgccatcctgccgcagctggcgcagcccacgctcatgatcgacttcctcacccgcgcctgcgacctcgggggggccctcagcctcttggccttgaacgggctgttcatcttgattcacaaacacaacctggagtaccctgacttctaccggaagctctacggcctcttggacccctctgtctttcacgtcaagtaccgcgcccgcttcttccacctggctgacctcttcctgtcctcctcccacctccccgcctacctggtggccgccttcgccaagcggctggcccgcctggccctgacggctccccctgaggccctgctcatggtcctgcctttcatctgtaacctgctgcgccggcaccctgcctgccgggtcctcgtgcaccgtccacacggccctgagttggacgccgacccctacgaccctggagaggaggacccagcccagagccgggccttggagagctccctgtgggagcttcaggccctccagcgccactaccaccctgaggtgtccaaagccgccagcgtcatcaaccaggccctgtccatgcctgaggtcagcatcgcgccactgctggagctcacggcctacgagatctttgagcgggacctgaagaagaaggggcccgagccggtgccactggagtttatcccaggcgccagggcctgctgggacggccgggtgaactctgtgcccagcacttnacgctcagctgaccctggcccacctgtgaataatatc

SEQ ID NO: 258164 - DNA, 1044 bp, Homo Sapiens
  misc_feature (242)..(285): n is a, c, g, or t
cgtaatagcgagcaaggcgggctggagcacaagggtgggaccatgacgccccgcgctaccgaggtagtgtgtgtgggcgcgcgggctgagcggagggcggattgcagagggtatggacggtaggtgggattcgcgtcgggggtgtagataaagcggaggaagagtaggggaaacgggagaacagggaacgctgtcagcgctggtggtgtggacgggcataggggaagccgggacgccgctcnnnnnnnnnnnnnnnnnnnnnnnnnnnnnnnnnnnnnnnnnnnnccacaaggggtgggaagccctcctgtgtccttcaggggaggcagccttccaggtgtcccacagctccgcccgcttcacatagaagctggagacggtgggctcccggcggggcaggctcacggcagacagcagcgtgaaggcattgttccaaaaggcggggggcacctcggggtgctggccagtgacccgggccacggcatccacggctgccctgcatggtgtggtagcgggtgtcgtcgtagtccagctactcccggaactgggacaggagcaggctctgggtcctcctcaggagacagcaggcctcccaccaccaacttgaagagctctcgggggaacaggtagttgccttcccacttggacttctccagggggtgcgctccttccagctgcacgaacttcaggagtgcgctgagggccagctccttgacctgaaaggaggggtggcccaggagctctcccaagcgattgcagcagctgtgatagcggtgtctcatccacaccttgtacttccgtgtggctccctgggaccctgtcatgaccatctcctcagagggcagctggcccacaaacagctctccccgctccagcaaggccccgaaaagacggctgcacgtgcggactgcttcctggatctcctcctggtcctcagactgcagcacggccaggatgtcgaacacggcgtcctcgtgccgaattcgccacgcagccccggcgggggggagtgttgacgggggcgcgcgtttaattaacgtttta

SEQ ID NO: 258165 - DNA, 1455 bp, Homo Sapiens
  misc_feature (33)..(33): n is a, c, g, or t
  misc_feature (238)..(238): n is a, c, g, or t
  misc_feature (240)..(240): n is a, c, g, or t
  misc_feature (281)..(281): n is a, c, g, or t
ttgggagaagaagggggactctggaagacagtnatgcggtcggagattgtccaggccccgggccgggaagtgggcggtgtctgggtgggcgggaccagcgccggggcggggctacggactcaggctgggagaacctccccctagcccgcgcgagggcggcacccgcggaggtcccggggggcgctgggcagtttggggcgcggggattggacaagaggccgactgaaggcggagcaangngtaaggccgggcggggcgtggcctcagagggcgtctgactnctcgccctgggcctggctctgctgcatttgggcctgcatcttctccagcatctcttgcatgcggcgcactcttcgtctttctcgcggatcagcttctcggtgtccgccagaggcagcatgggcagcgggatctctgttgcgctctggcgggaaaacttactgcggctggctcgatcgcatgatcccacgactgcaaaagggatgctttccttcatctctgcatcctgcctcttgaagtcttcatcttcatcagagttacattcggggaactggtagatgttgatctcctcttccttcaactgatcccggatcttctgctttagggcctgggtttcctctttcaggtcctgcaggtgtgtctgcaccagcatccatcgcaggttcaggaaatcgcagtgatgtgggttctccacctccacggtccccccaggagtagcggcgtcccctcaccggccggttcccgccatccctcaccacctcgcatgatcccacgactgcaaaagggatgctttccttcatctctgcatcctgcctcttgaagtcttcatcttcatcagagtcacattcggggaactggtagatgtggatctcctcttccttcaactgatcccggatcttctgcttgagggcctgggtttcctggggcatcagagcatccgctttgccaataactgggatgatgttgactttctcgtgtactgcccggaggaaggccacatctaggggccggagcccccggccgaagggtgagatgaagtagaggcagcagtggactcgggagtcctggatgttcttccggttcaggccactctcatccctaaggtactgctcaaattgctcctcgatgaatttcaccaccggaagccagcagtcagagcagtccactgagtccccaaagccaggtgtgtccacaagggtcagcttcactttcacacccccttcctcaatctctacgccccggcgctcaatggccagggtctgtgtcaagcgagcactggcctctggcacctggcgatcctcatagaggttggtgaggaagaggctgttgatgagggtggatttccctaggcctgactcccctgccaccattagcgtgaagtcaaaccccttcttgacagacttgcggtgcagctggttggggagagcagcaaaacccacgtactccttgtccatg

SEQ ID NO: 258166 - DNA, 1031 bp, Homo Sapiens
  misc_feature (882)..(882): n is a, c, g, or t
  misc_feature (907)..(907): n is a, c, g, or t
  misc_feature (915)..(915): n is a, c, g, or t
  misc_feature (931)..(931): n is a, c, g, or t
  misc_feature (966)..(966): n is a, c, g, or t
  misc_feature (971)..(971): n is a, c, g, or t
  misc_feature (983)..(983): n is a, c, g, or t
  misc_feature (991)..(991): n is a, c, g, or t
  misc_feature (997)..(997): n is a, c, g, or t
  misc_feature (1008)..(1008): n is a, c, g, or t
  misc_feature (1017)..(1017): n is a, c, g, or t
tggtaccggccggaattaccgggatatcgtcgaccacgcgtcgggcctccgcgcggtctctggcggagtcggggaatcggatcaaggcgagaggatccggcagggaaggagcttcggggccgggggttgggccgcacatttacgtgcgcgaagcggagtggaccgggagctggtgacgatggcggggccgcagcccctggcgctgcaactggaacagttgttgaacccgcgaccaagcgaggcggaccctgaagcggaccccgaggaagccactgctgccagggtgattgacaggtttgatgaaggggaagatggggaaggtgatttcctagtagtgggtagcattagaaaactggcatcagcctccctcttggacacggacaaaaggtattgcggcaaaaccacctctagaaaagcatggaatgaagaccattgggagcagactctgccaggatcgtctgatgaggaaatatctgatgaggaagggtctggagatgaagattcagagggactgggtctggaggaatatgatgaggacgacctgggtgctgctgaggaacaggagtgtggtgatcacagggagagcaagaagagcagaagccactctgcaaaaacaccgggcttcagtgtccagagtatcagtgactttgagaaatttaccaagggaatggatgaccttgggagcagtgaggaggaggaagacgaagagagtggcatggaagaaggggatgacgcggaagactcccaaggcgagagtgaggaagacagggctggagatagaaacagtgaggatgatggtgtggtgatgaccttctctagtgtcaaagtttctgaggaagtggagaaaggaagagccgtgaagaaccagatagcactgtgggnccagctcttggaaggaaggatcaanctacaaanagctctgttgaccacnaccagcttcctccaccagatgttttcccattgttnaaggncaaaggtggccnagattttncagtgncctgaaaattntcacaaggncttaagcattgttg

SEQ ID NO: 258167 - DNA, 1037 bp, Homo Sapiens
  misc_feature (4)..(4): n is a, c, g, or t
  misc_feature (12)..(12): n is a, c, g, or t
  misc_feature (50)..(50): n is a, c, g, or t
  misc_feature (53)..(53): n is a, c, g, or t
  misc_feature (74)..(75): n is a, c, g, or t
  misc_feature (88)..(88): n is a, c, g, or t
  misc_feature (109)..(109): n is a, c, g, or t
  misc_feature (115)..(115): n is a, c, g, or t
  misc_feature (117)..(117): n is a, c, g, or t
  misc_feature (188)..(188): n is a, c, g, or t
  misc_feature (196)..(196): n is a, c, g, or t
  misc_feature (198)..(198): n is a, c, g, or t
  misc_feature (686)..(686): n is a, c, g, or t
  misc_feature (689)..(689): n is a, c, g, or t
  misc_feature (770)..(770): n is a, c, g, or t
  misc_feature (806)..(806): n is a, c, g, or t
  misc_feature (958)..(959): n is a, c, g, or t
  misc_feature (963)..(963): n is a, c, g, or t
  misc_feature (994)..(994): n is a, c, g, or t
  misc_feature (1025)..(1025): n is a, c, g, or t
  misc_feature (1033)..(1033): n is a, c, g, or t
  misc_feature (1035)..(1035): n is a, c, g, or t
cttntaactggntcaccctggccctatgctcgacctccctcccctggaantgnaccttgtttgccctgctctcnnagcctccgacctnctgttcatcttctgcttcctnccaaanangtgcccctggagaaacgggcgccctctatcgccctggggttccgtgatgcgctgatctgctcagccccctngcccctcncncttctcggtgtcgctcgtggccaggacccaccctctggagacaggctcagcagcctgcgccgcctgggcctagtctacttcctctacctcttcctgttctcgggcctggagtacacgctgagcttcctaacacaccagcgcttccagttcagtagcctacagcaggggaagatgtttttcctcatcggcctcaccatggccaccatccagggtgcctatgcccggcggatccaacctggcggggaagttgctgccgtgaagcgggccctcctgctgctggtgcccgccttcctcctcatcggctggggacgttctctgcccgtgctgggcctggggctgctgctctactcctttgccgccgccgttgtggtgccctgcctgtcctccgtggtcgctggctatggctcaccagggcagaagggcacggtcatgggtacactgcgcagcctaggtgctctggccagggccgcggggcccctggtggccgnttnagtgtactggctggccggggcccaggcctgcttcaccacgtggtccgggctctttttgctccccttcttcctcctgcagangctgagttacccggcacagacgctcaaggctgagtngctgagccactgtgcccaggctgtgggcaccaggcagagtgggagcctaggtcaggcccctgcccactgcctgacccccaccccccgccagtccagggagaccctgtgggtgggggccggcccctaagcaggaagctcaggcagctcctccnnactnacttactccttcagtgactccgggctgcagnactccaaggctgtctagggcttctgtttgtnttttaaantntg

SEQ ID NO: 258168 - DNA, 1663 bp, Homo Sapiens
  misc_feature (53)..(96): n is a, c, g, or t
ggcctgggtggcgaattcggcacgagggcatcttcagcgggcgagtccccggnnnnnnnnnnnnnnnnnnnnnnnnnnnnnnnnnnnnnnnnnnnnggcttttgggggatcactgtcctctctcggcagcagaatgagccggcaggtggtccgctccagcaagttccgccacgtgtttggacagccggccaaggccgaccagtgctatgaagatgtgcgcgtctcacagaccacctgggacagtggcttctgtgctgtcaaccctaagtttgtggccctgatctgtgaggccagcgggggaggggccttcctggtgctgcccctgggcaagactggacgtgtggacaagaatgcgcccacggtctgtggccacacagcccctgtgctagacatcgcctggtgcccgcacaatgacaacgtcattgccagtggctccgaggactgcacagtcatggtgtgggagatcccggatgggggcctgatgctgcccctgcgggagcccgtcgtcaccctggagggccacaccaagcgtgtgggcattgtggcctggcacaccacagcccagaacgtgctgctcagtgcaggttgtgacaacgtgatcatggtgtgggacgtgggcactggggcggccatgctgacactgggcccagaggtgcacccagacacgatctacagtgtggactggagccgagatggaggcctcatttgtacctcctgccgtgacaagcgcgtgcgcatcatcgagccccgcaaaggcactgtcgtagctgagaaggaccgtccccacgaggggacccggcccgtgcgtgcagtgttcgtgtcggaggggaagatcctgaccacgggcttcagccgcatgagtgagcggcaggtggcgctgtgggacacaaagcacctggaggagccgctgtccctgcaggagctggacaccagcagcggtgtcctgctgcccttctttgaccctgacaccacatcgtctacctctgtggcaagggtgacagctcaatccggtactttgagatcacttccgaggcccctttcctgcactatctctccatgttcagttccaaggagtcccagcggggcatgggctacatgcccaaacgtggcctggaggtgaacaagtgtgaaatcgccaggttctacaagctgcacgagcggaggtgtgagcccattgccatgacagtgcctcgaaagtcggactgttccaggaggacctgtacccacccaccgcagggcccgaccctgccctcacggctgaggagtggctggggggtcgggatgctgggcccctcctcatctccctcaaggatggctacgtacccccaaagagccgggagctgagggtcaaccggggcctggacaccgggcgcaggagggcagcaccagaggccagtggcactcccagctcggatgccgtgtctcggctggaggaggagatgcggaagctccaggccacggtgcaggagctccagaagcgcttggacaggctggaggagacagtccaggccaagtagagccccgcagggcctccagcagggtcagccattcacacccatccactcacctcccattcccagccacatggcagagaaaaaaatcataataaaatggctttattttctggcaaaagggagaacaagaaaaaccaacacaagcgtgt

SEQ ID NO: 258169 - DNA, 675 bp, Homo Sapiens
  misc_feature (174)..(199): n is a, c, g, or t
  misc_feature (205)..(205): n is a, c, g, or t
  misc_feature (208)..(208): n is a, c, g, or t
  misc_feature (227)..(227): n is a, c, g, or t
  misc_feature (232)..(233): n is a, c, g, or t
  misc_feature (241)..(241): n is a, c, g, or t
  misc_feature (247)..(247): n is a, c, g, or t
cttcatgggaacaatctgttggagcagggggtcagttctctgctgggaatctacccctttctggaggagaaacccattccaccttaataactttattgtaatgtgagaaacacaaaacaaagtttacttttttgactctaagctgacatgatattagaaaatctctcgctctcnnnnnnnnnnnnnnnnnnnnnnnnnnggctanttnagttgtggtcctaaaaaanaaaanntgatgganaaaaanagggttgctggggggaaaagcgtgggcaaaatttccccaccaaaaaaccctgatcttcaggcgggtctcaggagcttctaaaaatccgcatggctctcctgagagtggacagaggagaggagagggtcagaaatgaacgctcttctatttcttgtcattaccaagccaattacttttgccaaatttttctgtgatctgccctgattaagatgaattgtgaaatttacatcaagcaattatcaaagcgggctgggtcccatcagaacgacccacatctttctgtgggtgtgaatgtcattaggtcttgcgctgacccctgagcccccatcactgccgcctgatggggcaaagaaacaaaaaacatttcttactcttctgtgttttaacaaaagtttataaaacaaaataaatggagcatatgttttcta

SEQ ID NO: 258170 - DNA, 1530 bp, Homo Sapiens
  misc_feature (1366)..(1396): n is a, c, g, or t
  misc_feature (1433)..(1468): n is a, c, g, or t
  misc_feature (1504)..(1504): n is a, c, g, or t
tttcgggccccaatacatcccccaccacgaggcctgggtggcgaattccgcacgaggcggcttcgacgcgggcagccgggtcccttttctttgacagatggggaaaccgaggcccggccggctgccggggctcctcgcacctaccccagcaactcaaattcaccacctcggactcctgcgaccgcatcaaagacgaatttcagctactgcaagctcagtaccacagcctcaagctcgaatgtgacaagccggccagtgagaagtcagagatgcagcgtcactatgtgatgtactacgagatgtcctacggcttgaacatcgagatgcacaaacaggctgagatcggcaaaaggctgaacgggatttgtgcccaggtcctgccctacctctcccaagagcaccagcagcaggtcttgggagccattgagagggccaagcaggtcaccgctcccgagctgaactctatcatccgacagcagctccaagcccaccagctgtcccagctgcaggccctggccctgcccttgaccccactacccgtggggctgcagccgccttcgctgccggcggtcagcgcaggcaccggcctcctctcgctgtccgcgctgggttcccaggcccacctctccaaggaagacaagaacgggcacgatggtgacacccaccaggaggatgatggcgagaagtcggattagcagggggccgggacagggaggttgggaggggggacagaggggagacagaggcacggagagaaaggaatgtttagcacaagacacagcggagctcgggattggctaaactcccatagtatttatggtggccgccggcgggggccccagcccagcttgcaggccacctctagctttcttcctaccccattcccggcttccctcctcctcccctgcagcctggttaggtggatacctgccctgacatgtgaggcaagctaaggcctggagggtcagatgggagaccaggtcccaagggagcaagacctcgcgaagcgcagcagccccggcccttcccccgttttgaacatgtgtaaccgacagtctgcctgggccacagccctctcaccctggtactgcatgcacgcaatgctagctgcccctttcccgtcctgggcaccccgagtctcccccgaccccgggtcccaggtatgctcccacctccacctgccccactcaccacctctgctagttccagacacctccacgcccacctggtcctctcccatcgcccacaaaagggggggcacgagggacgagcttagctgagctgggaggagcagggtgagggtgggcgacccaggattccccctccccttcccaaataaagatgagggtactaaagttgtcttggnnnnnnnnnnnnnnnnnnnnnnnnnnnnnnncagtatactagcttgtcttttaagaaaggggatattnnnnnnnnnnnnnnnnnnnnnnnnnnnnnnnnnnnncaacacccacacctgtgtctgtatatagtcagcttntctcgtgttcaatcgtctgatctcta

SEQ ID NO: 258171 - DNA, 861 bp, Homo Sapiens
tgcctttctgcagaaaaggaaactgaggctcagcaagaaccaccgcccagccagagccaaggtcacagagcacgtccgtggcacgcgtccaggtcgtgccacagcagggccggcggcttcgacgcgggcagccgggtcccttttctttgacagatggggaaaccgaggcccggccggctgccggggctcctcgcacctaccccagcaactcaaattcaccacctcggactcctgcgaccgcatcaaagacgaatttcagctactgcaagctcagtaccacagcctcaagctcgaatgtgacaagttggccagtgagaagtcagagatgcagcgtcactatgtgatgtactacgagatgtcctacggcttgaacatcgagatgcacaaacaggctgagatcgtcaaaaggctgaacgggatttgtgcccaggtcctgccctacctctcccaagagcaccagcagcaggtcttgggagccattgagagggccaagcaggtcaccgctcccgagctgaactctatcatccgagtatgtatggggacctgggcgggtgggcgggggacaggtgggccccaggcagctaatgttcccctcccccgccctgcagcagcagctccaagcccaccagctgtcccagctgcaggccctggccctgcccttgaccccactacccgtggggctgcagccgccttcgctgccggcggtcagcgcaggcaccggcctcctctcgctgtccgcgctgggttcccaggcccacctctccaaggaagacaagaacgggcacgatggtgacacccaccaggaggatgatggcgagaagtcggattagcagggggccgggacggggaggttgggagggg

SEQ ID NO: 258172 - DNA, 140 bp, Homo Sapiens
gctaacacccacacctgtgtctgtatatagtcagcttatctcgtgttcaatcgtctgatctctacagagagaagtggaaaatgctgtatcaagggtgggcttagctgtgcctttccaataaagatgtgataagcttcaaa

SEQ ID NO: 258173 - DNA, 1096 bp, Homo Sapiens
  misc_feature (8)..(8): n is a, c, g, or t
  misc_feature (15)..(15): n is a, c, g, or t
  misc_feature (20)..(20): n is a, c, g, or t
  misc_feature (22)..(23): n is a, c, g, or t
  misc_feature (28)..(28): n is a, c, g, or t
  misc_feature (33)..(33): n is a, c, g, or t
  misc_feature (38)..(39): n is a, c, g, or t
  misc_feature (48)..(48): n is a, c, g, or t
  misc_feature (53)..(53): n is a, c, g, or t
  misc_feature (61)..(61): n is a, c, g, or t
  misc_feature (68)..(68): n is a, c, g, or t
  misc_feature (75)..(75): n is a, c, g, or t
  misc_feature (82)..(82): n is a, c, g, or t
  misc_feature (88)..(88): n is a, c, g, or t
  misc_feature (101)..(101): n is a, c, g, or t
  misc_feature (104)..(104): n is a, c, g, or t
  misc_feature (108)..(108): n is a, c, g, or t
  misc_feature (121)..(121): n is a, c, g, or t
  misc_feature (161)..(161): n is a, c, g, or t
  misc_feature (214)..(214): n is a, c, g, or t
  misc_feature (222)..(222): n is a, c, g, or t
  misc_feature (241)..(241): n is a, c, g, or t
  misc_feature (272)..(272): n is a, c, g, or t
  misc_feature (287)..(287): n is a, c, g, or t
  misc_feature (305)..(346): n is a, c, g, or t
  misc_feature (398)..(398): n is a, c, g, or t
  misc_feature (425)..(425): n is a, c, g, or t
  misc_feature (592)..(592): n is a, c, g, or t
  misc_feature (1051)..(1051): n is a, c, g, or t
acccggangggattnccctnanngggancgccntgatnnagagcaccnagatngggagcgncccaggngaaagtnaatcganccaggngtgacccggacgngantcgncccggagcgagangtgaccaggaggaaatggcggcagctgggctcaccgtaantgtaaccaacagcaatgaaaagaacgaccttcatgttccctcccagcagggcngcagtganccagttgtccaagccctgncccaggttgttgaagaggtcataggggttcnacagtcttttcaganactcatatttaaggttcnnnnnnnnnnnnnnnnnnnnnnnnnnnnnnnnnnnnnnnnnnctcaaacacctgaacaggtgtcagatttgaagtcttatgatgatggcagaantctcaccattttcgatgacgctcatgngcagtcttccctcgctaggaaaatctctgaaggaaatggaaacaccgttgtcagcacttggaatacaagatggttgccgggtcatgttaattgggaaaaagcacagtccacaggaagaggttgaactaaagaagttgaaacatttggagaagtctgtggagaagatngctgaccagctggaagagttgaataaagagcttactggaatccagcagggttttctgcccaaggatttgcaagctgaagctctctgcaaacttgataggagagtaaaagccacaatagagcagtttatgaagatcttggaggagattgacacactgatcctgccagaaaatttcaaagacagtagattgaaaaggaaaggcttggtaaaaaaggttcaggcattcctagccgagtgtgacacagtggagcagaacatctgccaggagactgagcggctgcagtctacaaactttgccctggccgagtgaggtgtagcagaaaaaggctgtgctgccctgaagaatggcgccaccagctctgccgtctctggagcggaatttacctgatttcttcagggctgctgggggcaactggccatttgccaattttcctactctcacactggttctcaatgaaanaatagtgtctttgtgattttgagtaaagctcctatctgttttcgc

SEQ ID NO: 258174 - DNA, 867 bp, Homo Sapiens
  misc_feature (281)..(281): n is a, c, g, or t
  misc_feature (831)..(831): n is a, c, g, or t
atgaatcggagccaggaggtgacccgggacgaggagtcgacccgaggcgaggaggtgaccagggaggaaatggcggcagctgggctcaccgtgactgtcacccacagcaatgagaagcacgaccttcatgttacctcccagcagggcagcagtgaaccagttgtccaagacctgggcccaggttgttgaagaggtcataggggttccacagtcttttcagaaactcatatttaagggaaaatctctgtaaggaaatgggaaacaccgttgttcagcacttnggaatacaagatggtttgcccggtcatgttaattgggaaaaagaacagtccacaggaagaggttgaactaaagaagttgaaacatttggagaagtctgtggagaagatagctgaccagctggaagagttgaataaagagcttactggaatccagcagggttttctgcccaaggatttgcaagctgaagctctctgcaaacttgataggagagtaaaagccacaatagagcagtttatgaagatcttggaggagattgacacactgatcctgccagaaaatttcaaagacagtagattgaaaaggaaaggcttggtaaaaaaggttcaggcattcctagccgagtgtgacacagtggagcagaacatctgccaggagactgagcggctgcagtctacaaactttgccctggccgaagtgaggtgtagcagaaaaaggctgtgctgccctgaagaatggcgccaccagctctgccgtcttctgggagcgggaattttacctgatttctttcaggggctgcctgggggggcaactggcccatttgccaaattntccctactctcacactgggttctcaatgaaaaaaat

SEQ ID NO: 258175 - DNA, 2059 bp, Homo Sapiens
  misc_feature (185)..(185): n is a, c, g, or t
  misc_feature (539)..(539): n is a, c, g, or t
  misc_feature (1671)..(1671): n is a, c, g, or t
tcccgggatggaggctagggatgggtgctgaagtatcaggctctggctctagctttagctctggcactggaactgcgtcggagtctgggtctgagtctggcagcccgaagcctggacaccttttcttgattctctaggcgggggctgcctgcgtccaagcagctggtttgcagcgttccaacgcngggagggagttcccttacctggggtccagtctgtaaagttgtcgccgctttctagggaccccgccccaccggctgggactcttccatgcagttgaaactggttgacaaccattaacctgggttgcaactacaggtggcactggaagcagactggttcctggacatgcccggaggaaggaggggccctagtcggcaacagctaagccgttcagctttaccttctttgcagactttggttggtggaggctgtggcaatggaacaggcttgagaaacaggaatggtagtgctattggccttccagtcccacctatcacagccttaatcaccccaggtcctgttcgtcatgcccaaantcctgacttgcctgggaatggaagcctactctttgaatccctttttttcatctacctgttggttgctcttttcatccagtacatcaacatttataaaacagtgtggtggtatccttacaatcatcctgcttcttgtacatcactgaattttcatctcattgaatatcatctggcagcattcatcacagtgatgcttgcgaggaggcttgtatgggctctcatctcagaggctactaaggcaggtgcagcatcaatgattcactacatggttctgatatcagctcgcttggtactactcactttgtgtggatgggtactttgttggaccctcgtcaatctctttcgaagccattcagtcctcaatctccttttccttggctacccgtttggtgtttatgttcctctttgctgttttcatcaagatagtagagcacatcttcttctcacagactacaactatgtggttcagcacgaggcagtagaggaaagtgcctcgactgtgggaggcttggccaaatccaaagactttctctccttgttgctggagtcgctaaaagaacagtttaataatgccacacccatccccacccacagttgtcccctatctccagacctcattcgcaatgaagtagaatgtctgaaagcagatttcaaccacagaatcaaggaggttctcttcaactccctcttcagtgcctactatgttgcatttctccccctgtgttttgtgaagagtacccagtactatgacatgcgctggtcatgtgagcacctcattatggtgtggatcaatgcttttgtcatgctcaccacgcaactgttgccatccaaatactgtgatttgctacataaatcagctgctcacctgggcaagtggcagaagttggaacatgggtcctacagcaatgctccacagcacatttggtcagaaaatacaatatggcctcaaggggtgctggtgcggcacagcagatgtttatatagagccatggggccttacaacgtggcagtgccttcagatgtatctcatgcccgcttttatttcttatttcatcgaccattaaggctgttaaatctgctcatccttattgagggcagtgtcgtcttctatcagctctattccttgctgcgngtcggagaagtggaaccacacactttccatggctctcatcctcttctgcaactactatgttttatttaaacttctccgggacagaatagtattaggcagggcatactcctacccactcaacagttatgaactcaaggcaaactaagctgcctctcaacaatgagggagaactcagataaaaatattttcatacgttctatttttttcttgtgatttttataaatatttaagatattttatattttgtatactattatgttttgaaagtcgggaagagtaagggatattaaatgtatccgtaaacaaggtgatgtgatctttcatgtgttagtatattcgaataatatacatatgagaggtatgcctgtccagtaaagagattgatttg

SEQ ID NO: 258176 - DNA, 961 bp, Homo Sapiens
  misc_feature (12)..(12): n is a, c, g, or t
  misc_feature (44)..(44): n is a, c, g, or t
  misc_feature (51)..(51): n is a, c, g, or t
  misc_feature (56)..(56): n is a, c, g, or t
  misc_feature (726)..(786): n is a, c, g, or t
taacttgggaanttttcaaaaccctccccccaaactcctaagcncccacanggcanttgggcacctccagccttcctcccctactgatcccagcccgccacatccatcctccttccatggaatgtgggccagtctaaagacttcctgtctggcaaagtattatttcaaacaactaagaggaaaatctttggaagcagaagtggaaacacaggaaaagtggcagcaaaaccctcagcctcaggatagtagcttattcaaaagtatatttaaatgtcacagggtaaaatagaccagctgagtccgtatcttagaaaggaagcctactgctttctcctggtaggcaacaaagagaaccccacctaggactttaacccactcttttcccaatgtattccaatactattagccagctgaactaaaagagaatgggtgctggtaggcaactccattgatctccctttctttagcaataagtactggccagctgagggctaaagataatgaggattgaaagaaaagcagacataccaaaggtactgtgtcaagtaatacatgagatgtgttcataaactgaatgagttattccagagccatacaaacaaatcaatctctttactggacaggcatacctctcatatgtatattattcgaatatactaacacatgaaagatcacatcaccttgtttacggatacatttaatatcccttactcttcccgactttcnnnnnnnnnnnnnnnnnnnnnnnnnnnnnnnnnnnnnnnnnnnnnnnnnnnnnnnnnnnnnaatagaacgtatgaaaatttttatctgagttctccctcattgttgagaggcagcttagtttgccttgagttcataactgttgagtgggtaggagtatgccctgcctaatactattctgtcccggagaagtttaaataaaacatagtagttgcagatgaggatgagagccatggaa

SEQ ID NO: 258177 - DNA, 1479 bp, Homo Sapiens
gggagttgtttctgtaacagcagaaagtgcactcactaggagtagtcagaattcaaaatgctcaagagaaagccatccaatgtttcagagaaggagaaacatcaaaaaccaaagcgaagcagcagttttgggaatttcgatcgttttcggaataattctttatcaaaaccagatgattcaactgaggcacatgaaggagatcccacaaatggaagtggagaacaaagtaaaacttcaaataatggaggcggtttgggtaaaaaaatgagagctatttcatggacaatgaagaaaaaagtgggtaaaaagtacatcaaagccctttctgaggaaaaggatgaggaagatggagagaatgcccacccatatagaaacagtgaccctgtgattgggacccacacagagaaggtgtccctcaaagccagtgactccatggatagtctctacagtggacagagctcatcaagtggcataacaagctgttcagatggtacaagtaaccgggacagctttcgactggatgacgatggcccctattcaggaccattctgtggccgtgccagagtgcatacggatttcacgccaagtccctatgacactgactccctcaaaatcaagaaaggagacatcatagacattatttgcaaaacaccaatggggatgtggacaggaatgttgaacaataaagtgggaaacttcaaattcattttatggtggatgtcatctcagaaagaggaagcagcctcccaagaaaataaaggcaaaccggaagaataacagcaaaaaatccaagactctgcaggagttcctagagaggattcatctgcaggaatacacctcaacacttttgctcaatggttatgagactctagaagatttaaaagatataaaagagagtcacctcattgaattaaatattgaaaacccagatgacagaagaaggttactatcagctgctgaaaacttccttgaagaagaaacacacatctaggtattttgcccaatttgcagatgaggcaaaaatttggagatgaatttcaaagaagtcgaacagctagatgagtgcagagatggagatttaatcaaagggagtctgctgtaaaactcctccacatgtgcaaattggccaatatgaaagcaatgaatatttgaaaattgaagttttctgctacttcaccaattttctcaagggctttgattcagttttcctatatcagaaggtaaaaggcgagaggcttcccatggctgccctgtcaacagggtttgtggagagaaggggctgggaaccctgggcaagcagcactttcagcaataaacagtatcctcaggggcccacagagggaagatggtttcagtgccaaaggcttgagtccccttaattttttcattccacttcactcatcacctgtctcctttctatgctagcaaaagaacaattattcatagatggtaaaattatttatagagccggtgtaatta

SEQ ID NO: 258178 - DNA, 1455 bp, Homo Sapiens
  misc_feature (34)..(34): n is a, c, g, or t
  misc_feature (164)..(164): n is a, c, g, or t
  misc_feature (1200)..(1315): n is a, c, g, or t
ctggcctgtgtgggaccctgtgatatttctgggnttgaccttgtttttcaaactgcagctgcacctgctttgggggctgtgaatgtgtcctggggctgcacctgtggctgcacctgcttaagcggctctgcctcctgctcaaactgcacctgccttgggccctngtgaatgtgcctgtggctgtacctgtggctgcacctgctcctgtggctctgcctcctgctgcagctgtggctgcacctgcttctgttgcagcactaagtgctctggagaggtctgtgtttgcgcctgcttctgcagctttggctgcacctgggtgtctgtggatggtatccgcggctgagtctgtgactgcacctgggcctggacctgcaggacccgtggctggaatcgtggcagcacttgggcttccagggcctcaggcagcaggtctggtgtctgtgtctgtttcggtactgtcatccgggcctgcggctgggccttcacctgtaactgccctggaggttccttctctgtgggctcttctgagctcctcaatctctttgctggcagctcggacgcctcacaaggctcaggctcaggtgctggagtgcgtttttccttggcgatgtcctctgggcagggcggtaaatcttggtcttctggtgtgtccatccggggctctgcggcttcctcagacccctctggggggtctgacttgtcttccacaggcattgtctgagaagaagaatcctttcgattgggggtggtagaggaggaggtccgggcctgtttctgggggttccgtcctgaaaggttgaactgggaagggttcatggggaccccaacaggaggaggtcccagcaaggactggcgagtggcctggggaaagaactgttgcaaatttggagtggccagttgtgggggtgtgaggctgggggctgcgaggcctggggatgccatgccatagcctcggaggttacccagtgttgctgtgggcatggtgagaccggcagtgtcatacgtggctggtggcattgcaaactggtccagtccttgcaactgctgtaaaagcaaagctctctgcagcatggagccgttgaggagggaggctgagttggtgccctggagattcagaagcggctgctgtggctgctgcggggggagcccccggctgacagccatgggcaacggggcctgtggtggggactgctggagcannnnnnnnnnnnnnnnnnnnnnnnnnnnnnnnnnnnnnnnnnnnnnnnnnnnnnnnnnnnnnnnnnnnnnnnnnnnnnnnnnnnnnnnnnnnnnnnnnnnnnnnnnnnnnnnnnnnaacatggtggctcgcctccccgcgcgccctcaacgctcaagtcgcccccacggatgggccggccccgctagcccccacgcctcggccgggcggctccggcccgcgggctcccggcctccccgctgctactccggggcctg

SEQ ID NO: 258179 - DNA, 1851 bp, Homo Sapiens
tggtacaggtcccggaatgtcgggatatcgtcgacccacgcgtcgcatggcggccggccacgcgcgccagttccacgccatggccacgcgcacccgccagcagtacctgcaagacctggccaccaacgaggtgaccactacgtcgctggactcggcttcacgcttcggcctgccctccctgggtgggaggcgccgggcggcccctcggggcccaggcgccgagctgcaggcagcgggctcactggtgtggggagtgcgcgcggcgcccggggcgcgggtcgccgccggggctcaggcgagcggccccgaaggcatcgaggtgccctgcctgctgggcatctcggccgaagattctggtgctggtggccccgcgcgacgccccgcgtagtgttcaaatgcccctgtcgcgacgtgctggcctggaccttctccgagcagcagctggacctgtaccacggccgcggggaggcgatcacgctgcgcttcgacgggtcccccggccaagccgtgggcgaggtggtggcgcgcctgcagctggtgagccgtggctgcgagacccgcgagctggcgctgccccgcgacggtcaaggccgcctgggcttcgaggtggacgccgagggattcgtcacgcacgtggagcgcttcacattcgccgagacggcggggctgcggcccggggcgcgcctcctgcgcgtgtgcggccagacgctgcccagcctccggcccgaggccgctgcccagctcctgcgctcggcgcccaaggtctgcgtcaccgtcctgccccccgacgagagcggccggccccgcaggagtttttcggagctgtacacgctgtcgctgcaggagcctagccggcggggggccccagatcctgtgcaggatgaggtccagggggtgaccctgctgcccaccacaaagcagctgctgcacctgtgcctgcaagatggtggcagtcctccagggcctggggatctggccgaggagaggactgagttcctgcacagccagaactcgctgtcaccacgcagctctctgtcggatgaggccccagtcctgcccaacaccaccccggacctcctcctggccaccacagccaagccatcagtacccagtgctgacagtgagacacccctgacccaggacaggccaggcagtcccagtggctctgaggacaagggcaacccggcgccggagctgagggcctcctttctgccacgtaccttgtctctgcggaactccatcagcaggatcatgtcggaggcaggcagtgggaccctggaggacgagtggcaggccatctcggagattgcctctacttgcaacaccattctggagctcgctgtcccgagagggacagcccatcccagagagtggagaccctaagggaactcaaaaatctgatgctgagccagagcctgggaacctctcagaagaaggtctctcacttggagtccatgctcaggaagctgcaggaggacctgcagaaggagaaggcggacagggcggccctggaggaggaggtgcggagcctgagacacaacaaccggcggctgcaggcggagtctgagagtgcagccacacgcctcctcctggcctccaagcagctgggctcacccaccgccgacctggcctgagccgtctggaaccacctgggcccctgagggcactgtggtcacactgggccctcctcaggaactctccctgcgcagaggcgtgtcttagcactgcccccctccctagccccttatttggtggcggaagtggcctccaccccttccctgtttgtaaatattctgtggagaaacagaggacttcagggagtaaaaaagccactgatgtctgtgtctgaaa

SEQ ID NO: 258180 - DNA, 1151 bp, Homo Sapiens
  misc_feature (323)..(501): n is a, c, g, or t
  misc_feature (503)..(503): n is a, c, g, or t
  misc_feature (506)..(506): n is a, c, g, or t
  misc_feature (519)..(534): n is a, c, g, or t
  misc_feature (543)..(543): n is a, c, g, or t
  misc_feature (555)..(571): n is a, c, g, or t
  misc_feature (646)..(655): n is a, c, g, or t
  misc_feature (669)..(682): n is a, c, g, or t
  misc_feature (736)..(761): n is a, c, g, or t
  misc_feature (790)..(800): n is a, c, g, or t
  misc_feature (951)..(951): n is a, c, g, or t
  misc_feature (954)..(954): n is a, c, g, or t
  misc_feature (999)..(999): n is a, c, g, or t
gatctctgattaccagcctgacatcaacaaatcccctcagttacaacgtataggttaaacaaagcttttaaaagatcatgtggtagaacctacaaggttactaaactggtcactcatggtaattacaaactctgattggcagctttgtatttcttgactaaaaacctaaataaactgattaggttttaggcgttctttcaaagaggttcttgagaagattgagaactatcctatttggtgcttagtgaaaagattttgaattactgtacgtaccagttgttgccatttctttattaaattcagaagtttttttgccaaataannnnnnnnnnnnnnnnnnnnnnnnnnnnnnnnnnnnnnnnnnnnnnnnnnnnnnnnnnnnnnnnnnnnnnnnnnnnnnnnnnnnnnnnnnnnnnnnnnnnnnnnnnnnnnnnnnnnnnnnnnnnnnnnnnnnnnnnnnnnnnnnnnnnnnnnnnnnnnnnnnnnnnnnnnnnnnnnnnngnggngagaaggggccgnnnnnnnnnnnnnnnnaaaagaatnctccaaacaccnnnnnnnnnnnnnnnnnccccccccacggagaagaaagaaaggcgacacacgacgggcgccccaaggaaaacgcccggcgcgggcaaagacnnnnnnnnnnctactcccccaccnnnnnnnnnnnnnncggcggaccggggcacaaccaaagagggggcgtccgaagaacaagcctctgaannnnnnnnnnnnnnnnnnnnnnnnnnctctccgtggtggcggcccctccaccccnnnnnnnnnnnacggcgacccgaagcggcccgcggatgaacaataatatcgcgcgccgcccccgccgcgccgaccgctccgagaaggaggacgcgggtggggctcgatccaccaatagaacgcctccctgccccgggggagatgcgcggcgcgccccccagnggngcgggggatcgggatagcgtctgggggggtcccgcccgcggcggngagacccgcaaggcgctgggtggcgccctgctaaacaaagaaaaactattcggccccgccgcgccgccgaaaaaagcgggagggaggcgcagcacagacgggagcctgcctcactgcgggggtggccccctcgttatcaataacaacaagag

SEQ ID NO: 258181 - DNA, 1669 bp, Homo Sapiens
ggggctatcggaggccgcgcgggtggctgagcagcggcctggtgcgctcgcttagcgggcgacggaatcagacggacgtggacgcccccggagtggaagccgaagcaggagttgttgttgctgaggggctgccgcagccgccgcgagcctccggacagacgccagagcgaggagggcgctacgcgacttggcaagatgacccagttcctgccgcccaaccttctggccctctttgccccccgtgaccctattccatacctgccacccctggagaaactgccacatgaaaaacaccacaatcaaccttattgtggcattgcgccgtacattcgagagtttgaggaccctcgagatgcccctcctccaactcgtgctgaaacccgagaggagcgcatggagaggaaaagacgggaaaagattgagcggcgacagcaagaagtggagacagagcttaaaatgtgggaccctcacaatgatcccaatgctcagggggatgccttcaagactctcttcgtggcgagagtgaattatgacacaacagaatccaagctccggagagagtttgaggtgtacggacctatcaaaagaatacacatggtctacagtaagcggtcaggaaagccccgtggctatgccttcatcgagtacgaacacgagcgagacatgcactccgcttacaaacacgcagatggcaagaagattgatggcaggagggtccttgtggacgtggagaggggccgaaccgtgaagggctggaggccccggcggctaggaggaggcctcggtggtaccagaagaggaggggctgatgtgaacatccggcattcaggccgcgatgacacctcccgctacgatgagaggcccggcccctccccgcttccgcacagggaccgggaccgggaccgtgagcgggagcgcagagagcggagccgggagcgagacaaggagcgagaacggcgacgctcccgctcccgggaccggcggaggcgctcacggagtcgcgacaaggaggagcggaggcgctccagggagcggagcaaggacaaggaccgggaccggaagcggcgaagcagccggagtcgggagcgggcccggcgggagcgggagcgcaaggaggagctgcgtggcggcggtggcgacatggcggagccctccgaggcgggtgacgcgccccctgatgatgggcctccaggggagctcgggcctgacggccctgacggtccagaggaaaagggccgggatcgtgaccgggagcgacggcggagccaccggagcgagcgcgagcggcgccgggaccgggatcgtgaccgtgaccgtgaccgcgagcacaaacggggggagcggggcagtgagcggggcagggatgaggcccgaggtgggggcggtggccaggacaacgggctggagggtctgggcaacgacagccgagacatgtacatggagtctgagggcggcgacggctacctggctccggagaatgggtatttgatggagtgcgccggagtgaagaggtcgtcctctccatctgctgtgtttggacgcgttcctgcccagccccttgctgtcatcccctcccccaaccttggccacttgagtttgtcctccaagggtaggtgtctcatttgttctggccccttggatttaaaaataaaattaatttcctgttata

SEQ ID NO: 258182 - DNA, 1083 bp, Homo Sapiens
accccggttgtcccttgggcccacccggccccccccaccttgggggcctttcattcccttgcccccggctccaatggcccccgcttcccccccgttttgtgctcgcgggtcacggtccacgggtcacgatcccggttcccggcgccgctcgcgctcgctccggtggctccgccgtcgctcccggtcacgatcccggcccttttcctctggaccgtcagggccgtcaggcccgagctcccctggaggcccatcatcagggggcgcgtcacccgcctcggagggctccgccatgtcgccaccgccgccacgcagctcctccttgcgctcccgctcccgccgggcccgctcccgactccggctgcgttcgccggcttccggtccccggtccttgtccatgctatccgctacctggagcgcctcccgcatccgtccttgtcgcgactccgtgagcgcagtccgccggttcccgggagcgggagcgtcgccgttctcgctccttgtctcgctcccggctccgctctctgcgctcccgctcacggtcccggtcccggtccctctcatcgtagcgggaggtgtcatcgcggcctgaatgccggatgttcacatcagcccctcctcttctggtaccaccgaggcctcctcctagccgccggggcctccagcccttcacggttcggcccctctccacgtccacaaggaccctcctgccatcaatcttcttgccatctgcgtgtttgtaagcggagtgcatgtctcgctcgtgttcgtactcgatgaaggcatagcaacggggctttcctgaccgcttactgtagaccatgtgtattcttttgataggtccgtacacctcaaactctctccggagcttggattctgttgtgtcataattcactctcgccacgaagagagtcttgaaggcatccccctgagcattggggatcattgtgaggggtcccacattttaagctctgtctccacttcttgctgtcgccgctcaatcttttcccgtcttttcctctccatgcgctcctctcgggtttcagcacgagttggaggaggggcatctcgagggtcctcaactct

SEQ ID NO: 258183 - DNA, 1668 bp, Homo Sapiens
  misc_feature (87)..(87): n is a, c, g, or t
  misc_feature (165)..(165): n is a, c, g, or t
  misc_feature (172)..(172): n is a, c, g, or t
  misc_feature (179)..(179): n is a, c, g, or t
  misc_feature (181)..(181): n is a, c, g, or t
  misc_feature (186)..(186): n is a, c, g, or t
  misc_feature (188)..(188): n is a, c, g, or t
  misc_feature (193)..(193): n is a, c, g, or t
  misc_feature (196)..(197): n is a, c, g, or t
  misc_feature (205)..(205): n is a, c, g, or t
  misc_feature (213)..(213): n is a, c, g, or t
  misc_feature (215)..(215): n is a, c, g, or t
  misc_feature (226)..(227): n is a, c, g, or t
  misc_feature (232)..(232): n is a, c, g, or t
  misc_feature (235)..(235): n is a, c, g, or t
  misc_feature (242)..(244): n is a, c, g, or t
  misc_feature (246)..(246): n is a, c, g, or t
  misc_feature (281)..(281): n is a, c, g, or t
  misc_feature (284)..(284): n is a, c, g, or t
  misc_feature (286)..(287): n is a, c, g, or t
  misc_feature (289)..(289): n is a, c, g, or t
  misc_feature (295)..(296): n is a, c, g, or t
  misc_feature (300)..(301): n is a, c, g, or t
  misc_feature (306)..(309): n is a, c, g, or t
  misc_feature (364)..(365): n is a, c, g, or t
  misc_feature (368)..(370): n is a, c, g, or t
  misc_feature (373)..(375): n is a, c, g, or t
  misc_feature (384)..(384): n is a, c, g, or t
  misc_feature (396)..(396): n is a, c, g, or t
  misc_feature (404)..(404): n is a, c, g, or t
  misc_feature (407)..(409): n is a, c, g, or t
  misc_feature (413)..(414): n is a, c, g, or t
  misc_feature (420)..(420): n is a, c, g, or t
  misc_feature (424)..(424): n is a, c, g, or t
  misc_feature (435)..(435): n is a, c, g, or t
  misc_feature (438)..(438): n is a, c, g, or t
  misc_feature (461)..(461): n is a, c, g, or t
  misc_feature (467)..(467): n is a, c, g, or t
  misc_feature (469)..(469): n is a, c, g, or t
  misc_feature (472)..(475): n is a, c, g, or t
  misc_feature (478)..(479): n is a, c, g, or t
  misc_feature (481)..(481): n is a, c, g, or t
  misc_feature (491)..(491): n is a, c, g, or t
  misc_feature (493)..(494): n is a, c, g, or t
  misc_feature (499)..(499): n is a, c, g, or t
  misc_feature (503)..(504): n is a, c, g, or t
  misc_feature (511)..(511): n is a, c, g, or t
  misc_feature (513)..(515): n is a, c, g, or t
  misc_feature (520)..(520): n is a, c, g, or t
  misc_feature (543)..(543): n is a, c, g, or t
  misc_feature (560)..(560): n is a, c, g, or t
  misc_feature (563)..(564): n is a, c, g, or t
  misc_feature (566)..(566): n is a, c, g, or t
  misc_feature (600)..(601): n is a, c, g, or t
  misc_feature (604)..(604): n is a, c, g, or t
  misc_feature (608)..(608): n is a, c, g, or t
  misc_feature (627)..(627): n is a, c, g, or t
  misc_feature (648)..(648): n is a, c, g, or t
  misc_feature (660)..(661): n is a, c, g, or t
  misc_feature (664)..(664): n is a, c, g, or t
  misc_feature (668)..(668): n is a, c, g, or t
  misc_feature (676)..(676): n is a, c, g, or t
  misc_feature (679)..(679): n is a, c, g, or t
  misc_feature (685)..(686): n is a, c, g, or t
  misc_feature (692)..(692): n is a, c, g, or t
  misc_feature (710)..(710): n is a, c, g, or t
  misc_feature (716)..(716): n is a, c, g, or t
  misc_feature (733)..(733): n is a, c, g, or t
  misc_feature (1505)..(1505): n is a, c, g, or t
cgtcgcccttcagcggggcgctgcagctgacggacctggatgacttcatcgggccgtctcaggtgggccggcctgggcgggcggggncgaggctgcgctcggtgccctgtcgcgcggagggaaattgctctgcgccccacttcctccccgtgaggaatgagatcngaagtcncgggagngngggtngnggggnggnnagggaggnctatggangngggggcggggnntcagngangtgaggnnngnttcttaccaacaaggaaactgaggccagggagggnggngnncnccaacnnggtnntgtgnnnnatggtgtccgggcgggctgcgtgggagggtccagtggtcgcgggctcgcgccggnntgnnnaannnagaggaggnagcagaggcggntcccacanatnnntaannctaacncganccctgggtcgnagntggagggcggcggggcccggggngggggntnttnnnnttnngntggggaggangnnttgtnaggnntcaggancnnnaaggnagagggtttggatctggataaangggtgcggtggggaccncanntnatttgagggcagtaggggcggcccgctagacgcnncgnagtngctcctcagtagagctgtncttaacgtcgccctggtgggncggacagctacnnttnaacncgggaggntgnaggcgnncttttntgggtgcacctgcctgtncatgtncaacagccccgcggggncagagctgagcagggcgagaggcgggctgctgggagcgcttccggcagggatgagctgggaggcggctttctgggctgccagggttctcaaggagaagagagagaaatccacttgtttcccgggcactgagcaggaggtgtgtctccaaacagatccaagcacacgtcctctcgatgggcagtgcaactctggtctctgtggtggacacgccccctgttcacgtgaagggtgaaggtcagtgttggtggtgtctccgcaggtgggtagtttgcaggcgctgttagcactggccttcctgcacactgggaacttcagtgccgcaggatgttgggaacccgatccctgggtgagagcagtggggcaggaagaagacggtggtaccagcctcagtccctgagtgcatggctcctggcagagccttcaggctgtgcggctgggcagccatccttgaggcctggcctcccagggaacctgcgcccactcacaggggctgacttgaggtctcttcctgctctaggagtgcatcaagcctgtcaaagtggaaaaaagggcgggaagtggcgtggccaagattcgcattgaagatgacgggagctacttccaaattaaccaagtaaggcacaggaggctgctccactatctctcctgcccggctgatccgaaacacttttctctgcttcctcccgtcacagagcggtgaccccgagacactccaggtctcaccagtctttttcccactggtcgaatttacctgccatttgggaggctggnggtcagggtgcctggggcaggtgaatgagcagcacccagcccaacagcttgatttggtaagaaagggcgtttttgcagagaatggggaatctttttgggtctgcctgttccccctaattcaagcctggaaggattgttatttagaacccttggtgcttttgtt

SEQ ID NO: 258184 - DNA, 1128 bp, Homo Sapiens
  misc_feature (13)..(13): n is a, c, g, or t
  misc_feature (18)..(18): n is a, c, g, or t
  misc_feature (25)..(25): n is a, c, g, or t
  misc_feature (33)..(33): n is a, c, g, or t
  misc_feature (44)..(45): n is a, c, g, or t
  misc_feature (56)..(56): n is a, c, g, or t
  misc_feature (58)..(59): n is a, c, g, or t
  misc_feature (74)..(74): n is a, c, g, or t
  misc_feature (79)..(79): n is a, c, g, or t
  misc_feature (82)..(83): n is a, c, g, or t
  misc_feature (93)..(93): n is a, c, g, or t
  misc_feature (98)..(98): n is a, c, g, or t
  misc_feature (105)..(105): n is a, c, g, or t
  misc_feature (132)..(132): n is a, c, g, or t
  misc_feature (148)..(148): n is a, c, g, or t
  misc_feature (225)..(225): n is a, c, g, or t
  misc_feature (459)..(459): n is a, c, g, or t
  misc_feature (528)..(528): n is a, c, g, or t
  misc_feature (1090)..(1090): n is a, c, g, or t
  misc_feature (1102)..(1102): n is a, c, g, or t
gggtgccagacancaatnattatanggccgggnttctcccaggnncccctggacangnnccaggtaggcagganctcantannctccacccanccatntcagagngaatgcgtcaatacctccttcatagcnaattggggatgagctntcctgggtcaggggctccgggtcacgggtcaaaataacccacacgctgcagtgctcctcgatgtcttgccgtcgtanggtgatgccactgggcgtgatgcacggtcccgcatcagctcaaagctgatcttgccacacaggtagtcggggatgtctcgcttcttcctcttctcatccacctgagaaaaaagctcgtccatgtccgccatgtacttgtcgtgcttggcctcaatgcaggcctgctgggcccggacgtggctgtcgtcctcatcaccctcgtggtttcgctggcactcttccagctcccctctncactccgcggcaatgagcctggagaggtaggagtgcagctcgctctcctggtggatgcgccgctcctcnaatgctgttccagcgcttcttcttcgcgattcgaagagcgctggggatgtcgtccccgaagttcagccgctgctccttggccaggctgtaagctcgctgcagattggcgatggcctcatcatagctctccatctccagctggcactgccccaggaagaagtgcgccttcacagactgcccgtccagctccagggcgcgccggcagtcggccagggcctgctcgtgctgctgcatcttcaggtagcacaaggcccggttggtgtaatacacggccaccagcgggttccgggtctagggaccaaggccgggccagccgcatgagggcgtaggctcagcgtgcccactctgacccacggcccgtcccagcttctgcgctctgggatcgcgcggccgtagcaggccgccgcctccgggtactttcggcccacgaacagacgattgccctgctccttgagctcctgcgcgctcgggctcttctcggggcttccgccgccagcgcccagccgtgcgccgccctccttctcctccttgcccttcatggcgccgcgcggcacggcctggntccgctcccaantccgccctcgcggcccagcgcccgca

SEQ ID NO: 258185 - DNA, 1080 bp, Homo Sapiens
agaggtcgtgcacgccggtgctcaggggatgtctctggcgtctgagggaggaacagtattagcgtctgacggtgttatctgtacaacaaatagggcaaaggcgcggtcaagggtgagtcaagtagcaatgccaaagtgaccttttgtaaccagagccgcaaggctttccccatgccggggggtactcgaatgccctttgcggttttaagtgaatggccatggggcgtgatgcaggggttcccgcatcagttaagaggtgattcttgcccccacgggtagtcggggagtgtggcttcttcctcttttcatccgccggggaaaaaagctggtccaggtccggcatatacttgtcgtgctggccttcaatgcagcctggctgggcccggaaggtggcgtcggtcctcatcaccctggggtttcgctggcactcttccagctccctgtcacgctccgcggcaatgagcctggagaggttaggagtgcagctcgctctccctggtggatgcgccgctccccaatgctgttccagcgcttcttcttcgcgattcgaagagcgctggggatgtcgtcctcccgaagttcagccgctgctccttggccaggctgtaagctcgctgcagattggcgatggcctcatcatagctctccatctccagctggcactgccccaggaagaagtgcgccttcacagactgcccgtccagctccagggcgcgccggcagtcggccagggcctgctcgtgctgctgcatcttcaggtagcacaaggcccggttggtgtaatacacggccaccagcgggttccgggtgatcgcgcggccgtagcaggccgccgcctccgggtactttcggcccacgaacagacgattgccctgctccttgagctcctgcgcgctcgggctcttctcggggcttccgccgccagcgcccagccgtgcgccgccctccttctcctccttgcccttcatggcgccgcgcggcacggcctgggctccgctcccaagctccgcgcctcgcggcccagcgcccgcagccggagccccgcagcccgagcccgcgatccgctcgggcccggcccag

SEQ ID NO: 258186 - DNA, 1796 bp, Homo Sapiens
  misc_feature (1480)..(1480): n is a, c, g, or t
  misc_feature (1747)..(1747): n is a, c, g, or t
aaggagcgaggcctgggtggcgaattccgcacgaggcccaggccgtgccgcgcggcgccatgaagggcaaggaggagaaggagggcggcgcacggctgggcgctggcggcggaagccccgagaagagcccgagcgcgcaggagctcaaggagcagggcaatcgtctgttcgtgggccgaaagtacccggaggcggcggcctgctacggccgcgcgatcacccggaacccgctggtggccgtgtattacaccaaccgggccttgtgctacctgaagatgcagcagcacgagcaggccctggccgactgccggcgcgccctggagctggacgggcagtctgtgaaggcgcacttcttcctggggcagtgccagctggagatggagagctatgatgaggccatcgccaatctgcagcgagcttacagcctggccaaggagcagcggctgaacttcggggacgacatccccagcgctcttcgaatcgcgaagaagaagcgctggaacagcattgaggagcggcgcatccaccaggagagcgagctgcactcctacctctccaggctcattgccgcggagcgtgagagggagctggaagagtgccagcgaaaccacgagggtgatgaggacgacagccacgtccgggcccagcaggcctgcattgaggccaagcacgacaagtacatggcggacatggacgagcttttttctcaggtggatgagaagaggaagaagcgagacatccccgactacctgtgtggcaagatcagctttgagctgatgcgggagccgtgcatcacgcccagtggcatcacctacgaccgcaaggacatcgaggagcacctgcagcgtgtgggtcattttgaccccgtgaccccgagcccccctgacccaggaacagctcatccccaacttggctatgaaggaggttattgacgcattcatctctgagaatggctgggtggaggactactgaggttccctgccctacctggcgtcctggtccaggggagccctgggcagaagcccccggcccctatacatagtttatgttcctggccaccccgaccgcttcccccaagttctgctgttggactctggactgtttcccctctcagcatcgcttttgctgggccgtgatcgtccccctttgtgggctggaaaagcaggtgagggtgggctgggctgaggccattgccgccactatctgtgtaataaaatccgtgagcacgaggtgggacgtgctggtgtgtgaccggcagtcctgccagctgttttggctagccgaggaaggtggagatgaagacgctggtgtcaaggttgagcgtagcatgccaccagcggtcggggaagtacagcacctcaccagcccggatggtacactccaggggccgtgcagacggtggcagggctgggtatgtgtcccggagccaggccagcgtggtcttgttggggtggaactctggcgtcttctcaggtgggtnaaaggaaccagcgcttacgaccgtagatcacttctgagtacccgggtccatgccagtggaagggcacccccgagccagctcctgcgattccaaagctgtaagctggagcggttcccagcaggccaaatgggggtggggagtagtgccgaaagagagaggcccactcggtgaagttgttgtccccgaagaagtacagggtgtcattgcccagggaggtggggtcctgggggtgcagcagctgctccacatactcctggaagggcaagntcactttgtggtaggagtaggtgttggcggtgctcagccggaccactct

SEQ ID NO: 258187 - DNA, 464 bp, Homo Sapiens
  misc_feature (28)..(28): n is a, c, g, or t
  misc_feature (390)..(390): n is a, c, g, or t
cactgcacgagcacctcccagccatcgnagcaagcgacacacactcaccttcctcttctcatccacctgagaaaaaagctcgtccatgtccgccatgtacttgtcctgtgaagagttgagtgctgtgcttgggggaagacaccccacctcccctcctcccatggggcacagacccaacacaaggcggggatgctcccaagcccacgtgcacacacacagacccacatgtgggtggggggcaccctcacgtgcttggcctcaatgcaggcctgctgggcccggacgtggctgtcgtcctcatcaccctcgtggtttcgctggcactcttccagctccctgggggttgaccaggagccggtcagagatggacctggccagatgtctgaccanaccccaatctcagcgctaacatccacacttccccacatttcctgcttgccagtaaagccttcgataaaaaaaaa

SEQ ID NO: 258188 - DNA, 1832 bp, Homo Sapiens
  misc_feature (403)..(403): n is a, c, g, or t
  misc_feature (669)..(669): n is a, c, g, or t
  misc_feature (778)..(778): n is a, c, g, or t
  misc_feature (1747)..(1747): n is a, c, g, or t
  misc_feature (1750)..(1750): n is a, c, g, or t
  misc_feature (1753)..(1756): n is a, c, g, or t
  misc_feature (1760)..(1760): n is a, c, g, or t
  misc_feature (1764)..(1769): n is a, c, g, or t
ccggcatggaggagcgcggcgattccgagccgacccccggctgcagcggcctgggtccggacggtgttcgcggctttggcgacggcggtggagctccttcgtgggcccctgaggacgcctggatgggcactcaccctaagtatctagaaatgatggaattagatataggagatgccacccacgtttatgtagcgttcttggtttacctggacctcatggaaagcaaaagctggcatgaagtaaactgtgtaggattaccagaactccagctcatctgccttgttggtactgagatagaaggggaggggttacagactgtggtgcctacccccatcactgcttccctcagccataacagaatatttctcttagaagatgacatccatgtttcctgatgcttgtnttattcatacaagattggatttgagacccatcagactgcttcatcttttatctcagaaatagggttgacgtacatagtgagggttgacttccccattccataaggttttcattctgaagagtaaaacttccccaggtagaagactttctccttcttaaaaaatatagggtgatttctttaaaactttgttatctagagacagtttaattacagttatatacaggtttatgcctaggatgtattcagatgggtgggacctgtgttcngcttttgtcatcccacactcaaagttgtctctttgtttcttgctgccactgccagctcattgttgagactgccatttctttctcttactcagctctccccagtgccttntggccactgcagcgaccgtagaatggcattttatatgtaccttgtcacccacttctgttgtactttttcctctccagtaaaaagtaaaagatttctttcaatggtcttcccattgaagttactgttatttctcttttttggttaactttaaatcaaaactcaaaatatgttcatccagagtgtgtcttaagtaactaacgtgtcttaagtaacagggaccagacacatgttacctacaagagttctgggctatccttttcattcttatcacatatcatagcttgaatattacaacagtgtgggagagaatcaaccgtaaaaatgtcttcattaattagacccagttattccacttttgttaatgtctctcaaattgtacaaagtataaaaaattatatgcacaaagatgttccaagtgacattacttttagtagcccaaattataaaccactttaaagtttggggtaaagattggcaaactttttctataaagggccagaaagtaactattttaggtttttaaacctactgtctctgtcataacttgtcaacactgctgtatgaagcacaaaagcagccatagacaatacataaacaatacgggcgtggctttgttccagtaaaactttgtttacaaatgtggtgccatagtttgtcatccctgggtctaggaaatagtcaataaacagatatatacaaatgatacataatgtacttattaaaaattagtaatgaatattattaaaaacatgaaaatattaccttaagtaaaaattgcaagacggaaaagtgtataagtgggtgtaatcatggctgaaataacagaccaagcatatgataaaaagataacaaagtaaatcaaattactaactggttatagtgggataggaggcagaaaatggatgactttgtcttttctcaatgtttttatttgtattttataataaaaatgttttaaaatcaaaaaanaanaannnnaaanaaannnnnnccctggtcggcccgcctcggcccctcgaaaaagcttttcttagaccaattcgttttgggcgcg

SEQ ID NO: 258189 - DNA, 915 bp, Homo Sapiens
  misc_feature (808)..(870): n is a, c, g, or t
gggggcatggaggagcgcggcgattccgagccgacccccggctgcagcggcctgggtccgggcggtgttcgcggctttggcgacggcggtggagctccttcgtgggcccctgaggacgcctggatgggcactcaccctaagtatctagaaatgatggaattagatataggagatgccacccaagtttatgtagcgttcttggtttacctggacctcatggaaagcaaaagctggcatgaagtaaactgtgtaggattaccagaactccagctcatctgccttgttggtactgagatagaaggggaggggttacagactgtggtgcctacccccatcactgcttccctcagccataacaggataagggagatcttgaaggcatctcgaaagttgcaaggtgatccagatttgccgatgtcttttactttggccatagtggagtcagattccacaatagtctattataaacttaccgatggatttatgctgccagaccctcagaatatttctcttagaagatgacatctgcccttcttggtgctgacttcagttctgaaagattggatgtgaggctcctcagcgagctgctcgtcttttatctcagaggtagtcagggctgacttagctagtcccaacccataaacttcctttcagaataaagccttctccgatggaagcactatattgcttgcaaatatcgttcgcccataactttcttatcacaaacaccacactcgcatgccggtttacaccaacgtatatgggcagaactgctggcccatttcccccgcctttcccccattcctgnnnnnnnnnnnnnnnnnnnnnnnnnnnnnnnnnnnnnnnnnnnnnnnnnnnnnnnnnnnnnnntttccatcatctaaccgctttttcccatttttcgcttctaaaatt

SEQ ID NO: 258190 - DNA, 362 bp, Homo Sapiens
aaatgatggaattagatataggagatgccacccaagtttatgtagcgttcttggtttacctggacctcatggaaagcaaaagctggcatgaagtaaactgtgtaggattaccagaactccagctcatctgccttgttggtactgagatagaaggggaggggttacagactgtggtgcctacccccatcactgcttccctcagccataacaggtgagcaggtgattttggtctaagttcctttcccgagtaaagcagtaggaaacattaaacatagtgatgtaatacttttaatgaaatttgggatacagggttcatagctttactcttggctatttgaggaataagttaaatatgagtgttt

SEQ ID NO: 258191 - DNA, 1248 bp, Homo Sapiens
  misc_feature (977)..(977): n is a, c, g, or t
  misc_feature (979)..(1046): n is a, c, g, or t
  misc_feature (1050)..(1054): n is a, c, g, or t
  misc_feature (1059)..(1062): n is a, c, g, or t
  misc_feature (1064)..(1066): n is a, c, g, or t
  misc_feature (1068)..(1090): n is a, c, g, or t
tcggtgggggcccatctctgctgacctgggtgtggcggagggagaggcgatgctgcaaagtgttttctgtgtcccactgtcttgaagctgggcctgccaaagcctgggccccacagctgcaccggcagcccaaggggaaggaccggttgggggagccgggcatgtgaggccctgggcaaggggatggggctgtgggggcggggcggcatgggcttcagaagtatctgcacaattagaaaagtcctcagaagctttttcttggagggtacactttcttcactgtccctattcctagacctggggcttgagctgaggatgggacgatgtgcccagggagggacccaccagagcacaagagaaggtggctacctgggggtgtcccagggactctgtcagtgccttcagcccaccagcaggagcttggagtttggggagtggggatgagtccgtcaagcacaactgttctctgagtggaaccaaagaagcaaggagctaggacccccagtcctgccccccaggagcacaagcagggtcccctcagtcaaggcagtgggatgggcggctgaggaacggggcaggcaaggtcactgctcagtcacgtccacgggggacgagccgtgggttctgctgagtaggtggagctcattgctttctccaagcttggaactgttttgaaagataacacagagggaaagggagagccacctggtacttgtccaccctgcctcctctgttctgaaattccatccccctcagcttaggggaatgcacctttttccctttccttctcacttttgcatgtttttactgatcattcgatatgctaaccgttctcagccctgagccttggagaggagggctgtaacgccttcagtcagtctctggggatgaaactcttaaatgctttgtatattttctcaattagatctcttttcagaagtgtctatagaacaataaaaatcttttacttctgaaanannnnnnnnnnnnnnnnnnnnnnnnnnnnnnnnnnnnnnnnnnnnnnnnnnnnnnnnnnnnnnnnnnnngggnnnnnttttnnnnannnannnnnnnnnnnnnnnnnnnnnnnattggtgggggcggccttgggcccctccaaaaaaatttttttaaaaccactttcgttttggccggcgcggcccccccaagaggggaaaaaggaaacatggggcacaatcctggtttttcccaaagggaacaaccccggggcccaaggaaaataggggg

SEQ ID NO: 258192 - DNA, 909 bp, Homo Sapiens
  misc_feature (57)..(57): n is a, c, g, or t
  misc_feature (89)..(89): n is a, c, g, or t
  misc_feature (162)..(162): n is a, c, g, or t
  misc_feature (220)..(220): n is a, c, g, or t
  misc_feature (272)..(272): n is a, c, g, or t
  misc_feature (830)..(841): n is a, c, g, or t
agctgggccctcgcccctccctcgggcggtcacctgggcacgggcgctgcaggtgtnggggcctcaaccttgcggaccgacagccatcnatcctcgggtggcctcgaggtggtggcagggccgccccctgcagtccggagacgaacgcacggaccgggcctncggaggcaggttcggctggaaggaaccgctctcgcttcgtcctacacttgcgcaaatntctccgagcttactcacatagcatattggtatatcaaaatgaaatgcaaggnaccaaaaataacataattgaaggcagtaaaagtgaaattaaataggaagatcatcagtcaaggaagacccactggagaggacagaaaatgaagcagtgttttatcatgtgtatttcagcaggtcttcttgaaatttaactaaaaatatgactgctctctcttcagagaactgctcttttcagtaccagttacgtcaaacaaaccagcccctagatgttaactatctgctattcttgatcatacttgggaaaatattattaaatatccttacactaggaatgagaagaaaaaacacctgtcaaaattttatggaatatttttgcatttcactagcattcgttgatcttttacttttggtaaacatttccattatattgtatttcagggattttgtacttttaagcattaggttcactaaataccacatctgcctatttactcaaattatttcctttacttatggctttttgcattatccagttttcctgacagcttgtatagattattgcctgaatttctctaaaacaaccaagctttcatttaagtgtcaaaaattannnnnnnnnnnnacagtaattttaatttggatttcagtccttgcttatgttttgggagacccagccatctaccaaagcct

SEQ ID NO: 258193 - DNA, 1018 bp, Homo Sapiens
gtgacaagggggggttacttcgccagggtcccggaggtaccctagggaagggcggtcaggcgggaaagtaaggtttagggcccacggggcgggggcagggctgggtggagcgccggttttccaggaggggggggttcctggctctcgagcggacagccggagaaaggggcagcagggcccagggggttgagcagattcaagcggcatcacggaagcccaggggcgatagagggcggccgttttgtccagggggcagcgtctctggcaggaagcagaagaggaccagcaggtcggaggctgggaagagcagggcaaaccagggtgccatttccaggggcagggaggctccgagcatagggcccagggtgaagcccagtgagaagagccaccccaatgaccgccatgccttgactgcgggccagaggcgagcccaggtcagcaacgatggccgtggagaggctgacgttccctttgctgatgcccccaatcagcctggaggccaggaaggccgcaaagctccgagaggtggcccagactgcatatgaggtggccacacccatcaggcacagcagcatcaccgggcgcctccccaagcagtcagaggtggccccagtgagtggcgcacacagaaactgcaggacagagaatgccgagccaatgagacctccgaacaggacactgttgtacctcttctccactggcatcccgatggcggtggcaaaccagtccaccccgccctgccaggagccatagagggggtcgtgggcacggccgtggctctccaacagcccgggcagcaggggcagcagcagcgtgaaggccaggaggtccagcaggaggccgagaaagacaacggtgaccacgcggcgctccggcggctgctggtggatgggtgggcgcggggtgcagcctccaccccctccccatcccatggtgggctgctctgacctggcctgccgcggctgcgcgctcgggacggacggtcgcacagacgccctcgtgccgaattcgccaccca

SEQ ID NO: 258194 - DNA, 1155 bp, Homo Sapiens
  misc_feature (143)..(143): n is a, c, g, or t
  misc_feature (648)..(648): n is a, c, g, or t
gggttccgcctccgggtggcgcttcccggtgtcgtgttctggaagcttagcggtcaccatggagctgctgggagagtacgtcgggcaggaagggaagccgcagaagctgcggttgtcctgtgaggcgccgggtgacggcaccnctttccagggcctgttgtctggcgtggcccagatgaaggacatggtaacggaattattcgaccctctggtacagggggaagtgcagcaccgggtggcggcggctccagacgaggacttggacggtgatgatgaagatgatgcagaagatgaaaataacattgataacagaactaacttcgatggaccatctgcaaaacggccaaaaacaccgtcttaacaatagccttcatgacatttaaaagatggctgttgtatccttattgtcacactaggacatttaaggaagacttatggctctaatttggaaaaagcatttgtgttgttctcctgggacaattttgttcaaagagaaaactggtttttcctgtttctagccaaagatagtaaaggctttagaaataaaatctgttttcttgagaaataaatttcagaccctggaaggaaaatagaacacttcataatgtataaaatcctctaagttggcaactgaatttttatcattgntttctatttttaaaataatcattgatttgtgtgatgtctacatcttttaacttctggttctgttataaagagtacatgtcacggttcataggcagtaacatttcagagaactgacatgaacaagtagtgaaaattgggcattaaatataaaaataacagttcttcataaacagaaggaaaataaggaaatagaaataccgacgagaaaggagagtccttgaaagagacccaaggaaaccctgaattcatacccacgtcaaatatgcacatatcctgagatgatgccactttgatgaatgtgcattagtctgatttatcatgtaccttaagagagccagatggggtatgtttttgtgctgtgatatggtatttatacaggtacaaatataaggccttaagtaaacaatctgcattgattacaatttggatatttcctctcctcctgtagccatactttgattttgctttaaaaagattattgaatccttttaaaaatatatattccta

SEQ ID NO: 258195 - DNA, 1036 bp, Homo Sapiens
  misc_feature (99)..(99): n is a, c, g, or t
  misc_feature (115)..(115): n is a, c, g, or t
  misc_feature (118)..(118): n is a, c, g, or t
  misc_feature (156)..(156): n is a, c, g, or t
  misc_feature (195)..(195): n is a, c, g, or t
  misc_feature (322)..(322): n is a, c, g, or t
  misc_feature (970)..(971): n is a, c, g, or t
gggccaggggggcctggccagggaggggctgcatgggcccccgaaagcaggttcagctcttttggtatgaccactggccggtgtgtggggcatccgggntcattcctccttcccncantggcggccccccttggccgcctcgcctctggcgccagncgcagctccctccaacctggcgttccagccctcgcaccnttggcctcgagttggcccccaagaggctcgggagccagtgagccggctcagaagggcgtagaggatcagaaaggccaggagtagcagggcccgggtggaagggtcaggcaccgacctcatcagggcncacgaagccggccaggaagatgacaagcttcaggccccacaggatccgccccagcaaggccaagaccaagccgaggagcagagacagcagccagtagacgaccagggcccctgctccccacagcaggaaggtctggacctggccagggctgagcttcaggccctgggcgaggtaatcaccagctagtcccaaggcattcagcagctgtgcggcgatcccagacagagcaaagaaggccacagaaatggctgatgagatggcccacaacacttgggacgaagactctgacaccaggtgcatggtctctggcccaatccaggcatccagtgtccctcgcacagatcgacctatctgggtcaagacatcaactggggcttctctcttctgttggcctggtggtgcaaagtctcgacgggactgggccaatgctgagtggaggaggataagggccactaggaccatcagaatggctttgaacacatgctttcccccatggtgaactgatgctggaggctgccatgactgggtctttctcaggccactgctatccttcacgtgcgacttcgctgaaacgcgccaccaaacccgcgcctcaactcggggcgagaatttaccttctccgcatgccgatcctcgtagttccggacnncggtacccagccctgcttttttgacaaccaggggcagtatgtaagggcagggggaaataaacgaa

SEQ ID NO: 258196 - DNA, 1018 bp, Homo Sapiens
  misc_feature (969)..(969): n is a, c, g, or t
  misc_feature (972)..(972): n is a, c, g, or t
  misc_feature (983)..(983): n is a, c, g, or t
  misc_feature (996)..(996): n is a, c, g, or t
  misc_feature (1002)..(1002): n is a, c, g, or t
  misc_feature (1015)..(1015): n is a, c, g, or t
tgccatggcaaaagaactcccggagaatccgaattcgtggtcctcagaattggtttagggttgtttcgcggttcttcccgtattctgcctccgaggcccagtggggctggctgtgggccccctgtgctgtttgaggcgtgaaactcacctcaggaaatgtatctgatccattagcgtggattcatattatttggtgatggagaatcttcagctgtgttaagtgttaccgtcagtttcagagatggcttctttgcaaaggaaagggctgcaggcaaggattctcacctctgaagaagaggagaaactgaaaagagaccacaactttggtgtctgattttaaacagcagaaattggaacaagaggctcagaaaaattgggatctcttttacaaaagaaatagcactaatttcttcaaagacagacactggaccaccagagagtttgaggagctaagatcatgtagagagtttgaagatcaaaagttaacaatgcttgaagctggctgtggggttggaaactgtttattcccacttttagaagaagatccgaatatctttgcctatgcctgtgatttttctccaagagccattgaatatgttaagcaaaatcctttatatgatacagaaagatgcaaggtattccagtgtgatctgactaaagatgatcttctggatcatgtaccgccagagtctgtggatgttgttatgttgatatttgtgctgtcagctgttcatcctgataagatgcaccttgtcttacaaaacatttacaaggtattaaaaccaggcaaaagtgtcttgtttcgtgactacggactgtatgatcatgccatgcttaggtttaaagccagcagcaaacttggagaaaacttttatgttagacaagatgggacaagatcatatttttttactgatgacttcctggctcagctctttatggacacaggttatgaagagttggtaacgagtnttntttcgagaganggtgaataaaaanaaggcngttttttccaganttt

SEQ ID NO: 258197 - DNA, 1391 bp, Homo Sapiens
  misc_feature (6)..(6): n is a, c, g, or t
  misc_feature (79)..(79): n is a, c, g, or t
  misc_feature (1345)..(1345): n is a, c, g, or t
gttganggcccgcgccgcatggaggccggctgaggagcgccgctgcctcgcctcggctcccaacaggggcaggaagccngccgcccagccatgaacggggaggagcagcagccaccgcaccaggccaacgtggaacctgatgtgccgtcagaggcttcagagccggtgcccagggtgcttcatggagacccccagaacctgtccgacgtggacgccttcaacctgctcctggagatgaagctgaagcggcggcgtcagcggcccaacatgccgcgcactgtgacccagttggtggctgaggacgggagcagggtgtacgtggtggggacagcccacttcagcgacgacagcaagagggacgttgtgaagaccatccgggaggtgcagcctgacgtggtggtcgtggagctctgccaatatcgtgtgtccatgctgaagatggacgagagcacgctgctgcgggaggcccaggagctcagcctggagaagctgcagcaggccgtgaggcagaacgggctcatgtcggggctgatgcagatgctgctgctgaaggtgtctgcacacatcaccgagcagctgggcatggccccaggtggcgagttcagggaggccttcaaggaggccagcaaggtgcctttctgcaagttccacctgggtgaccgacccatccccgtcaccttcaagagggccatcgcagcgctctccttctggcagaaggtcaggctggcttggggcctgtgcttcctgtcagaccccatcagcaaggatgacgtggaacgctgcaagcagaaggacctactggagcagatgatggccgagatgattggcgagttcccagacctgcaccgcaccatcgtctcggagcgcgacgtctacctaacctacatgctgcgccaggccgcgcggcgactcgagctgcctcgggcctctgacgccgagcccaggaagtgcgtcccctccgtggtcgtgggcgtcgtgggcatgggccacgtgcctggcatcgagaagaactggagcaccgacctcaacatccaggagatcatgaccgtgcccccgccgtccgtctccggcagagtgtctcggttggccgtgaaggccgccttcttcggcctgctgggctacagcctgtactggatgggccgccgcaccgcgagcctggtcctgtcgctgcccgccgcgcagtactgcctgcagagggtgaccgaggcccggcacaagtaggagactgctccccgcccgctcgggcccctgaggagccagtgcccccgcggcacttctgggtgccaggtgcatcctagcccgccggagcccctgccacccccatgggggtctaggcccggcctangctgccttctggccagtcacccctcccaggccaccaataaagatta

SEQ ID NO: 258198 - DNA, 1335 bp, Homo Sapiens
gggatcagaaaccctcctcccctcccagcctcaggtgcctgcttcagaaaatgaagtagtaagtctgctggcctccgccatcttagtaaagtaacagtcccatgaaacaaagatgcagtcgggcactcactggagagttctgggcctctgcctcttatcagttggcgtttgggggcaagatggtaatgaagaaatgggtggtattacacagacaccatataaagtctccatctctggaaccacagtaatattgacatgccctcagtatcctggatctgaaatactatggcaacacaatgataaaaacataggcggtgatgaggatgataaaaacataggcagtgatgaggatcacctgtcactgaaggaattttcagaattggagcaaagtggttattatgtctgctaccccagaggaagcaaaccagaagatgcgaacttttatctctacctgagggcaagagtgtgtgagaactgcatggagatggatgtgatgtcggtggccacaattgtcatagtggacatctgcatcactgggggcttgctgctgctggtttactactggagcaagaatagaaaggccaaggccaagcctgtgacacgaggagcgggtgctggcggcaggcaaaggggacaaaacaaggagaggccaccacctgttcccaacccagactatgagcccatccggaaaggccagcgggacctgtattctggcctgaatcagagacgcatctgaccctctggagaacactgcctcccgctggcccaggtctcctctccagtccccctgcgactccctgtttcctgggctagtcttggaccccacgagagagaatcgttcctcagcctcatggtgaactcgcgccctccagcctgatcccccgctccctcctccctgccttctctgctggtacccagtcctaaaatattgctgcttcctcttcctttgaagcatcatcagtagtcacaccctcacagctggcctgccctcttgccaggatatttatttgtgctattcactcccttccctttggatgtaacttctccgttcagttccctccttttcttgcatgtaagttgtcccccatcccaaagtattccatctacttttctatcgccgtccccttttgcagccctctctggggatggactgggtaaatgttgacagaggccctgccccgtcacagatcctggccctgagccagccctgtggttcttcctctcccaacacttcttacaacccccttattccctaattccttcacccccccttcactgtaggccctggaatggcattttgatctccgaaaaggggcccgtccctaactgggagag

SEQ ID NO: 258199 - DNA, 1681 bp, Homo Sapiens
gggacagtgccagtgggcgtgtggggcggggcagggcagggaagggaagggcggagctggggtgagggtccaaggggcccaggacttggccggcgtgatctcagctctgcagaccctgcggtgctgggagccaccatggagagtaggtgctacggctgcgctgtcaagttcaccctcttcaagaaggagtacggctgtaagaattgtggcagggccttctgttcaggctgcctaagcttcagtgcagcagtgcctcggactgggaacacccaacagaaagtctgcaagcaatgccatgaggtcctgaccagagggtcttctgccaatgcctccaagtggtcaccacctcagaactataagaagcgtgtggcagccttggaagccaagcaaaagcccagcacttcccagagccagggactgacacgacaagaccagatgattgctgagcgcctagcacgactccgccaggagaacaagcccaagttagtcccctcacaggcagagatagaggcacggctggctgccctaaaggatgaacgtcagggttccatcccttccacccaggaaatggaggcacgacttgcagcgttgcagggcagagttctaccttctcaaaccccccagccggcacatcacacaccggacaccaggacccaagcccagcagacacaggatctgctaacgcagctggcagctgaggtggctatcgatgaaagctggaaaggaggaggcccagctgcctctctccagaatgatctcaaccagggtggcccagggagcactaattccaagaggcaggccaactggtccttggaggaggagaagagcagactgctggctgaggcagcacttgagttgcgggaggagaacacgaggcaggaacggattctggccctggccaagcgactagccatgctgcggggacaggaccccgagagagtgaccctccaggactatcgcctcccagacagtgatgacgacgaggatgaggagacagccatccaaagagtcctgcagcagctcactgaagaagctgccctggatgaggcaagtggctttaacatccctgcagaagcaggcttctcgcaccctggacgcaaccccgcggagcagagcctgagatccctgaaagcccaggatgtggaccccaggcctgaggctgaggaagaggagctcccctggtgctgcatctgcaatgaggatgccaccctacgctgcgctggctgcgatggggacctcttctgtgcccgctgcttccgagagggccatgatgcctttgagcttaaagagcaccagacatctgcctactctcctccacgtgcaggccaagagcactgaagacaccctggtcctcccggaagggcagtcccacaggcagcggcacccatttctgggcccagccacaggacgtccgatgggagagcttgtctggctctactgatgatggataggccccttcctgagccttggtgtccctggaatgaggaaagattctccattcgagagaatgactgggagggaagaagtcggggccctcctattagaagcccagactggaagtgagaggcatgatggggagagaccagactgaatctacgggtgagccctgtaacctggctctagagcacaggcccctcccctggcacttagtgggtctaataaagtatgttgattcattgga

SEQ ID NO: 258200 - DNA, 1093 bp, Homo Sapiens
agaaatctacatggaaaaagaaagttaagagtcttcctaatattctcaccgatgatcgatttaaagttatgtttgagaaccctgacttccaagtagatgaagagagtgaagaatttaggcttctgaatccacttgtttcaaaaattagtgaaaaaaggaagaagaaactaagactcttagagcaacaagaacttcgtgaaaaagaagaggaggaagagccggaaggaaaaccaagtgatgcagaaagttcggagagttcagatgatgaaaaagcctgggttgaagaggtcaggaagcaacgcagactcctccagcaggaggaaaaagtgaagcggcaggaacgactcaaggaggaccagcagacagtcctaaagccccagttttatgagatcaaagcaggagaagaatttagaagcttcaaagattctgccacaaagcagaaactgatgaacaaaacccttgaagatcgtttgaaaattgaagcaaaaaatgggacattgagtgtatccgacaccaccgttggcagcaaacaattgacattcacgttaaagaggtctgaacagcagaagaagcaacaggaggctgagaaactgcatcgacaagaaaggaaaagactccgtcgttcggccggacacctgaagtcaagacacaaaagaggacggtcgtttcattgatttgggaagtggtcctacctgtgattagggaggggtacgtctcccccaaactgatcatcgttagggtgttaaacacagacgaggaaacacacgtttttaaagttcatgtacgttcttgtacacagaggtaaagatttgaaaacctgtgccttgtgggttggactttgaagctggccccgccgacggccaccgcacagccccaggggtgtgcttgcgagtcgttgctccctggaaacattgtcctttccccacggctttaatcatgaaaaccaggctggggtttttttaatattgtgaaatgtacaccatgaaatgaaaggtttatcctgtgccagaaaccaaggtttatcatgctctaggaacttttttcttacactgcctaccgccattcatgattaaaccatccagaaataccaaaa

SEQ ID NO: 258201 - DNA, 436 bp, Homo Sapiens
  misc_feature (425)..(425): n is a, c, g, or t
gagatcaaagcaggagaagaatttagaagcttcaaagattctgccacaaagcagaaactgatgaacaaaacccttgaagatcgtttgaaaattgaagcaaaaaatgggacattgagtgtatccgacaccaccgttggcagcaaacaattgacattcacgttaaagaggtctgaacagcagaagaagcaacaggaggctgagaaactgcatcgacaagaaaggaaaagactccgtcgttcggccggacacctgaagtcaagacacaaaagaggacggtcgtttcattgatttggggaagtggtcctacctgtgattagggaggggtacgtctcccccaaactgattccatcgttaggggtgtttaaacacagacgaggggaaacacacgttttttaaagtttcatgttacgttcttgttacaccgnggttaaaggtt

SEQ ID NO: 258202 - DNA, 1490 bp, Homo Sapiens
  misc_feature (637)..(637): n is a, c, g, or t
  misc_feature (640)..(640): n is a, c, g, or t
  misc_feature (646)..(646): n is a, c, g, or t
  misc_feature (648)..(648): n is a, c, g, or t
  misc_feature (733)..(733): n is a, c, g, or t
  misc_feature (756)..(756): n is a, c, g, or t
  misc_feature (777)..(777): n is a, c, g, or t
ggaatccacagcccacacgtgagctccctcctcacccccaggcagggaagcccctcctgccagtccctgtcccctttcagcccaccagtccctctctgctgccggtgatgggaggcctttctagacctggctctttctctcccgtctcagtggcttctctgaggtgctgtacacgcgcgttaacctgttcccttctctatccttccccgtggtactgagctcacgtggactcccagtgcgaaggggcccatgggttgggctgcaggcctggccgtgagcgggggctgcctgcacgctcccctagcctactcttgtgtttaggggatggtgggaacatatcccagtgcccttgcctcataatagatgtggtgactctcccggtagaccctagcaagggtcctccatggtggtgagggactcaggagaattgtagggattgggggaccctgcctgcctggcttgagaacagccctgctgcccttttgagccgagattttgaagtggatgcccgtcttgccagaaatgctgttctcaccagaatgccccctccccttgcccttactggacttggccctgcctgatgccaagcaaagacccttccccagaggcctaccccccatatgtcctcagagaggcngantgtccncnccaggcagtcatgggccctgaggcccctcctgcctggccctgctccccagtggggaggtgactgtgtttcccagagtgtgatctnttttctttccccctaaaaggctnactcactgtgagtgaccttgngcaagttcccaaacctccttgtgcctcagtttccccctctggaaaaaatgggccacctcttgccagcagtagcagggctgcccacgcccctttctccccatgccccatccagcacttgggcgactcatgcctctgcctcagtgggcctgtgggagcctactggagcccagtacttactccccctgagcagcgagcctgcgtctgtctcagctgtccagcgctgagggccagggtcttgtgctgtggggctgggggatgccctcttttctatatttatttcatagaaagtctcctgcgggagcggaaatgcagtccggcctagggctcccagcccttgactgtcctcctgtgagggcctgaagctgggccagggcccgtcggcagcggagccccctctcagcagcccaccgggtccctccaggctgctgcccgtgcgtggtctttctcctccttttcaaagcaatagccgccgggtctgcaaagccctgtcagacagactgggcccttccaaggtcaagccatgtgtctgatgacattcctggtgaagcaaaggagaggaggatgggtcagccctcactgggtgtcacacactgagagaagtcctattgtaaagaaacggaaaaagtcacaaaaaagtttgtataaagacatatttttgtactacatggggactcttcctgcatgtcagcaataaaacttcctgatctggaaaa

SEQ ID NO: 258203 - DNA, 894 bp, Homo Sapiens
  misc_feature (8)..(8): n is a, c, g, or t
  misc_feature (14)..(14): n is a, c, g, or t
  misc_feature (16)..(16): n is a, c, g, or t
  misc_feature (19)..(19): n is a, c, g, or t
  misc_feature (33)..(33): n is a, c, g, or t
  misc_feature (40)..(40): n is a, c, g, or t
  misc_feature (52)..(52): n is a, c, g, or t
  misc_feature (60)..(61): n is a, c, g, or t
  misc_feature (67)..(67): n is a, c, g, or t
  misc_feature (69)..(71): n is a, c, g, or t
  misc_feature (75)..(75): n is a, c, g, or t
  misc_feature (85)..(85): n is a, c, g, or t
  misc_feature (89)..(89): n is a, c, g, or t
  misc_feature (91)..(91): n is a, c, g, or t
  misc_feature (96)..(96): n is a, c, g, or t
  misc_feature (108)..(108): n is a, c, g, or t
  misc_feature (125)..(126): n is a, c, g, or t
  misc_feature (131)..(131): n is a, c, g, or t
  misc_feature (141)..(141): n is a, c, g, or t
  misc_feature (143)..(143): n is a, c, g, or t
  misc_feature (145)..(145): n is a, c, g, or t
  misc_feature (153)..(153): n is a, c, g, or t
  misc_feature (157)..(157): n is a, c, g, or t
  misc_feature (169)..(169): n is a, c, g, or t
  misc_feature (173)..(173): n is a, c, g, or t
  misc_feature (175)..(418): n is a, c, g, or t
  misc_feature (439)..(439): n is a, c, g, or t
  misc_feature (446)..(459): n is a, c, g, or t
  misc_feature (563)..(563): n is a, c, g, or t
aaagcatntttatncnggntcccgcagccattnaaaaccnttttccttgcanatattatnntttttntnnnattntatacaactntggnanaccanacacaaagctantaaccttttttaaaacnncccanttacagtaangnanacacatanacgnccgggcgtggtnggtnannnnnnnnnnnnnnnnnnnnnnnnnnnnnnnnnnnnnnnnnnnnnnnnnnnnnnnnnnnnnnnnnnnnnnnnnnnnnnnnnnnnnnnnnnnnnnnnnnnnnnnnnnnnnnnnnnnnnnnnnnnnnnnnnnnnnnnnnnnnnnnnnnnnnnnnnnnnnnnnnnnnnnnnnnnnnnnnnnnnnnnnnnnnnnnnnnnnnnnnnnnnnnnnnnnnnnnnnnnnnnnnnnnnnnnnnnnnnnnnnnnnctgggtgacagggtgagactntttctcnnnnnnnnnnnnnnggagacacaagacttactgcaaaaatatttttccaaggatttaggaaagaaaaattgccttgtattctccaagtcaggtaactcaaagccaaaaaagtgatccnaaatgtagagtatgagtttgcactccagaaatttgacattactgtaaattatctcatggaatttttgctaaaattcagagatacgggaagttcacaatctaccttattgtagacatgaaatgcgaacacttacttacatattaatgttaactcaaccttagggacctggaatggttgcattaatgctataatcgttggatcgccacatttcccaaaaataataaaaaaatcactaaccttttttaaggaaaatatttaaagttttacaaaattcaatattgcaattatcaatgtaaagtacatttgaatgcttattaaaactttcccaatt

SEQ ID NO: 258204 - DNA, 772 bp, Homo Sapiens
ttccggtctggcggtgagtggggagtgggatccgatcccgtggggctatgtaggggaagttggtggctgcagctgccgtggttttctcctggtgtccagcagaaacggcggcggcgcaaggtgtggctgggccaacccaggatctcccaggaccctccgctctgcgcgacaaggggcccgcgcttgccaaggccgacgggcaggagtgaacgtggcctccgtgggtctgcagccccgataggccaattgtacagaatttaaaccgtctctcagatgtgtacagtagaactcaagaagacagactaccaagggtcatctgaagtcgtgattgggtcactaataacaccaggacaaagttaagggatcactactcaagcataagccccagttttcataagactgctgtgaagatgtttgatataaaggcttgggctgagtatgttgtggaatgggctgcaaaggacccctatggcttccttacaaccgttattttggcccttactccactgttcctagcaagtgctgtactgtcttggaaattggccaagatgattgaggccagggagaaggagcaaaagaagaagcaaaaacgccaagaaaacattgcaaaagctaaacgactaaaaaaggattgaaggactgaacaggcttttgcaaccagaggcaaaatcatttggaaaattacacagcctttggaagaatcccctaaagtttcttcctttgaatttccttgacagtatgatttaataaaatgaaattttggcccaaaaaa

SEQ ID NO: 258205 - DNA, 1028 bp, Homo Sapiens
  misc_feature (757)..(757): n is a, c, g, or t
  misc_feature (772)..(772): n is a, c, g, or t
  misc_feature (813)..(813): n is a, c, g, or t
  misc_feature (817)..(817): n is a, c, g, or t
  misc_feature (829)..(829): n is a, c, g, or t
  misc_feature (841)..(841): n is a, c, g, or t
  misc_feature (844)..(844): n is a, c, g, or t
  misc_feature (846)..(846): n is a, c, g, or t
  misc_feature (857)..(857): n is a, c, g, or t
  misc_feature (867)..(867): n is a, c, g, or t
  misc_feature (870)..(870): n is a, c, g, or t
  misc_feature (886)..(886): n is a, c, g, or t
  misc_feature (891)..(891): n is a, c, g, or t
  misc_feature (899)..(899): n is a, c, g, or t
  misc_feature (914)..(914): n is a, c, g, or t
  misc_feature (934)..(934): n is a, c, g, or t
  misc_feature (938)..(938): n is a, c, g, or t
  misc_feature (942)..(942): n is a, c, g, or t
  misc_feature (951)..(951): n is a, c, g, or t
  misc_feature (955)..(956): n is a, c, g, or t
  misc_feature (968)..(968): n is a, c, g, or t
  misc_feature (973)..(973): n is a, c, g, or t
  misc_feature (976)..(976): n is a, c, g, or t
  misc_feature (981)..(981): n is a, c, g, or t
  misc_feature (1003)..(1004): n is a, c, g, or t
  misc_feature (1010)..(1010): n is a, c, g, or t
  misc_feature (1018)..(1020): n is a, c, g, or t
gtggcaccaaacccctctcaggcaggcagacccagggcctccccgccacaccttgttcatggattttgtcgctggagccatcggaggcgtctgcggtgttgctgtgggctaccccctggacacggtgaagggcctgctggccttgccctaggcctggagccgctcgtgcctgaagcccaattctcctgcaggtcaggatccagacggagccaaagtacacaggcagcgggcactgcgtccgggatacgtatcaccgagagcgcgtgtggggcttctaccggggcctctcgctgcccgtgtgcacggtgtcccatggtatcttccgtgtcttttggcacctaccgccactgcctggcgcacatctgccggctccggtacgcaaccctgacgccaagcccaccaaggccgacatcacgctctcgggatgcgcctccggcctcgtccgcgtgttcctgacgtcgcccactgaggtggccaaagtccgcttgcagacgcagacacaggcgcagaagcagcagcggcggctttcggcctcggggccgttggctgtgccccccatgtgtcctgtgcccccagcctgcccagagcccaagtaccgcgggccactgcactgcctggccacggtagcccgtgaggaggggctgtgcggcctctacaagggcagctcggccctggtcttacgggacggccactcctttgccacctacttcctttcctacgcggtcctctgcgagtggctcagccccgctggccacanccggccagatgtccngtgcgtgctggtggccggggctgttctggaggcctggcctnggcngtggcaccccanggacgtgatcangtnanactgatgagangggagggcanagngctacccgggtctctncactntattgtgncagcgttcgagaagnaggaccccgggtcttttcangggntggnctcaattgngccnnccttcctgtcanatcgnggnttcgngcctatgaggagtgtgaaggtnnccgggnctgctcgnnnagcggtcc

SEQ ID NO: 258206 - DNA, 1718 bp, Homo Sapiens
cctggtggcaccaaagccctctcaggcaggcagacccagggcctccccgccacaccttgttcatggattttgtcgctggagccatcggaggcgtctgcggtgttgctgtgggctaccccctggacacggtgaaggtcaggatccagacggagccaaagtacacaggcatctggcactgcgtccgggatacgtatcaccgagagcgcgtgtggggcttctaccggggcctctcgctgcccgtgtgcacggtgtccctggtatcttccgtgtcttttggcacctaccgccactgcctggcgcacatctgccggctccggtacggcaaccctgacgccaagcccaccaaggccgacatcacgctctcgggatgcgcctccggcctcgtccgcgtgttcctgacgtcgcccactgaggtggccaaagtccgcttgcagacgcagacacaggcgcagaagcagcagcggcggctttcggcctcggggccgttggctgtgccccccatgtgtcctgtgcccccagcctgcccagagcccaagtaccgcgggccactgcactgcctggccacggtagcccgtgaggaggggctgtgcggcctctacaagggcagctcggccctggtcttacgggacggccactcctttgccacctacttcctttcctacgcggtcctctgcgagtggctcagccccgctggccacagccggccagatgtcccgggcgtgctggtggccgggggctgtgcaggagtcctggcctgggctgtggccacccccatggacgtgatcaagtcgagactgcaggcagacgggcagggccagaggcgctaccggggtctcctgcactgtatggtgaccagcgttcgagaggagggaccccgggtccttttcaaggggctggtactcaattgctgccgcgccttccctgtcaacatggtggtcttcgtcgcctatgaggcagtgctgaggctcgcccggggtctgctcacatagccggtccccacgcccagcggcccacccaccagcagctgctggaggtcgtagtggctggaggaggcaaggggtagtgtggctgggttcgggaccccacagggccattgcccaggagaatgaggagcctccctgcagtgttgtcggccgaggcctgagctcgccctgcccagctactgacctcaggtcgaggggcccgccagccatcagccagggttggcctagggtggcaggagccagggaggagtgggcctctttgatgagagcgttgagttgcatggagtcggttgttcatcccagcctccccatggccctcgcctcccatgtctttgaagcacccctccagggagtcaggtgtgtgctcagccaccctctgccccattcctagaccctcacccccaccactgttcctgtgtcttcacgagctgtcccttacaggcaggggcttcccacaggctgggggcctcggggcggggagcatgagctgggctggcaccacgactgagggctcccggcccggcttcttccccacagcaggctgctcagagggggtgctgccgggactgccatgcccacctgagaggggcctggggtggccgtcctcggccggttagggaatttggggtgaggttcctcaggagccctcactctgcctgtggacgctgcacctgccacttaaagaccccaaagactctgttgggaactgttgtcaataaaatgtttctgaggatg

SEQ ID NO: 258207 - DNA, 421 bp, Homo Sapiens
  misc_feature (287)..(287): n is a, c, g, or t
  misc_feature (340)..(340): n is a, c, g, or t
tagccagggaggagtgggcctctttgatgagagcgttgagttgcatggagtcggttgttcatcccagcctccccatggccctcgcctcccatgtctttgaagcacccctccagggagtcaggtgtgtgctcagccaccctctgccccattcctagaccctcacccccaccactgttcctgtgtcttcacgagctgtcccttacaggcaggggcttcccacaggctgggggcctcggggcggggagcatgagctgggctggcaccacgactgagggcttccggccggncttcttccccacagcaggctgcttcagagggggtgctgccgggactgccatgncccacctgagaggggcctgggggtggccgttcctcgcgggttgaggggaatttgggggttgaggtttcctcaggaagcctt

SEQ ID NO: 258208 - DNA, 397 bp, Homo Sapiens
  misc_feature (105)..(105): n is a, c, g, or t
  misc_feature (122)..(122): n is a, c, g, or t
  misc_feature (263)..(263): n is a, c, g, or t
cctcccagggaaataaggtgtgtgctaaagccaaccctctgccccaattccctagaaccctcacccccaaccactgttcctgtgtcttcacgagctgtcccttanaggcaggggcttcccanaggctgggggcctcggggcggggagcatgagctgggctggcaccacgactgaaggcttccggcccggcttcttccccacagcaggctgctcagagggggtgctgccgggactgccatgcccacctgagaggggcctggggntgcgtcctcggccggttagggaatttggggtgaggttcctcaggagccctcactctgcctgtggacgctgcacctgccacttaaagaccccaaagactctgttgggaactgttgtcaataaaatgtttctgagt

SEQ ID NO: 258209 - DNA, 2218 bp, Homo Sapiens
  misc_feature (2163)..(2172): n is a, c, g, or t
gagggaggtctttggctttttttggcggagctggggcgccctccggaagcgtttccaactttccagaagtttctcgggacgggcaggagggggtggggactgccatatatagatcccgggagcaggggagcgggctaagagtagaatcgtgtcgcggctcgagagcgagagtcacgtcccggcgctagcccagcccgacccaggcccaccgtggtgcacgcaaaccacttcctggccatgcgctccctcctgcttctcagcgccttctgcctcctggaggcggccctggccgccgaggtgaagaaacctgcagccgcagcagctcctggcactgcggagaagttgagccccaaggcggccacgcttgccgagcgcagcgccggcctggccttcagcttgtaccaggccatggccaaggaccaggcagtggagaacatcctggtgtcacccgtggtggtggcctcgtcgctagggctcgtgtcgctgggcggcaaggcgaccacggcgtcgcaggccaaggcagtgctgagcgccgagcagctgcgcgacgaggaggtgcacgccggcctgggcgagctgctgcgctcactcagcaactccacggcgcgcaacgtgacctggaagctgggcagccgactgtacggacccagctcagtgagcttcgctgatgacttcgtgcgcagcagcaagcagcactacaactgcgagcactccaagatcaacttccgcgacaagcgcagcgcgctgcagtccatcaacgagtgggccgcgcagaccaccgacggcaagctgcccgaggtcaccaaggacgtggagcgcacggacggcgccctgctagtcaacgccatgttcttcaagccacactgggatgagaaattccaccacaagatggtggacaaccgtggcttcatggtgactcggtcctataccgtgggtgtcatgatgatgcaccggacaggcctctacaactactacgacgacgagaaggaaaagctgcaaatcgtggagatgcccctggcccacaagctctccagcctcatcatcctcatgccccatcacgtggagcctctcgagcgccttgaaaagctgctaaccaaagagcagctgaagatctggatggggaagatgcagaagaaggctgttgccatctccttgcccaagggtgtggtggaggtgacccatgacctgcagaaacacctggctgggctgggcctgactgaggccattgacaagaacaaggccgacttgtcacgcatgtcaggcaagaaggacctgtacctggccagcgtgttccacgccaccgcctttgagttggacacagatggcaacccctttgaccaggacatctacgggcgcgaggagctgcgcagccccaagctgttctacgccgaccaccccttcatcttcctagtgcgggacacccaaagcggctccctgctattcattgggcgcctggtccggcctaagggtgacaagatgcgagacgagttatagggcctcagggtgcacacaggatggcaggaggcatccaaaggctcctgagacacatgggtgctattggggttgggggggaggtgaggtaccagccttggatactccatggggtgggggtggaaaaacagaccggggttcccgtgtgcctgagcggaccttcccagctagaattcactccacttggacatgggccccagataccatgatgctgagcccggaaactccacatcctgtgggacctgggccatagtcattctgcctgccctgaaagtcccagatcaagcctgcctcaatcagtattcatatttatagccaggtaccttctcacctgtgagaccaaattgagctaggggggtcagccagccctcttctgacactaaaacacctcagctgcctccccagctctatcccaacctctcccaactataaaactaggtgctgcagcccctgggaccaggcacccccagaatgacctggccgcagtgaggcggattgagaaggagctcccaggaggggcttctgggcagactctggtcaagaagcatcgtgtctggcgttgtggggatgaactttttgttttgtttcttccttttttagttcttcaaagatagggagggaagggggaacatgagcctttgttgctatcaatccaagaacttatttgtacannnnnnnnnncaataaaacttttcccacccccctcacacctcttctccctagaata

SEQ ID NO: 258210 - DNA, 2469 bp, Homo Sapiens
  misc_feature (628)..(628): n is a, c, g, or t
  misc_feature (1676)..(1676): n is a, c, g, or t
  misc_feature (1690)..(1690): n is a, c, g, or t
  misc_feature (1784)..(1784): n is a, c, g, or t
  misc_feature (1809)..(1809): n is a, c, g, or t
  misc_feature (2283)..(2296): n is a, c, g, or t
gggatctgatctcagctcgggcccgcgttacatcctcctcctcttcttccttcggcccagctttccttaggggctgcaacccggacgccgaggccggtttcggagtggggagtgcccattttctctccttcccacgttcctggcccccagacgccatttgcaggcgggtggcttgggtcagcctccccgcccccacccgactcccgtcacgggagagcgcacaccgcgccccgagaaccaatcagcagccgcgttaggtaaccatgtctgagtctggacacagtcagcctggactctatgggatagagcggcggcgacggtggaaggagcctggctctggtggcccccagaatctctctgggcctggtggtcgggagagggactacattgcaccatggcaaagagagagaagggatgccagcgaagagacaagcacttccgtcatgcagaaaacccccatcatcctctcaaaacctccagcagagcggtcaaaacagccacccacctccaacagcccctgctgccccgcctgctccagcccctctggagaagcccatcgttctcatgaagccacgggaaggaggggaaggggccctgtgccgtgacaagtgcctctacccctgagggncacgccccaacaccccctgcagcccctgcgccacccaagggggagaaggaggggcagagacccacacagcctgtgtaccagatccagaaccggggcatgggcactgccgcaccagcagccatggaccctgtcgtgggtcaggccaaactactgcccccagagcgcatgaagcacagcatcaagttggtggatgaccagatgaattggtgtgacagtgccatcgagtacctgttggatcagactgatgtgttggtggttggtgtcctgggcctccaggggacaggcaagtccatggtcatgtcattgttgtcagccaacactccagaggaggaccagaggacttatgttttccgggcccagagcgctgaaatgaaggaacgagggggcaaccagaccagtggcatcgacttctttattacccaagaacggattgttttcctggacacacagcccatcctgagcccttctatcctagaccatctcatcaataatgaccgcaaactgcctccagagtacaaccttccccacacttacgttgaaatgcagtcactccagattgctgccttccttttcacggtctgccatgtggtgattgttgtccaggactggttcacagacctcagtctctacaggttcctgcagacagcagagatggtgaagccctccaccccatcccccagccacgagtccagcagctcatcgggctccgatgaaggcaccgagtactacccccacctagtcttcttgcagaacaaagctcgccgagaggacttctgtcctcggaagctgcggcagatgcacctgatgattgaccagctcatggcccactcccacctgcgttacaagggaactctgtccatgttacaatgcaatgtcttcccggggcttccacctgacttcctggactctgaggtcaacttattcctggtacccttcatggacagtgaaagcagagagtgaaaacccaccaagagcaggacctggttccagcccactcttctccctgctgcctgggtatcgtggccaccccagtttccagtccttggtnaacaaaatccgganccaagtgatgtccatggcccggccacagctgtcacacacgatcctcaccgagaagaactggttccactacgctgcccggatctgggatggggtnagaaagtcctctgctctggcagagnacagccgcctgctggcctgaggccaaggagaggaatgtcatgcaggggacctcctgggtccgcagtgtactgcgagggagcacagatgtccatcccccgctggggtggagagcggcagcaggcctgatggatgagggatcgtggcttcccggcccagagacatgaggtgtccagggccaggccccccaccctcagttggggctgttccgggggtgactgtgagcgatcccaccccaaacctgagatggggcagcccgtcctgtgtcctccacagggacaagcagtgggaggagtctgaatggtcaccaggaagcccgggctccatcttgacctcctttttcagggacaggagcaacaggcccctcttccctgactctaagcccttccctgtaaggtgaggcagggtctggagagctctttattggaacagatctggtggttcaaataaacacagtcaaaaaacccgcccccacnnnnnnnnnnnnnncatggtcggccgccctcggcccctccgataagcctttcctaaacccattccgtttgggcggcgccggggccccagtaaggtaaggtgaaacatgggtcaatagcctggttttccctagcgaagatccctgggtccagtgacctaggtgcgttgtggatttcctccccccaaat

SEQ ID NO: 258211 - DNA, 2010 bp, Homo Sapiens
ggccacccgccgctaagctgagaagggagagcgagcttaggaccgcctgcccggggcaaccccgaaccaagctttagccgccgaggccgcgtgtcccaaaggccagtcatccctcctctgtgttgccatgggaattcaaggcctggccaaactaattgctgatgtggcccccagtgccatccgggagaatgacatcaagagctactttggccgtaaggtggccattgatgcctctatgagcatttatcagttcctgattgctgttcgccagggtggggatgtgctgcagaatgaggagggtgagaccaccagccacctgatgggcatgttctaccgcaccattcgcatgatggagaacggcatcaagcccgtgtatgtctttgatggcaagccgccacagctcaagtcaggcgagctggccaaacgcagtaagcggcgggctgaggcagagaagcagctgcagcaggctcaggctgctggggccgagcaggaggtggaaaaattcactaagcggctggtgaaggtcactaagcagcacaatgatgagtgcaaacatctgctgagcctcatgggcatcccttatcttgatgcacccagtgaggcagaggccagctgtgctgccctggtgaaggctggcaaagtctatgctgcggctaccgaggacatggactgcctcaccttcggcagccctgtgctaatgcgacacctgactgccagtgaagccaaaaagctgccaatccaggaattccacctgagccggattctgcaggagctgggcctgaaccaggaacagtttgtggatctgtgcatcctgctaggcagtgactactgtgagagtatccggggtattgggcccaagcgggctgtggacctcatccagaagcacaagagcatcgaggagatcgtgcggcgacttgaccccaacaagtaccctgtgccagaaaattggctccacaaggaggctcaccagctcttcttggaacctgaggtgctggacccagagtctgtggagctgaagtggagcgagccaaatgaagaagagctgatcaagttcatgtgtggtgaaaagcagttctctgaggagcgaatccgcagtggggtcaagaggctgagtaagagccgccaaggcagcacccagggccgcctggatgatttcttcaaggtgaccggctcactctcttcagctaagcgcaaggagccagaacccaagggatccactaagaagaaggcaaagactggggcagcagggaagtttaaaaggggaaaataaatgtgtttccccattatacctccttcaccccagaatatttgccgtcttgtacccttaagagctacagctagagaaaccttcacggggtggagagaggattctaaggcttttctagcgtgacccttttcagtagtgctagtcccttttttacttgatcttaatggcaagaaggccacagaggtacttttccttttttagctcaggaaaatatgtcaggctcaaaccacttctcaggcagtttaatggacactaagtccattgttacatgaaagtgatagatagcaacaagttttggagaagagagagggagataaaagggggagacaaaagatgtacagaaatgatttcctggctggccaactggtggccagtgggaggtgatggtggacctagactgtgcttttctgtcttgttcagccttgacccaccttgagagagagccaccaggaaggcgcatcttagcagatgggaggaactgctgagagaagatgggcagaaagctggagcccctggagttggctgtgtctgtgtttgtgactgattactggctgtgtcttgggtgggcagaaactcgaacttgctatgtaatttgtgtctagttattcagaggagtaagatggtgatgttcacctggcaatcagctgagttgagactttggaataagacactggttttcatgcgctgtttttgttttaaagttatgaagaaaaaagtcaataaaattctaaaagtaaccaaaa

SEQ ID NO: 258212 - DNA, 2351 bp, Homo Sapiens
  misc_feature (3)..(3): n is a, c, g, or t
  misc_feature (32)..(32): n is a, c, g, or t
  misc_feature (34)..(35): n is a, c, g, or t
  misc_feature (127)..(127): n is a, c, g, or t
  misc_feature (1470)..(1470): n is a, c, g, or t
  misc_feature (1482)..(1482): n is a, c, g, or t
  misc_feature (1965)..(1965): n is a, c, g, or t
  misc_feature (1971)..(1971): n is a, c, g, or t
  misc_feature (1987)..(1987): n is a, c, g, or t
  misc_feature (1997)..(1997): n is a, c, g, or t
  misc_feature (2005)..(2005): n is a, c, g, or t
  misc_feature (2072)..(2072): n is a, c, g, or t
  misc_feature (2074)..(2074): n is a, c, g, or t
  misc_feature (2102)..(2102): n is a, c, g, or t
  misc_feature (2119)..(2119): n is a, c, g, or t
  misc_feature (2162)..(2162): n is a, c, g, or t
  misc_feature (2227)..(2227): n is a, c, g, or t
  misc_feature (2229)..(2229): n is a, c, g, or t
ccnggaagggagcaggtggtattgcatagttngnncagatggcagtggtacaacacacatacacacacaagtggcctggagcaaaagtgcaaaatccgtagctggcctgtgggtcgggaagcctgtnggactgcaagcatgtggtcttgagttgttcacagcccccctctgacctcagctcctccatttacagaatgagtccgaagactgggtcagagatgctgtttgcaatccaacagtagtcctgagactgctgagaggggaaggagcaggcttccaggcccagaatccccttcccaatccttccacccaccaggaccctctcttttccctgcttgtctgctaagagtctgtgccagacttccctgggacctggcgtgtggtaaacaaaatcagacaactaccacactgcctgccttggacagccttttcttgctaacagtgggatctcaaaggtgtgtcctgatcccatgtctgagccatggtgtcttggtataagctgcggtgacaccaccaaataacataagccaaattttgctttattaacccaaaatgctttaggttctaaagtgggctttgaacactcagactcattgctgagggtcctgggtcctgccaaaccagatgacaaacgggtatactgtgtttctacctgcaggggggcagcccctgtagcccctggatgggtctgatgctgctgtgggctccctggagcccggggtaactcactggagtgacaactttcttctgcagcctggatcattaagcttgagggagctgatgctgaggttctttggacagagtccttaacagtgggaaaacacatggagaatctgtctgctggtgaaagaactctggggctccttatgctggacaacctacagtccctcccttttatcctcattgagacgccaagtgttggaaataccccttcctggggcttctgtccattggattattttaactagattttccttggataaactgtggggtttgtagcctgggccttctgtgaagtcagcagatgacaggagggccaggctctggcctctgaaactgcagccgccctgcctttcccgtccaccaggtggcacaaggaccccaggctgtcattccgcaggctgttctcgggcctgacattgacagagccatccacccagaccatccactaaggccacagctggcccaactgtagctggagcaggaagggctgatggcagcaggatagacactgcaatttcttcctacttaaggctgaccccaggtctctgggttgtcacagtggctgtttccctctacggccacagacgcggtggttaccatgaagaccaaggcctggagggaacagaagcagcatccctgcctgccactccagctcacacagtgaattgagtgtagggacactgcttggtgctggaggcggggtctgctgtccatcagacggaaaggctggtggtgagaagcccagtnccctgtcctgcntgcagtcctgtccagccacccgagcctaggcttactggggaaggggcctcagaagatcttgaagcccttcaggagagtcagggtaggcgccttgcgcttgctctgggcccgggatgacttcacggtgaccagcttggcctgggccacagtgggcatctccttcaggttgatggtggagagcgtgttgaaggtgcagctggccagcccatgccgcgcagtgagcggggcctggtggggcagggccctctcctcggagatgaagaggggccgggtcagggggctcttctccagctcccgccgtgcctctcgcactgcctcgtggaagacatgctgcacgtgctcaaagtccagacaggcagagacctcgaaaaacaggcacccaaacctgcctgccaaagccacaccctctgccttggtgacttgcctgtactgagccatgtccagcttgttgcccagcagcagggcagggatgtgcgctgtgtntccttngcgtgcaaggcaagcngctccaggtngctgctgntgctatcaaagttttggcggctgtcgacgctgtacaccaccaggaaggcatgggcccagttcaggtngngctcgcagttcctgggggtgtccaggtntgcagtgtccatgaccntcaggtggacaggctggtggtccacagtctcttcggagctgtnggtgtcctcagacttgccagccccgcggcgccccaggatggccaggttgacctcgaggggcgcgntntgaggcccgctgcccgcgcggggttttccaaacaccgaggacatggcgacgccctggacggccacgcaggtctgcggccggtgggccccgcgcagtgcgcccgcccgtcggggatcccggga

SEQ ID NO: 258213 - DNA, 1547 bp, Homo Sapiens
  misc_feature (407)..(443): n is a, c, g, or t
  misc_feature (604)..(613): n is a, c, g, or t
  misc_feature (1433)..(1444): n is a, c, g, or t
gggggtctagcttttctggtgaagccagttcctgttcctgccttctttcctaagggcctgctcgctctggcttccaccacagtgccaagcccctctggtctccaggggagggattgctgtgttacatagcaggatcggggtaatcaggccaacaggggagatggtggcgatttttcttttttaatctgtatttattatacagtcttgtttctttaagcccatactctgtctcttcccccgtcttcctctcaggtgacagtatcagtgagtgccatacagaattgtgtattcaccagcatcatgaaacagttgtggtcttttgagttgatcttggcagagtaaagggacgtgtcctggagccattcctgaatctccccttctttgtgacagctcctcccacccccccnnnnnnnnnnnnnnnnnnnnnnnnnnnnnnnnnnnnnctaaggcacttcacttagagactggagtcctgcttataatcatgcatataacctttactttgatggatctggccagaggggtgttggagcccagcccacccacataccagtcaagctcttaggggagcagaagaaaagcaggaagaatttaaatgtttaannnnnnnnnnaaattgacttttctagttattaaaagttgcttgtttcagcagtgatattgtataaagaacatcttgtaagatactcctgacatcttgctttagcacatgtacagtacagtttctatgataatgtgtttgctctaacttccctggcttctccttcagcccatccactctcctctagagcagttgggttggaggctcattgaggcaagcagcaacattggagggggagcagggcagtgctgtgtctgctgcctcccatgcccgttctgacctcagccttggaactcctcaagaacctgaagattccagtggtcagtgtcggtggggggtgggaggagagagcggcagagaagctctgagagccccttcccccacaacaaatctagctctagttgttatatttaggcaaaactttgtagtcttctttcccttttatgatggattttgataaaagtacaaaacagggtttttcttttttatcacctttgaatttggaaattttgagcacccaagctcttctgtacctatttaaagtccaccaaggggactgcagctcctagaacatgagaatcaagcctcttaattttaaactgcggaatgtggcctctgcttcctccgtcctcctgcccaaggacgacgaggattgctccagggctgctgggtagtttaccgtcccttctataggcatggagttggcactgacatcacagcttcataaccccaccaccgccagcttcccctgcctcctacatccagtctgttcttgttcatagtgagaatcctgtgttcccacttcagtgacacctgaattgtttgttgttgnnnnnnnnnnnnattgtcttcaaagaggaagggccccattaaagggtgaacttgtaataaattggaatttcaaataaacctcatgtacttgtgtttataaagaagaaacccaaaa

SEQ ID NO: 258214 - DNA, 1065 bp, Homo Sapiens
  misc_feature (485)..(485): n is a, c, g, or t
  misc_feature (804)..(804): n is a, c, g, or t
  misc_feature (819)..(819): n is a, c, g, or t
  misc_feature (828)..(828): n is a, c, g, or t
  misc_feature (832)..(832): n is a, c, g, or t
  misc_feature (916)..(916): n is a, c, g, or t
  misc_feature (954)..(954): n is a, c, g, or t
  misc_feature (964)..(964): n is a, c, g, or t
  misc_feature (973)..(973): n is a, c, g, or t
  misc_feature (978)..(978): n is a, c, g, or t
  misc_feature (985)..(985): n is a, c, g, or t
  misc_feature (1003)..(1003): n is a, c, g, or t
  misc_feature (1005)..(1006): n is a, c, g, or t
  misc_feature (1018)..(1018): n is a, c, g, or t
  misc_feature (1025)..(1025): n is a, c, g, or t
  misc_feature (1037)..(1037): n is a, c, g, or t
  misc_feature (1050)..(1051): n is a, c, g, or t
gctgggccgggcgcgtcctacgcagcagccgcgagccgggctgcgggtgccagacggttcccggcggggggcaggggcggggcgccgcaggaggccgggactcctggcggaggagccccaaggaggcccgcctgacgactgaccagttgccatggcatcctactacgagatcctagacgtgccgcgaagtgcgtccgctgatgacatcaagaaggcgtatcggcgcaaggctctccagtggcacccagacaaaaacccagataataaagagtttgctgagaagaaatttaaggaggtggccgaggcatatgaagtgctgtctgacaagcacaagcgggagatttacgaccgctatggccgggaagggctgacagggacaggaactggcccatctcgggcagaagctggcagtggtgggcctggcttcaccttcaccttccgcagccccgaggaggtcttccgggaattctttgggagtggagacncttttgcagagctctttgatgacctgggccccttctcagagcttcagaaccggggttcccgacactcaggccccttctttaccttctcttcctacttccctgggcactccgatttctcctcctcatctttctacttcagtcctggggctggtgcttttcgctctgtttctacatctaccacctttgtccaaggacgccgcatcaccacacgcagaatcatggagaacgggcaggagcgggtggaagtggaggaggatgggcagctgaagtcagtcacaatcaatggtgtcccagatgacctggcactgggcttggagcngagccgtcgcgagcngcagccgtnagtnacttccaggtctgggggcactcaggtccagcagacccctgcctcatgccccttggacagcgacctctctgaggatgaggacctncagctggccatggccttacagcctgttagagatggagnagctgggaanaacccgcanatgtntcttgantggatgccggttcaagantnntgccaattccanaggaaanccttccccattngctgggggggccnncattttccctcacc

SEQ ID NO: 258215 - DNA, 996 bp, Homo Sapiens
  misc_feature (955)..(955): n is a, c, g, or t
ggcctgggtggcgaattcggcacgaggcaggaggccatcaaaaagcctctgacacaaaagcgaaagcttcggatctacatttccaatacgttcagtcccagcaaggcggaaggcgatagtgcaggaactgcagggacccctgggggaaccccagcaggggacaaggtggcttcctgggaactccgagtggaaggaaaactgctggatgatcctagcaaacagaagaggaagttttcttcattctttaagagcctcgtcattgagctggacaaggagctgtacgggcctgacaatcacctggtggagtggcaccggatgcccaccacccaggagacagatggcttccaagtaaaacggcctggagacctcaacgtcaagtgcaccctcctgctcatgctggatcatcagcctccccagtacaaattggacccccgattggcaaggctgctgggagtgcacacgcagacgagggccgccatcatgcaggccctgtggctttacatcaagcacaaccagctgcaggatgggcacgagcgggagtacatcaactgcaaccgttacttccgccagatcttcagttgtggccgactccgtttctccgagattcccatgaagctggcagggttgctgcagcatccagaccccattgtcatcaaccatgtcatttagtgtcgaccctaacgaccagaagaagacagcctgttacgacatcgatgtggaagtggaccaccccactgaaggcccaaatggagcaattttctggcctctaccaccaatcagcagggagatcgccctcccctgatgccaagatccatgaaaaccattgaggccatcaacccagctggaaaacccagagagattccatggcccagttttaaccaccgaacccccaggacttcatccaggaaatgggccccgttcccagcggccgagaactccagatcatccactgatnggaatgggaaatcctgaagggagagaagaaccacctccttt

SEQ ID NO: 258216 - DNA, 1252 bp, Homo Sapiens
cctcataggtcctaagtagcgaggcctgggtggcgaattcggcacgaggatcagcaggagatcgcctcccttgatgtcaagatccatgagaccattgagtccatcaaccagctgaagacccagagagatttcatgctcagttttagcaccgacccccaggacttcatccaggaatggctccgttcccagcgccgagacctcaagatcatcactgatgtgattggaaatcctgaggaggagagacgagctgctttctaccaccagccctgggcccaggaagcagtaggcaggcacatctttgccaaggtgcagcagcgaaggcaggaactggaacaggtgctgggaattcgcctgacctaactgctcagggatctttcttcccagccctggagcctggagggagaccaccctctgggtccttgctggggccgcagacacgtaggctggggtgaggagtgtctgctgtcaccctctactctccagctttagttttataaatgtagtgataggattccttgttgcttggtccccaaagccttatactttttgcattggctttaattgggttcagcagatgcctcctctgcccccctgcaggcaggcccaagtaggactgctggaggctgtgctttgacattgtaagacatttccgaaccaaaggctgctgggtttgcatgtttacagactccccctggggcgagggtcagagctggctctggggagctgggctaggaagaggaggtgcagcccagactcttcctagcctttctaaaccaaagttctttgccattcctacaagcccagccttgctgctggtttttttcctttcctttgggtatttgcactattttgggagcaagttttctatgtgggagccactttttttgtacaggggtaaagttgggggttttcagggagcctgttaggtgcctccttcttttctttcctcaatctatgcaagcggctctggccgccatcatctcccgggatgccagagggctgcctctccagcggcttgggccggggaggggacactccagttctctagcatggcctgaggtatggggtatgtgcatgtggaggccagggtaaggtgaatggggaggctgggaggactggtgttgccctttggagcttggtgaggagggtgggcctagggcttggcgagtgccacttctggcaggtttggaaatttccaaataaatccttttgtctattaggacttgaatcactccttccttgaaatccttgt

SEQ ID NO: 258217 - DNA, 1079 bp, Homo Sapiens
  misc_feature (8)..(9): n is a, c, g, or t
  misc_feature (53)..(53): n is a, c, g, or t
  misc_feature (59)..(59): n is a, c, g, or t
  misc_feature (62)..(62): n is a, c, g, or t
  misc_feature (64)..(65): n is a, c, g, or t
  misc_feature (68)..(68): n is a, c, g, or t
  misc_feature (78)..(78): n is a, c, g, or t
  misc_feature (86)..(87): n is a, c, g, or t
  misc_feature (107)..(107): n is a, c, g, or t
  misc_feature (699)..(699): n is a, c, g, or t
  misc_feature (1073)..(1073): n is a, c, g, or t
agaggcannaactagtgtgggaagtagggactgaagttgggatagctgccacntttatnccntnncanttgacagagntgggcccnntgccagtctctccactgatnaagaatatgctcctcttcaggtaataaagtggggaaaaggaacgtcttctcaatgcaagaacataagctttctcgtatatacctgtatgctacagtttttcacatggaattccgttttctgaggtacagcacattttaggtaacagtatttaacttgaaattcatcatgggagtctgctgctataccaggcacaagataaaactccaaaatttctgtttacattgacctttacatttaaagctgttcatccatggtgcctccccaaatcataagaccaaagaccaccaaacgcagggtggactctgctcattattctttgacccagaaagactggagaaggtatgtgctttaagtgctgctctacctgaaaagaaatcctttaaattacctatggaagtgatgtcctcagataatcttaatgactattttgacatttataaatagaaatgattatggactttgatctgccatacggaggttcggaacctggagaatggctgtgataagtaggttttgattgagtgaaagcatgagcttgttcagagtgaggggcatagtgaaaaagggacagccatgccgcaaaatcaaatnatttgcatccccacagcatcctgaataccgactacctcttcacttgctaaagcagctaaactgtgaagctctaagtggtttgggtttgttgtttaaccttagcgagatcctttaactgcagcaatattcaagccagatatttggaagcaaatgatatttcctcttgcagtgtccacaaatctgaatattaggggcatgaaattaggcttaccatctgatttgtaattacaattttggaattctctgttttagttgctgaggcctgagttttctggctcttaaagcatagatcatttcacctgatgtttttgaagcatcctaagtacagtagagtagaaaactgatttctttgttaattgtacactgaataatgngtttta

SEQ ID NO: 258218 - DNA, 976 bp, Homo Sapiens
cgagcctggccagcccttgaccaagaacaagttcaaagtcctttacgagaaggagcagaaggggcccgtgaccgccctgtgccactgcaatggccacctggtgtcggccatcggccagaagattttcctgtggagcctgcgggccagcgagctgacgggcatggccttcatcgacacgcagctctacatacaccagatgatcagcgtcaagaacttcatcctggcagccgacgtcatgaagagcatttcgctgctgcgctaccaggaggaaagcaagacgctgaacctggtgtcgcgggatgccaagcccctggaggtgtacagcgtggacttcatggtggacaatgcccagctgggttttctggtgtctgaccgcgaccgcaacctcatggtgtacatgtacctgcccgaagccaaggagagtttcgggggcatgcgcctgctgcgtcgggcagacttccacgtgggtgcccacgtgaacacgttctggaggaccccgtgccggggggccactgaagggctcagcaaaaagtcggtcgtgtgggagaataagcacatcacgtggtttgccaccctggacggcggcatcgggctgctgctgcccatgcaggagaagacctaccggcggctgctgatgctgcagaacgcgctgaccaccatgctgccacaccacgccggcctcaacccccgcgccttccggatgctgcacgtggaccgccgcaccctccagaatgccgtgcgcaacgtgctggatggggagctgctcaaccgctacctgtacctgagcaccatggagcgcagcgagctagccaagaagatcggcaccacaccagacataatcctggacgacttgctggagacggaccgcgtcaccgcccacttctagccccgtggatgccgtcaccaccagcacacggaactacctcccaccccctttttgtacaaaacacaaggaaaaacattttttgcttgaata

SEQ ID NO: 258219 - DNA, 1508 bp, Homo Sapiens
  misc_feature (1070)..(1078): n is a, c, g, or t
cgggatcgggcatggtaacggctcggaagcctaggaggctgggccggagggaggcggaggaaccggtgttcgccgccgccgctgcttcagcttattccttgtggcctctgcgggtcctgcctcagccatgatgatccacggcttccagagcagccaccgggatttctgcttcgggccctggaagctgacggcgtccaagacccacatcatgaagtcggcggatgtggagaaattagccgatgaattacatatgccatctctccctgaaatgatgtttggagacaacgttttaagaatccagcatgggtctggctttggaattgagttcaatgctacagatgcgttaagatgtgtaaacaactaccaaggaatgcttaaagtggcctgtgctgaagagtggcaagaaagcaggacggagggtgaacactccaaagaggttattaaaccatatgattggacctatacaacagattataagggaaccttacttggagaatctcttaagttaaaggttgtacctacaacagatcatatagatacagaaaaattgaaagccagagaacagattaagttttttgaagaagttctcctttttgaggatgaacttcatgatcatggagtttcaagcctgagtgtgaagattagagtaatgccttctagctttttcctgctgttgcggtttttcttgagaattgatggggtgcttatcagaatgaatgacacgagactttaccatgaggctgacaagacctacatgttacgagaatatacgtcacgagaaagcaaaatttctagtttgatgcatgttccaccttccctcttcacggaacctaatgaaatatcccagtatttaccaataaaggaagcagtttgtgagaagctaatatttccagaaagaattgatcctaacccagcagactcacaaaaaagtacacaagtggaataaaatgtgatacaaaataaactcactatggaatctgactggacaccttggctatttgtaaggggttatttttattatgagaattaattgccttgtttatgaacagattttctgtagccttaaaggnnnnnnnnntaaagatcgttacaggcaggtttcactcaactgctgtttgtactgtctgtcttcacattcatattccagatttatattttctggagttaaatttggatgatttctaaattatcacaaagtgggacctcagcagtagtgatgtgtgtgtctcatgagcagtgagcacagtctgcattcatcatgaaacactatcttctaccaggaggaggttaatgtaaatcaccaaatcccaatgccttgtgactttcataggattcctgatcatgcatgttgatgtactggctcttcactttgggctttctgatgtttattcacacctttggagagttgcaacttgccacatacgaaattagtctcatagtgtagtgaacttcaaccccaaaattttaaaaatgtatttccccccagttttaaattgcctttgaaattt

SEQ ID NO: 258220 - DNA, 1506 bp, Homo Sapiens
  misc_feature (34)..(34): n is a, c, g, or t
  misc_feature (94)..(94): n is a, c, g, or t
  misc_feature (98)..(98): n is a, c, g, or t
  misc_feature (129)..(129): n is a, c, g, or t
  misc_feature (213)..(213): n is a, c, g, or t
  misc_feature (216)..(216): n is a, c, g, or t
  misc_feature (218)..(218): n is a, c, g, or t
  misc_feature (221)..(221): n is a, c, g, or t
  misc_feature (265)..(265): n is a, c, g, or t
  misc_feature (278)..(278): n is a, c, g, or t
  misc_feature (342)..(342): n is a, c, g, or t
  misc_feature (362)..(362): n is a, c, g, or t
  misc_feature (451)..(452): n is a, c, g, or t
  misc_feature (468)..(468): n is a, c, g, or t
  misc_feature (517)..(518): n is a, c, g, or t
  misc_feature (526)..(526): n is a, c, g, or t
  misc_feature (528)..(528): n is a, c, g, or t
  misc_feature (531)..(531): n is a, c, g, or t
  misc_feature (574)..(574): n is a, c, g, or t
  misc_feature (1254)..(1255): n is a, c, g, or t
  misc_feature (1315)..(1316): n is a, c, g, or t
tttctttcaggaaatttctccatgtggaaatttntcctgtttaatgatgtccacagaccagccttctaaagaaaattcttattttgcagtaggntcantacagatttgatgatggaattatctgccagntgcccagttctccctttgaggatacacagatagactccagtgtcattagactatcttcccctgaaatgcttttactatggttcntgnanaanttcagggtgtgccacctaccagccatccagacaaaaagtcatgntgaccacccaggntgcagcagaaggaggagatgagctctgggcaagtatgaaaagatattgatggcaagaaaactcnttttttccccaaaaatatgnaggttaatgataattattcttctcatcaaaatgtttttgtctccctccttccaggtaaaagtgctaatgcttttagaattaaaaaatgnnattggccataacctgngccttcttttgcactcatctggacttatggtcttcatctccaaatgagnnaaacaggngngantggaacttctgagccctaggggcagcattcacttgaaagtcanttacgtccaaagtaagacactcatgataaggacacttctgaaaaacagagtgaggtgtctgctttcatgggagtaaacctattacttccacttacaataataattctcttaacatctccttaatgctccctgataaatctcagctcctcctcaaccagctctaaatgagaatgacaaggaaagttgtatgaggccaagcagaatgagatctgtagctgcttaagagtggctgataattaacccttctctctcttccccaatcccagtgggtccatgacttttggacaataaagcacccaacctgtgacagcactaagtgattcctgtgccacaggcgggaagcctctcagtgaggctgtgcacttaacagtcatcccaatgacagggaggacagtcttatacacaggaagtttataatgaactgaatttgacaatggcagcctgttcatgtgcagaaactaagatcagtgcctggggacaggcagtcaacttttaaatattaaacagcatataaatatgtatagccttgacctgaacacttgagttatacgttctgaataattatcatttctgaaagactaagggatagatttaccaaattaaaatacagaatctataggatcatgatgttctgcatttatagcattacacgatcaaagccccatctggataaaaggcannaggcactttaaaaaagtccttagagattagatcctttgatctcatctgaagtccactggnnttcattttcactatatgttacttcatataaatcgggtaaaaattatagtcatgatcataagtagggtcttgagatgtggcaatcaaagcctaaagattatacttaactttcagtttcaaactaagtcccccatattcaaactggaggcatgagtcagagaaatttcaaaggttaaatgctactgacttta

SEQ ID NO: 258221 - DNA, 1771 bp, Homo Sapiens
ttcgcgcctttctcagatactgaggaggcttgaacctgtgggtgggaggtgaagcggaacggtcccggcgggactgaatgcagtcgggaaggggaggacgggaagtctagccggcttggacccgccccactctgttacctgccagatgacgctgaggaaactgcttttcttctcgaggcctccgttgcctcgtctgtgcccgggcggtggtgcttacccggcggggtcgcagggaggtctcgtggcggcgcgtgttgggtctgcgattcccatatggggtgcttgggcagcatgagcccaggactgtggacagcatggtgctcacggatttgtggctccacagacatcccaagaaggacaacccgaggcgaggcttgtggctggccaactgccagcggctggaccccagcggccagggcctgtgggacccggctatccgagtacatctacttctgctccaaacactttgaggagaactgctttgagctggtgggaatcaggtgggcctccctgccggccgacgctggggtaggatgtggggctcccggcggactgggacagctgcaggtcatggaagtcccttgagcagcctgcgtccaagggggctgtttcctgttcccagctctgcacagtgaaacccacccccaggatcactgtgcctgtgacacaaggggaaaacaggagcctttccagagagtatctttcagagccccagtcttgccagcaagtccacaaatcaaagaattctttctggctggtcagcccagctcggcttatgcaggctttccacacacctggactgtgaggagtcctgcggggaagcgattggtgtagctgtaacttggcgttccccagacgtattgtttgcacgatgccttccagcatcccacggcgctgctgctgggggcagattggcctggggaggcagcacttgctctccagctcatctgggttgcttttccccgcagtggatatcacaggctaaaggagggggcagtccccaccatatttgagtctttctccaagttgcgccggacaaccaagaccaaaggacacagttacccacctggccccctgaagtcagccggctcagacgatgcaggaagcgctgctccgagggccgagggcccacaactccattttctccacctccacctgctgatgtcacctgctttcctgtggaagaggcctcagcacctgccactttgccggcctccccagctgggaggctggagcctggccttagcagccccttttcagacctactgggccccttgggtgcccaggcagatgaagcaggctgcagcgcccagccttcaccagagcggcagccctcccctctcgaaccacggccagtctccccctcagcgtatatgtgcgcctgcccccacccgccggagcctacatccagaatgaacacagctaccaggtgggcagcgccttactctggaagcggcgagccgaggcagcccttgatgcccttgacaaggcccagcgccagctgcaggcctgcaagcggcgggagcagcggctgcggttgagactgaccaagctgcagcaggagcgggcacgggagaagcgggcacaggcagatgcccgccagactctgaaggagcatgtgcaggactttgccatgcagctgagcagcagcatggcctgaggggctgctgcactgaccgaggggctgcccagcaagactgcagcctcttcctccctcagatcccaccagacccaccaggtgccataataaagcggattctagacggaaaaa

SEQ ID NO: 258222 - DNA, 526 bp, Homo Sapiens
gtctgagccggctgacttcagcggggccaggtgggtaactgtgtcctttggtcttggttgtccggcgcaacttggagaaagactcaaatatggtggggactgccccctcctttagcctgtgatatccactgattcccaccagctcaaagcagtcctcctcaaagtgtttggagcagaagtagatgtactcggatgccgggtcccacaggccctggccgctggggtccagccgctggcagttggccagccacaagcctcgcctcgggttgtccttcttgggaagtcaccgcccgggcacagacgaggcaacggaggcctcgagaagaaaagcagtttcatcagcgtcatatggcaggtaacagagtggggcgggtccaagccggctagaattcccgtcctccccttcccgactgcattcagtcccgccgggaccgttccgcttcacctcccacccacaggttcaagcctcctcagtatctgagaaaggcgcgaagcctctacgcagttgcgacccgaggcgagcaac

SEQ ID NO: 258223 - DNA, 1656 bp, Homo Sapiens
  misc_feature (18)..(18): n is a, c, g, or t
ggcgtgcgggaccccttntatacggggccgccctgtctgggggtcgaggtggccgctccctttgtccttgtggctttcacgggcaggggcggtcccagcgagatcgtctcataaccaaaccagccctgtgcacgagaagtcacgccatgccccacagcctccggtcctggctgctggtggctcggggacccgcagggcaggagggtcccgggtctcgcagttccatgagccccagccgcggggacccccatggacaaacttccggggctgcacctgccggagcagcgtgtcccaagcatcggaggtcctttctcagcagggcggagccctagtggacagagccctgagtggcaaggcgggagtcagggctctcggagtcgtcaattcagcaagaaaggcccctggcccgccacctttcaaactggaggtgggtgtctagggtgcggaggcagaggcacagagaggttcagaacatgctgggctcctggggatccccccaccaagcagggaagctgaggtgcgccgggaagccaggccaaggcagggaccccttaacggaagcctgcaccagctaatgggagcagcgaggagcaagaggaagcgcggggaccccaaggtctggaggtgtcttcctcacagacgagcgcgagccacgcggggctgggactccaggggaacagcaccagagggcgtggggcctgggcctcgggcccaccgggggagcccacaaccggccagaagctgggctcggtcgagagttaatccggactgagagcaggccagtggcgcctgagtgcgttcaggctcaaggtctccaggagacgctctggagtcctcctgcaatgcgcctgcgtggctgcagctctgctcagcaccgtgcgcactgggctccagggaacccggtcaggggctggccgtgacccaaactctctgtgggccacagtccctggggcatccccgtgagtcccacaagacgaggccacgttacgaagctgccaccagctccgcctgcctgggcctggccttgacagggacgttttctgggatcttctcaggaaggggctcggagggaacctctggcagctctatttgttcctgagtgattgcgctcagctcctccaggatggcgtcttcatcctcctgagtgaagcttcctgccaggagctcgtctatttgccgctggtactccacggcctcctgcgtctcgtccaggatcctctccacctcttcaatggacatcacctggtgcatcttgttcagacactcatttccaaactgcagcccctccatcactttcatttcgatctgggtgaactcaatactctgaaccatggcctccaggctgctgatctggttctccgtcctgtccaggagctgctcctggtatcgcttcttcttgagcagcagcttggcccgttccttcctgccgtcccgcagcagctgccgggccagggcgcgctcgcgctccagctgctgggcgatcctcttctggtactgcctcagcttgtcccgctgctgcttcagttgcaggatggccttgtcctgctccgtgacgcggctctgcatcttgcggccgaacaggttacccatggcggcgcccgcccctggcccgggacccaccaagtccaatcgccaccgccgccccgcggccaccgt

SEQ ID NO: 258224 - DNA, 1977 bp, Homo Sapiens
  misc_feature (1551)..(1560): n is a, c, g, or t
  misc_feature (1952)..(1952): n is a, c, g, or t
ggatatcaagcccccaagatggcggcagcggcggaggagcggatggcagaggaaggaggcggcggccaaggcgacggcggttcctctttggcctccggctctacccagcgacagcctccaccgcccgcgccacagcacccgcagccggggtcccaggcgctcccagcccccgcgctggctccggaccagctgcctcaaaacaacacgcttgtggcgctgcccatcgtagccatcgagaacatcctcagctttatgtcctacgacgaaattagccagctccgcctggtttgtaaaagaatggacttggtctgccagagaatgttgaatcagggatttctgaaagtggagaggtaccataatctatgtcagaaacaagttaaagcacaactcccaaggagagagtcagaaaggagaaaccattcattagctcgtcatgcagacattcttgctgctgttgaaacaaggctgtcactattaaatatgactttcatgaaatatgtggattccaatctctgttgcttcatcccaggaaaggtgattgatgagatttatcgtgtgttgagatatgtcaattctaccagagcccctcaacgagctcatgaagtacttcaagaattaagggatatatcctctatggcaatggagtactttgatgaaaagattgttccaattttaaagaggaaattaccaggatcagatgtttctggaagactcatgggctctcctccagttccaggaccgtctgcagccctaacaacaatgcagctcttctccaagcaaaatccttcaagacaagaggttaccaaactccagcagcaggttaaaacaaatggtgctggcgtgactgttctcaggcgtgaaatttctgagcttcgcaccaaagtgcaagaacagcaaaaacagcttcaagaccaggaccagaaactgctagagcagacccagatcataggtgaacaaaatgcacggttggcagagctagaacgcaaactacgagaagtaatggaaagtgctgtaggaaattcctcagggtccgggcagaatgaggagtctcctcggaaacgaaaaaaggccacggaagccatagactctcttaggaaatctaaacgtcttcggaatagaaagtaaattggaatgtggttctagttccagaggaagacacagcttagtagcttaagcagttatgcatatcaggatactgtgagcaacatggtgtcccttaagcttctaggctttcagaacacaacttaaacttgaactcttatggttgggacattcttttcctgcttctcctgattgaactgatgcacagaatctttttactttgcaatagatttgtactaaccagacctgttctatcatgttttgaggagttaacttttttctgtgcagataatgttgaaagtaagttaatttgtttctgcatatatgcacatacatacgtaaggatcttaaacccagtcttgacagactagaagttaagtttaatacagaaaatgtcctgttcacttgaaagaaaagacctactttttaaatggacactatcttggttcnnnnnnnnnnaagtcatctttttgttataagtgacctttgtctggaatgtctgaaaagtagttaatgctttttggtattgaagtaatgggtaactaaaatggacttccatagtattgactgtagaaggagcctctacaatattgactatatatttttataaactactggcaaggaacttacccagctgttatacatgttttcagttctctttgggggccatgtcctacatttgcatggatggatgcatgcattgcctagtcaactcacttaaaaagctcttgcactggtattgatcttgaacctctatacttctccactttttagagtcggcgtcttagtttatttaaacgcttaacatcttccaccgcaacagcttgcctctagagggggaattgttcatnccatttgtcctccagttttatagga

SEQ ID NO: 258225 - DNA, 735 bp, Homo Sapiens
gcggcggcaaaggcgacggcggttcctctttggcctccggctctacccagcgacagcctccaccgcccgcgccacagcacccgcagccggggtcccaggcgctcccagcccccgcgctggctccggaccagctgcctcaaaacaacacgcttgtggcgctgcccatcgtagccatcgagaacatcctcagctttatgtcctacgacgaaattagccagctccgcctggtttgtaaaagaatggacttggtctgccagagaatgttgaatcagggatttctgaaagtggagaggtaccataatctatgtcagaaacaagttaaagcacaactcccaaggagagaagtcagaaaggagaaaccatttcattagctcgttcatgcagacattcttgctgctgttgaaacaaggctgtcactattaaatatgactttcatgaaatatgtggattccaatctctgttgcttcatcccaggaaaggtaaaatagaattgcttgcctagaacagctggactgccctacataaacttattatacagttatgaatttttgattttagaaatgttagaattgtttctacttctctgagtttctactaatgaatttgtttgctttctgtacagttataaatatgtatcatttgtatgatctttatatttaaaattctaattatggaaataggtcggaaaccctaatattctttagaggaaggttttttaaggagttccatactcag

SEQ ID NO: 258226 - DNA, 1795 bp, Homo Sapiens
  misc_feature (112)..(112): n is a, c, g, or t
  misc_feature (181)..(181): n is a, c, g, or t
  misc_feature (243)..(243): n is a, c, g, or t
  misc_feature (247)..(247): n is a, c, g, or t
  misc_feature (340)..(340): n is a, c, g, or t
  misc_feature (344)..(344): n is a, c, g, or t
  misc_feature (410)..(410): n is a, c, g, or t
  misc_feature (412)..(412): n is a, c, g, or t
  misc_feature (420)..(420): n is a, c, g, or t
  misc_feature (444)..(444): n is a, c, g, or t
  misc_feature (510)..(510): n is a, c, g, or t
  misc_feature (1011)..(1126): n is a, c, g, or t
  misc_feature (1143)..(1177): n is a, c, g, or t
ggaaacatttcctgaattatcactggatatttgaaacaaagaaataaaatatataaatatgaaggtcattctccaagtattagaacagaatacggatggaatcacttcagtnaagttattcataaacatttgcatggttacccacatactgtatcaccttccaaaaaatcaaacacatganaggaaggggaacctcaaatgagatgtcttttctccatgggatttggtcaacgcatatcagtnaganaatttctttgctatatacacaacataaacatttgaaaatgcagaatacattgtgtaaattaaaaattttgtcagctttgttgtatggggagtnactncacagaccacccacacaaacatttaaaatatactgtgtatatattatcttacaaaaatcgcatgtntnagggaatnaggcctttatttccagagcatctnaacataggattaatatgggtatattcatcttttatattttagacttcaaattctttaacatctcanctattaacattatgcgtagtacctaagacaacatatgagtagtggcataacacaatttcaactacagtgcttggttgcattcacatgacgtaccatctagaactgaccaaacagaatttcagaactgcccaatttaaagacctgtgaagaaaataaaatgcaaccccgtcatatgagcccagtttgtctctcagagcgttgctatatatactggaagcctgacacttcagagtatgtacttaaatgaagtatttggtaataatgtcaacatcagcctgcaaagtgttctagtcagcataaaaatctgaaagtctaaaaatacttctgtatgttaattaaaactaactgctgtttgaatttgagtatgttttgtctggaggctagttggagatttttttctcccttctagcaacaaattggctaagtggtcaacctctgtggctcacagttttgtaaaaaaagcatacagaaaagaaactaggctgggcacagtggctcatnnnnnnnnnnnnnnnnnnnnnnnnnnnnnnnnnnnnnnnnnnnnnnnnnnnnnnnnnnnnnnnnnnnnnnnnnnnnnnnnnnnnnnnnnnnnnnnnnnnnnnnnnnnnnnnnnnnnagaaactgtctctcttnnnnnnnnnnnnnnnnnnnnnnnnnnnnnnnnnnntctggaatttggatattattctgatagtgttaagctggaatgggaggagtggtggagtttaaggattcttggtccaagactttttcaaagatcataagcactaatccacattagctgttggtataagcagccttcaaaaacaccacaaaggggagtcaacaattcgagtgtaaactgatggctcagggccttctctgccctttactagccttcatgatctgtcgggtctcagcagctcagggcacaggaggaggtgggtctcctgactggcctgtgcattctcccaaacaagatgtttaagactctactttatctcgtcacaaatacacagctttgaaataccattagtctttttctctaggatataattagaaaaagccaggcatggagatagaaaagacataattagaaaaagtattgtatacatctgcaaattcttcaacactgggtgatttgaaatttgactttaatatttaaaaataaatttattaataatctaaattttcaagtcaaattttctaaactcaaaacataaacagaagtgaacttgttatttaataaacagattttttcaacagctatatggttaagatgttcttaaccatgctctcagaaaag

SEQ ID NO: 258227 - DNA, 1259 bp, Homo Sapiens
  misc_feature (644)..(678): n is a, c, g, or t
acagcacctcgaactacaggccctaaagagaaattgcctcaaaccacaagtgctgtaacttcctcccctttctgtcaattggttgtctttaaatattgcaaaagtcctgatgctaaacagtatttggagtgttttcagtgtctgtactactgttgtagaccttggtatttttttaaacactgttaactgaaatgttttgatgatttgtatgtgatttgtgtttctaaacttctctttacattaatgttgttactggtgaaaggcatgagagcagcactaagtcctctgtgtaactgccattgtctttccaatccccagtagaccagtaaataaataacacatcagtgtcttctagaaggtgcctgaccaggttcaccttttaaacgacaaagcatggtttgtggctttttgcaaaattactatgaaccaaaagttgacaaatgttccaaagttattttctctaacatatcacattaaagatctgtttcagaattgtaaaaagtacatctagatgtgtttacagaaagcaagtatccagtatgactggcatgtgttcatgctattcagaatcacttgtaaatagtctgcttttaaaggagggcatgttcagttttctgtgaattaaaatatgctcatgtgtgggnnnnnnnnnnnnnnnnnnnnnnnnnnnnnnnnnnngtggcagaagggatttatattaatattctttcccctctggccttcttacagtctgttggtccctttgcttctgttgtcagtgtgttgaattgcaaaccgagtactgctgtaaatactatgtttacttcatgctgaatgtttgcaaagacttgatataagtattaatagtaatgaatcaatgaataaataatgagctagggtttgtgaggctttctacaaataggtcagctccacctggagtgcgaattgccagagacaccttggtagtgcccatcggcaaatcgcaatggcagcatgtgagtggaccattcagaaacttctgcttggtggaaagtaaacagagaggatggaggtttggggcgaatgtcctgaggcagagatggtctttattgtgtgtggtggtggttgtggtatttataataatgcaagcataccctcccttgagtctcaattgaagataaaagaatgtactgagcaagcaaagccaatggagagtatttcacaaaaatactttgtaaatgagatgccagtagtgttcaaagttgtatttttaaaagataaatattcctttttatacctca

SEQ ID NO: 258228 - DNA, 1272 bp, Homo Sapiens
  misc_feature (14)..(14): n is a, c, g, or t
  misc_feature (107)..(107): n is a, c, g, or t
  misc_feature (148)..(148): n is a, c, g, or t
  misc_feature (150)..(150): n is a, c, g, or t
  misc_feature (159)..(159): n is a, c, g, or t
gccgcgggcgcganaaggattccgggtgctggttgttcggcggcgagttcgaggactcggtgttcgaggagaggccggagcggcggtcaggaccgcccgcgtcctantgcgccaagctctgcgagccgcagtggttttatgaagaaananaaagcagtnatgatgttgaagtgctgactctcaagaaattcaaaggagaactggcctacagacgacaagagtatcagaaagcactgcaggagtattccagtatctctgaaaaattgtcatcaaccaattttgccatgaaaagggatgtccaggaaggtcaggctcggtgtctggctcacctgggtaggcatatggaggcgctggagattgctgcaaacttggaaaataaagcaaccaacacagaccatttaaccacggtactctacctccagcttgctatttgttcaagtttgcagaacttggagaaaacaattttctgcctgcagaaactgatttctttgcatccttttaatccttggaactggggcaaattggcagaggcttacctgaatctggggccagctctttcagcagcacttgcgtcatctcagaaacagcacagtttcacctcaagtgacaaaactatcaaatccttctttccacactcaggaaaacactgtcttttgtgttttcctgaaaccttgcctgaggagctctttattttctgtggaagcgaatagcagtaatagccagaaaaatgagaaagctctgacaaatatccaaaactgtatggcagaaaagagagaaacagtgttgatagagactcagctgaaagcatgtgcctcttttatacgaaccaggcttctgcttcagtttacccaacctcagcaaacatcgtttgctttggagaggaacttaaggactcagcaggaaattgaagataaaatgaaagggttcagcttcaaagaagacactttgctgttgatagctgaggttatgggagaagatatcccagaaaaaataaaagatgaagttcacccagaggtgaagtgtgttggctccgtagccctgactgccttggtgactgtatcctcagaagaatttgaagacaagtggttcagaaagatcaaagaccatttctgtccatttgaaaatcagttccatacagagatacaaatcttggcttagtgggttataaaaaacaaaaccacaaatatcttgtactgtattaattgtccttgtttacttcagacaggatccattgctaatcatggagtataaatgattatttatgttttataa

SEQ ID NO: 258229 - DNA, 1661 bp, Homo Sapiens
  misc_feature (1401)..(1514): n is a, c, g, or t
tgggtggcgaattcggcacgaggatgctggggtgcagcttcaagcttaggaccacccaccatgcctatccaggtgctgaagggcctgaccatcactcattaagaacagaggaggctgcctgttactcctggtgttgcatccctccagacactctgctgtttcctgcctaggcgtggctgcagccatggctaggaaagcgctgccacccacccacctgggccagagctggttctgctcctgctgcagggacactgagctggctatctcggcgcttcgggcaagaactgcaacaggctctcctgggtcctgcaggtgtacagccgggcccctgccttgtgcctcagctctcgagagctgctgctgccgggtgacctgatccaacctgataaggtgccatcttcagctaccactgcaaggccctgagggcaacagcagcacggcactgcccacccggctgctgatggcctggtgccagctgggagtcctcccggcacttcgaggccactgagccacccttccagccccagcccaccatggacaggggtatccagcttcctcctcaacctcgtcctctgcccctgagccagtgacgcccaaggacatgcctgttacccaggtcctgtaccagcactagctggtcaagggcatgacagtgctggaggccgtcttggagatccaggccatcactggcagcaggctgctctccatggtgccagggcccgccaggccaccaggctcatgctgggacccaacccagtgcacaaggacttggctgctgagccacacacccaggagaaggtggataagtgggctaccaagggcttcctgcaggctaggggaggagccacccccgcttccctattgtgaccaggcctatggggaggagctgtccatacgccaccgtgagacctgggcctggctctcaaggacagacacccgccctggcctggtgctccagggggtgaagcaagccagaatcctggggggagctgctccctggttttgagctgcatttcaggaagtgccgggacatggtaggggaggcaaaaagccttggggaactaccctccctgtggagctgttcggtgtccgtcgagctagccacaccctgacaccatgttcaagggtaccggaagagaagggtgtctgcccccaacctcccctgtgggtgtcactggccagatgtcatgagggaagcaggccttgtgagtggacactgaccatgagtccctggggggagtgatcccccaggcatcgtgtgccatgttgcacttctgcccaggcagcagggtgggtgggtaccatgggtgcccacccctccaccacatggggccccaaagcactgcaggccaagcagggcaaccccacacccttgacataaaagcatcttgaagcttttannnnnnnnnnnnnnnnnnnnnnnnnnnnnnnnnnnnnnnnnnnnnnnnnnnnnnnnnnnnnnnnnnnnnnnnnnnnnnnnnnnnnnnnnnnnnnnnnnnnnnnnnnnnnnnnnnccctgggggggcccccccgcccctcaaaaaagttttcaaaacctttcgtttgggggcggcggcccccgaggggaaagggaacaggggccaatagtgggttccccaagaaaaccggggccaagaaaaagggggttggaatttcccccc

SEQ ID NO: 258230 - DNA, 1508 bp, Homo Sapiens
  misc_feature (1115)..(1115): n is a, c, g, or t
  misc_feature (1224)..(1224): n is a, c, g, or t
  misc_feature (1247)..(1247): n is a, c, g, or t
  misc_feature (1250)..(1250): n is a, c, g, or t
  misc_feature (1260)..(1260): n is a, c, g, or t
  misc_feature (1304)..(1304): n is a, c, g, or t
  misc_feature (1324)..(1324): n is a, c, g, or t
  misc_feature (1376)..(1376): n is a, c, g, or t
  misc_feature (1381)..(1381): n is a, c, g, or t
  misc_feature (1387)..(1387): n is a, c, g, or t
  misc_feature (1402)..(1402): n is a, c, g, or t
  misc_feature (1409)..(1409): n is a, c, g, or t
  misc_feature (1419)..(1420): n is a, c, g, or t
  misc_feature (1424)..(1424): n is a, c, g, or t
  misc_feature (1427)..(1427): n is a, c, g, or t
  misc_feature (1431)..(1431): n is a, c, g, or t
  misc_feature (1444)..(1444): n is a, c, g, or t
  misc_feature (1446)..(1446): n is a, c, g, or t
  misc_feature (1463)..(1463): n is a, c, g, or t
  misc_feature (1483)..(1483): n is a, c, g, or t
  misc_feature (1495)..(1495): n is a, c, g, or t
  misc_feature (1498)..(1498): n is a, c, g, or t
ctggtaccggtccggaactccaaggatcgagccctttgtgagggctgtgacgctgcgcctgacggtggcaccatgagcagctcaggtggggcgcccggggcgtccgccagctctgcgccgcccgcgcaggaagagggcatgacgtggtggtaccgctggctgtgtcgcctgtctggggtgctgggggcagtctcttgcgcgatctctggcctcttcaactgcatcaccatccaccctctgaacatcgcggccggcgtgtggatgatcatgaatgccttcatcttgttgctgtgtgaggcgcccttctgctgccagttcatcgagtttgcaaacacagtggcggagaaggtggaccggctgcgctcctggcagaaggctgtcttctactgcgggatggcggtcgttcccatcgtcatcagcctgaccctgaccacgctgctgggcaacgccatcgcctttgctacgggggtgctgtacggactctctgctctgggcaaaaagggcgatgcgatctcctatgccaggatccagcagcagaggcagcaggcggatgaggagaagctcgcggagaccctggagggggagctgcgaagggctgggcgcccctccctccctgtcccctcttctggctctgtgtgggtccaagtgaggcctggactgtccacgctgaggcacagcctgcagaggggcctttgcacgtgtccctacacctggagtcctctgctcctttctccagactggcttaagccaggagccactggctgctggtgtgagggtctgggctgctggacttgaggcagagcctgcagcagctgtgtggacactacccagccctactcctctgctgggtgggtctgcagatctcacaccacagacagggctgcctgtgacctgctgtgacctgggagcagcttcccctggagatgctggtcctggcttgaggggaggggcaagtgggaccctgccacctgggcactgagcagagggacctcccccagctctcttagcaggtggagccccagggcctgggacagcctgccgctgccagcaacctcccactgctgcctagggtgcagcgcccactgtcaccctgccttctgaagaagcccacaggntcctaaggtgcaccccggtacctggaactgcagccttggcagtgactggacagctgggtgggggatgctcctgctggccctgggaactttggacaggccacctcaaggnccctcggctgcccctcctccctnggnctgctggggnccctaggttctgcccatcaccccccgcccctgctggccttggtnctaaggaagtggggagagangctctcctggcaccgagggtgccaccctctccctggtgtggcccgtcaaatnagcanagccancccattagtggttantgggttnactcagcccnntcangtntctnttggcttgccaancntccctcaaggagttttncttttaaaaattggaaaggnaaattactcccnaanaaaatgtccc

SEQ ID NO: 258231 - DNA, 1023 bp, Homo Sapiens
  misc_feature (14)..(14): n is a, c, g, or t
  misc_feature (16)..(16): n is a, c, g, or t
  misc_feature (23)..(23): n is a, c, g, or t
  misc_feature (26)..(26): n is a, c, g, or t
  misc_feature (28)..(28): n is a, c, g, or t
  misc_feature (38)..(38): n is a, c, g, or t
  misc_feature (41)..(41): n is a, c, g, or t
  misc_feature (43)..(44): n is a, c, g, or t
  misc_feature (47)..(47): n is a, c, g, or t
  misc_feature (53)..(53): n is a, c, g, or t
  misc_feature (62)..(62): n is a, c, g, or t
  misc_feature (66)..(66): n is a, c, g, or t
  misc_feature (71)..(74): n is a, c, g, or t
  misc_feature (76)..(77): n is a, c, g, or t
  misc_feature (100)..(100): n is a, c, g, or t
  misc_feature (153)..(153): n is a, c, g, or t
  misc_feature (161)..(161): n is a, c, g, or t
  misc_feature (346)..(346): n is a, c, g, or t
ttacttctggacgngngactgtntcngncttcttgacncgntnnacncatgtngaaaccccncccnctgcnnnnanngagcatgatgtgaatgtggcctntcaacagtcagcacacaaggtattgctagatgatgacaaccttctcccctctntgcacttnacaatcgagtatcacggaaaggagcacaaagatgctactcaggcaagagaagggccttctcgggaaacttctcccccgggaagcccctgcatctggctgggcagccctaggtctttcctacaaagtacagtggccactacatattctcttcaccccagctgtcctggaaaagtacaatgttgttnttaagtacttactgagtgtgcgccgggtgcaagctgagctgcagcactgctgggccctacaaatgcagcgcaagcacctcaagtcgaaccagactgatgcaatcaagtggcgcctaagaaatcacatggcatttttggtggataatcttcagtactatctccaggtagatgtgttggagtctcagttctcccagctgcttcatcagatcaattctacccgagactttgaaagcatccgattggctcatgaccacttcctgagcaatttgctggctcaatcctttatcctattgaaacctgtgtttcactgcctgaatgaaatcctagatctctgtcacagtttttgttcgctggtcagtcagaacctaggcccactggatgagcgtggagccgcccagctgagcagtctcgtgaagggctttagccgccagtcttcactcctgttcaagattctctccagtgttcggaatcatcagatcaactcagatttggctcaactactgttacgactagattataacaaatactatacccaggctggtggaactctgggcagtctcgggatgtgaaaatttctggctcataaattgaaataacagccacgttcccaaggttgtaacagaagattcaaaacatcccattctagccacacacaaataaatatctgcggcttagtg

SEQ ID NO: 258232 - DNA, 746 bp, Homo Sapiens
  misc_feature (617)..(631): n is a, c, g, or t
aaagcccttccacgagaatgctccagctgggcggctcccacgctcatccagtgggcctaggttctgactgaccagcgaacaaaaactgtgacagagatctaggatttcattcaggcagtgaaacacctacccgggaaacagagttggcattaggaaaggaaggaaggtacatccatgaagttaaagtgttaggagaacagtctgattaatagctgatctaattaatagctgacctcccaaatctgacaggatagacactgccacgtgcaaggcctgccagcccctcagacgcaccaaatgcgtaaaacaaatgcatcctttcctggctaagcgagtattactctcttagccctgcaccaaacctccaatctagccacatttaactcttcatttcttagacccgcagagtgtcttcctgcctctgagctgtgagtgttgttccctttgcccgggatgctcttgtttttaataccagttcaagtcccactctctcagtgaagcactcccttccccactatagcctttagtgaaccctcgtttcttgcttctttattatctgtactgttgtccacttggcaattgttcaggcctctgtgttgttactgatttttgtatgnnnnnnnnnnnnnnngtcttgtttttccaactagattgtgagctccttaagggcagagccatgaattatacctctttgtatccccagtgccttgcatacagtaagcactcaataaatatttaatgatgaa

SEQ ID NO: 258233 - DNA, 1728 bp, Homo Sapiens
  misc_feature (1520)..(1520): n is a, c, g, or t
  misc_feature (1619)..(1619): n is a, c, g, or t
cggcggcccattgtctggcgtgatagagtttgcagatttgacagctgggcgcacgcagatttgattcaaactcggtctccccgagagatgaacttggacatcagcaaagatcccgagcactgccggctggctcctagaccggtctcccgacccagtgtagacttcgcgcagataaagtgagcccggaaagggaaggagggggcggggacaccattgccctgaaagaataaataagtaaataaacaaactggctcctcgccgcagctggacgcggtcggttgagtccaggttgggtcggacctgaacccctaaaagcggaaccgcctcccgccctcgccatcccggagctgagtcgccggcggcggtggctgctgccagacccggagtttcctctttcactggatggagctgaactttgggcggccagagcagcacagctgtccggggatcgctgcacgctgagctccctcggcaagacccagcggcggctcgggatttttttgggggggcggggaccagccccgcgccggcaccatgttcctggcgaccctgtacttcgcgctgccgctcttggacttgctcctgtcggccgaagtgagcggcggagaccgcctggattgcgtgaaagccagtgatcagtgcctgaaggagcagagctgcagcaccaagtaccgcacgctaaggcagtgcgtggcgggcaaggagaccaacttcagcctggcatccggcctggaggccaaggatgagtgccgcagcgccatggaggccctgaagcagaagtcgctctacaactgccgctgcaagcggggtatgaagaaggagaagaactgcctgcgcatttactggagcatgtaccagagcctgcagggaaatgatctgctggaggattccccatatgaaccagttaacagcagattgtcagatatattccgggtggtcccattcatatcagtggagcacattcccaaagggaacaactgcctggatgcagcgaaggcctgcaacctcgacgacatttgcaagaagtacaggtcggcgtacatcaccccgtgcaccaccagcgtgtccaatgatgtctgcaaccgccgcaagtgcccacaagcccctccggcagttctttgacaaggtcccgggccaagcacagctaccgaaatgctcttctgcttccctgccgggacatcgcctgcacagagcggaggcgacagaccatcgtgcctgtgtgctcctatgaagagagggagaagcccaactgtttgaatttgcaggactcctgcaagacgaattacatctgcagatctcgccttgcggatttttttaccaactgccagccagagtcaaggtctgtcagcagctgtctaaaggaaaactacgctgactgcctcctcgcctactcggggcttattggcacagtcatgacccccaactacatagactccagtagcctcagtgtggccccatggtgtgactgcagcaacagtgggaacgacctagaagagtgcttgaaatttttgaatttcttncaggacaatacatgtcttaaaaatgcaattcaagcctttggcaatggctccgatgtgaccgtgtggcagccagccctcccagtacagacccacactggncactaccaccactggccctccgggttaaagaacaagccccctgggggcccagcaagggtctggagaatgaaatttccccacctaatggtttttgcccaccccgtgtgga

SEQ ID NO: 258234 - DNA, 754 bp, Homo Sapiens
  misc_feature (4)..(4): n is a, c, g, or t
  misc_feature (146)..(146): n is a, c, g, or t
  misc_feature (195)..(206): n is a, c, g, or t
attnttaatttttaattatttatttttaatactgtgagatataggaaaataactctgcataatttatacagtaagtggccttctgattggttggccctggtctgatggtctgacaagcgcacagcacttgcgaatctgcttgagtntagaaatccctacaacttttccaagttctgggaccactgtcatcatttnnnnnnnnnnnnttagtaatttaattcccccgtctttcaggaatgtatgtaatttggcattaaaatttccttagttccatatcttgactattggctagagagagtggtcagctgagtgcatactgtccactgagagggattctgcaatgcccttggcgtcttaaacacacaaaccttctttccatcaaattccagtggggtgaaaacttcactggccttacaatcaatgttccagttgccatccactgaatttggtcctcctaaaattagattataagcttcccacctctatttgtcactaaatctcaaaccagaacatgacgggttaagtccatgattctgtgtcatactgaaccccgtgtattgacaagaaactgctttggtcataaaaacataaagaaaacgtacagcttctttctcagaaccatgacttaaccattccagtaatcttaatatgcaactcacaagatgccaggagactgagaattcaaactggcatactggcccatggaattattcatctctttgttcaggtagaggaagcaaaagttaccaacatt

SEQ ID NO: 258235 - DNA, 2175 bp, Homo Sapiens
  misc_feature (208)..(208): n is a, c, g, or t
  misc_feature (373)..(373): n is a, c, g, or t
  misc_feature (619)..(619): n is a, c, g, or t
  misc_feature (622)..(622): n is a, c, g, or t
  misc_feature (742)..(742): n is a, c, g, or t
  misc_feature (745)..(745): n is a, c, g, or t
  misc_feature (1543)..(1556): n is a, c, g, or t
  misc_feature (1659)..(1659): n is a, c, g, or t
gtgaacaaccctccagtcatgttcttcgatgagcccaccagcggcctggacagcgcctcctgcttccaggtggtctcgctgatgaaagggctcgctcaagggggtcgctccatcatttgcaccatccaccagcccagcgccaaactcttcgagctgttcgaccagctttacgtcctgagtcaaggacaatgtgtgtaccggggaaaantctgcaatcttgtgccatatttgagggatttgggtctgaactgcccaacctaccacaacccagcagattttgtcatggaggttgcatccggcgagtacggtgatcagaacagtcggctggtgagagcggttcgggagggcatgtgtgactcagaccacaagaganacctcgggggtgatgccgaggtgaacccttttctttggcaccggccctctgaagaggactcctcgtccatggaaggctgccacagcttctctgccagctgcctcacgcagttctgcatcctcttcaagagagaccttcctcagcatcatgagggactcggtcctgacacacctgcgcatcacctcgcacattgggatcggcctcctcattggcctgctgtacttggggatcgggaacgaagccaanaangtcttgagcaactccggcttcctcttcttctccatgctgttcctcatgttcgcggccctcatgcctactgttctgacatttcccctggagatgggagtctttcttcgggaacacctgaantantggtacagcctgaaggcctactacctggccaagaccatggcagacgtgccctttcagatcatgttcccagtggcctactgcagcatcgtgtactggatgacgtcgcagccgtccgacgccgtgcgctttgtgctgtttgccgcgctgggcaccatgacctccctggtggcacagtccctgggcctgctgatcggagccgcctccacgtccctgcaggtggccactttcgtgggcccagtgacagccatcccggtgctcctgttctcggggttcttcgtcagcttcgacaccatccccacgtacctacagtggatgtcctacatctcctatgtcaggtatgggttcgaaggggtcatcctctccatctatggcttagaccgggaagatctgcactgtgacatcgacgagacgtgccacttccagaagtcggaggccatcctgcgggagctggacgtggaaaatgccaagctgtacctggacttcatcgtactcgggattttcttcatctccctccgcctcattgcctattttgtcctcaggtacaaaatccgggcagagaggtaaaacacctgaatgccaggaaacaggaagattagacactgtggccgagggcacatctagaatcgaggaggcaagcctgtgcccgaccgacgacacagagactcttctgatccaacccctagaaccgcgttggggtttgtgggtgtctcgtgctcagccactctgcccagctgggttggatcttctctccattcccctttctagctttaactaggaagatgtaggcagattggtggnnnnnnnnnnnnnnaacatacagaattttaaataccacaactggggcagaatttaaagctgcaacacagctggtgatgagaggcttcctcagtccagtcgctccttagcaccaggcnaccgtgggtcctgggatggggaactggcaagcagcctcttcagctgatggctgcacagtcagatgtctggtggcagagagtccgagcatggagcgaatcccattttatggactgttgtttttccacattttcatctttcctaaggtgtgtccccttttcccaatgagaagtcatttttgcaagcccaaaagtcgatcaatcgcattcattttaagaaattatacctttttagtacttgctgaagaatgattcagggtaaataacatactttgtttagagaggcgaggggtttaaccgagtcacccagctggtctcatacatagacagcacttgtgaaggattgaatgcaggttccaggtggagggaagacgtggacaccatctccactgagccatgcagacatttttaaaagctatacaaaaaattgtgagaagacattggccaactctttcaaagtctttctttttccacgtgcttcttattttaagcgaaatatattgtttgtttcttcctagt

SEQ ID NO: 258236 - DNA, 486 bp, Homo Sapiens
  misc_feature (203)..(265): n is a, c, g, or t
tttttttacacattaaatgtaccacagtttaatagttttgtgatagttcaataactgtcatttgctttaatctacagaattttaaaaaatctaaataaaactattacgctggccagataaaatagtaacaaaaaaagtaaagagatataaaacaaactgtacactattacaaagtagtggttctctgtatgtctatgtgtatnnnnnnnnnnnnnnnnnnnnnnnnnnnnnnnnnnnnnnnnnnnnnnnnnnnnnnnnnnnnnnncacatatacttaattttaaagttaatcaaatggttatcaaaaattaatatacaacaaagattcctgggaaggtaatgcttatataaaataaggccatgtttctaaaaatccctcaaatcagtccaagataagatttttaatgaagaacataaaggttaaagaaattctttctctccaggttagctgtttttccctacttgttttcttcttgctttttcctg

SEQ ID NO: 258237 - DNA, 1739 bp, Homo Sapiens
  misc_feature (104)..(104): n is a, c, g, or t
  misc_feature (165)..(165): n is a, c, g, or t
  misc_feature (268)..(268): n is a, c, g, or t
  misc_feature (927)..(1090): n is a, c, g, or t
  misc_feature (1189)..(1198): n is a, c, g, or t
aaaccagcatctgataattgaagagcatatcaggaatactgcttcttcctttacagactcaataaattagacaggctgtcaacccctgatgtccagatcctggnacgccctcttcctacacgatcagttcttttcatttctatagtcttctgcatttctgcctgnctactaagaaagagctctacagatgaatccttgataaaccctcctgaacgacttatggcacgtcttgcatcttcatctgttgcaaaaataataaaagcctccncaatttcccctccaattatatgcactcctccatcaggaatagtcaatcccgtgaagaagtgacgaatatccacaggccccgcaataaaaggaagccccagtaaacggatgactacagccatgctgagctcaaaccacagcaataatgacctgcagacaaaaaggtacacataatagcaagtcttatttttgaagtaccttagcccaaactaagcttaataattacctggttcctgctttcttcaacatttataaatgaaaacaagatacaagttcacaaaaatactgatcatatctaattattaaagaaaacaagggataaactttctcccatctaaaaatacaaataaaccaactaccttgaagaaacatttcgtatcacctattctatacaataggaacatcaaaaatatcaaatcttcctttgtaagtctgccaaatgctgcttcacaagaccaaactactttcagactcatttagaatcttatcttctactgaaacatgagagctttgtagattattttatcaactgcaatgaattttacatatttagaaaagtcatctatggttagtatataatttctgctcatgataataaattgcctaccactggccagacacagagaacaaaaagccaggccagcatgatagctcatgccnnnnnnnnnnnnnnnnnnnnnnnnnnnnnnnnnnnnnnnnnnnnnnnnnnnnnnnnnnnnnnnnnnnnnnnnnnnnnnnnnnnnnnnnnnnnnnnnnnnnnnnnnnnnnnnnnnnnnnnnnnnnnnnnnnnnnnnnnnnnnnnnnnnnnnnnnnnnnnnnnnnnagactgcctgagcccaatttgaaattttcaggatacaatgggctgcaactgtgccattgcactccagcctggaggacagagtgaggccctgtctttttnnnnnnnnnngaacagaagccatggatacctagatgtactattctacttcacatgttttttgttgagcctcaaagccttaaactctggatatcttaccttttttaaaatttcttggagacctgttaactctgtaaaagcaacttaactgtggaaagaaaatgaaatataattaatccttgaaccctgtaatttatcttaaacaacgccagagtaggatatccatttcagaattacctatcaaaagtgaagcagaataaggaaccacaattacgggtgttacaaaatggtcttttgttccaaggggaaattaatcatccttctgcaaaaaggagatacaatatccaaatagacatataaaaattatttaaaaatttgaaacttgccgaaaatttaacaactgctcttgattggaagtagcatgaagaaaggagtgatggaaatgttacatattttgaatgcagcagtagttacatgggtgtataaatttatcaaggtttactgaattctatccttagggtctatacattttgctgtacacaagttttacatc

SEQ ID NO: 258238 - DNA, 1789 bp, Homo Sapiens
  misc_feature (51)..(51): n is a, c, g, or t
  misc_feature (1663)..(1663): n is a, c, g, or t
aaaatatgggggcggggagcgcattgttgggctatcaaaataataggtgtntgtttcgggcgccattaatccaacccttttaatctgccgggggaaccagttaagcgggagttttggtgggcggccctccgtgcccatgattcaggggcacaactgccccagcagacacacactttcatacgcactcacaccccacccgccagacagcacccccaggtctcgtggaactggcccagggtcctgctgctctcacagccgcagggacagggctcaagggctaccctcacccccacccggcttcctagcgccctggacgcccacggcccctcttggacttcttggtccctgaggggggacggatggggagaggggcggtggtcgagggcggcggcggtggcagaagtgaaggtaaaggtagctccgtgggctccggcaggctggggctgggccgaaacccctcaaaaggggagaacttgagggggctgacgggggcccgggggctactgttgaggcgcctgggtgagcgcagcttgggctggaaggagaagccctccttgatgctgtccaggacagacggcgccacgtatgtgaagcccaggaaggcctggttggcactctcgctgagggctgtgtcatcaggactgtccaccggcgtctgccgtgtgaagcgggtatcaaactggctcacgtcctcctctgactgcagacagggcctgaaaggggggtccacacgccaggccagaaggtcgtcccaattcatgtgccggaaaaagggatgtctctgcacatcagcagcatcccctgggccacccccaatccgctggctgggattccgtttcagaaactttttgacaaggtcccgggcatctggggtgaggtaggggggcagtgccagcttgcccctgatgatcttatccatggttttcttccggttctctgcggtgaagggcggcgatccagtgagcatgtcgtacatcagggcccccaggctccaccagtccacagcccggttgtggccactgcgcaccagaatctcaggggccatgtactcaatggtgccgcagaaggtgtgagtgacggcgccctcatggatagactccttgcagagtccaaagtcggtcagtttgatgtggccctggctgctgagcatgatgttctcgggcttgaggtcccggtagatgatgccctgggagtggagatggcccagggccagcgtgatctcagccaggtagaagcaggccgtatcttccaggaagatgccctctcgctccagatgcgtgaagagctcgccaccactgaggcactcaaggatgaggtagagtttgccaccagtctggaaggcataggccagttccacaataaaggggtgcttcactgactctagaatgttccgctcagcccgtgtgtgtgctgtgtccttggcattgcgcacaattttggccttccttaggactttcatggcatatattttgcccaagttggtgccttgcacctttcgcacctggaacaccttgccatagccccccttgcccagcacacgcagcagctcaaagcagtggggcccgatgcgctctgggccaacgttcacgctggtctcagtcagctccacctcttcatagtgtcccacaggctctaggccagctgccctcaactcggcaagggnacatgcgtccgcggggctgagctctggctcgccctcgccctcgctgccttcctccgtctccaaatccaaatcaaacacggccgccatggcggcgccggccccgcgagcccgtcggcccgatcccgg

SEQ ID NO: 258239 - DNA, 1581 bp, Homo Sapiens
  misc_feature (16)..(16): n is a, c, g, or t
  misc_feature (1111)..(1111): n is a, c, g, or t
  misc_feature (1239)..(1239): n is a, c, g, or t
  misc_feature (1252)..(1252): n is a, c, g, or t
  misc_feature (1484)..(1484): n is a, c, g, or t
agcatcttccctcgcnccctgcagcctctgctgtaacagggtaggtcttctggtaagttttctcagcatcccttaactcttttcaaataaatccctcagttgctccagttctgactcatgctgggttttttctcgctgcttcagctgttctaaatcttccacacgagaggtgcgcgccaggagttgctcatgtagctctccagctgttttctttctcgctctctttgaacttgaactccaagtcttctaaacaccggccgtgctcggactgcaggtcttcacgtaacttctcaatggctgcttgatgatgactctccaggttcctaagggcccgttcagcctggtttttgtcttgaaaaatcttctccaactcagctctctgttctgccaattctttctgaaactggttttgtaaatcctccatttctgattgatgctttgcagacagttctttgcgtagattttctaaacataaatctttttcagattcccaatcttccttcagggtctttactatctgggcgtttttctccatttctgattgtaacttctccttcagctcagctgcttcctgtccacacctgagcaccacctcctccttctcccgtgcgtgctgctccctgaggagctccagctcgtgctgctgcctgctctgtagcagggccagctcctgggcacgccggctgttgagcatctcccgcagctccgtcaatgccgtctccttctccttctggaggttggcctgtgtcagctccagctgcgccgtgtgcatgttgctcagactcaggcgcagcgcctccagctcaaggccatgcacggcctgactctgatgcaggccagcctcatcttgcacggccgccccccaggtcagtaatggcaagttcacattcttgttcacactcctttgtgaacatcccacgctgttctgctgggtggtcactgattgtgaagatcccacgctgttctggtgtgtggtcactgactgtgaacatcccacgctgttccggttggtggtcactgattgtgaacatcccacgctgttctggtgggtggtcactgactgtgaacatcccatgctgttctggtgggtggtcactgactgtgaacatcncacgctgttctggtgggtggtcaccgactgtgaacatcccatgctgttctggtgggtggtcactgactgtgaacatcccacactgctctggaggatggtcattgacttgcttctgctgcagatgttcnaagtcctctctcntctctccatcacagtcctccggctgagctgcaaaggcccctcctgccccatcaggggtgtcgtcacatgatgtgcttttgcaaatgtcccctcctccacagagtgcgctgtcctccttggttaccggactctcctcctggacagacgcatcgacagccgagcccttcctcttcgccgtctttttctccgaatgcgaactgtcaccttttgtttttctctgtcggaagtgagnaagcttcgtcctcccggcctccacctttctgcgccgctgctcttgctcaacttccatctccactcagactccgcgcgggccgcccggcgatcccggg

SEQ ID NO: 258240 - DNA, 1133 bp, Homo Sapiens
  misc_feature (12)..(12): n is a, c, g, or t
  misc_feature (15)..(15): n is a, c, g, or t
  misc_feature (17)..(17): n is a, c, g, or t
  misc_feature (27)..(27): n is a, c, g, or t
  misc_feature (30)..(31): n is a, c, g, or t
  misc_feature (39)..(40): n is a, c, g, or t
  misc_feature (50)..(50): n is a, c, g, or t
  misc_feature (52)..(52): n is a, c, g, or t
  misc_feature (58)..(58): n is a, c, g, or t
  misc_feature (70)..(70): n is a, c, g, or t
  misc_feature (82)..(82): n is a, c, g, or t
  misc_feature (85)..(85): n is a, c, g, or t
  misc_feature (99)..(99): n is a, c, g, or t
  misc_feature (102)..(102): n is a, c, g, or t
  misc_feature (121)..(121): n is a, c, g, or t
  misc_feature (123)..(123): n is a, c, g, or t
  misc_feature (130)..(130): n is a, c, g, or t
  misc_feature (146)..(146): n is a, c, g, or t
  misc_feature (148)..(149): n is a, c, g, or t
  misc_feature (164)..(164): n is a, c, g, or t
  misc_feature (167)..(167): n is a, c, g, or t
  misc_feature (262)..(262): n is a, c, g, or t
tctccagtactnatncnttctggtaantannttgaaganntatgtggacntnaaattngtccaaatattnaaatagtcattntangaagctcattaggnatnccgtatccaggccacagtntntcatatnccagcaccgggcaacntnncgaaatgtgtaaccnccncctcccagcatcagcataggcaggttaaagctcttgacaaattcccacacacttggcgtgtcctttgatagttagattgaagcaacctaaccganccccagatagggagtctgagccacactgtaagaccaccgcactaggctggaacatctccattactttggacatgaccggcttgaaaatggcctcataggactcgtcatcaatcccgtctcggagcgggtagttaacagcataatacttgcctttgccagccccgatatcccgtaggtccccagttcctgggaagtactctccatacttatgaaaggacacagtcatgacccggtccgtggtgtagaaggcctcttccacgccgtcaccatggtgaatatcaatgtcaatgtacagcaccctctggtgatactttagcagttccaggatggccaagacgatatcattgacgtaacagaagccagatgcctcggacttctttgcatggtgcaggcccccagcccaattcacagcgatgtccgtctgctgcttattaagtttcacagcacttgccacagaaccaccagtagacaactgacagaactcaaacaggccatcgaatactggacagtcctcaccaacgttgaatctctgcatctgcttgctgtactccgacatgttatctggacggatggagcgcaagaatttaatgtagtcatcgctgtggtacttggtcatctcctcagcattggctttgtgagggcgatagatttccatttttcggtagagaccatagttgagcagcaaattatgagtcatgcggattcggtgaggcttcattgggtggccttgtccataatagtaatttccaacatccccgtcgtagtagtaacagactttcctccgggtgccctgcgtctgcgccatcttgctcgcctcccgtccctaccgtcagtcggtccgtccgccctcccgcccgcggcccacgcgtcc

SEQ ID NO: 258241 - DNA, 2530 bp, Homo Sapiens
  misc_feature (140)..(140): n is a, c, g, or t
  misc_feature (186)..(218): n is a, c, g, or t
  misc_feature (465)..(465): n is a, c, g, or t
  misc_feature (539)..(539): n is a, c, g, or t
  misc_feature (678)..(678): n is a, c, g, or t
  misc_feature (823)..(823): n is a, c, g, or t
agaacaacaaaccccggagccggagccaggggaggctggacgggacgggatgggcgacagcgggcgggactcccgaagcccagacagctcctccccaaatccccttccccagggagtccctcccccttctcctcctgggncacccctacccccttcaacagctccatcccttggaggctctggggnnnnnnnnnnnnnnnnnnnnnnnnnnnnnnnnntgggctctccctttccagtcatcagttcttccatggggtcccctggtctgccccctccagctcccccaggattctccgggcctgtcagcagcccccagattaactcaacagtgtcactccctgggggtgggtctggcccccctgaagatgtgaaaccaccagtcttaggggtccggggcctgcactgtccaccccctccaggtggccctggggctggcaaacggctatgtgcaatctgcggggacanaagctcaggcaaacactacggggtttacagctgtgagggttgcaagggcttcttcaaacgcaccatccgcaaanaccttacatactcttgccgggacaacaaagactgcacagtggacaagcgccagcgaaaaccgctgtcagtactgccgctatcagaagtgcctggccactggcatgaagagggaggcggtacaggaggagcgtcagaagngaaaggacaaggatggggatggggagggggctgggggagcccccgaggagatgcctgtggacaggatcctggaggcagagcttgctgtggaacagaagagtgaccagggcgttgagggtcctgggggaaccgggggtagcggcanagcccaaatgacccttgtgactaacatctgtcaggcagctgacaaacagctattcacgcttgttgagtgggcgaagaggatcccacacttttcctccttgcctctggatgatcaggtcatattgctgcgggcaggctggaatgaactcctcattgcctccttttcacaccgatccattgatgttcgagatggcatcctccttgccacaggtcttcacgtgcaccgcaactcagcccattcagcaggagtaggagccatctttgatcgggtgctgacagagctagtgtccaaaatgcgtgacatgaggatggacaagacagagcttggctgcctgagggcaatcattctgtttaatccagatgccaagggcctctccaaccctagtgaggtggaggtcctgcgggagaaagtgtatgcatcactggagacctactgcaaacagaagtaccctgagcagcagggacggtttgccaagctgctgctacgtcttcctgccctccggtccattggccttaagtgtctagagcatctgtttttcttcaagctcattggtgacacccccatcgacaccttcctcatggagatgcttgaggctccccatcaactggcctgagctcagacccagacgtggtgcttctcacactggaggagcacacatccaagagggactccaagccctggggcagggtggggggccatgttcccagaaccttgatggggtgagaagtacagggcagaaccaagaacataaaccctccaagggatctgcttgatatcccaagttggaagggaccccagatacctgtgaggactggttgtctctcttcggtggccttgagtctctgaatttgtcgggttctcccatgatttggggtgatttctcaccctctgtccttcccccagcacaaagcactggccttgcctccaggaccttgcttccttctcatcttgcctcattttgcttcccatctgaagagtggaaatggggaactcccccagaggtggatactggggggcaggcctcccaagctgatggacatgagagtagggccctgacaggccttcctcctctcaaacctggcagatgggggcctctctggaagagggaggggccctgtcactgtccagagtctctttttacacttcacctccttctgcagtcagactgaaatataaaaaaggtggtggtggtggtgaaagggctggtggagatgtaggaaccgatctgctatttttaatttcctgtgaagatagagacttgcagttagactcaaagaagtactgtactttcccaggttgactaagaaatgccagtggtggaggtgggtgtttgggaaaggcagggccctgaaatggcctgtccctagggctctccaagcactagccttccccagcttcccgccgccccccccatctcttcctgtctaacttggggaaggggcctgggctgtgaggacaggtgccccacaggggatggtttcacgagtgtagtcccggaggccttccctttacagctctcctccagccctgggcacatagcataggctggggacacaggatcctggcctgagaattgaggggaggtggccagcccgcagaggtggggtgctggggctgcatgatttttgccctgcgtcccttctctttggggctcctttcccctctcatacataaaatcgctttcaaattaaaatcgctgttttctgg

SEQ ID NO: 258242 - DNA, 2187 bp, Homo Sapiens
  misc_feature (19)..(19): n is a, c, g, or t
  misc_feature (21)..(21): n is a, c, g, or t
  misc_feature (67)..(67): n is a, c, g, or t
tcggggaggagcgggcgcntngcggaggctctgctcggatcgaggtctgcagcgcacttcgggagcntgagtgctgcagtgactgcagggaagctggcacgggcaccggccgaccctgggaaagccggggtccccggagttgcagctcccggagctccggcggcggctccaccggcgaaagagatcccggaggtcctagtggacccacgcagccggcggcgctatgtgcggggccgctttttgggcaagggcggctttgccaagtgcttcgagatctcggacgcggacaccaaggaggtgttcgcgggcaagattgtgcctaagtctctgctgctcaagccgcaccagagggagaagatgtccatggaaatatccattcaccgcagcctcgcccaccagcacgtcgtaggattccacggctttttcgaggacaacgacttcgtgttcgtggtgttggagctctgccgccggaggtctctcctggagctgcacaagaggaggaaagccctgactgagcctgaggcccgatactacctacggcaaattgtgcttggctgccagtacctgcaccgaaaccgagttattcatcgagacctcaagctgggcaaccttttcctgaatgaagatctggaggtgaaaataggggattttggactggcaaccaaagtcgaatatgacggggagaggaagaagaccctgtgtgggactcctaattacatagctcccgaggtgctgagcaagaaagggcacagtttcgaggtggatgtgtggtccattgggtgtatcatgtataccttgttagtgggcaaaccaccttttgagacttcttgcctaaaagagacctacctccggatcaagaagaatgaatacagtattcccaagcacatcaaccccgtggccgcctccctcatccagaagatgcttcagacagatcccactgcccgcccaaccattaacgagctgcttaatgacgagttctttacttctggctatatccctgcccgtctccccatcacctgcctgaccattccaccaaggttttcgattgctcccagcagcctggaccccagcaaccggaagcccctcacagtcctcaataaaggcttggagaaccccctgcctgagcgtccccgggaaaaagaagaaccagtggttcgagagacaggtgaggtggtcgactgccacctcagtgacatgctgcagcagctgcacagtgtcaatgcctccaagccctcggagcgtgggctggtcaggcaagaggaggctgaggatcctgcctgcatccccatcttctgggtcagcaagtgggtggactattcggacaagtacggccttgggtatcagctctgtgataacagcgtgggggtgctcttcaatgactcaacacgcctcatcctctacaatgatggtgacagcctgcagtacatagagcgtgacggcactgagtcctacctcaccgtgagttcccatcccaactccttgatgaagaagatcaccctccttaaatatttccgcaattacatgagcgagcacttgctgaaggcaggtgccaacatcacgccgcgcgaaggtgatgagctcgcccggctgccctacctacggacctggttccgcacccgcagcgccatcatcctgcacctcagcaacggcagcgtgcagatcaacttcttccaggatcacaccaagctcatcttgtgcccactgatggcagccgtgacctacatcgacgagaagcgggacttccgcacataccgcctgagtctcctggaggagtacggctgctgcaaggagctggccagccggctccgctacgcccgcactatggtggacaagctgctgagctcacgctcggccagcaaccgtctcaaggcctcctaatagctgccctcccctccggactggtgccctcctcactcccacctgcatctggggcccatactggttggctcccgcggtgccatgtctgcagtgtgcccccccagccccggtggctgggcagagctgcatcatccttgcaggtgggggttgctgtataagttatttttgtacatgttcgggtgtgggttctacagccttgtccccctccccctcaaccccaccatatgaattgtacagaatatttctattgaattcggaactgtcctttccttggctttatgcacattaaacagatgtgaactaccaaaa

SEQ ID NO: 258243 - DNA, 910 bp, Homo Sapiens
  misc_feature (481)..(481): n is a, c, g, or t
  misc_feature (822)..(822): n is a, c, g, or t
  misc_feature (834)..(834): n is a, c, g, or t
gggaggagcggagcggtgttgaggctctgctcggatcgaggtctgcagcgcagcttcgggagcatgagtgctgcagtgactgcagggaagctggcacgggcaccggccgaccctgggaaagccggggtccccggagttgcagctcccggagctccggcggcggctccaccggcgaaagagatcccggaggtcctagtggacccacgcagccggcggcgctatgcgcggggacgctttttgggcaagggcggctttgccaagtgcttcgagatctcggacgcacacaccaaggaggcgttcccggctcaaccattgtgcctaagtctatgctgctcaagccgcaccaccagggagaacatgtccatggaaatatccattcaccgcagcctcgcccaccagcacgtcgtaggattccacggctttttcgaggacaacgacttcgtgttcgtggtgttggagctctgccgccggagggtgagtntcgctgctggagaactggaactgcctgcggggcagttggagcgcccagacctggagctgctggaaagagtacccagcaagggagagcctgggacttggagctgctagagaagggtgctgggagcctcccgcttacgtatggaaagtgtctttgtctctcctggagctgcacaagaggaggaaagccctgactgagcctgaggcccgatactacctacggcaaattgtgcttggctgccagtacctgcaccgaaaccgagttattcatcgagacctcaagctgggcaacttttcctgaatgaagatctggaggtgaaaataggggattttggactggcaacnaagtcgaatatnacggggagaggaagaagaccctgtgtgggactcctaattacatagctcccgaggtgctgagcaagaaagggcacag

SEQ ID NO: 258244 - DNA, 968 bp, Homo Sapiens
tggcagtaactcctacggttataggtagcgaggcctgggtggcgaattcggcacgaggcagcgcagcttcgggagcatgagtgctgcagtgactgcagggaagctggcacgggcaccggccgaccctgggaaagccggggtccccggagttgcagctcccggagctccggcggcggctccaccggcgaaagagatcccggaggtcctagtggacccacgcagccggcggcgctatgtgcggggccgctttttgggcaagggcggctttgccaagtgcttcgagatctcggacgcggacaccaaggaggtgttcgcgggcaagattgtgcctaagtctctgctgctcaagccgcaccagagggagaagatgtccatggaaatatccattcaccgcagcctcgcccaccagcacgtcgtaggattccacggctttttcgaggacaacgacttcgtgttcgtggtgttggagctctgccgccggaggtctctcctggagctgcacaagaggaggaaagccctgactgagcctgaggcccgatactacctacggcaaattgtgcttggctgccagtacctgcaccgaaaccgagttattcatcgagacctcaagctgggcaaccttttcctgaatgaagatctggaggtgaaaataggggattttggactggcaacccaaagtcgaatatgacggggagaggaagaagaccctgtgtgggactcctaattacatagctcccgaggggctgagccaagaaagggcacagttttcaaggtgggatgtgtgggtcccattggggtgtatcatggattaccttggttaggggggcaaacccacccttttgaagactttcttgccctaaaaagaaaacctaacctcccggatccaagaaagaaatggaataaccgtaattccccaaagccacattccaacccccggtggggcccgccttccccttcatcccaggaac

SEQ ID NO: 258245 - DNA, 1135 bp, Homo Sapiens
  misc_feature (98)..(98): n is a, c, g, or t
  misc_feature (362)..(371): n is a, c, g, or t
aggagcggggaataagagcggggtatataagggggcagggggattatagctgactggcgggggcgtatacgcggactgcgcggcgcctagcgtcgcanacggcgggcgaacatctgggagggcattcagcggggtgggaagcgcgaacgataggaggagctaatcgcgcggtgagagcgggtataggcgggtgtaaagatgcgggacggaagacggggaaacgacggcggcatggggggtgtgggagaggcgccacggaggaaggggatgagggggaagagatacggaagcagccggggatgtaacgggctcgcagggggaacacacggccacacggcggcgggcagcagcggggctagaannnnnnnnnnagaagggatgggagcggccggcggaagagggaaagaggggaggagcgggggagcaaagggcgaggtgagatgggcgggggagattggaggaagcggaggggggcggggtgcggcttttgtcccgtcgggggggtgaacctgggaaagcttgcgcggcccgcggttgcccagagtaagtggggaggggtggggaggtaaggcgggcaggagcagtggcgcaaggggaaggcggtcctcaagggcagtcaggagggtcctcctagtgagcagctccaggagaggcctgcgtcggcagagctccaacgccacgaacgcgaagtcgttgtcctcgaaaaagccggtggaatcctacgacctgctggtgggcgaggctgcggtgaatggatatttccatggacatcttctccctctgatacggcttgagcagcagagacttaggcacaatcttgcccgcgaacacctccttggtgtccgcgtccgagatctcgaagcacttggcaaagccgcccttgcccaaaaagcggccccgcacatagcgccgccggctgcgtgggtccactaggacctccgggatctctttcgccggtggagccgccgccggagctccgggagctgcaactccggggaccccggctttcccagggtcggccggtgcccgtcccagcttccctgcagtcactgcagcaccctcgtgccgaattcgccaagcagcccgggggggagtggacgtgtagcccacagggtatagatgtggtggagggggg

SEQ ID NO: 258246 - DNA, 1042 bp, Homo Sapiens
  misc_feature (51)..(52): n is a, c, g, or t
  misc_feature (67)..(67): n is a, c, g, or t
  misc_feature (83)..(83): n is a, c, g, or t
  misc_feature (90)..(90): n is a, c, g, or t
  misc_feature (93)..(93): n is a, c, g, or t
  misc_feature (450)..(450): n is a, c, g, or t
  misc_feature (946)..(946): n is a, c, g, or t
  misc_feature (964)..(964): n is a, c, g, or t
  misc_feature (966)..(966): n is a, c, g, or t
  misc_feature (968)..(968): n is a, c, g, or t
  misc_feature (972)..(972): n is a, c, g, or t
  misc_feature (980)..(980): n is a, c, g, or t
  misc_feature (990)..(990): n is a, c, g, or t
  misc_feature (992)..(992): n is a, c, g, or t
  misc_feature (996)..(996): n is a, c, g, or t
  misc_feature (1001)..(1002): n is a, c, g, or t
  misc_feature (1013)..(1013): n is a, c, g, or t
  misc_feature (1022)..(1022): n is a, c, g, or t
  misc_feature (1031)..(1031): n is a, c, g, or t
  misc_feature (1034)..(1034): n is a, c, g, or t
gggctacccacagggcccctacccacaagagggctacccacagggcccctnnccccaaggaggctanccccaggggccatagncccagangcnccttcccccccaacccctatggacagccacaggtcttcccaggacaagaccctgactcaccccagcatggaaactaccaggaggagggtcccccatcctactatgacaaccaggacttccctgccaccaactgggatgacaagagcatccgacaggccttcatccgcaaggtgttcctagtgctgaccttgcagctgtcggtgaccctgtccacggtgtctgtgttcacttttgttgcggaggtgaagggctttgtccgggagaatgtctggacctactatgtctcctatgctgtcttcttcatctctctcatcgtcctcagctgttgtggggacttccggcgaaagcacccctggnaaccttgttgcactggtaaccgcgccaaacgctgagcctctgtgcctgggtccggccatgcagtcccacacgcccactcttccgggcctggtcaccgtggttctccttgtgctcatgaggcaggggccggcaggggtggcatgggggcacacacccaaggtcagcctgtgtctcccaactgcagtcggtcctgaccgccagcctgtcgtacatggtggggatgatcgccagcttctacaacaccgaggcagttatcatggccgtgggcatcaccacagccgtctgcttcaccgtcgtcatcttctccatgcagacccgctacgacttcacctcatgcatgggcgtgctcctggtgagcatggtggtgctcttcatcttcgccattctctgcatcttcatccggaaccgcatcctggagatcgtgtacgcctcactgggcgctctgctcttcacctgcttcctcgcagtggacacccagctgctgctggggaaaaancagctgtccctgagccananantatntttttctnccctgaactntnaaanacatnncaaatcttctntacatctcncatcattgncgncaaggagt

SEQ ID NO: 258247 - DNA, 713 bp, Homo Sapiens
  misc_feature (11)..(11): n is a, c, g, or t
  misc_feature (26)..(27): n is a, c, g, or t
  misc_feature (42)..(43): n is a, c, g, or t
  misc_feature (60)..(60): n is a, c, g, or t
  misc_feature (65)..(65): n is a, c, g, or t
  misc_feature (150)..(150): n is a, c, g, or t
  misc_feature (162)..(163): n is a, c, g, or t
  misc_feature (170)..(170): n is a, c, g, or t
  misc_feature (175)..(176): n is a, c, g, or t
  misc_feature (188)..(188): n is a, c, g, or t
  misc_feature (192)..(192): n is a, c, g, or t
  misc_feature (202)..(202): n is a, c, g, or t
  misc_feature (206)..(209): n is a, c, g, or t
cctaccctggngccccttacccacanncccctttccagcccnncccctacggtcagccanggtantcccatggccccagcccctacccccaagggggctacccacagggtccctacccccaagggggcgtacccacagggcccctacccncaagagggctannacagggnccctnnccccaagggggnctanccccaggggncatnnnnccagaggcccttcccccccaacccctatggacagccacaggtcttcccaggacaagaccctgactcaccccagcatggaaactaccaggaggagggtcccccatcctactatgaaaaccaggacttccctgccaccaactgggcatgacaagagcatccgacaggccttcatccgcaaggtgttcctagtgctgaccttgcagctgtcggtgaccctgtccacggtgtctgtgttcacttttgttgcggaggtgaagggctttgtccggcagaatgtctggacctactatgtctcctatgctgtcttcttcatctctctcatcgtcctcagctgttgtggggacttccggcgaaagcacccctggaaccttgttgcactgtcggtcctgaccgccagcctgtcgtacatggtggggatgatcgccagcctgtcgtacatggtggggatgatcgccagcttctacaacaccgaggcagtcatcatggctgtggtgatgcccacgg

SEQ ID NO: 258248 - DNA, 1150 bp, Homo Sapiens
  misc_feature (975)..(998): n is a, c, g, or t
gctgggtggcgaattcggcacgagggacttccctgccccaactgggatgacaagagcatccgacaggccttcatccgcaaggtgttcctagtgctgaccttgcagctgtcggtgaccctgtccacggtgtctgtgttcacttttgttgcggagtcggtcctgaccgccagcctgtcgtacatggtggggatgatcgccagcttctacaacaccgaggcagtcatcatggccgtgggcatcaccacagccgtctgcttcaccgtcgtcatcttctccatgcagacccgctacgacttcacctcatgcatgggcgtgctcctggtgagcatggtggtgctcttcatcttcgccattctctgcatcttcatccggaaccgcatcctggagatcgtgtacgcctcactgggcgctctgctcttcacctgcttcctcgcagtggacacccagctgctgctggggaacaagcagctgtccctgagcccagaagagtatgtgtttgctgcgctgaacctgtacacagacatcatcaacatcttcctgtacatcctcaccatcattggccgcgccaaggagtagccgagctccagctcgctgtgcccgctcaggtggcacggctggcctggaccctgcccctggcacggcagtgccagctgtacttcccctctctcttgtccccaggcacagcctagggaaaaggatgcctctctccaaccctcctgtatgtacactgcagatacttccatttggacccgctgtggccacagcatggcccctttagtcctcccgcccccgccaaggggcaccaaggccacgtttccgtgccacctcctgtctactcattgttgcatgagccctgtctgccagcccaccccagggactgggggcagcaccaggtcccggggagagggattgagccaagaggtgagggtgcacgtcttccctcctgtcccagctccccagcctggcgtagagcannnnnnnnnnnnnnnnnnnnnnnntggagtgctgccctctggggacatgcggagtgggggtcttatccctgtgctgagccctgagggcagagaggatggcatgtttcaggggagggggaagccttcctctcaatttgttgtcagtgaaattccaataaatgggatttgctctctgc

SEQ ID NO: 258249 - DNA, 1130 bp, Homo Sapiens
gaacctgggtggtgcccccccagttccttgggggtggggctggcagacaaggggcttcatgccaccaatgagtaggcaggagggtggcacggaaaacgtggccctgggtgcccccttgccgggggcgggaggactaaagggggccatgctgtgcccacagcgggtccaaatggaagtatctgcagtgtacatacaggagggttggagagaggcatccttttccctaggctgtgcctggggacaagagagaggggaagtacagctggcactgccgtgccaggggcagggtccaggccagccgtgccacctgagcgggcacagcgagctggagctcggctactccttggcgcggccaatgatggtgaggatgtacaggaagatgttgatgatgtctgtgtacaggttcagcgcagcaaacacatactcttctgggctcagggacagctgcttgttccccagcagcagctgggtgtccactgcgaggaagcaggtgaagagcagagcgcccagtgaggcgtacacgatctccaggatgcggttccggatgaagatgcagagaatggcgaagatgaagagcaccaccatgctcaccaggagcacgcccatgcatgaggtgaagtcgtagcgggtctgcatggagaagatgacgacggtgaagcagacggctgtggtgatgcccacggccatgatgactgcctcggtgttgtagaagctggcgatcatccccaccatgtacgacaggctggcggtcaggaccgacagtgcaacaaggttccaggggtgctttcgccggaagtccccacaacagctgaggacgatgagagagatgaagaagacagcataggagacatagtaggtccagacattctcccggacaaagcccttcacctccgcaacaaaagtgaacacagacaccgtggacagggtcaccgacagctgcaaggtcagcactaggaacaccttgcggatgaaggcctgtcggatgctcttgtcatcccagttggtggcagggaagtcctggttgtcatagtaggatgggggaccctcctcctggtagtttccatgctggggtgagtcagggtcttgtcctgggaagacctgtggctgtcatcccggagaattccggaccg

SEQ ID NO: 258250 - DNA, 936 bp, Homo Sapiens
  misc_feature (803)..(812): n is a, c, g, or t
ggcctgggtggcgaattcggcacgagggacttccctgccaccaactgggatgacaagagcatccgacaggccttcatccgcaaggtgttcctagtgctgaccttgcagctgtcggtgaccctgtccacggtgtctgtgttcacttttgttgcggagtcggtcctgaccgccagcctgtcgtacatggtggggatgatcgccagcttctacaacaccgaggcagtcatcatggccgtgggcatcaccacagccgtctgcttcaccgtcgtcatcttctccatgcagacccgctacgacttcacctcatgcatgggcgtgctcctggtgagcatggtggtgctcttcatcttcgccattctctgcatcttcatccggaaccgcatcctggagatcgtgtacgcctcactgggcgctctgctcttcacctgcttcctcgcagtggacacccagctgctgctggggaacaagcagctgtccctgagcccagaagagtatgtgtttgctgcgctgaacctgtacacagacatcatcaacatcttcctgtacatcctcaccatcattggccgcgccaaggagtagccgagctccagctcgctgtgcccgctcaggtggcacggctggcctggaccctgcccctggcacggcaggggccagctgtacttcccctctctcttggccccaggcacagccctaagggaaaaagatgccctctcctccaacccttcctggaatgtacactgcaagatacttccaatttgggacccccctgggggccccaacatgggcccccctttagatccttnnnnnnnnnnggcccaaggggccacccagggccccggtttcccagggcccacctccgtgggtaaactagtagggtgccgtgaaaaccccggaattggcccaaccccactccacgggaaacttgggggagaacaa

SEQ ID NO: 258251 - DNA, 1659 bp, Homo Sapiens
  misc_feature (1139)..(1154): n is a, c, g, or t
  misc_feature (1509)..(1509): n is a, c, g, or t
  misc_feature (1550)..(1550): n is a, c, g, or t
  misc_feature (1556)..(1556): n is a, c, g, or t
  misc_feature (1597)..(1605): n is a, c, g, or t
gaagcctctgtttggtccggccaggtcccgggatccgggccgcccgctgcgatgccaagtccccggaggagcatggagggacggccgctgggcgtctccgcttcgagcagcagcagcagccccggcagcccagcccatggcggcggtggcggcggcagcaggtttgagttccagtccctgctcagcagccgcgccacggccgtggaccccacctgcgcccggctccgtgcatcggagagcccagttcaccgccgcggctccttccccctggccgcggcgggcccctcgcagtcgcccgcgcctccgctgcccgaggaggaccgcatggacttgaacccgtccttcctgggcatcgccctgcgctccctgctggccatcgacctgtggctgtccaagaagctgggggtgtgcgcgggagagagctcgtcgtggggcagcgtgcgaccccttatgaagctgctggagatctcgggacacggcatcccctggctgctgggcaccctctactgcctgtgcaggagcgacagctgggccgggcgcgaggtgctgatgaacctgctcttcgccctgctgttggacctgctgctggtggccttgatcaaagggctggtccgcagcgccgcccggcccacaaccagatggacatgtttgtcactctctcggtggacaagtactccttcccctcgggccatgccacaagggccgccctgatgtcgaggttcatcctgaaccacctggtgctggccattccactgagggtgctggtggttctgtgggccttcgtcttgggcctatccagggtcatgctggggcggcacaatgtcaccgacgtagcttttggcttttttctgggctacatgcagtacagcatcgtggactattgctggctctcaccccataatgctccggtcctctttttactgtggagtcaacgatgacaccatctcattgattatggcaccaggaagtctgaaggtttccacattcgatgatgtcaacctaaaccagcagccatcccgcttgtccctcttaggcatttcaggcttcctttgggatttcaggtgtcccatgatcttgatgtgctgctaggctggagcacacactggccattactgaacacagccatattagggaaagcnnnnnnnnnnnnnnnntcctctattgtatatttattcaacaactgtttatgtttccaggacaactgcaaagaaaacaagctgaggtggttatactgttgctgttaaaagttggtatcagtaagatttgtgttttgtgataatccctaaatcaacataccacttgtaaactgaacttcgagaaagaaacatgatgttcattctgtaaatatacatgcagacaggtcatgtactaatcctagtccttttcctgaggtagattttaaacagtatttttaaagtccaagacataggtttttctagtttattccctgaagatctgttgccacagttgggagatttcttcctaatcctgattttcttggtaagcctntttactttattatctctattaattaattatctctatccatnatttgnggatcgggtaagtgggaaaaagagattataaaaccttgtgnnnnnnnnncctttccctccattcctaaaaagaatctttatgcattttcccacctactcctta

SEQ ID NO: 258252 - DNA, 1555 bp, Homo Sapiens
  misc_feature (17)..(17): n is a, c, g, or t
  misc_feature (54)..(54): n is a, c, g, or t
  misc_feature (60)..(60): n is a, c, g, or t
  misc_feature (63)..(63): n is a, c, g, or t
  misc_feature (72)..(72): n is a, c, g, or t
  misc_feature (82)..(82): n is a, c, g, or t
  misc_feature (86)..(86): n is a, c, g, or t
  misc_feature (94)..(94): n is a, c, g, or t
  misc_feature (107)..(107): n is a, c, g, or t
  misc_feature (132)..(132): n is a, c, g, or t
  misc_feature (158)..(158): n is a, c, g, or t
  misc_feature (163)..(163): n is a, c, g, or t
  misc_feature (179)..(179): n is a, c, g, or t
  misc_feature (185)..(185): n is a, c, g, or t
  misc_feature (194)..(194): n is a, c, g, or t
  misc_feature (207)..(207): n is a, c, g, or t
  misc_feature (245)..(245): n is a, c, g, or t
  misc_feature (256)..(257): n is a, c, g, or t
  misc_feature (262)..(262): n is a, c, g, or t
  misc_feature (292)..(292): n is a, c, g, or t
  misc_feature (308)..(308): n is a, c, g, or t
  misc_feature (340)..(340): n is a, c, g, or t
  misc_feature (347)..(347): n is a, c, g, or t
  misc_feature (349)..(349): n is a, c, g, or t
  misc_feature (353)..(353): n is a, c, g, or t
  misc_feature (368)..(368): n is a, c, g, or t
  misc_feature (391)..(391): n is a, c, g, or t
  misc_feature (394)..(394): n is a, c, g, or t
  misc_feature (398)..(398): n is a, c, g, or t
  misc_feature (411)..(411): n is a, c, g, or t
  misc_feature (426)..(426): n is a, c, g, or t
  misc_feature (443)..(443): n is a, c, g, or t
  misc_feature (466)..(466): n is a, c, g, or t
  misc_feature (470)..(470): n is a, c, g, or t
  misc_feature (483)..(483): n is a, c, g, or t
  misc_feature (492)..(492): n is a, c, g, or t
  misc_feature (504)..(504): n is a, c, g, or t
  misc_feature (508)..(508): n is a, c, g, or t
  misc_feature (521)..(521): n is a, c, g, or t
  misc_feature (523)..(523): n is a, c, g, or t
  misc_feature (573)..(573): n is a, c, g, or t
  misc_feature (1032)..(1032): n is a, c, g, or t
  misc_feature (1042)..(1042): n is a, c, g, or t
  misc_feature (1046)..(1046): n is a, c, g, or t
  misc_feature (1133)..(1133): n is a, c, g, or t
  misc_feature (1162)..(1162): n is a, c, g, or t
ttcctattcccgttggncacaaggagtctgtgagggggtgtgaaggaaggaggntgcggntgngtcctggantccgtttgtnggtngggagtcnagcagggtttggnttatttttccgcatctggtgtgcanttggatttttatcctttttgaatggnttttnggtttttattagttangtgttnttttagggnagcgagggcccgntccccaccgtcctggaagtgctgcagtagcctgtctgngtactccattnncacgnagttggggcagccattcatgcagcagtttntgggcggctggagctnaggtggcagcgatgccttgggcggcctggtgncgtccgnanctgnttgggagctcacctntacgtggtttgtcccgaattttntgngctnatcaggggcttgngctccgggatggtgnctttgaagaaagctgcnacctccaggaagcctctggcagnagtncgggctggagaancggcgagcnccctgaggatgnaganaaacatgtgattntncaggaagctggtgaggccccgtctacccccagcagtgaggacatttcagntctcctgtcattgggcaactggctccatgtcctcagctttttcacttcctgtgactttagacatgttatttcacctctctagactcagtttccccactgtgcaatggaagtaatgggtatgacacggtgtgattaacaagaagtgccaggatcagggcctggcgccgggtgtgcactcaagcacatggtggggggtgggggaggcactcgacacctccagctaagatggctgctctgtggacaccagtatgcgagaggtgtaaccctgtaagctcctggccagcccagcacctctaccagtataaccaagccccaccacctctgagggaccaaccggaagaatcgcaccaccctttatccaagtttccctgtcacaaagcccaggcctctcaggcccctctcatcccagcgtgaatgtcctataggcagtcttccgtcgctgccctgctctatctaccnaggatcacgnactnacacgctaccaacttcacttatttaactagtcctgcgaggggcatcatccgctccatgtccacggccagtccccagagcccaggagngctcgcacacaggcgctcggcagatactnagaaacaggaaagtggccgttcaccgggctgcttcctctcccaaggctaagcggcccctccacagattccggggcggggactcggtaagagccgatggaggagaggagcgaggggccttcggcggcggccagcgcgcgatcctcccggctccgtccccacatgcgggtggaggggccggggctcctcccggtacgtgcgggcccccggacagcggcctctcggacgtgcccttcggcgctgccaagacccgtcctggtacttgccgagccacggaccgcggacgctaccgcccggcctccctcgaccaccctccgcagcagcatcgcccgcggacgggatccggcaacccctgaccgtgagcggcgggcgctccggccaatcccggacctccc

SEQ ID NO: 258253 - DNA, 1657 bp, Homo Sapiens
  misc_feature (15)..(15): n is a, c, g, or t
  misc_feature (21)..(21): n is a, c, g, or t
  misc_feature (23)..(23): n is a, c, g, or t
  misc_feature (265)..(265): n is a, c, g, or t
  misc_feature (1493)..(1493): n is a, c, g, or t
  misc_feature (1501)..(1501): n is a, c, g, or t
  misc_feature (1529)..(1529): n is a, c, g, or t
  misc_feature (1566)..(1566): n is a, c, g, or t
  misc_feature (1574)..(1574): n is a, c, g, or t
  misc_feature (1581)..(1581): n is a, c, g, or t
  misc_feature (1583)..(1583): n is a, c, g, or t
  misc_feature (1599)..(1599): n is a, c, g, or t
  misc_feature (1622)..(1622): n is a, c, g, or t
  misc_feature (1630)..(1630): n is a, c, g, or t
  misc_feature (1650)..(1650): n is a, c, g, or t
  misc_feature (1655)..(1655): n is a, c, g, or t
gggatcccgcgcgcngcgggngnccactcagccaggcgggaagcgctggtgttgcggcgctggcgacagtcggggttgcgagcggcccggggccggggcggccagggccgctgcaggacgagaccctgggtgtggcgtccgtgccctcgcagtggagggccgtccagggcatccgcggggagacgaaaagttgccagacggccagcattgccactgccagtgcatccgcccaggccaggaatcatgtggacgcccaggtgcaganggaggcccccgtgcctgtcagcgtgcagcccccgtcccagtacgacatacccaggctcgcagcctttcttcggagagtggaggccatggtcatccgagagctgaacaagaattggcagagccacgcgtttgatggcttcgaggtgaactggaccgagcagcagcagatggtgtcttgtctgtataccctgggctacccgccagcccaagcgcagggtctgcatgtgaccagcatctcctggaactccactggctctgtggtggcctgtgcctacggccggctggaccatggggactggagcacgcttaagtccttcgtgtgtgcctggaacctggaccggcgagacctgcgtccccagcaaccgtcggccgtggtggaggtccccagcgctgtcctgtgtctggccttccaccccacgcagccctcccacgtcgcaggagggctgtacagtggtgaggtgttggtgtgggacctgagccgtcttgaggacccgctgctgtggcgcacaggcctgacggatgacacccacacagaccctgtgtcccaggtggtgtggctgcccgagcctgggcacagccaccgcttccaggtgctgagtgtggccactgacgggaaggtgctactctggcagggcatcggggtaggccagctgcagctcacagagggcttcgccctggtcatgcagcagctgccacggagcaccaagctcaagaagcatccccgcggggagaccgaggtgggcgccacggcagtggccttctccagctttgaccctaggctgttcattctgggcacggaaggcggcttcccgctcaagtgttccctggcagctggagaggcagccctcacgcggatgcccagctccgtgcccctgcgggccccagcacagtttaccttctccccccacggcggtcccatctactctgtgagctgttcccccttccacaggaatctcttcctgagcgctgggactgacgggcatgtccacctgtactccatgctgcaggcccctcccttgacttcgctgcagctctccctcaagtatctgtttgctgtgcgctggtcccccagtgcggcccttggcttttgcagctgccctctgggaaaggtggacgtgcagctgtttgatctccagaaaagctcccagaaaaccaccaggtttgatcaagcaaacccagggatgaaagccctgtctactgtctggagttcaacagccagcagactcagntcttggcngcgggcgatgcccagggcacagtgaagntgtggcagctgagcacagagttcacggaacaagggcntcgggaanctgaggncntggactgcctggcagnagaggtggcggcgtgagggtttnctggaggnggttgcaagccttcgctgtnccgancc

SEQ ID NO: 258254 - DNA, 1582 bp, Homo Sapiens
ttggcttgcgtcagaaacacaaggctcggcacagcgaaggcttgcacccgcctcccgggacccctcaggccgccacctctgctgccaggcagtccaggtcctcagcttcccggggcccttgttccgtgaactctgtgctcagctgccacaccttcactgtgccctgggcatcgcccacaggccaagagctgagtctgctggctgttgaactccagacagtagacagggctttcatcctgggtttgcttgatcaaaactgtgggtttctgggagcttttctggagatcaaacagctgcacgtcacctttcccagaggcagctgcaaaaaccaaggggccgcactggggaccagcgcacagcaaacagatacttgagggagagctgcagcgaagtcaagggaggggcctgcagcatggagttcaggtggacatgcccgtcagtcccagcgctcaggaagagattcctgtggaagggggaacagctcacagagtagatgggaccgccgtggggggagaaggtaaactgtgctggggcccgcagggcacggagctgggcatccgcgtgagggctgcctctccagctgccagggaacacttgagcgggaagccgccttccgtgcccagaatgaacagcctagggtcaaagctggagaaggccactgccgtggcgcccacctcggtctccccgcggggatgcttcttgagcttggtgctccgtggcagctgctgcatgaccaaggcgaacccctctgtgagctgcagctggcctaccccgatgccctgggacacagggtctgtgtgggtgtcatccgtcaggcctgtgcgccaaagcagcgggtcctcaagacggctcaaggtcccacaccaacacctcaccactgtacagccctcctgcgacgtgggagggctgcgtggggtggaaggccagacacaggacagcgctggggacctccaccacggccgacggttgctggggacgcaggtctcgccggtccaggttccaggcacacacgaaggacttaagcgtgctccagtccccatggtccagccggccgtaggcacaggccaccacagagccagtggagttccaggagatgctggtcacatgcagaccctgcgcttgggctggcgggtagcccagggtatacagacaagacaccatctgctgctgctcggtccagttcacctcgaagccatcaaacgcgtggctctgccaattcttgttcagctctcggatgaccatggcctccactctccgaagaaaggctgcgagcctgggtatgtcgtactgggacgggggctgcacgctgacaggcacgggggcctccgtctgcacctgggcgtccacatgattcctggcctgggcggatgcactggcagtggcaatgctggccgtctggcaacttttcgtctccccgcggatgccctggacggccctccactgcgagggcacggacgccacacccagggtctcgtcctgcagcggccctggccgccccggccccgggccgctcgcaaccccgactgtcgccagcgccgcaacaccagcgcttccccctcgtgccgaattcgccacccaggcc

SEQ ID NO: 258255 - DNA, 665 bp, Homo Sapiens
ggtagatctcctggatggggcttctggggatgtccagcatcctccccatctggacccctccccaggaggtgccctggtacacctgcttgaccttccctgtgtacctccacccccagctcccatcccagatctcaaagtgtttgagcgtgagggagtacagctgaatctgtctttcattcgaccccctgaaaaccctgctttgctgttaatcaccatcactgccaccaacttctcagagggtgatgtcacccatttcatctgccaggctgctgtgcccaagagtctccagctgcagctgcaggcccccagtgggaacacagttccagctcggggtggccttcctatcacccagctcttcagaatcctcaatcctaacaaggcccccctgcggctaaagctgcgcctcacctacgaccactttcaccagtcggtgcaggagatctttgaggtgaacaacttgcctgtggaatcgtggcagtaactgtctccactcacagcctgaaattctcctgtgtcccaaaccccagggggccccagcagcttcgaacctacacctgagggctaccagcaggtggcgctctggctttgcactgcaaaaactggggaccagcccccttctcccacaaataaagcccaataaagcctgagaagtgaggaaagccata

SEQ ID NO: 258256 - DNA, 1554 bp, Homo Sapiens
  misc_feature (136)..(145): n is a, c, g, or t
actcattctccgatcagcgcgtgaacgcagctcggctgccgctggcaggaaacaattctgcaaaaataatcatactcagcctggcaattgtctgcccctaggtctgtcgctcagccgccgtccacactcgctgcannnnnnnnnncacagaatttaccgcggcaagaacatccctcccagccagcagattacaatgctgcaaactaaggatctcatctggactttgtttttcctgggaactgcagtttctctgcaggtggatattgttcccagccagggggagatcagcgttggagagtccaaattcttcttatgccaagtggcaggagatgccaaagataaagacatctcctggttctcccccaatggagaaaagctcaccccaaaccagcagcggatctcagtggtgtggaatgatgattcctcctccaccctcaccatctataacgccaacatcgacgacgccggcatttacaagtgtgtggttacaggcgaggatggcagtgagtcagaggccaccgtcaacgtgaagatctttcagaagctcatgttcaagaatgcgccaaccccacaggagttccgggagggggaagatgccgtgattgtgtgtgatgtggtcagctccctcccaccaaccatcatctggaaacacaaaggccgagatgtcatcctgaaaaaagatgtccgattcatagtcctgtccaacaactacctgcagatccggggcatcaagaaaacagatgagggcacttatcgctgtgagggcagaatcctggcacggggggagataacttcaaggacattcaggtcattgtgaatgtgccacctaccatccaggccaggcagaatattgtgaatgccaccgccaacctcggccagtccgtcaccctggtgtgcgatgccgaaggcttcccagagcccaccatgagctggacaaaggatggggaacagatagagcaagaggaagacgatgagaagtacatcttcagcgacgatagttcccagctgaccatcaaaaaggtggataagaacgacgaggctgagtacatctgcattgctgagaacaaggctggcgagcaggatgcgaccatccacctcaaagtctttgcaaaacccaaaatcacatatgtagagaaccagactgccatggaattagaggagcaggtcactcttacctgtgaagcctccggagaccccattccctccatcacctggaggacttctacccggaacatcagcagcgaagaaaaggcttcgtggactcgaccagagaagcaagaggtatagcttacctgaccactagccagtctttagttttgaaagcattacaggttaactcaccattgcaggttaaaaaccagacatgctaaactaattagtaatttagctaaagaatagggcgatagtggtagacaatacttagccctagtgtcattttaggatgagcaagcaagctgtgttggggagggaggaacacatccatattttttcctaaaactggagcttattttcttgctggggctgcggaaatcacatccaggggtatacaccaat

SEQ ID NO: 258257 - DNA, 2386 bp, Homo Sapiens
  misc_feature (1910)..(2085): n is a, c, g, or t
gaagcgaggggacctgagtgaagcctggatcatttcagttcactgggtggctgttcagtggctggttgggcatgcctgcctttgctgtcctccacccccactgcactgtcctctcccccacagtgtctttgagctgcagcagctggttgaggggcaccaagaatcctacctcctctgctgggaccagtcacaaaaccaggtacaggtagttctgaaccagaaggcaggccccaagaccatcctaagggccgccacacatgggctgatgcttggggccctgcagggagatggaccccttccagcagagctggaggagctgaggaaccgggtgcgggcaggtcctaagaaagagagctgggtcgtcgtcaaggagacacacgaagtgttggacatgctgttcccaaagttcttgaaaggactgcaggatgccggctggaagaccgagaagcaccagctagaggtggatgagtggagggccacatggcttctgtctcccgaaaagaaggtcttgtgagcagcccagacggaggcccaagcccagggcaggaacctggagcaaggacactttggccacagcaggacaggggaaaggcagctttatttttccttagggcaactgcagcgggtgggccaggccctcatgggaagtgactgccaatcagatgcagtgggccccaggcagaggaaggccgggagaaggggagccaggaccttctcaccccactgccccttccccttttctggggagcaccgcaggctcctcacccccacttcctgtgaggctgtggcttatggtgtccaacgcagttggtcttaggcatagaagccccagaggaacacggccactgccatcatgagcagggcattgaggttgaccacacgggcccagctcgggtcctcgctgatgtcctccagccgcctggctgctgccgctgcctcctcctgggtaaggggcggaggactgcccaccccacctctgctcattccacaaaaccagagcaggcactggcggaagaggcttggtgccggggcctggggctctgagggaaattgaggccctgcagttagtttgcgggaactcagctcctccagccccacctcccagcatggtgccctaccattcatctccatggcactctctgggcacccattctgtacagggaagtgaggagccttgctgctcatcagcatccaggtcctcccgttcctccttgctatgccggagactgaagaccaggcggtggagctggggagggtgggagcacgaacgaggtgggagttctgtccccccatgcctggccctaaagtctcttgcacaccagctcctcactgcctgccctacccacctctgtccagtctacacacccagcccaggcttaactcatgccaactccaccctacatggctgccctgtgccctcgggataaaccccaagcccctgagcttgtgtttaaaagccgttggccttgctcccccagctttgtcagctcaggtctgtctacacccagatggtagcgcttgtgacactggcctggcagtcctgctcacagtgttctgtgcctgtgtgctcccaccctttcctcctgctgctgcagaaacccggccatccttccacacccagatctcttgtcctgtcctcaccccaccctgccaccatcagccctgcctggagccacctgccctttggcaacaaaaccaaacctttttgtgggcgttcaagatggtattgtgcccaccagtcagatcctgtgttttgagtcccaaaggccatgccaaggattggctttgggaggctttaatcaccaacccatcaacatcaagcctcccccaggccggttcaaataaatgtatttacaataaacaaaaaaaaccagcacaagaaatacaccagacaatacagagaaagaagnnnnnnnnnnnnnnnnnnnnnnnnnnnnnnnnnnnnnnnnnnnnnnnnnnnnnnnnnnnnnnnnnnnnnnnnnnnnnnnnnnnnnnnnnnnnnnnnnnnnnnnnnnnnnnnnnnnnnnnnnnnnnnnnnnnnnnnnnnnnnnnnnnnnnnnnnnnnnnnnnnnnnnnnnnnnnnnngcagacgcaacaagtacgagccagccaacgaataaagagcgaccaaaagcccaaccacaacagagcatcacgcccccaggcagtcatccgtgccagtgctacgggtacaagatgggatcaaacaaatctgttataggagcctgacctcccgctgcgggcacaggtagactgtcattctcctcgctcggacatcgaccatagccactcttattgtcgtcgatgatgcatcatggcccgcataaatacttactacgtaacgcgtgagcaccacacaccaacgcggccgaacagtctattcacg

SEQ ID NO: 258258 - DNA, 1563 bp, Homo Sapiens
  misc_feature (1436)..(1436): n is a, c, g, or t
  misc_feature (1530)..(1530): n is a, c, g, or t
  misc_feature (1537)..(1537): n is a, c, g, or t
ccggagcggctgcggaccgggcgctctccgccttcaagttgcggggcttgctgctccgtggtgaagctattaagtacctcacagaagctcttcagtctatcagtgaattagagcttgaagataaactggaaaagataattaatgcagttgagaagcaacccttgtcatcaaacatgattgaacgatctgtggtggaagcagcagtccaggaatgcagtcagtctgttgatgaaactattctgttaatgaccaaccaccctgcaccaaatttatttggaacaccaagagataaagcagagatgtttcgtgagcgatataccattttgcaccagaggacccacaggcatgaattatttactcctccggtgataggttctcaccctgatgaaagcggaagcaaattccagcttaaaacaatagaaaccttattgggtagtacaaccaaaatcggagatgcgattgttcttggaatgataacgcagttaaaagagggaaaattttttctggaagatcctactggaacagtccaactagaccttagtaaagctcagttccatagtggtttatacacagaggcatgctttgtcttagcagaaggttggtttgaagatcaagtgtttcatgtcaatgcctttggatttccacccactgagccctctagtactactagggcatactatggaaatattaatttttttggaggtccttctaatacatctgtgaagacttctgcaaaactaaaacagctagaagaggagaataaagatgctatgtttgtgtttttatctgatgtttggttggaccaggtggaagtattggaaaaacttcgcataatgtttgctggttattcaccagcacctccaacctgctttattctgtgtggtaatttttcatctacaccatatggaaaaaatcaagttcaagctttgaaagattccctaaaaactttggcagatataatatgtgaatacccagatattcaccaaagtagtcgttttgtgtttgtacctggtccagaggatcctggatttggttccatcttaccaaggccaccactggctgaaagcatcactaatgaattcagacaaagggtaccattttcagtgtttactactaatcctggcagaattcagtactgtacacaggaaattactgtcttccgtgaagacttagtaaataaaatgtgcagaaactgcgtccgttttcctagcagcaatttggctattcctaatcactttgtaaagactatcttatcccaaggacatctgactcccctacctctttatgtctgcccagtgtattgggcatatgactatgctttgagagtgtatcctgtgcccgatctacttgtcattgcagacaaatatgatcctttcactacgacaaataccgaatgcctctgcataaaccctggctcttttccaagaagtggattntcattcaaagttttttatccttctaataagacagtagaagatagcaaacttcaaggcttttgagattcttaaagatcatctgaagaaaattcancagtttnctgcttaactctatatcttatgtgat

SEQ ID NO: 258259 - DNA, 1530 bp, Homo Sapiens
gcaataaggggcctgagcgcgcgggggagaagcgggagcgggagcgggagcgagctggcggcgccgtcgggcgccgggccgggccatggagctgtggccgtgtctggccgcggcgctgctgttgctgctgctgctggtgcagctgagccgcgcggccgagttctacgccaaggtcgccctgtactgcgcgctgtgcttcacggtgtccgccgtggcctcgctcgtctgcctgctgcgccacggcggccggacggtggagaacatgagcatcatcggctggttcgtgcgaagcttcaagtacttttacgggctccgcttcgaggtgcgggacccgcgcaggctgcaggaggcccgtccctgtgtcatcgtctccaaccaccagagcatcctggacatgatgggcctcatggaggtccttccggagcgctgcgtgcagatcgccaagcgggagctgctcttcctggggcccgtgggcctcatcatgtacctcgggggcgtcttcttcatcaaccggcagcgctctagcactgccatgacagtgatggccgacctgggcgagcgcatggtcagggagaacctcaaagtgtggatctatcccgagggtactcgcaacgacaatggggacctgctgccttttaagaagggcgccttctacctggcagtccaggcacaggtgcccatcgtccccgtggtgtactcttccttctcctccttctacaacaccaagaagaagttcttcacttcaggaacagtcacagtgcaggtgctggaagccatccccaccagcggcctcactgcggcggacgtccctgcgctcgtggacacctgccaccgggccatgaggaccaccttcctccacatctccaagaccccccaggagaacggggccactgcggggtctggcgtgcagccggcccagtagcccagaccacggcagggcatgacctggggagggcaggtggaagccgatggctggaggatgggcagaggggactcctcccggcttccaaataccactctgtccggctcccccagctctcactcagcccgggaagcaggaagccccttctgtcactggtctcagacacaggcccctggtgtcccctgcagggggctcagctggaccctccccgggctcgagggcagggactcgcgcccacggcacctctgggagctgggatgataaagatgaggcttgcggctgtggcccgctggtgggctgagccacaaggcccccgatggcccaggagcagatgggaggaccccgaggccagacgcacactgtccgagccctctgctcagccgcctgggacccaccagggtgcagctgggctccagggtccagcccacaagctgcatcagggtctctgggagaggaggggcctggagggccaggagtcccagactcacgcaccctgggccacagggagccgggaatcggggcctgctgctcctgctggcctggaagactctgtggggtcagcactgtactccgttgctgtttttttataaacacactcttggaagtga

SEQ ID NO: 258260 - DNA, 961 bp, Homo Sapiens
  misc_feature (4)..(4): n is a, c, g, or t
  misc_feature (10)..(10): n is a, c, g, or t
  misc_feature (22)..(22): n is a, c, g, or t
  misc_feature (26)..(27): n is a, c, g, or t
  misc_feature (31)..(31): n is a, c, g, or t
  misc_feature (50)..(50): n is a, c, g, or t
  misc_feature (62)..(62): n is a, c, g, or t
  misc_feature (76)..(76): n is a, c, g, or t
  misc_feature (98)..(98): n is a, c, g, or t
  misc_feature (126)..(126): n is a, c, g, or t
  misc_feature (128)..(128): n is a, c, g, or t
  misc_feature (131)..(131): n is a, c, g, or t
  misc_feature (133)..(133): n is a, c, g, or t
  misc_feature (137)..(137): n is a, c, g, or t
  misc_feature (159)..(159): n is a, c, g, or t
  misc_feature (161)..(162): n is a, c, g, or t
  misc_feature (173)..(174): n is a, c, g, or t
  misc_feature (183)..(183): n is a, c, g, or t
  misc_feature (354)..(354): n is a, c, g, or t
ccangagccngaggaccacccngganncgtntctaaacacccacatcgcngcggctgtgctnttggccgcgccggntgcacggagccggcaccccagnaccacgccgcccccgtctacaagatggncnccnanggantctacgcagaggacgcccagcncnncgcccagccannggccaggcntcgccgccgcctacagccagttctacgggaaagcggtattgaccccagccaggtgggcgtgcacccgagcccaggcgcccgccacctccataatggggacctggaccacttctccaacagtgacaactgccgggaggtgcacctcgagaagcggcgaggggagggcctggngtggccctggtggagtcgggctggggctccctgctgccaacagccgtcatcgccaacctgctgcacggggggcctgctgagcgctcgggggccctcagcatcggggaccgcctgaccgctatcaacgggaccagcctggtggggctgcccctggctgcgtgccaggccgctgtccgcgagacgaagtcgcagacgtcggtgacactcagcatcgtccactgccctcccgtcaccaccgccatcatccaccggccccacgcccgcgagcagctgggcttctgcgtggaggacggcatcatctgcagcctcctccgtggtggcatcgccgagcgtgggggcatccgcgtcggccaccgcatcattgagatcaatgggcagagtgtggtggccacgccacacgcccgcatcatcgagctgctcaccgaggcctatggcgaggtgcatatcaagacgatgccagctgccacatatcgcctccttacaggccaggagcagcccgtgtacctgtgaccacctcatcccttgcctgccactgtgccttcgcctccatggccccggagccccatcctgggcctgccctggctggccaggaccccagcgggttctt

SEQ ID NO: 258261 - DNA, 1307 bp, Homo Sapiens
ccgggatggcggacgcaggaggcctcgtggaggacacagcagcatgggacagtcagggaggtcccggcaccagaagcgcgcccgcgcccaggcgcactccgcaacctcgaggcctatgccgcgaacccgcactcgttcgtgttcacgcgaggctgcacgggtcgcaacatccggcagctcagcctggacgtgcggcgggtcatggagccgctcactgccagccgtctgcaggttcgtaagaagaactcgctgaaggactgcgtggcagtggctgggcccctcggggtcacacactttctgatcctgagcaaaacaaaaaccaatgtctactttaagctgatgcgcctcccaggaggccccaccttgaccttccaggtcaagaagtactcgctggtgcgtgatgtggtctcctcactgcgccggcaccgcatgcacgagcagcagtttccccacccacccctcctggtactcaacagctttggcccccatggtatgcatgtgaagctcatggccaccatgttccagaacctgttcccctccatcaacgtgcacaaggtgaacctgaacaccatcaagcgctgcctcctcatcgactacaaccccgactcccaggagctggacttccgccactatagcatcaaagttgttcctgtgggcgcgagtcgcgggatgaagaagctgctccaggagaagttccccaacatgagccgcctgcaggacatcagcgagctgctggccacgggcgcggggctgtcggagagcgaggcagagcctgacggcgaccacaacatcacagagctgcctcaggctgtcgctggccgtggcaacatgcgggcccagcagagtgcagtgcggctcaccgagatcggcccgcggatgacactgcagctcatcaaggtccaggagggcgtcggggagggcaaagtgatgttccacagttttgtgagcaagacggaggaggagctgcaggccatcctggaagccaaggagaagaagctgcggctgaaggcgcagaggcaggcccagcaggcccagaatgtgcagcgcaagcaggagcagcgggaggcccacagaaagaagagcctggagggcatgaagaaggcacgggtcgggggtagtgatgaagaggcctctgggatcccttcaaggacggcgagcctggagttggacctgttccccgaggccaagcagaaacggcttgccaagtctccaggggcggaagccgaaagcggtggggaaatggatcgaggccagggggtcgcctttggtgaccagaagttttcccaagaccaaaggacaagttccca

SEQ ID NO: 258262 - DNA, 1163 bp, Homo Sapiens
ttttttttatagcggccgcgggcggcggcggcagcggttggaggttgtaggaccggcgaggaataggaatcatggcggctgcgctgttcgtgctgctgggattcgcgctgctgggcacccacggagcctccggggctgccggcacagtcttcactaccgtagaagaccttggctccaagatactcctcacctgctccttgaatgacagcgccacagaggtcacagggcaccgctggctgaaggggggcgtggtgctgaaggaggacgcgctgcccggccagaaaacggagttcaaggtggactccgacgaccagtggggagagtactcctgcgtcttcctccccgagcccatgggcacggccaacatccagctccacgggcctcccagagtgaaggctgtgaagtcgtcagaacacatcaacgagggggagacggccatgctggtctgcaagtcagagtccgtgccacctgtcactgactgggcctggtacaagatcactgactctgaggacaaggccctcatgaacggctccgagagcaggttcttcgtgagttcctcgcagggccggtcagagctacacattgagaacctgaacatggaggccgaccccggccagtaccggtgcaacggcaccagctccaagggctccgaccaggccatcatcacgctccgcgtgcgcagccacctggccgccctctggcccttcctgggcatcgtggctgaggtgctggtgctggtcaccatcatcttcatctacgagaagcgccggaagcccgaggacgtcctggatgatgacgacgccggctctgcacccctgaagagcagcgggcagcaccagaatgacaaaggcaagaacgtccgccagaggaactcttcctgaggcaggtggccccgaggacgctccctgctccgcgtctgcgccgccgccggagtccactcccagtgcttgcaagattccaagttctcacctcttaaagaaaacccaccccgtagattcccatcatacacttccttcttttttaaaaaagttgggttttctccattcaggattctgttccttaagattttttccttctgaagtgtttcacgagagcccgggagctgctgccctgcggccccgtctgtggctttcagctctgggtctgagtaatggcgggggggg

SEQ ID NO: 258263 - DNA, 1009 bp, Homo Sapiens
  misc_feature (707)..(707): n is a, c, g, or t
  misc_feature (718)..(718): n is a, c, g, or t
  misc_feature (925)..(925): n is a, c, g, or t
ggcctgggtggcgaattcggcacgaggaggttgtaggaccggcgaggaataggaatcatggcggctgcgctgttcgtgctgctgggattcgcgctgctgggcacccacggagcctccggggctgccggcacagtcttcactaccgtagaagaccttggctccaagatactcctcacctgctccttgaatgacagcgccacagaggtcacagggcaccgctggctgaaggggggcgtggtgctgaaggaggacgcgctgcccggccagaaaacggagttcaaggtggactccgacgaccagtggggagagtactcctgcgtcttcctccccgagcccatgggcacggccaacatccagctccacgggcctcccagagtgaaggccgtgaagtcgtcagaacacatcaacgagggggagacggccatgctggtctgcaagtcagagtccgtgccacctgtcactgactgggcctggtacaagatcactgactctgaggacaaggccctcatgaacggctccgagagcaggttcttcgtgagttcctcgcagggccggtcagagctacacattgagaacctgaacatggaggccgaccccggccagtaccggtgcaacggcaccagctccaagggctccgaccaggccatcatcaacgctccgcgtgcgcagccacctgggccgccctcttggcccttcctgggcatccntgggctgaagngggctggttgcttggtcaccatccatcttcatctaccaaaaagcgccggaagccccagggacgtcctggaagatgacaaccccgggttctgcaccccctggaaaaacagcggggccccacccgaatgacaaagggaaaaaaggtccggccgaaggaatcctttccttgagggaggggggcccccaaggaccctcccctgctccgggnttggggcccgccccccgaaatccacttcccccggggttgggacaaattccagggttctccccccttaaaagaaaaaccccccct

SEQ ID NO: 258264 - DNA, 988 bp, Homo Sapiens
  misc_feature (642)..(642): n is a, c, g, or t
  misc_feature (790)..(790): n is a, c, g, or t
ggcctgggtggcgaattcggcacgaggaggttgtaggaccggcgaggataggaatcatggcggctgcgctgttcgtgctgctgggattcgcgctgctgggcacccacggagcctccggggctgccggcacagtcttcactaccgtagaagaccttggctccaagatactcctcacctgctccttgaatgacagcgccacagaggtcacagggcaccgctggctgaaggggggcgtggtgctgaaggaggacgcgctgcccggccagaaaacggagttcaaggtggactccgacgaccagtggggagagtactcctgcgtcttcctccccgagcccatgggcacggccaacatccagctccacgggcctcccagagtgaaggccgtgaagtcgtcagaacacatcaacgagggggagacggccatgctggtctgcaagtcagagtccgtgccacctgtcactgactgggcctggtacaagatcactgactctgaggacaaggccctcatgaacggctccgagagcaggttcttcgtgagttcctcgcagggccggtcagagctacacattgagaacctgaacatggaggccgaccccggccagtaccggtgcaacggcaccagctccaagggctccgaccagnccatcatcacgctccgcgtgcgcagccacctggccgccctctggcccttcctgggcatcgtggctgaggtgctggtgctggccccatcatcttcatctacgagaagcgccggaaagcccgagacgtcctggatgatgacaaccccggntttgcacccctgaaaagcagcgggccgcaccggaatggacaaggccagaaccgcccgcccaaagaactctttcctgaggaaggtgggcccaaggaacctcctccggctccggtaatctggcccaccccgcgggagacacccttccacggggcgtgcggaaaccctcccgggtgacgcccctctttaaacggataacgc

SEQ ID NO: 258265 - DNA, 1028 bp, Homo Sapiens
  misc_feature (970)..(970): n is a, c, g, or t
tccccccctccatttcctcgttaccccaccgccgcgtctcgtcttgtttgaggcctgggtggcgaattcggcacgaggggttgtaggaccggcgaggaataggaatcatggcggctgcgctgttcgtgctgctgggattcgcgctgctgggcacccacggagcctccggggctgccggcacagtcttcactaccgtagaagaccttggctccaagatactcctcacctgctccttgaatgacagcgccacagaggtcacagggcaccgctggctgaaggggggcgtggtgctgaaggaggacgcgctgcccggccagaaaacggagttcaaggtggactccgacgaccagtggggagagtactcctgcgtcttcctccccgagcccatgggcacggccaacatccagctccacgggcctcccagagtgaaggctgtgaagtcgtcagaacacatcaacgagggggagacggccatgctggtctgcaagtcagagtccgtgccacctgtcactgactgggcctggtacaagatcactgactctgaggacaaggccctcatgaacggctccgagagcaggttcttcgtgagttcctcgcagggccggtcagagctacacattgagaacctgaacatggaggccgaccccggccagtaccggtgcaacggcaccagctccaagggctccgaccaggccatcatcacgctccgcgtgcgcagccacctggccgccctctggcccttcctgggcatcgtggctgaggtgctggtgctggtcaccatcatcctcatctacgagaagcgccggaaagcccgaggacgtcctgggatgatgacgacgccggcttctgcaccccctgaaaaagcaggggggcgcaccagaatgaccaagggaagaaccgcccgcccgaaggaactcttccctgaagggaaggggggccccaaggaaagcttcccctggcttccacgttntggcggccgcccggcccgggaactccaccttcccagggggctttggcaaaaaattccc

SEQ ID NO: 258266 - DNA, 1082 bp, Homo Sapiens
tcgtgagttcctgcaggccggtagagctacacatgagaacctaacatggcagcgaccccggccagtaccggtgcaacggcaccagctccaagggctccgaccaggccatcatcacgctccgcgtgcgcagccacctggccgccctctggcccttcctgggcatcgtggctgaggtgctggtgctggtcaccatcatcttcatctacgagaagcgccggaagcccgaggacgtcctggatgatgacgacgccggctctgcacccctgaagagcagcgggcagcaccagaatgacaaaggcaagaacgtccgccagaggaactcttcctgaggcaggtggcccgaggacgctccctgctccgcgtctgcgccgccgccggagtccactcccagtgcttgcaagattccaagttctcacctcttaaagaaaacccaccccgtagattcccatcatacacttccttcttttttaaaaaagttgggttttctccattcaggattctgttccttaggtttttttccttctgaagtgtttcacgagagcccgggagctgctgccctgcggccccgtctgtggctttcagcctctgggtctgagtcatggccgggtgggcggcacagccttctccactggccggagtcagtgccaggtccttgccctttgtggaaagtcacaggtcacacgaggggccccgtgtcctgcctgtctgaagccaatgctgtctggttgcgccatttttgtgcttttatgtttaattttatgagggccacgggtctgtgttcgactcagcctcagggacgactctgacctcttggccacagaggactcacttgcccacaccgagggcgaccccgtcacagcctcaagtcactcccaagccccctccttgtctgtgcatccgggggcagctctggagggggtttgctggggaactggcgccatcgccgggactccagaaccgcagaagcctccccagctcacccctggaggacggccggctctctatagcaccagggctcacgtgggaacccccctcccacccaccgccacaataaagatcgcccccacctccaccctcgaaaa

SEQ ID NO: 258267 - DNA, 466 bp, Homo Sapiens
  misc_feature (20)..(20): n is a, c, g, or t
  misc_feature (32)..(32): n is a, c, g, or t
taaacataaaaccacaaaanggcgcaacccanacacattggcttcaaaacaggccaggacacaggggccccctccttgtgaacctgtgaactttcccacaaagggcaaggaccctggcactgactcccggcccagtggaagaaagctgtgccgccccacccggcccatgactcagacccagaggctgaaagccacagacagggccgcagggcagcagctcccgggctctcgtgaaacacttcagaaggaaaaaatcctaaggaacagaatcctgaatggagaaaacccaacttttttaaaaaagaaggaagtgtatgatgggaatctacggggtgggttttctttaagaggtgagaacttggaatcttggaagcactgggagtggactccggcggcggccagacgcggagcagggagcgtcctcgggccacctgcctcaggaagagttcctctggcggacgttctt

SEQ ID NO: 258268 - DNA, 1015 bp, Homo Sapiens
aaggtagcgaggcctgggtggcgaattcggcacgaggcacaggcatgactgagagcgcctatgggctgctgaccactgaagcttctgccgtctgggcctgcgatctctgcctcaagaccaaggagatccagtctgtctacatccgtgagggcatggggcagctggtggctgctaacgatgggtgacgctggtgaagtggcccagggaagtgcacatgtctctccctgctcttccagggtgatttttttgatgtttggctcttggtccttgtttccactggctttccatccccatggggcagaaacagtggctcctgggagcagaaaaggaattgaggtgggcaggcagaagagcctggattgctcactgttttgggaaacttacatgttgagatctacagagatccaggaaaccaaagccctgctgagcagagccattttgtggctatttctggaggcccaggagtgtggctgcaagagaaaaggggctggaggaagatccggaggggcaggggtgttccctctgctgatgatggatgcccctaacacctgtgcctaacacccctactgaaccccacagctccagccttagtttttggagtcaagtgttaaaggtttctggccagaaggaattggggtcttgccatccctgcaatagcccttttatgggctctgggagacagctttagggaataaatggggattttcccctttttctacccactcctttgcttcctccaagacttacccaactccttccccctcagagaaccaaataccctgaggaaacaggagagttcctgggttatgggcagtttcctttggggattttggggcttccaaaacagtaaggtgaaaaaatgctgtccaggacataatcttttttccaaacccaaaaggcaccggggtcccttttccccagcccccctctcggggggtttttcccccaaagaggaaccattattttttggcccaaaaaatctggcggacaattgtaattccgggcaccgcacact

SEQ ID NO: 258269 - DNA, 1011 bp, Homo Sapiens
  misc_feature (118)..(118): n is a, c, g, or t
gcggacatgctgttgccgactgatcatgagtagagttattgcgctacgacggtgacctctcctcgctctatccaggtaagcaaggtctgtacagcttctgagaatttggaatcatctnttaatttttcagcaacaatgctgcattcatgatctgaatagtggaccactgggggtggagatggtggacgcaatctttcttcttccattcttctacgatggcgctcctctctggctagcatacgctgtttacactcccactcatacaggtcatctcgagcctgtgcgaaatcaacgtggagtctgcctgtgtccttcttgtcagtactagagcccaggcgaatgcggtaacttggatttggagggaagagcgtgcagcttttacagtgtatgatctcttttactactggcatatctggaggaattggtggaggtactattcccaaaccaggcatcattggagttattggtggaattccagtcatcattccaagagcaggatcaaagtcaggtaaaattggttgtccggcaattcccagcggtgccattccaagattattcattgctgtggcccatgcagttggatcagacataggtagtgtcattgcagtggaatccacgttcagagttctactgttatcggctgaaggagtatttgttctctttcttttcttgcttgattcccctccattctcaatgaggccttctgtgaccagagggccactggcactaccaaactgcaggggctcgttgttgttagcagggtcaaagggcagctggttcaatccatcacacttctttgtgttctccaagaattgatctcaaatcaggttccctccagctccccggctaccgaagcgctagtcataatacagccgcggaaaatcgggccggcgcggcagttcctgggctcgtagtgccctcgcggcgccccacgccgcgccactctcttccgaaatgcccgcctcgcgcttccaggcctagacccggcactctggcccaaggctggactct

SEQ ID NO: 258270 - DNA, 1156 bp, Homo Sapiens
  misc_feature (7)..(7): n is a, c, g, or t
  misc_feature (20)..(20): n is a, c, g, or t
  misc_feature (29)..(29): n is a, c, g, or t
  misc_feature (62)..(62): n is a, c, g, or t
  misc_feature (80)..(80): n is a, c, g, or t
gcttggnacaaagctgagcnccggaaggnacagcaatgcgtcgaggtgaggccggggtcggnggtccgctgaaagactcntcttcatgatgctcttgaaggtctcatatgtccttttacgtttctcctcaatccggtgacgatcgtctgtatctggcaggtactggaattccatgggctcactgagctcccggtcggaagggccgccgcagctgcatggagacacgcacaggagcctgcaggctggggtctgcgtagggaggggtccggaacacaatggccacttgtcggtgcacatcagcttgcgaaaaggagcctcgggcctcccagcctggtcccgtgaaatacacctcaatgtcctctttctgcaccttgtcacacagtaggaagatctcatccccaccgaggcagctgccagagtttcggttcactcggcagatcttgagctcggcagtgttgggggcacgattgtcaaagatgggatgagaaaggacaggcggcaggcggaggggcctgcctgatgggtcccgcactgtcacctggaagcagagccgcacagcattcaggtcgtagtccccacgctgctcttctataggaacttggaaggggttgttgttggtctggatgcgctgactgatagcctgctccaggtcccgcttcttcacacactggattcccaggttctggaaactgtggatgcagcggtccgggcagagctcagcctcatagaagccatcccggcagtcctttcctacaagctcgtgggggtgaggccggtgaggagggtccttggtgaccagggagatgcgcactgtccctggtcctgtgtagccattgatcttgatggtggggtgggtcttggtggtatctgtgctcctctcgcctgggatgctgcccgcggagcgcccctcgcacttgtagcggaagcgcatgccccgctgcttgggctgctcaatgatctccacataggggccagaggcctgggctggctctgccgggaagatgagggggaacagttcgtccatggccggggtcccgggggcggggccggggtcgcagctgggcccgcggcgtgcactacagacgagccattcgccagaggcggaaatgcgccgcgcggcccgcatcccgggaattccggaccggtaccagcctgc

SEQ ID NO: 258271 - DNA, 1014 bp, Homo Sapiens
  misc_feature (4)..(4): n is a, c, g, or t
  misc_feature (7)..(7): n is a, c, g, or t
  misc_feature (16)..(16): n is a, c, g, or t
  misc_feature (21)..(21): n is a, c, g, or t
  misc_feature (23)..(23): n is a, c, g, or t
  misc_feature (33)..(34): n is a, c, g, or t
  misc_feature (40)..(40): n is a, c, g, or t
  misc_feature (49)..(49): n is a, c, g, or t
  misc_feature (76)..(76): n is a, c, g, or t
  misc_feature (82)..(82): n is a, c, g, or t
  misc_feature (85)..(85): n is a, c, g, or t
  misc_feature (113)..(113): n is a, c, g, or t
  misc_feature (135)..(135): n is a, c, g, or t
  misc_feature (147)..(149): n is a, c, g, or t
  misc_feature (161)..(161): n is a, c, g, or t
  misc_feature (173)..(173): n is a, c, g, or t
  misc_feature (176)..(176): n is a, c, g, or t
  misc_feature (179)..(179): n is a, c, g, or t
  misc_feature (471)..(589): n is a, c, g, or t
ccancgngagcctggnctccntntcgcaaccgnngtctcnccaaccctngactctcgttttggccacagaaagacntcgggngantggagaggggggtctaggccgggccttntgggtgctgatgctgcattttntccccgacacannnctattcccttgntggacatccccnacngtncaagtgcttccccaagggcaggtgaggggtgaacatctcagggcctacctggctgtgcacgctgcagccacactgtggaagctgcccctccccgaggacccgcctcccttgctgatgccaggatctcggcgcatagaccactctaccccagcggtcgtcacagaaaggtctctctgttcctcacactcagctttcagcataagctgtgaggccagaaaaaaggtcagctcttctagtatcgtgcagtgcttaaaaaccgggagctccagccgggcgcagtggttcatgccannnnnnnnnnnnnnnnnnnnnnnnnnnnnnnnnnnnnnnnnnnnnnnnnnnnnnnnnnnnnnnnnnnnnnnnnnnnnnnnnnnnnnnnnnnnnnnnnnnnnnnnnnnnnnnnnnnnnnnactgggagattttctgcagaaattgagttccagcctctctcgaacctgggaagacctggcaggagggggctgggctctcggctacagacttctccccaccccgtaggagctgaacgccaaccatcctgacccgccagtgctcttggtctcctgagtgtacccaggtcctcccaggtgcggtgtgcaccgaacgcgcctggcctgatgccctggcctgtgagctggggacttcctgggccctgtgagcccctaggcggcaggcccaggaatggctgggtaggacagggaacacctttgccccacgtctggctgtgacctcggtgaaagccgacaggagagagatgggaccctcctcctcagtagtggctgccagtccctcgttgcaggacagggtcatcataaccataaataacccttcacgtgtc

SEQ ID NO: 258272 - DNA, 980 bp, Homo Sapiens
  misc_feature (180)..(224): n is a, c, g, or t
  misc_feature (865)..(873): n is a, c, g, or t
agcgaggcctgggtggcgaattcggcacgagggtcagcccgcgctccgcccgccgcgatccgagctcggaggttcggactccgggctcgccgccccccgggccggctccgcgccccgcactcccggcgcccagcgccccgcgccccggcgggcggagcgcaccatgccgcagctggactnnnnnnnnnnnnnnnnnnnnnnnnnnnnnnnnnnnnnnnnnnnnnacgagctgctggccttccaggatgaaggcgaggagcaggacgacaagagccgcgacagcgccgccggtcccgagcgcgacctggccgagctcaagtcgtcgctcgtgaacgagtccgagggcgcggccggcggcgcagggatcccgggggtcccgggggccggcgccggggcccgcggcgaggccgaggctctcgggcgggaacacgctgcgcagagactcttcccggacaaacttccagagcccctggaggacggcctgaaggccccggagtgcaccagcggcatgtacaaagagaccgtctactccgccttcaatctgctcatgcattacccacccccctcgggagcagggcagcacccccagccgcagcccccgctgcacaaggccaatcaacccccccacggtgtcccccaactctctctctacgaacatttcaacagcccacatcccacccctgcacctgcggacatcagccagaagcaagttcacaggcctcctgcaaaccccggacctccctgggcttctactccctgacctcagggagaatgggggcagctcccccacactgggaggctgggtcacccaccccatccctgaagctaaggttccggtggaactgggccaccccacaagccaatnnnnnnnnngggcctttgtggcccccctcccgggaaccaagaaacttgcagccccttcaaccgcaaacctggaaaaacccaaggcgaaagtccaaggccaaagaaaaggagcccca

SEQ ID NO: 258273 - DNA, 994 bp, Homo Sapiens
  misc_feature (97)..(156): n is a, c, g, or t
  misc_feature (182)..(207): n is a, c, g, or t
  misc_feature (905)..(913): n is a, c, g, or t
aagcgaggcctgggtggcgaattcggcacgagggtcagcccgcgctccgcccgccgcgatccgagctcggaggttcggactccgggctcgccgcccnnnnnnnnnnnnnnnnnnnnnnnnnnnnnnnnnnnnnnnnnnnnnnnnnnnnnnnnnnnnagcgcaccatgccgcagctggactcnnnnnnnnnnnnnnnnnnnnnnnnnnacgacctccgcgcgccggacgagctgctggccttccaggatgaaggcgaggagcaggacgacaagagccgcgacagcgccgccggtcccgagcgcgacctggccgagctcaagtcgtcgctcgtgaacgagtccgagggcgcggccggcggcgcagggatcccgggggtcccgggggccggcgccggggcccgcggcgaggccgaggctctcgggcgggaacacgctgcgcagagactcttcccggacaaacttccagagcccctggaggacggcctgaaggccccggagtgcaccagcggcatgtacaaagagaccgtctactccgccgtcaatctgctcatgcattacccacccccctcgggagcagggcagcacccccagccgcagcccccgctgcacaaggccaatcagcccccccacggtgtcccccaactctctctctacgaacatttcaacagcccacatcccaccccctgcacctgcgggacatcagccagaagcaagtttcacagggccgctgcagaaccctggacctctctggcctcctactccccggacctccaggcaccatggggggcagctccccccaccctggggagctggcttacaccaccccattcttggaatgccaaggtttctgggggaaccccgggctactccggaaagccgcttccccaaaccggggcaaatggtggnnnnnnnnnagggcaaaacgggatccttttcttggcgttccacccggaaacttgaagaaaattggccaaaagttcccggggagcaaacaa

SEQ ID NO: 258274 - DNA, 1476 bp, Homo Sapiens
  misc_feature (844)..(844): n is a, c, g, or t
  misc_feature (1094)..(1094): n is a, c, g, or t
  misc_feature (1098)..(1098): n is a, c, g, or t
  misc_feature (1132)..(1168): n is a, c, g, or t
  misc_feature (1174)..(1174): n is a, c, g, or t
  misc_feature (1367)..(1367): n is a, c, g, or t
attattataaatgtttactgcataacagtacaaaattgaggttcccaaaaagagggtaaaaaaatctttaactgacattaaacatcttaagtaatttggaaaaatcccaaggttgaaatgtaactatcagggaacaacgaaaaatgctttcatgcatgtacacatgttaagtaacaaataagcaaaccccaagtcaatacagtacatcaatgacacttaaataacattatgaatataaaaagaaaggataaaatgttgactgctattgatgaaaaagcatttcaacaatatacacaaaatgatactaaacagctttttaaaaaagatgtcctaagaagatcaagccacaataagttagtgttttccataatacatgctaaattatttgatcccatatctatactgttactgtcttaattcctaaatgttgtgacagcatatttaattactgaggtacattagtttacatctttttataggtattctaagaggattaacttttcgtttccagtttttcatcttcttcacctcctccaaagaaaattaaaggaaacattcctagaatgcagccaatagtcaccccaacagctttgcccaaatgtgtactaagacgtgtttgccacatgtcaacttgctttggtgtgagatcaggaattgacaggcctaacctggaagccaatgcttcaacgtagcctgcaagtccgagtccagctagatctgacacaagatttcccaaagcagcagctgccatagttgaaattcccaaaataattccaatagacatttcaatatgggttccagcaacaatcataattgcattatccaaaaagccaaaccctatganaggtatcgcattgtggatgaatacatatctcagctgtcctggggtgggtggtggagcttccaatttttcttgggcaatggcaataaactcgaagagatagcagctctttgagcaggcagctcctctccgtggagtgcaggctgtagatgaagtcgcgcgcgccctgcgccgtgttcagcgcctccatgggctccttcttggggtgcgtgcccagccgcctggggccgcccggcaagccgccggggaggcncgancgccagcagcccccgcccgcagcagcaccaggannnnnnnnnnnnnnnnnnnnnnnnnnnnnnnnnnnnnctcagntgcgcgcggtccggctcctcagcagcggcagcagccgggacatggcgagctgaggagctgggacccccgcggccgtccgggaaggcggtttctggcgcggctgaggcgagaaggagctgggctcagctcgaccccgccccgaggtcctcctgccaggcagccgaggcgccgggcaccatgcactccgcgggcnccgcggcggctctcgcctcctgttccgtccccacttcctttccaaaaggcccgcggcggctcccgcccctccgatgggaaaaactttctctgagacggccgggcccgga

SEQ ID NO: 258275 - DNA, 1765 bp, Homo Sapiens
  misc_feature (1609)..(1609): n is a, c, g, or t
  misc_feature (1633)..(1633): n is a, c, g, or t
  misc_feature (1653)..(1653): n is a, c, g, or t
  misc_feature (1690)..(1690): n is a, c, g, or t
  misc_feature (1703)..(1703): n is a, c, g, or t
  misc_feature (1716)..(1716): n is a, c, g, or t
  misc_feature (1735)..(1735): n is a, c, g, or t
aaggaagcgaggcctgggtggcgaattcggcacgagggcggcatggcgatggcggagggcgagaggactgagtgtgctgagcccccccgggacgaacccccggctgatggagctctgaagcgggcagaggagctcaagactcaggccaatgactacttcaaagccaaggactacgagaacgccatcaagttctacagccaggccatcgagctgaaccccagcaatgccatctactatggcaaccgcagcctggcctacctgcgcactgagtgctatggctacgcgctgggagacgccacgcgggccattgagctggacaagaagtacatcaagggttattaccgccgggctgccagcaacatggcactgggcaagttccgggccgcgctgcgagactacgagacggtggtcaaggtgaagccccatgacaaggatgccaaaatgaaataccaggagtgcaacaagatcgtgaagcagaaggcctttgagcgggccatcgcgggcgacgagcacaagcgctccgtggtggactcgctggacatcgagagcatgaccattgaggatgagtacagcggacccaagcttgaagacggcaaagtgacaatcagtttcatgaaggagctcatgcagtggtacaaggaccagaagaaactgcaccggaaatgtgcctaccagattctggtacaggtcaaagaggtcctctccaagctgagcacgctcgtggaaaccacactcaaagagacagagaagattacagtatgtggggacacccatggccagttctatgacctcctcaacatattcgagctcaacggtttaccctcggagaccaacccctatatatttaatggtgactttgtggaccgaggctccttctctgtagaagtgatcctcacccttttcggcttcaagctcctgtacccagatcactttcacctccttcgaggcaaccacgagacagacaacatgaaccagatctacggtttcgagggtgaggtgaaggccaagtacacagcccagatgtacgagctctttagcgaggtgttcgagtggctcccgttggcccagtgcatcaacggcaaagtgctgatcatgcacggaggcctgttcagtgaagacggtgtcaccctggatgacatccggaaaattgagcggaatcgacaacccccagattcagggcccatgtgtgacctgctctggtcagatccacagccacagaacgggcgctcgatcagcaagcggggcgtgagctgtcagtttgggcctgacgtcaccaaggccttcttggaagagaacaacctggactatatcatccgcagccacgaagtcaaggccgagggctacgaggtggctcacggaggccgctgtgtcaccgtcttctctgcccccaactactgcgaccagatggggaacaaagcctcctacatccacctccagggctctgacctacggcctcagttccaccagttcacagcagtgcctcatcccaacgtcaagcccatggccttatgccaacacgctgctgcagctagggaatgatgtgaggtgacgggcggggcggccttgcattccaaggggcccctccaattccaaccgggacccagggccntgggttagggggcaagagcagggncccggccccaggggaaattnttttgggacccctttttatttttgttaaaattttgtnatttaatttcccntttaaggtttttncagaagggggtaagggggnaagagttaaggggtttggccagagggtttt

SEQ ID NO: 258276 - DNA, 937 bp, Homo Sapiens
gtgcgcgtgcgcagggataagagagcggtctggacagcgcgtggccggcgccgctgtggggacagcatgagcggcggttggatggcgcaggttggagcgtggcgaacaggggctctgggcctggcgctgctgctgctgctcggcctcggactaggcctggaggccgccgcgagcccgctttccaccccgacctctgcccaggccgcaggccccagctcaggctcgtgcccacccaccaagttccagtgccgcaccagtggcttatgcgtgcccctcacctggcgctgcgacagggacttggactgcagcgatggcagcgatgaggaggagtgcaggattgagccatgtacccagaaagggcaatgcccaccgccccctggcctcccctgcccctgcaccggcgtcagtgactgctctgggggaactgacaagaaactgcgcaactgcagccgcctggcctgcctagcaggcgagctccgttgcacgctgagcgatgactgcattccactcacgtggcgctgcgacggccacccagactgtcccgactccagcgacgagctcggctgtggaaccaatgagatcctcccggaaggggatgccacaaccatggggccccctgtgaccctggagagtgtcacctctctcaggaatgccacaaccatggggccccctgtgaccctggagagtgtcccctctgtcgggaatgccacatcctcctctgccggaaaccagtctggaagcccaactgcctatgggggttatggcagcctgctgcggaggctcagtgcaagcctggtcaccgccacccttcctccttttggtcctggcctccgagcccaggaaacgcctcccgcccacctgggggttactggtggggccatgaaggaatccccgtgctggcggtcaaaaacagaaagaccttccctggccctgaagc

SEQ ID NO: 258277 - DNA, 1077 bp, Homo Sapiens
ctggaccggtccggaatttccgggatcgcaggttggagcgtggcgaacaggggctctgggcctggcgctgctgctgctgctcggcctcggactaggcctggaggccgccgcgagcccgctttccaccccgacctctgcccaggccgcaggccccagctcaggctcgtgcccacccaccaagttccagtgccgcaccagtggcttatgcgtgcccctcacctggcgctgcgacagggacttggactgcagcgatggcagcgatgaggaggagtgcaccgcctggcctgcctagcaggcgagctccgttgcacgctgagcgatgactgcattccactcacgtggcgctgcgacggccacccagactgtcccgactccagcgacgagctcggctgtggaaccaatgagatcctcccggaaggggatgccacaaccatggggccccctgtgaccctggagagtgtcacctctctcaggaatgccacaaccatggggccccctgtgaccctggagagtgtcccctctgtcgggaatgccacatcctcctctgccggagaccagtctggaagcccaactgcctatggggttattgcagctgctgcggtgctcagtgcaagcctggtcaccgccaccctcctccttttgtcctggctccgagcccaggagcgcctccgcccactggggttactggtggccatgaaggagtccctgctgctgtcagaacagaagacctcgctgccctgaggacaagcacttgccaccaccgtcactcagccctgggcgtagccggacaggaggagagcagtgatgcggatgggtacccgggcacaccagccctcagagacctgagctcttctggccacgtggaacctcgaacccgagctcctgcagaagtggccctggagattgagggtccctggacactccctatggagatccggggagctaggatggggaacctgccacagccagaactgaggggctggccccaggcagctcccagggggtagaacggccctgtgcttaagacactcctgctgccccgtctgagggtggcgattaaagttgcttcacatcctc

SEQ ID NO: 258278 - DNA, 924 bp, Homo Sapiens
aggctggaccggtccggattcccgggatgagcggtctggacagcgcgtggccggcgccgctgtggggacagcatgagcggcggttggatggcgcaggttggagcgtggcgaacaggggctctgggcctggcgctgctgctgctgctcggcctcggactaggcctggaggccgccgcgagcccgctttccaccccgacctctgcccaggccgcaggccccagctcaggctcgtgcccacccaccaagttccagtgccgcaccagtggcttatgcgtgcccctcacctggcgctgcgacagggacttggactgcagcgatggcagcgatgaggaggagtgcaggattgagccatgtacccagaaagggcaatgcccaccgccccctggcctcccctgcccctgcaccggcgtcagtgactgctctgggggaactgacaagaaactgcgcaactgcagccgcctggcctgcctagcaggcgagctccgttgcacgctgagcgatgactgcattccactcacgtggcgctgcgacggccacccagactgtcccgactccagcgacgagctcggctgtggaaccaatgagatcctcccggaaggggatgccacaaccatggggccccctgtgaccctggagagtgtcacctctctcaggaatgccacaaccatggggccccctgtgaccctggagagtgtcccctctgtcgggaatgccacatcctcctctgccggagaccagtctggaagcccaactgcctatggggttattgcagctgctgcggtgctcagtgcaagcctggtcaccgccacccctcctccttttgtcctggctccgaagcccaggagcgcctccggcccactggggggttactgggggggccatggaaagggatcccctgcctggctgttcacaaaacagaaagaa

SEQ ID NO: 258279 - DNA, 990 bp, Homo Sapiens
  misc_feature (130)..(150): n is a, c, g, or t
tgtatcaaggcgttttctcttcttcgcactttttctttcgagaagactggttctgtagacacgcccccctttttgtgtgtttcccctcttcgagccctctgcggcaccccggaaccacactgttggggtnnnnnnnnnnnnnnnnnnnnngctgcgtgtggtgacccacagtgggcacctgggcccacccaggcctcggagggacacctttgccccagcaggtctggtccaggttacaggcttctgagccagagtacacacttacgtagttctgtggatcagcccccctctgcctttcagagtccttctaccaccaggttccctggaggtttgtacatcctcaaaaattgctcctatttcaaaagataattccgagctgtgttctgctttcacacggatacacggctcgagccttccgactgcggatgctttcaggtggcttgtccgctacagtagcaggaggagaaaaggggaaaggggacgacccgggtgaaagaggtgtcacagctgagttggagcttgttgtggttggagactgtgggttaagccactggaccatagacgatcgggtctggcctgggatagtggatgcccagtctccaaagctccctccatctgccagaaggtggtttttgtctggtccaggaggcccagggacagctgtagtcacgggagacggggaggaaagtgagtccagactgctggtaggggtgtcctccttggaagggtaaggattgtcaccatcttccagctccagacaaagattgtagacggccacgggcctcttggttctctggccttgtctcttcgactgccttggtggcgcatttgggggtgatgctgacaggcaggtgggctcagggaatgtagtatcgggcggcgtccgaaaaatcttttcatggttttcaattaagatttccacaacaatattctgaaacttcaagtcccgacgcgtgggtcgacgatatcccgacattccggaccgatacc

SEQ ID NO: 258280 - DNA, 1228 bp, Homo Sapiens
  misc_feature (89)..(89): n is a, c, g, or t
  misc_feature (145)..(145): n is a, c, g, or t
  misc_feature (531)..(531): n is a, c, g, or t
  misc_feature (560)..(560): n is a, c, g, or t
  misc_feature (609)..(609): n is a, c, g, or t
  misc_feature (630)..(630): n is a, c, g, or t
  misc_feature (645)..(645): n is a, c, g, or t
  misc_feature (675)..(675): n is a, c, g, or t
  misc_feature (700)..(700): n is a, c, g, or t
  misc_feature (729)..(729): n is a, c, g, or t
  misc_feature (767)..(767): n is a, c, g, or t
  misc_feature (998)..(998): n is a, c, g, or t
  misc_feature (1005)..(1005): n is a, c, g, or t
  misc_feature (1131)..(1132): n is a, c, g, or t
  misc_feature (1141)..(1143): n is a, c, g, or t
  misc_feature (1151)..(1151): n is a, c, g, or t
  misc_feature (1160)..(1160): n is a, c, g, or t
  misc_feature (1179)..(1181): n is a, c, g, or t
tggaagagtgtgcctccaccctggccaccacctacagcagtggggccttttatgagcgaaaaatcgtcaccacggatctgcgtcagctngtaccgatggccacactgggacctcagtctctgcccccatggtggcgggcatcatngccttggctctagaagcaaacagccagttaacctggagggacgtccagcacctgctagtgaagacatcccggccggcccacctgaaagcgagcgactggaaagtgaacggcgcgggtcataaagttagccatttctatggatttggtttggtggacgcagtaagctctcgttgtggaggcaaagaagtggacagcagtgccatcggcagcacatgtgtgtggccgcctcggacaagagacccaggagcatccccttagtgcaggtgctgcggactacggccctgaccagcgcctgcgcggagcactcggaccagcgggtggtctacttggagcacgtggtggttcgcacctccatctcacacccacgccgaggagacctccagatntacctggtttctccctcgggaaccaagtntcaacttctggcaaagaggttgctggatctttccaatgaagggtttacnaactgggaattcatgactgtncactgctggggaganaaggctgaagggcagtggaccttggaaatncaagatctgccatcccaggtccgcnacccggagaagcaagggaagttgaaagantggagcctcatactgtatggcacagcagagcacccgtnccacaccttcagtgcccatcagtcccgctcgcggatgctggagctctcagccccagagctggagccacccaaggctgccctgtcaccctcccaggtggaagttcctgaagatgaggaagattacacagctcaatccaccccaggctctgctaatattttacagaccagtgtgtgccatccggagtgtggtgacaaaggctgtgatggccccaatgcagaccagtgcttganctgcgtncacttcagcctgggggagtgtcaagaccagcaggaagtgcgtgagtgtgtgccccttgggctactttggggacacagcagcaagacgctgtcgccggtgccacaaggggtgtgagactgctccagnnagctgcgannntgcctgtnttgccgcgngggttctatcacaccaggnnngaacaactgtgtgacctctgtctgcaggttttatgctgatgaaataa

SEQ ID NO: 258281 - DNA, 1180 bp, Homo Sapiens
  misc_feature (13)..(13): n is a, c, g, or t
  misc_feature (67)..(67): n is a, c, g, or t
  misc_feature (89)..(89): n is a, c, g, or t
  misc_feature (401)..(401): n is a, c, g, or t
  misc_feature (461)..(461): n is a, c, g, or t
  misc_feature (549)..(549): n is a, c, g, or t
  misc_feature (602)..(602): n is a, c, g, or t
  misc_feature (1036)..(1036): n is a, c, g, or t
  misc_feature (1165)..(1165): n is a, c, g, or t
gaaatgtgggtantggcgggtccgttcctcgggtccagcaggggagatcccccggcccagtccccgnagaggctccctctggggtaagncagacttccaaagtcccctggagttaaacttgaacagtctgaacactttaatctttacttcaagggagtatcccaagtataaacatatcaatctgctcctagtcccacatgtgtcgccctacagaattcaggtgattcatcatgaagctcaaaggatcagaggatgtctccctggaaaacaggagtctaaaaagactgggaatgacctttttagtcttcatttgttcataaacttcagtgacttgatacagcatgatgaactttaaagcttcataaagtttatattccagaatggcatctgaaaaaagggtntggacatacttcctctcttgtgataatctctaatgccattaaattcagtccactgtgttntcaataattccacatatttccgtagttttccaaacacattcgagcctgtatacttctcaggaccaaaactgtactgctgaatccaatnacaaccttgtgaaaacagcagtttttcaggaagcttaacaatgtccttttctntcatccatgatggaaaagagatgccctggctgaatatctgaaataacactgatctgagagcatcatagttatctctccttacttgtcgaacacatttaatgtgatgccgccaaaatagctcctcataagccttcctcatcagcttgttacggggtgtctctcctttccattctcttgcacaataactgagtaaatcaacctctgcctccacactgaggttccttttgaattttctctgcagatatccaatccaccatttcagcttgtgccctgaatataaatgtagcctccggaagtagcagatggcagccaccagaaatgaaactgccaacatcacaaagccttttgccattctccagacagtgtctaaggcttggcttgtagctagcatccaggagtgaacttggtcacttcctgcggcgggagcgccagancgctcccgctcccttgcccgcgtggggctccttgtcgccgccatgccggcgcgctgcggacgggcgctgggcctcggcccgtggtctgcagtggtctgtcagacgcgacggccgcccgccggcgcccgngctcgcttccctgag

SEQ ID NO: 258282 - DNA, 1522 bp, Homo Sapiens
  misc_feature (1235)..(1244): n is a, c, g, or t
ctggcaggtgtggattccgccggtgaaggctgaaggcagctaccttaaagatgccgggatccgcagcgaagggctcggagttgttcagagaggatcgagagcttcgtggagaccctgaagtcgtgggtggtgggccgcgcagctcctgaggaaatggctcgggagaccctagggttgctgcgccagatcatcacggaccaccgctggagcaacgcgggggagctgatggagctgatccgcagagagggcaggaggatgacggccgctcagccctccgagacctaccgtgggctaacatgtgtgtctgtgagtagttgctctaagattatccgggaggagtatggcagactccatggacgcagcgacgagagtgatcagcaggagtccctgcacaaactgttgacatccggaggcctaaacgaggatttcagcttccattatgcccaactccagtccaacatcattgaggcgattaatgagctgctagtggagctggaagggacaatggagaacattgcagcccatgtgctctggagcacattcactccaatgaggtgatcatgaccattggcttctcccgaacagtagaggccttcctcaaagaggctgcccgaaagaggaaattccatgtcattgtagcagagtgtgctcctttctgccagggtcatgaaatggctgtgaatttgtccaaagcaggtattgagacaactgtcatgactgatgctgccatttttgccgttatgtcaagagtcaacaaggtgatcattggcacgaagaccatcctggccaatggggccctgagagctgtgacaggaactcacactctggcactggcagcaaaacaccattccaccccactcatcgtctgtgcacctatgttcaaactttctccacagttccccaatgaagaagactcatttcataagtttgtggctcctgaagaagtcctgccattcacagaaggggacattctggagaaggtcagcgtgcattgccctgtgtttgactacgttcccccagagctcattaccctctttatctccaacattggtgggaatgcaccttcctacatctaccgcctgatgagtgaactctaccatcctgatgatcatgttttatgaccgaccacacgtgtcctaagcagattgcttaggcagatacagaatgaagaggagacttgagtgttgctgctgaagcacatccttgcaatgtgggagtgcacaggagtccacctnnnnnnnnnntccttgatactgttgcctgcctttttagtcaccccgtaacaagggcacacatccaggactgtgtcttgcctttcagatcttaacagagcagcagggcttaacttgttgattttggagcctcttagtgacctggttgcgtctgtgtcaggaacttaaactttctggttcagtagtgtgttaaacataacactgaataccttactgggatacagatttttgctcagaaatggctatgacactttttctaggctctaccaataaaagccacttgaaggttc

SEQ ID NO: 258283 - DNA, 1288 bp, Homo Sapiens
tgggtggcgaattcgggcacgaggctgagctctgccgcctggctctagccgcctgcctggcccccgccgggactcttgcccaccctcagccatggctccgatatctctgtcgtggctgctccgcttggccaccttctgccatctgactgtcctgctggctggacagcaccacggtgtgacgaaatgcaacatcacgtgcagcaagatgacatcaaagatacctgtagctttgctcatccactatcaacagaaccaggcatcatgcggcaaacgcgcaatcatcttggagacgagacagcacaggctgttctgtgccgacccgaaggagcaatgggtcaaggacgcgatgcagcatctggaccgccaggctgctgccctaactcgaaatggcggcaccttcgagaagcagatcggcgaggtgaagcccaggaccacccctgccgccgggggaatggacgagtctgtggtcctggagcccgaagccacaggcgaaagcagtagcctggagccgactccttcttcccaggaagcacagagggccctggggacctccccagagctgccgacgggcgtgactggttcctcagggaccaggctccccccgacgccaaaggctcaggatggaaggcctgtgggcacggagcttttccgagtgcctcccgtctccactggcgccacgtggcagaggtctgctccccaccaacctgggcccagcctctgggctgaggcaaaagacctatgaggcaccgtccacccagaaaccctccaacccaggcctccaatgcgtcctccccagccccagaggagaatgctccgtctgaaggccagcgtgtgtggggtcagggacagagccccaggccagagaactctctggagcgggaggagatgggtcccgtgccagcgcacacggatgccttccaggactgggggcctggcagcatggcccacgtctctgtggtccctgtctcctcagaagggacccccagcagggagccagtggcttcaggcagctggacccctaaggctgaggaacccatccatgccaccatggacccccagaggctgggcgtccttatcactcctgtccctgacgcccaggctgccacccggaggcaggcggtggggctgctggccttccttggcctcctcttctgcctgggggtggccatgttcacctaccagagcctccagggctgccctcgaaagatggcaggagagatggcggagggccttcgctacatcccccggagctgtggtagtaattcatatgtcctggtgcccgtgtgaa

SEQ ID NO: 258284 - DNA, 906 bp, Homo Sapiens
  misc_feature (166)..(166): n is a, c, g, or t
  misc_feature (212)..(212): n is a, c, g, or t
  misc_feature (859)..(859): n is a, c, g, or t
ctctggccgtgaaaacggggggttcatgcccaggcacaaaacccccctcatttaaaatgcgttgaagatctcaagcactcgctctgaactcagcaggatctctttctctgaagagtctcatttaacgtgcttccatcccgcatacagctctaggccagaacgcggnatctggggctggtaccgcccacagcacccatggccttttcttggtncagatcctcgtcaccctcaggttgttccacacgaactttgttgtccatctcctctccaccctcgcatatgtttttgcccctgcaaaggtcgtagacatgtgtgagccgcttcttgggctgtcccttggacttagccaggatatccttgatctttgggttgttagagtccacaagcagtttggagcagaagaagcagacacagcgcaaaactttcattgtcttcaccaggaagcccacgtgaaacacaggcttggccagttcaatgtggccaaagtggccaggacactctgtcatgtttcctgcacatgtttggcagcggccagtccgctcaatcaccccctgcctcgggtccatcagccccccaagcttggggcggcctccctcagtcgtctctgggtatttgatgccaccctccgtcacagacattcgcttcagttcatccggactcaggactccgaactggactctcttgatggtgcgcagcgggcatgcgctgtcccccgagggggggccacccccgtgcatggcggaggcaggcgcgctgcgcaggcgcaaacctcactacaaaaagcctgcgccgcctccgcctaggtgctcagacctcgtcagggcggccaccgggaaggacctccccgggttgggagganaaaagccggaggaggggtaaggtgggggcagggtaaggcaggccggg

SEQ ID NO: 258285 - DNA, 1539 bp, Homo Sapiens
  misc_feature (54)..(54): n is a, c, g, or t
  misc_feature (1524)..(1524): n is a, c, g, or t
agagggggctccggggtcggaccatccgctctccctgcgctctccgcaccgcgncttaaatgatgtattttgtgatcgcagcgataaaagctcaatattgaaattattccatgcaagatctgtggagacaaatcatcaggaatccattatggtgtcattacatgtgaaggctgcaagggctttttcaggagaagtcagcaaagcaatgccacctactcctgtcctcgtcagaagaactgtttgattgatcgaaccagtagaaaccgctgccaacactgtcgattacagaaatgccttgccgtagggatgtctcgagatgctgtaaaatttggccgaatgtcaaaaaagcagagagacagcttgtatgcagaagtacagaaacaccggatgcagcagcagcagcgcgaccaccagcagcagcctggagaggctgagccgctgacgcccacctacaacatctcggccaacgggctgacggaacttcacgacgacctcagtaactacattgacgggcacacccctgaggggagtaaggcagactccgccgtcagcagcttctacctggacatacagccttccccagaccagtcaggtcttgatatcaatggaatcaaaccagaaccaatatgtgactacacaccagcatcaggcttctttccctactgttcgttcaccaacggcgagacttccccaactgtgtccatggcagaattagaacaccttgcacagaatatatctaaatcgcatctggaaacctgccaatacttgagagaagagctccagcagataacgtggcagacctttttacaggaagaaattgagaactatcaaaacaagcagcgggaggtgatgtggcaattgtgtgccatcaaaattacagaagctatacagtatgtggtggagtttgccaaacgcattgatggatttatggaactgtgtcaaaatgatcaaattgtgcttctaaaagcaggttctctagaggtggtgtttatcagaatgtgccgtgcctttgactctcagaacaacaccgtgtactttgatgggaagtatgccagccccgacgtcttcaaatccttaggttgtgaagactttattagctttgtgtttgaatttggaaagagtttatgttctatgcacctgactgaagatgaaattgcattattttctgcatttgtactgatgtcagcagatcgctcatggctgcaagaaaaggtaaaaattgaaaaactgcaacagaaaattcagctagctcttcaacacgtcctacagaagaatcaccgagaagatggaatactaacaaagttaatatgcaaggtgtctacattaagagccttatgtggacgacatacagaaaagctaatggcatttaaagcaatatacccagacattgtgcgacttcattttcctccattatacaaggagttgttcacttcagaatttgagccagcaatgcaaattgatgggtaaatgttatcacctaagcacttctagaatgtctgaagtacaaacatgaaaaacaaacanaaaaattaaccgaga

SEQ ID NO: 258286 - DNA, 550 bp, Homo Sapiens
tgacgggcaacaccctgaggggagtaaggcagactccgccgtcagcagcttctacctggacatacagccttccccagaccagtcaggtcttgatatcaatggaatcaaaccagaaccaatatgtgactacacaccagcaacaggcttctttccctactgctcgtacaccaatggcgagaacttccccaactgtgtacagggcagaattaggcaatggcatgcatgcttctcctgggatgctctattcatgccctttgaagtaaaaggggtatgtctgactttcctctaatgagttctgctaaatgatgcaattcacctttaccatttgggccacttaattttctgccctgcccccttgcttttgaccctctgctgtttcccatggtttatccaatacatgcattgacctctcagcattagaaatggggcaaaaccaacggaagcagtctttgaattctgcagaaaactgtaagttcaggaaatggctacattaacttcattagtggtttactttagttatattccaaggattgctttatacctaaggtga

SEQ ID NO: 258287 - DNA, 2733 bp, Homo Sapiens
  misc_feature (838)..(838): n is a, c, g, or t
  misc_feature (874)..(874): n is a, c, g, or t
  misc_feature (1193)..(1211): n is a, c, g, or t
gctgacaggagagagaacaggcactgcgggacctgcaggagaaaggcgatcctgtggctgggaatgtgaccccacggccagaagaggacccggtatcctcaggtccgagcccctggacagcagccccaggcccagctggccatggccctgtgcctgaagcaggtgttcgccaaggacaagacgttccggccgcggaagcgctttgagccgggcacacagcgctttgagctgtacaagaaggcacaggcctctctcaagtcgggcctggacctgcgcagtgtggtgaggctaccacccggggagaacatcgacgactggatcgccgtgcacgtggtggacttcttcaaccgcatcaacctcatctacggcactatggcggagcgctgcagtgagaccagctgcccggtcatggccggcgggccccgctacgagtaccgctggcaggacgagcgccagtaccggcggcccgccaagctctctgcgccgcgctatatggcgttgctcatggactggatcgaaggcctcatcaacgacgaagaggtctttcccacgcgtgttggagttcccttccctaagaacttccagcaggtctgcaccaagatcctgacccgcctcttccgagtctttgtccatgtctacatccaccacttcgatagcatcctcagcatgggggcagaggcgcacgtcaacacctgctacaagcacttctactacttcatccgcgagttcagtctggtggaccagcgggagctgaagccactgagggagatgacagagcggatctgccactgagcccaggtctggacttttttggccatcagatggacgatctgaacanagggtggctggcagaggggaccccaggagcctgaangaatctgaaggcactggaatcactccacacacccaaagcctctggacttctggttctcaggagtctgcctacctgtcggcctgaccgcttgtggatggagaaggggagagcatctaggcaggcaaacagaagggaagtggagttaaacctctggcatgaagtctgggagtagggtaggctagggggtttcttctatgacacttgacccttccatgctggttcccaagcctattgaaggaatgtgggtgtggccgaggtgatggcaagaaaggtgcaagaaagtgagcagtctgcctgtgagtgagcacaaataccgggnnnnnnnnnnnnnnnnnnnattttcactgtggggtgtgtctgtgagagctagctgccttacccctccttggcacatagtaggccttccataaatgtcggatggatggataaatagattgggaccatcagaccatgggaccatcagaccatgtccactgtaggagtgatgacagctcagcgtccccactcagtgtatctgaccatgtgtgtaagtgcacaaaaatgtggttgtagatgttgctctacattcaaaccttccaggctacactcttccatcagcatgagtcctggagagctgggggaaggtaggaagaggagccttgccttgagttcctaaaccgacccactgcagacacaggctctgattctcttacccagagatgcccatgagctgacattttactcatccctctgcctccaagaaggcctgtattatacgtgtcctcctgggggttggagatgatccctcaagtacacaaaggtcccctggcccttcatctgggaatcatatactccactctagctcccagaatctacagacctggctcctcggatctgaagcccagcacaaaataatctccccgtccaaggagcttgtggaacttgaattgggaactttggagtcttgtctcccatcccagcacattgaggatgtagttggtgaatggactcttccaggcatggagatcctccatcctaaaagtacctgcctccttcccagccatccctgacacattccagccagttggatctcacagcacagctatccacagggagactgggatgttcacgcagcacttccattactcagtacctccatacccagccctatacgcagacccacaggtggggaaactgaggcaggaacagggttctgccctcccagagcctccactctggggatgccagaatggaaagccagagggaacctggagaatcatccagtcttactgtctcaatgtacatacggggaaactgaagccaggagaagaagagggagaaactgtccagggcctcacagggaggcattcatggagctggagaaaccagggatcctgaccgcagggcccatcaattgctacatagagatacacatggaaagagggtttaacagaccctctctaggacacaactgtttctgctttgagcaataatttctaacctgaggccaacatgtcccactgccccttgggttggctggggttgtttcctgagccaagcatccaatatcatgccccactcaatggcctagaagctgcctgtactttggggaaacagatggagctcttgggcccagccagctgggcctgggacttctgcctctgccgcctccagagtggcctggcagctttgccagaggctgtggagcgagggtagtaggagcttttcccagagtgctgtgacttgcatgatggattctaggctgtggcaagggctgatttctgggatagggggagggttggaaaatttatttttatgaaacagagggaagactttattgttgttatttttggtaaaataaaaggcaaactaaagcaaaa

SEQ ID NO: 258288 - DNA, 1215 bp, Homo Sapiens
taaggcggcccctccacaagtcagttcctgtgatcatcccagtaacaggttgttcccctggcagccttgtatcatcctcaataaacagaaattatgtttgagtccataataaactccacagtccctgctccaacataatttacagctttagcagctctgactgcagcttctccagctttttttcttacttcagatttaataccaggcgctggggcctcttcaatgatcttctgatgtcgcctctgcacactacagtctctttcaaacaagtacacagcattgccatggtgatcaccaaacacctggacttctacatgcctcggtgtgtctacaaacttctcgatcagcatagcatcatcattgaaagacttcttagcttctctccgtgctgactctaactgttcttgaaattcttgttctgatctaacaatcctcattccttttcctcctccaccccggacggctttaatcatgacaggatagccaattctcctggcgtgttccttcaggcactggtctgattggtcctcaccatgataaccctccacaacaggtactccagcagcagccattatggatttggatgtgctctttatacccatgtctctaattgcagatggaggagggcctataaaaataattccttcttgcttacaaagttcagcaaattccatgttttctgaaagaaaaccgcatcctggatggatagcctgtgcagcagaggtcttggccacttgaatgattttctccatagataggtagctctgctgggagggagcggggccgatggaatatgcttcatctgccatatctacatgcatggaatttctgtcagcctcactataaaccgccacagtctgtacacccagtttttaggctgtgcgcatcacactgcaggcaatttctcctctgtttgcaatgaggaccttggtaatgtttcttcctgtggctgttgtgtacttcatggttctttgcctccacacccatgtcctcggcggcaggagcaggctcgggagacgatgccaccggttcctctccgccgccaccagcagcaccgacaccgcagaggccgccgccatgtccctggagcccggcactccgtgactccccagtacagaggcagctgcgtcccacacgccaaacccgttcctccactacgaagcctcgtgacccccgcgggccaccgtcggagcctgagcctacctttgggctgat

SEQ ID NO: 258289 - DNA, 2026 bp, Homo Sapiens
  misc_feature (1304)..(1304): n is a, c, g, or t
  misc_feature (1455)..(1456): n is a, c, g, or t
  misc_feature (1460)..(1460): n is a, c, g, or t
  misc_feature (1501)..(1501): n is a, c, g, or t
  misc_feature (1555)..(1555): n is a, c, g, or t
  misc_feature (1570)..(1570): n is a, c, g, or t
  misc_feature (1610)..(1667): n is a, c, g, or t
  misc_feature (1672)..(1672): n is a, c, g, or t
gtcctgtagacccagagaggctcagctgcactcgcccggctgggagagctgggtgtggggaacatggccgggcctccgaggctcctgctgctgcccctgcttctggcgctggctcgcggcctgcctggggccctggctgcccaagactgatggtgacagcccaggtcctccccagaggtgcaccagtctccccactgcacgactgtccccgtgggagcctccgtcaacatcacctgctccaccagcgggggcctgcgtgggatctacctgaggcagctcgggccacagccccaagacatcatttactacgaggatggggtggtgcccactacggacagacggttccggggccgcatcgacttctcagggtcccaggacaacctgactatcaccatgcaccgcctgcagctgtcggacactggcacctacacctgccaggccatcacggaggtcaatgtctacggctccggcaccctggtcctggtgacagaggaacagtcccaaggatggcatagatgctcggacgccccaccaagggcctctgccctccctgccccaccgacaggctccgccctccctgacccgcagacagcctctgccctccctgacccgccagcagcctctgccctccctgcggccctggcggtgatctccttcctcctcgggctgggcctgggggtggcgtgtgtgctggcgaggacacaggtcagtgtgagccccagctgccacctgcaccccaaagattgttccctctcctgagagcagcgtggggggcgccaaagccccagaggaaaaccctggtacccgccgcctcctctgcaggctctggaactctcagggtggaagtggcctcggcggggagggagggggaccagcaccaaagcgacctgagggggagggagcagcccaggcgctgggcccgcgtgtgcgcgtgtgcgcgtgtgcaggtgtgagtgtctgaggggggatctctgaggtctgtgcgtgcaggttggagtgtgcgggcagaggagggagcgcccaggcgctgggcccgcgtgtgcacgtgtgcaggtgtgagcctgtgtgtggggatctctgaggactgtgcgtgcatgttggagtgtgccggcgtgctgtgtggccgtgggaaggggagggggcctcagacagacacagagtctaggcgtggccactccccccggcccctgctgtttgtctggggctggagtgggggtcccgcttggcttgggcttggtgggggggtccaagccacttccactctccttcttcagaggcaccccagggtccgacccagccctgcntggggaaggctctgctgggaagccctggggctcaggagacctggggccagcccagaggagccccgtgggggtctcgtgttaaaattagaaagctgaccggagtggggtggggtccaggacaccacgctggccactggtgggagacggcggnnctgnctttcagaaaaagaaactgggctcggggtgggaaaagaaancggcggcaagagaggagaacgaggacatgtcgcacagccgctgcaacacgctgnccccccccaaccagnaccagtgacccagtgggcccctgcacgtcccgcctgtggnnnnnnnnnnnnnnnnnnnnnnnnnnnnnnnnnnnnnnnnnnnnnnnnnnnnnnnnnngctgncctcccacggctgcagcagagtttgaagggcccagccgtgcccagctccaagcagacacacaggcagtggccaggccccacggtgcttctcagtggacaatgatgcctcctccgggaagccttccctgcccagcccacgccgccaccgggaggaagcctaactgtcctttggctgcatctcccgaccatggccaaggagggcttttctgtgggatgggcctgggcacgcggccctctcctgttagtgccggcccacccaccagcaggcccccaacccccaggcagcccggcagaagacgggaggagaccagtcccccacccagccgtaccagaaataaaggcttctgttcttcc

SEQ ID NO: 258290 - DNA, 893 bp, Homo Sapiens
  misc_feature (5)..(5): n is a, c, g, or t
  misc_feature (15)..(15): n is a, c, g, or t
  misc_feature (28)..(28): n is a, c, g, or t
  misc_feature (31)..(31): n is a, c, g, or t
  misc_feature (40)..(40): n is a, c, g, or t
  misc_feature (42)..(42): n is a, c, g, or t
  misc_feature (45)..(45): n is a, c, g, or t
  misc_feature (48)..(49): n is a, c, g, or t
  misc_feature (57)..(58): n is a, c, g, or t
  misc_feature (67)..(68): n is a, c, g, or t
  misc_feature (70)..(71): n is a, c, g, or t
  misc_feature (77)..(77): n is a, c, g, or t
  misc_feature (91)..(91): n is a, c, g, or t
  misc_feature (95)..(97): n is a, c, g, or t
  misc_feature (101)..(101): n is a, c, g, or t
  misc_feature (103)..(103): n is a, c, g, or t
  misc_feature (106)..(106): n is a, c, g, or t
  misc_feature (109)..(109): n is a, c, g, or t
  misc_feature (116)..(116): n is a, c, g, or t
  misc_feature (130)..(130): n is a, c, g, or t
  misc_feature (132)..(133): n is a, c, g, or t
  misc_feature (136)..(136): n is a, c, g, or t
  misc_feature (138)..(138): n is a, c, g, or t
  misc_feature (142)..(142): n is a, c, g, or t
  misc_feature (144)..(144): n is a, c, g, or t
  misc_feature (150)..(151): n is a, c, g, or t
  misc_feature (153)..(153): n is a, c, g, or t
  misc_feature (155)..(156): n is a, c, g, or t
  misc_feature (160)..(160): n is a, c, g, or t
  misc_feature (162)..(163): n is a, c, g, or t
  misc_feature (168)..(168): n is a, c, g, or t
  misc_feature (171)..(173): n is a, c, g, or t
  misc_feature (176)..(176): n is a, c, g, or t
  misc_feature (180)..(180): n is a, c, g, or t
  misc_feature (186)..(187): n is a, c, g, or t
  misc_feature (193)..(193): n is a, c, g, or t
  misc_feature (199)..(199): n is a, c, g, or t
  misc_feature (206)..(206): n is a, c, g, or t
  misc_feature (208)..(209): n is a, c, g, or t
  misc_feature (214)..(214): n is a, c, g, or t
  misc_feature (216)..(216): n is a, c, g, or t
  misc_feature (223)..(224): n is a, c, g, or t
  misc_feature (229)..(229): n is a, c, g, or t
  misc_feature (234)..(235): n is a, c, g, or t
  misc_feature (239)..(242): n is a, c, g, or t
  misc_feature (245)..(245): n is a, c, g, or t
  misc_feature (251)..(251): n is a, c, g, or t
  misc_feature (253)..(253): n is a, c, g, or t
  misc_feature (259)..(259): n is a, c, g, or t
  misc_feature (261)..(261): n is a, c, g, or t
  misc_feature (264)..(264): n is a, c, g, or t
  misc_feature (266)..(266): n is a, c, g, or t
  misc_feature (269)..(269): n is a, c, g, or t
  misc_feature (281)..(282): n is a, c, g, or t
  misc_feature (284)..(285): n is a, c, g, or t
  misc_feature (288)..(288): n is a, c, g, or t
  misc_feature (292)..(292): n is a, c, g, or t
  misc_feature (302)..(302): n is a, c, g, or t
  misc_feature (304)..(305): n is a, c, g, or t
  misc_feature (307)..(308): n is a, c, g, or t
  misc_feature (311)..(311): n is a, c, g, or t
  misc_feature (317)..(318): n is a, c, g, or t
  misc_feature (320)..(320): n is a, c, g, or t
  misc_feature (326)..(327): n is a, c, g, or t
  misc_feature (330)..(330): n is a, c, g, or t
  misc_feature (335)..(336): n is a, c, g, or t
  misc_feature (341)..(341): n is a, c, g, or t
  misc_feature (346)..(346): n is a, c, g, or t
  misc_feature (350)..(350): n is a, c, g, or t
  misc_feature (356)..(357): n is a, c, g, or t
  misc_feature (361)..(361): n is a, c, g, or t
  misc_feature (363)..(363): n is a, c, g, or t
  misc_feature (365)..(365): n is a, c, g, or t
  misc_feature (370)..(370): n is a, c, g, or t
  misc_feature (373)..(374): n is a, c, g, or t
  misc_feature (377)..(377): n is a, c, g, or t
  misc_feature (383)..(383): n is a, c, g, or t
  misc_feature (385)..(385): n is a, c, g, or t
  misc_feature (389)..(389): n is a, c, g, or t
  misc_feature (404)..(404): n is a, c, g, or t
  misc_feature (408)..(408): n is a, c, g, or t
  misc_feature (412)..(412): n is a, c, g, or t
  misc_feature (417)..(417): n is a, c, g, or t
  misc_feature (421)..(421): n is a, c, g, or t
  misc_feature (426)..(426): n is a, c, g, or t
  misc_feature (428)..(428): n is a, c, g, or t
  misc_feature (430)..(430): n is a, c, g, or t
  misc_feature (433)..(435): n is a, c, g, or t
  misc_feature (438)..(438): n is a, c, g, or t
  misc_feature (440)..(440): n is a, c, g, or t
  misc_feature (449)..(449): n is a, c, g, or t
  misc_feature (456)..(457): n is a, c, g, or t
  misc_feature (463)..(463): n is a, c, g, or t
  misc_feature (471)..(471): n is a, c, g, or t
  misc_feature (476)..(477): n is a, c, g, or t
  misc_feature (482)..(482): n is a, c, g, or t
  misc_feature (484)..(485): n is a, c, g, or t
  misc_feature (493)..(493): n is a, c, g, or t
  misc_feature (498)..(498): n is a, c, g, or t
  misc_feature (503)..(503): n is a, c, g, or t
  misc_feature (506)..(506): n is a, c, g, or t
  misc_feature (529)..(529): n is a, c, g, or t
  misc_feature (531)..(531): n is a, c, g, or t
  misc_feature (534)..(534): n is a, c, g, or t
  misc_feature (547)..(547): n is a, c, g, or t
  misc_feature (552)..(552): n is a, c, g, or t
  misc_feature (579)..(579): n is a, c, g, or t
  misc_feature (583)..(583): n is a, c, g, or t
  misc_feature (585)..(585): n is a, c, g, or t
  misc_feature (593)..(593): n is a, c, g, or t
  misc_feature (596)..(596): n is a, c, g, or t
  misc_feature (599)..(599): n is a, c, g, or t
  misc_feature (602)..(602): n is a, c, g, or t
  misc_feature (608)..(609): n is a, c, g, or t
  misc_feature (616)..(616): n is a, c, g, or t
  misc_feature (618)..(618): n is a, c, g, or t
  misc_feature (624)..(624): n is a, c, g, or t
  misc_feature (628)..(628): n is a, c, g, or t
  misc_feature (630)..(630): n is a, c, g, or t
  misc_feature (633)..(633): n is a, c, g, or t
  misc_feature (636)..(636): n is a, c, g, or t
  misc_feature (638)..(638): n is a, c, g, or t
  misc_feature (640)..(640): n is a, c, g, or t
  misc_feature (643)..(643): n is a, c, g, or t
  misc_feature (646)..(646): n is a, c, g, or t
  misc_feature (666)..(667): n is a, c, g, or t
  misc_feature (683)..(683): n is a, c, g, or t
  misc_feature (694)..(694): n is a, c, g, or t
  misc_feature (704)..(704): n is a, c, g, or t
  misc_feature (708)..(708): n is a, c, g, or t
  misc_feature (711)..(711): n is a, c, g, or t
  misc_feature (723)..(723): n is a, c, g, or t
  misc_feature (730)..(730): n is a, c, g, or t
  misc_feature (737)..(737): n is a, c, g, or t
cctcnatctatatanatagagattatcnacnggagaaaantntanctnngagagcgnnatgctttgnngnnctaaantttaagaaatcatncgcnnnaaancntanaangaagaantgaaaagcattaangnntgncncccngncggggnngntnnttcnannctggnggnnnctnaccngtgtgnncaccgnggccangcttcgncnngtgcncnccccctnnttgcncgggnnggcnnnntcncccggngncgccangnccncntcntggcaaaggaannannccnttgncaccggctcncnncnnacncaaaanngnagaggnncanagtcnnccccngcccncccncccccnncccncncngaagnccnnccngaaagnangccnccaaagtatagaagngcanctantctgnccanccccncncncannngangnggactgtantggcttnnctggtnccacagancctannggacncnncttatacnagagnggggncgncaggcagttgttaaaattgtgtngnacnccagggaggttangaaancccggcaagtataatgaattgggaaanacantntggcaaanacnacnaangataanncgccgangngggcanactnanatntantntngcnganacattaaatatgaaagatanncaagccaaaattaagnctatgtaaatntcagggaatnattngcngtagagatgtcnggggcantcaggcnttagacattacactaaatcagagtgctgagtatagaaaataatacaaacagatttgtctaaacatttgtatataactttaaaaatagaatatttttggagggttataattacaagcaaagtactttttttgcaaaacacagtattttttcaaaagt

SEQ ID NO: 258291 - DNA, 583 bp, Homo Sapiens
ggtctttagaaagaatattatatatattgttagatgtcaaattttaaataacgattttaatgaaaaaaggctgtcaaacaaataacgcctcagccaatgttcctgagtcccgattaagacagccttcaatcaatagttcatagtctcatcatcatcagttcatccgacgtatattttcctttccaaacagaatcaagcagagaaaactcttaatacttaaaatcgttcttgattagcatatgtcagtttaaaaagtctacaactcctgtaagtttttcaactcaaggcacaaggtatagtggaatgagtgtgagcatcgggctttgcagtcccatagaacagaaatgggatgctagcgtgccactacctacttgtgtgattgtgggaaattacttaacctcttcaagccccaatttcctcaaccataaaatgaagataataatgcctacctcagagggatgctgaccacagacctttatagcagcccgtatgatattattcacattatgatatgtgtttattattatgtgactctttttacatttcctaaaggtttgagaattaaatatatttaaaaaatgaa

SEQ ID NO: 258292 - DNA, 1376 bp, Homo Sapiens
  misc_feature (393)..(450): n is a, c, g, or t
  misc_feature (1290)..(1323): n is a, c, g, or t
acgcacgcacactcacaccagcctgggaggagggagctggggacaaggtcacttggcaacagggctgggacctcaggaccctcaagggcccctgggggctgttgcccggggaggcccctgctcccccagagccggactggcctggttgaaagtccagggtctgggcaaaggcacggcccccactcgggaccctctggcacccccacccacgctgggccgtcccccatggtggacctgagctaaaaggccgggtgtgggcgtggccgtctgcgctgcagcgtgggacagctgggcacgtgggtggcaaccttgggacccctaacaccagctcccgctgggacggaacagggaaggctgtgctttggagccgccagcccagttcggtgtcctcannnnnnnnnnnnnnnnnnnnnnnnnnnnnnnnnnnnnnnnnnnnnnnnnnnnnnnnnncattctctctatttgactctctgtatctttattctaggaggcaacgctccaaaacttctcttctcagtgcaaatgggggtgggttgggcctgtctccctggcaccagcctcctgggggtccagaggagagaatgtgggggtgtcagggtgatgagggcaatgggggccatcgtgggacccgccctgcccccaccccgggagatccacgggaggacggaagatttggccgccgctgccgcaccaggcagctattgggagcctggggatgcaggcccttccggggcagagccattgggtatcggaggaggcgtgagggcctgggcactctggctttggggaagccccaagggctctgggctcttctccccttctgtggtctgggggggctggtgggccccggaggctgggacagaggtagaggggtctctggttgcactgtccgaggagctgggggcagaacggatcccgtggaaggtggcctgaaggtccccgatgctaaccaaggcctggcaaggggctgagggctccgtgactttgctgccttctgtggcttcctgaggtgctgaggggggtgtggggtcctgagacctgagctgcagggcgtcacgggcaggagggctggccaggctctgagtggggaggccctggggcacactgaggggcccctgtggggctggaggcccagtgtgcagctcttcctccccggagactcgggggctggtcggggcatctgtaggcactgggtcaaaggtggctgtccagctggggcctggaggctgagggccagggctggggtaggacagaggggtggcccctcacacgggctgcacagccaatgcnnnnnnnnnnnnnnnnnnnnnnnnnnnnnnnnnnttcgcacgcgtgggtcgacgatatcccggaaattccgggccgtaccagccttg

SEQ ID NO: 258293 - DNA, 1006 bp, Homo Sapiens
  misc_feature (732)..(899): n is a, c, g, or t
  misc_feature (926)..(926): n is a, c, g, or t
  misc_feature (954)..(954): n is a, c, g, or t
  misc_feature (959)..(959): n is a, c, g, or t
  misc_feature (964)..(964): n is a, c, g, or t
  misc_feature (971)..(971): n is a, c, g, or t
  misc_feature (977)..(977): n is a, c, g, or t
  misc_feature (979)..(979): n is a, c, g, or t
  misc_feature (995)..(995): n is a, c, g, or t
  misc_feature (1001)..(1001): n is a, c, g, or t
tgcaaatgttcacagttccaagggaccgcgggggaaatttacacctcctccccctactgcttgtgcttcctttcgctttgaagttctgtggctccgcactggagttggggaggcaagtcctccagcctcgggcttttaatattcacatcacgtcctctttgcagctactttgggaggattgaaagctacaaaggacgtttgggtgacctccccacaacacaaggtggggtggggggtttcaacccacactgccccatcttgaatcgccatggatgaccaagtagttgaaacacgacgggggacttaggtgccagtccttctaggcagaagggccctcttgggttttcaatgaaaggaagagtgtgaggcattaagaagcctgaggaagagaggagagaggggctaggggctcccgcctgggaacagggaactgcaagagggcctgttcagtgctttggcctaactcgaagtggtgccgctaaggtgactggtgtcctggtttccaccggtcatggtttgatgagcatttcttcgaagatgtgaactgcctaccccaacggcccagctcttggcccaacagtctacaccacgctcaagattgtcaagaggtcattgtgcttgttggatggctagttaactctttactcaccacttcttccctgaccctcttcttgtaaatttctaaaactagcaatacaagattcaaatctaaatcatcatacagaactgcannnnnnnnnnnnnnnnnnnnnnnnnnnnnnnnnnnnnnnnnnnnnnnnnnnnnnnnnnnnnnnnnnnnnnnnnnnnnnnnnnnnnnnnnnnnnnnnnnnnnnnnnnnnnnnnnnnnnnnnnnnnnnnnnnnnnnnnnnnnnnnnnnnnnnnnnnnnnnnnnnnnnnnncaagtctctttaaaggggagagggaanagtaaagatggtagaggatgaatgtaanaggancgacntgccttntgaagnanggggcatgaccaaatnattccntagaa

SEQ ID NO: 258294 - DNA, 894 bp, Homo Sapiens
  misc_feature (760)..(760): n is a, c, g, or t
  misc_feature (769)..(769): n is a, c, g, or t
  misc_feature (778)..(778): n is a, c, g, or t
  misc_feature (803)..(803): n is a, c, g, or t
  misc_feature (812)..(812): n is a, c, g, or t
  misc_feature (826)..(826): n is a, c, g, or t
  misc_feature (853)..(853): n is a, c, g, or t
  misc_feature (856)..(856): n is a, c, g, or t
  misc_feature (888)..(888): n is a, c, g, or t
  misc_feature (891)..(891): n is a, c, g, or t
tgccggcataagggggccggggttcccccccgccccgggaaaccgcaaagacctggatctctttgggaagccggaggcacggagacagaaaacaaaccccacggggacaaagagtccctcgtctttttcttaaataaaaaaatccatatattaaatcatgacaatgaaatttcaacaatctgaaaaaaaaagcagaacacaccgtgcttccccggcccagctctgggcggtgacagcggctccgtccaccctggggaccagggagtcccttctccagcaaagcactgcaggccaagggcaggtagaagcccacggcccacaagacgtggacaccaagaaccccaagacgggacagaaccggccacccgctgcggcctgtcctgcggggcccagctgcctggtacagtccgtggggagatgaagggggacggcgggcagcccgggcctccgctttgctcccaactcccacctgtgcccgtgcccccggctctgctctgatagatttacagtatcaaactggaaaagaaagattgttacgaaaaatctgtagataaactgtgaatataattttatatctctatatattttctgtttctctctttaaatatccccctggtccttatgacatccaatatggattacctaccacggccacgggggcaacggctgtttgggaacacgcaggcctttgctctgtagggacccagtggtcctggcgggcctgcagcttcccactcaacttctaacagtagacacagancaagtcganccccggggntgtctgtctctgccctccagcgtgntgcaccgcntgggctctgtagtngtgggggtgtactgggtggcagggcancgngaggagcaggcccagcacacttgcagtctatntgnggc

SEQ ID NO: 258295 - DNA, 969 bp, Homo Sapiens
  misc_feature (8)..(8): n is a, c, g, or t
  misc_feature (10)..(10): n is a, c, g, or t
  misc_feature (17)..(17): n is a, c, g, or t
  misc_feature (22)..(22): n is a, c, g, or t
  misc_feature (25)..(25): n is a, c, g, or t
  misc_feature (28)..(28): n is a, c, g, or t
  misc_feature (31)..(31): n is a, c, g, or t
  misc_feature (39)..(40): n is a, c, g, or t
  misc_feature (47)..(48): n is a, c, g, or t
  misc_feature (56)..(56): n is a, c, g, or t
  misc_feature (71)..(72): n is a, c, g, or t
  misc_feature (76)..(76): n is a, c, g, or t
  misc_feature (83)..(83): n is a, c, g, or t
  misc_feature (86)..(86): n is a, c, g, or t
  misc_feature (103)..(104): n is a, c, g, or t
  misc_feature (115)..(115): n is a, c, g, or t
  misc_feature (131)..(131): n is a, c, g, or t
  misc_feature (133)..(133): n is a, c, g, or t
  misc_feature (141)..(141): n is a, c, g, or t
  misc_feature (284)..(284): n is a, c, g, or t
  misc_feature (950)..(950): n is a, c, g, or t
  misc_feature (967)..(967): n is a, c, g, or t
cacctacncnctacctncaagnggnccnagncctgactnnccctgtnntgactctntgcaaatgcgcaaannccanaaaaaancangaaacaaagcagcaggnngatgcaggggnacacctctccatccancncctctctntgggcttaggcatctggtgccccacacttcctggctgcccaaacaagcaccagctcggttctaaagggaagtaaaacaaaacgcacagcagaggcctggaaacggccagggaaggaggagaggccaaacgttagcatctgagnactttctttttgggaggtgctgtgaggcgtgcaaaagcgaacagtaatggctctcagtaacctcagcaaatgccagcactcagcagccgcccttccagagaggggtcgctggcagctgcagcatcaagcggagttgctgcataggatgctttttatagtgctgtttgtcttcacggttctccaacagatgagctggagggtggatgtttttaagatccatttgtgtaccgtgaaagcacatggcctgtcttcccaagagtttctgcatttccaacttcttaatccacaatagaaaaaagtctagaaaaactaatgcagttagagcaggttttcctcgtgccagtgtcctcatatccccctccccccgccgctaaaaatgactccccaagggactccagcagaatgtggtattgtctcaagataaaaacaaaagcagtagagccagagatggggcagaaaaagtgagatgagacattaacttcctcaggtccttttccaggagtaaatgaccatcgtgcgcccatgggaagagcgctgcatccacggaggacatgggccaacagagctctcaaatgggtttcatgaaagcatctgtaactcataccctgttcaagaatgttttcattacgattcagcagaagcgatgtgcctaggtcagcaaaaacnactgcaaaaccggggcntg

SEQ ID NO: 258296 - DNA, 1044 bp, Homo Sapiens
  misc_feature (834)..(834): n is a, c, g, or t
  misc_feature (845)..(846): n is a, c, g, or t
  misc_feature (896)..(896): n is a, c, g, or t
  misc_feature (907)..(907): n is a, c, g, or t
  misc_feature (910)..(913): n is a, c, g, or t
  misc_feature (917)..(917): n is a, c, g, or t
  misc_feature (925)..(925): n is a, c, g, or t
  misc_feature (927)..(927): n is a, c, g, or t
  misc_feature (929)..(929): n is a, c, g, or t
  misc_feature (937)..(938): n is a, c, g, or t
  misc_feature (942)..(942): n is a, c, g, or t
  misc_feature (944)..(944): n is a, c, g, or t
  misc_feature (947)..(947): n is a, c, g, or t
  misc_feature (965)..(967): n is a, c, g, or t
  misc_feature (973)..(973): n is a, c, g, or t
  misc_feature (979)..(979): n is a, c, g, or t
  misc_feature (985)..(986): n is a, c, g, or t
  misc_feature (992)..(992): n is a, c, g, or t
  misc_feature (997)..(997): n is a, c, g, or t
  misc_feature (1001)..(1001): n is a, c, g, or t
  misc_feature (1008)..(1008): n is a, c, g, or t
  misc_feature (1010)..(1010): n is a, c, g, or t
  misc_feature (1014)..(1014): n is a, c, g, or t
  misc_feature (1017)..(1018): n is a, c, g, or t
  misc_feature (1032)..(1032): n is a, c, g, or t
  misc_feature (1039)..(1039): n is a, c, g, or t
tttgaagagaacagatcttgagggggatctgtagatggacacagggagattccaggtgcctcagagggatcaacttgcagttccaagttgtcctcagggaaatcttgccattttttgggataatgaactgaattctcatcacagtggaatacgtatcatcggaagggatttttaaagggcagggtgagaagtggattgagaatttcgcatagcaccaaggttaaacagaagccaactacgaaacaaagccagaagggcactcaagcaaataatcaaaatcaaatccttaccacgctgccagggaccgatatatccagagcatgggaccaggagctggactcacggtgggatctctgatcagtcacagaaggagcttgacgagctcatggggtctctctccctaggtggagaagacagggctccaaatggacttccagtcccatccacgtcacagaggcaaattgtcagagacaaagacctaagccggaaacaaggcagtcacccatgactgttacggaaatcacaagaacgagtatacggcatttatgaatggacctactggtgtgctagtagggctgccataacaaagtactgcacagatggggcttaaccagagatgcatcgtctcaccatgctggaggctggaagtcccaggtcaacacatggacagggctggtttctcctctggcctctcccctcagccatcttctccctgtgtccccacgttggtctttcctccatgtgtctgtgtcctcatctcctctacttatgaggacacctgtgaggtttggattagggcccaccctagtgacttcatttaaccttcatcacctntttaaagaccnntccaaatacgttcacactctgagtaactggggggttttggactccacatntgaattttaanagnnnnactnagtccgtnanancgggtttnncgantntcntggggagagtgttttttnnntgagtntttccnggaacnnaaaggnggggnaatntgaaaanantttnggnntttcccttgttttntcagagncaagg

SEQ ID NO: 258297 - DNA, 437 bp, Homo Sapiens
aaagccagaagggcactcaagcaaataatcaaaatcaaatccttaccacgctgccagggaccgatatatccagagcatgggaccaggagctggactcacggtgggatctctgatcagtcacagaaggagcttgacgagctcatggggtctctctccctaggtggagaagacagggctccaaaatgacttccagtcccatccacgtcacagaggcaaattgtcagagacaaagacctaagccggtccttttccaggagtaaatgaccatcgtgcgcccatgggaagagtgctgcatccacggaggacatgggccaacagtgctctcaaatgggtttcatgaaagcatctgtgactcatccctgttcaagaatgttttcattacgattcagcagaagcgatgtgccaggtcagcaaatacaactgcaaaaccgggcctg

SEQ ID NO: 258298 - DNA, 1186 bp, Homo Sapiens
  misc_feature (878)..(910): n is a, c, g, or t
  misc_feature (921)..(972): n is a, c, g, or t
ggatctgtgacagggtccaacagggcctggtccgtgtccggtcccccaaatctgtcgtccctgcccccagggtgagtccacgcgtccccgggtctcgcggtgagacggaggctgtggtcgccggggaagggggtggtgtctgtgccactgcggcccgcagtcccccggccggcccggagcagggttcggggaggcgcccctccgtcccctgcagcccgtcctctactccgcttccccagggatccccctagcctagcgggatcctgcgtaggggttagtaatggggctccggttctggttttgtgactttaacggcgacccagctggagcgtttaaaagtttcagcagagcggtaggggcgcctctctcttgaaagcagctaatgacagcgaccctaacttggtatttctcccagacgtttttatttgatgttaacacagttattcgcgcccgtggcaggagaggaagtttatttttacgcagctgggtccaaggatcagagaaattctgctaagcgtacgcagttagcacgagggctgggagtgggtgcagacgccgattccaggggtaatccttctggagcccagtgcatcgcgtgatacacctggctcaggctccgttttcagttgtattagattcctggtttgatcctctctccggaagtgggattgaatccacatcggtgtttacactctgaagggcttgtgtaaactccaggagaagatagcagagtgatgaacctgaaaccgatgggctaattagaggaacgagcgtattattttctccagaaaagacatctgtggagagtgggcatcatttgattatacgtgtttgatggacagtcgggtggaaggagaagattctgttattgaagctcnnnnnnnnnnnnnnnnnnnnnnnnnnnnnnnnngagactgtctnnnnnnnnnnnnnnnnnnnnnnnnnnnnnnnnnnnnnnnnnnnnnnnnnnnnaagcgcttttcctgcttcagcctcccgagtggttgggactacaggcgcccggcaccaccttcgcggaatttttgtatttttaggagaagacggggatccgaccttttggccaggctgggactggaactcctgaccaaagtgaatccacctggcttgggcttgccaagtgttggggattacaggggtttagtccccggtccggcctttttgtctt

SEQ ID NO: 258299 - DNA, 783 bp, Homo Sapiens
ctagggactgacttcaaagaaggaaggaaagaatcaggcagtgcttcctcattctcttttaaaacccgcttcccgctgagtctgcacccaggagaccagagagcaccttgcccttccatggaaactcaggctgatctcgtatctcaggaacctcaggccctgcttgacagtgctcttccttcaaaagttcctgccttttccgacaaggacagcctgggggatgagatgttggcggctgcgctcctaaaggccaagtcccaggagctggtaacctttgaggatgtacctgtgtacttcatccggaaggagtggaaccgtttggaaccctgcctcagagggacctctatagagatgtgatgctggagaattacgggaatgtgttctcactggatcgtgagcccaggactgaaaatgatcaagaaatttctgaagacacaagatcacatggggtcctactgggaagatttcaaaaggatatttctcagggtctcaagtttaaagaagcctatgaacgagaagtcagtctgaaaaggccgctggggaactcccctggagaaagactgaacaggaaaatgccagattttggtcaagtgacagttgaggagaagctaacccccaggggagagagaagcgagaaatataatgattttgggaacagcttcactgtgaattccaaccttatctcacatcagagactccccgtgggagacagaccccataagtgtgatgaatgtagcaagagctttaatcgaacttcagaccttattcaacatcagagaatcc

SEQ ID NO: 258300 - DNA, 398 bp, Homo Sapiens
  misc_feature (328)..(328): n is a, c, g, or t
  misc_feature (388)..(388): n is a, c, g, or t
taaaccctgatctcctccatcaggcccatggttctgtcctgctgaatcatggaccctcaccttctatcttggactcctgtctctcttcctccaccctgtcctcccttcctcccttcccaaatgtgcatttttcaccccatcctcagtgatttttttggtgccgccattcacattcctcaccctgaaattgcatgccagcacgtgttgtttcaggagctgggtaacctttgaggatgtagctgtgtacttcatccggaaggagtgggaagcgtttgggaacctgctcagaggggacctctataggaggatgtgatgctgggaggaattnacgggggaatgtgtttcttcactggggttaagggagtttatggccttggttcaacaaaantcgctgggtg

SEQ ID NO: 258301 - DNA, 502 bp, Homo Sapiens
  misc_feature (13)..(13): n is a, c, g, or t
  misc_feature (54)..(54): n is a, c, g, or t
  misc_feature (77)..(77): n is a, c, g, or t
  misc_feature (436)..(436): n is a, c, g, or t
aaacaaggttccnaaaaggcttcccaacttccttccgggatgaaaataacacancctaacatcccttcaaaaggttnaccagctccctgggaacttggcccttttaggaaccgcaagccgcccaacatcttcatccccccaggctgtccttgtcggaaaaggcaggaacttttgaaggaagagcactgtcaagcagggcctgaggttccctgagatacgaagatcagcctgaatttcccatggaagggcaaggtgctctctggtctcctgggtgcagactcagcgggaagcgggttttaaaagagaatgaggaagcactgcctgattctttccttccttctttgaagtcagtccctagaaggccaaaggagcaattactgggaatttagcagcctctgttcaagttcccgggaattctgacttttgttgatgccanatgcctgggggcagggacgacagatttgggggaccggacacggaccaggccctgttggaccctgtc

SEQ ID NO: 258302 - DNA, 724 bp, Homo Sapiens
  misc_feature (722)..(722): n is a, c, g, or t
tgcgtgagccaccacacttggcctacattttttctttatataccagaacatctataacaggcaccttatctactcattagtgaagagataattggattacacaggcaggcttgtttactacatccagaatgtagaaactgctttcttcaacatcttggttctagctagtaataacaatataattctttggcagatattcagaataacattttaaactacattttcttagaaaattgcattcttgtagtgagcagtgtatggtctcttttgttcagaatttaaaactgataaccaatgaaagccttttctcttattcctctaccgtcatttacatgataatctgaagctaatatgacaatatttaaatactaagtggtactagggaactacaagaatactgtaaagcttaagccattgttatcactgtcatttagcatttaataacaaaactatacagaattatgtgcataccaatgaatgttttgtaccatctagttaaattttttaaataaagttttatgggttaagcagaagacgactgtcatactgaattttattaaaagtatatatacttcaaattcaaagcatcccttaggacccacagaatatattaacactaccacccttaaattttatatttttgctttaagacagacaatgcaaaggtcactggcaagaggtgagcaaatgttttagaacatttatattatgctaaaatgggntt

SEQ ID NO: 258303 - DNA, 739 bp, Homo Sapiens
  misc_feature (129)..(138): n is a, c, g, or t
  misc_feature (166)..(339): n is a, c, g, or t
  misc_feature (351)..(410): n is a, c, g, or t
  misc_feature (426)..(440): n is a, c, g, or t
agctagaaccaagatgtgaagaaagcagtttctacattctggatgtagtaaacaagcctgcctgtgtaatccaattatctcttcactaatgagtagataaggtgcctgttatagatgttctggtatatnnnnnnnnnntgtaggccaagtgtggtggctcacgcannnnnnnnnnnnnnnnnnnnnnnnnnnnnnnnnnnnnnnnnnnnnnnnnnnnnnnnnnnnnnnnnnnnnnnnnnnnnnnnnnnnnnnnnnnnnnnnnnnnnnnnnnnnnnnnnnnnnnnnnnnnnnnnnnnnnnnnnnnnnnnnnnnnnnnnnnnnnnnnnnnnnnnnnnnnnntgcttgaaaacnnnnnnnnnnnnnnnnnnnnnnnnnnnnnnnnnnnnnnnnnnnnnnnnnnnnnnnnnnnncagtgagactccatcnnnnnnnnnnnnnnngcacttcattaccagaagcctcttggcctgttgaaaaatgaaaccaaatattgaaaattaaatcagagtttaaagcagctattttggaagagctgccattaggtagaaagtatcaaaatgtacaaaagaaagttgtatgggagttgagtggaaggtaggatttaagagcagcactgcccaataaaacttcctataatgaaaatgttctataatgtatgttgcccagtacagtagccactaaccacctgtgatttgaacacttgacaatgtggctaatgtaattcgaaaactggatttta

SEQ ID NO: 258304 - DNA, 405 bp, Homo Sapiens
  misc_feature (30)..(30): n is a, c, g, or t
  misc_feature (76)..(76): n is a, c, g, or t
  misc_feature (97)..(97): n is a, c, g, or t
  misc_feature (138)..(138): n is a, c, g, or t
atatttaaatcccaagggggacctgggganccaccaagaataccggtaaagccttaagcccattggttatccaccngtcatttagcatttaataacnaaacctataccagaatttatggtgccataccccaatgaatngttttgtacccatcctagttaaattttttaaataaagttttatgggttaagcagaagacaactgtcatactgaattttattaaaagtatatatacttcaaattcaaagcatcccttaggacccacagaatatattaaaactaccacccttaaattttatatttttgctttaagacagacaatgcaaaggtaactggcaagaggtgagcaaatgttttagaacatttatattattgcttaaaatgagatttgaaattgtaataaaatt

SEQ ID NO: 258305 - DNA, 1069 bp, Homo Sapiens
  misc_feature (26)..(26): n is a, c, g, or t
  misc_feature (30)..(31): n is a, c, g, or t
  misc_feature (34)..(34): n is a, c, g, or t
  misc_feature (56)..(56): n is a, c, g, or t
  misc_feature (64)..(64): n is a, c, g, or t
  misc_feature (66)..(66): n is a, c, g, or t
  misc_feature (93)..(93): n is a, c, g, or t
ggactcttagagccatcttaaaattngaannaantttcaaaaaagagaaaaagaangaaagaanantcctcagcagagggcataccgagctgnccttgacctttcatggaataagctaatcagaaatgttttagcaagtgcatcagctgacaacactgtaattctgtgggatatgtccttggggaaaccagcagctagcctcgctgtacacacagacaaggtccaaacactgcagtttcatccatttgaagcacagactctgatttctggctcatatgataagtcagtggctttgtatgactgccgaagtccagatgaaagccatcgaatgtggcgattcagtgggcagatagagagagtgacttggaatcacttttcaccttgtcatttcttggccagtacagatgacggctttgtatataatttggatgcacgttcagataagccaatttttacacttaatgcacacaatgatgaaatctctggtcttgatcttagcagtcaaatcaagggctgtctcgtgactgcttcagctgacaaatacgtgaagatctgggacatcttaggagataggccaagtctagttcattctagggacatgaaaatgggagttctcttctgttcttcatgttgccctgatttgccatttatttatgcctttggaggtcaaaaagaagggcttcgggtctgggatataagcacagtctcttcagtaaatgaagcatttggaagacgagagaggcttgttcttgggagtgcaagaaattcatctattagtggcccttttggcagcaggagctcagatacacccatggagtcttaatgaagatcatctaatttcctgcttaccttaactgggaattttaaaaagttggcctaaaaatgttccatgcgtggcagcaaccatgcagagtgactgaaacacaattcatttctgactgacattcctttctgcaactgcggtggcaccacaaatatccggtctttgtgcttggctcttcagatggatggtttgtaaggctcttgttgcatttcttaaaaagagtaataaaaaggatttttaaaaagt

SEQ ID NO: 258306 - DNA, 1108 bp, Homo Sapiens
ggcctgagtggcgaattcggcacgaggccctggcagcggccctgtgcagatccctgagcgtgtggcagcagtgcggtcgtggtccctccctatgcagcctggtttctagcgtgacacgcccttgacttgaggaccatgaaccgcagccgccaggtgacgtgcgtggcctgggtccgctgcggcgtggccaaagagacaccagacaaggtagagctgagtaaagaagaagtaaaacgcctcattgctgaggcaaaggagaaattgcaagaagaaggtggtggcagtgatgaagaggagacaggcagtccttcagaagatggcatgcagagtgcacgcacccaggcacgcccaagagagcccctggaggatggtgacccagaggatgacaggacgcttgatgatgatgagctggctgagtacgacttagataaatatgatgaggaaggtgacccagatgctgagactcttggtgaatctctcttgggtcttacggtctacgggagtaatgatcaagatccttacgttactctgaaagatacagaacaatatgaacgtgaagatttcttgattaagcccagtgataatcttatagtttgtggccgagctgaacaggaccagtgcaatttagaggtgcatgtttataatcaagaagaagactctttttatgtacaccatgatatactcttgtctgcatatcctctgagtgtggaatggctgaattttgatcctagcccagatgattctactggaaattacattgctgtaggaaacatgacccctgttattgaagtgtgggaccttggatataggtggactctttagagccagtcttccccactcggaagtaaactttcccaaaaagaagaaaaagaaagggaaagaagagttcctcagcagaagggcataccgatgctgtccttgacccttcatggaaatagctaatcagaaatgttttagccagtggcatcagctgacaacactgtaaattctggggggatatggccccttggggaaacccagcaggctaaccctccgctggaccacaccagacaaggggtccaaacacctggcaggtttcaatccatttttgaaagccccggaactcctc

SEQ ID NO: 258307 - DNA, 802 bp, Homo Sapiens
  misc_feature (356)..(384): n is a, c, g, or t
ggggagtaatgatcaagatccttacgttacctctgaaagatacagaacaatatgaacgtgaagatttcttgattaagcccagtgataatcttatagtttgtggccgagctgaacaggaccagtgcaatttagaggtgcatgtttataatcaagaagaagactctttttatgtacaccatgatatactcttgtctgcatatcctctgagtgtggaatggctgaattttgatcctagcccagatgattctactggaaattacattgctgtaggaaacatgacccctgttattgaagtgtgggaccttgatatagtggactctttagagccagtcttcacactcggaagtaaactttcnnnnnnnnnnnnnnnnnnnnnnnnnnnnngttcctcagcagaagggcataccgatgctgtccttgacctttcatggaataagctaatcagaaatgttttagcaagtgcatcagctgacaacactgtaattctgtgggatatgtccttggggaaaccagcagctagcctcgctgtacacacagacaaggtccaaacactgcagtttcatccatttgaagcacagactctgatttctggctcatatgataagtcagtggctttgtatgactgccgaagtccaagatgaaagccatccgaatgtggcgattcagtgggcagataagaagagaagtgacttggaatcacttttcaccttgtcatttcttggccagtacagatgacggctttgtatataatttggatgcacgttcagataagccaaattttttacacttaatgcacacaatg

SEQ ID NO: 258308 - DNA, 1059 bp, Homo Sapiens
  misc_feature (44)..(44): n is a, c, g, or t
  misc_feature (56)..(56): n is a, c, g, or t
  misc_feature (63)..(63): n is a, c, g, or t
cagcagtctggttgccaaggtccaaagaccttaaaaaacctggngctagaaagcantagactngaggcttctacagactgtaggattcaagggcaggcactcgggaagggaagatggatgtaaagtgtgggagaccgaggacacagtggagcccacgagcacgagctggaacccacgaggatggcctggaacccatgtcagtctctcaccacctccagcttcgatgatgtgggtgtcctgcagaagaagctggtgcccttcctcacagagttaaatatgcatctggcccaggaattagagaagctgaaaggatgatcctggggaaggtggagcagctgcaggcctggctgcaggcctgactactgcccacaccaacgaggtgatctagcagatacatggcaacgtgtgaactgcaacaacgcctggtgccccagcacaaaccttccaagtgtaaaaacaatgtgctgctgcttcacttccgccctccggttatcaagcaaaatgtctcttgtggcccatcttactggaagagagttccgggaaacatagcctcaccaaggtgacacattacaaagccaccctaccatgaatccgcgtcccaagggtctcactgctcacctgaggataactcaatataactatgttgctgaaaatgcaaagctgaagaccatggatttcatggtgattccagcaagtacagagattctatgaagcccacccagaaaaaacttgctggtcctggctatttttgtgtcatttattcaagtattgagaacctggcctgtggtaggcactgtacttaatactaggatacagaaatgcaaaagatacggcccatgcaattttattaaatgcatcaatatgtattacaaatggtgaatggatttcccaactttatcatggaatttaatgctgaatatatagaattcagaaaattgttgggaggacagcccttttgtgaaccttgtttggggcacagtaggaattggaaataatttagtttctatctctaagctgttctattttaaaattatttttaaatttttattgtcccactta

SEQ ID NO: 258309 - DNA, 1016 bp, Homo Sapiens
  misc_feature (29)..(30): n is a, c, g, or t
  misc_feature (32)..(32): n is a, c, g, or t
  misc_feature (53)..(53): n is a, c, g, or t
  misc_feature (65)..(65): n is a, c, g, or t
gctctgtggctctgggactgtgatggggnngnggaggcagtggctgggctccngggcgccgcctngcagccatcttggagtgacagcctcccttgcggggggcatggttacccccgtaggcaacgtcgctggacaccatttccactgggcgcctgagaccaggccggggagggcgaaaggcagatggggccaatggcccacaatcctcttgggtttgacagccccgggcatactccacaccctcggctcctttccacaatccggaggcagcgtctccgttcacacttgcagaacagccccgatgccacatcatggggcagctgcaggaggcaggtggagcaggccccacagtcttctgttacctggcaggctgcacactccccacagcccacacgcttaaacattctctgttcccggttgaaggcaattctctgtgctcgacagtctttgcacaacgttttgagccgctgcctttgggtgccatcccctgagaagctgattccacagttctcacagcacccaggagcagggaatgaagctggggctgtgtcagtgtcagccttggtctcatccctcggggcctccttcctgacctcaccactctggggtccaacctgacgtttccgagtcttggctggccttgaaggcttctttcgcttcttgctggcaaccgccacgggatgggccttgggggctggatagcacaagatgccttgtttgaagtcgaagagggtgagatcacacgcagggcccaggtatcgagtcagctcaactttgcttcggatcctgtctcctgtggggctctggtaataggtgtctgagcgtccacaggtggcccctgacttgcgaaagacttcgcggcgcttccagccagggcccagggccgggcagtccagccagtcctcagccatggaggccacaggaagcagcagtagccagtttggcaccaggccggtatcttccgccactctaggcccgtggacccatggcctcgtgccgaattcgccacccaggcc

SEQ ID NO: 258310 - DNA, 1561 bp, Homo Sapiens
  misc_feature (4)..(4): n is a, c, g, or t
  misc_feature (34)..(34): n is a, c, g, or t
  misc_feature (79)..(79): n is a, c, g, or t
  misc_feature (96)..(96): n is a, c, g, or t
  misc_feature (141)..(141): n is a, c, g, or t
  misc_feature (1087)..(1104): n is a, c, g, or t
  misc_feature (1113)..(1151): n is a, c, g, or t
  misc_feature (1198)..(1272): n is a, c, g, or t
  misc_feature (1351)..(1359): n is a, c, g, or t
aaangcacccatcccttgccagctcacatcaccncaacccggagagaccttccctggcgagcgatctatgaggtgtccngcccctcgtctcccctntgcacctcaactgctcaggcctgcagaacttcgaggcgctcatgnccctaacaaacctggctgggatcagcgagaggctccggcagaagatcctgaaggagaaggctgtgcccatgatagaaggctacatgtttgaggagcatgagatgatccgccgggcagccacggagtgcatgtgtaacttggccatgagcaaggaggtgcaggacctcttcgaagcccagggcaatgaccgactgaagctgctggtgctgtacagtggagaggatgatgagctgctacagcgggcagctgccgggggcttggccatgcttacctccatgcggcccacgctctgcagccgcattccccaagtgaccacacactggctggagatcctgcaggccctgcttctgagctccaaccaggagctgcagcaccggggtgctgtggtggtgctgaacatggtggaggcctcgagggagattgccagcaccctgatggagagtgagatgatggagatcttgtcagtgctagctaagggtgaccacagccctgtcacaagggctgctgcagcctgcctggacaaagcagtggaatatgggcttatccaacccaaccaagatggagagtgagggggttgtccctgggcccaaggctcatgcacacgctacctattgtggcacggagagtaaggacggaagcagctttggctggtggtggctggcatgcccaatactcttgcccatcctcgcttgctgccctaggatgtcctctgttctgagtcagcggccacgttcagtcacacagccctgcttggccagcactgcctgcagcctcactcagaggggccctttttctgtactactgtagtcagctgggaatggggaaggtgcatcccaacacagcctgtggatcctggggcatctggaagggcgcacacatcagcagcctcaccagctgtgagcctgctatcaggcctgcccctccaataaaagtgtgtagaactccnnnnnnnnnnnnnnnnnnctcgaggcnnnnnnnnnnnnnnnnnnnnnnnnnnnnnnnnnnnnnnncatggtcatagctgtttcctgacccagctttcttgtacaaagtggtnnnnnnnnnnnnnnnnnnnnnnnnnnnnnnnnnnnnnnnnnnnnnnnnnnnnnnnnnnnnnnnnnnnnnnnnnnntgcagtaccccgggaatttaaccccgcctaatgagcgggccttttttttggggatccaaaggatcttcttggagatccnnnnnnnnnctgcgaagtaaatcctgctggccttggcaaaacaacaaaaagccacccgcgtacccaacgggtgggggtttgggttttgcccgggaattcaagagaggcttaccccactctcctttttttcccgaaaaggggaaaacttggggccttctcaagccaagaacaccgcgcaaaaaatcaccaataattaacctgtggcttccca

SEQ ID NO: 258311 - DNA, 960 bp, Homo Sapiens
  misc_feature (10)..(11): n is a, c, g, or t
  misc_feature (16)..(16): n is a, c, g, or t
  misc_feature (27)..(28): n is a, c, g, or t
  misc_feature (33)..(33): n is a, c, g, or t
  misc_feature (37)..(37): n is a, c, g, or t
  misc_feature (42)..(42): n is a, c, g, or t
  misc_feature (56)..(56): n is a, c, g, or t
  misc_feature (64)..(64): n is a, c, g, or t
  misc_feature (74)..(74): n is a, c, g, or t
  misc_feature (78)..(78): n is a, c, g, or t
  misc_feature (100)..(100): n is a, c, g, or t
  misc_feature (115)..(115): n is a, c, g, or t
  misc_feature (143)..(143): n is a, c, g, or t
  misc_feature (157)..(157): n is a, c, g, or t
  misc_feature (163)..(163): n is a, c, g, or t
  misc_feature (175)..(175): n is a, c, g, or t
  misc_feature (178)..(178): n is a, c, g, or t
cctgcacagnnctganagtcgcccccnngcctntgtncgctntgtgcattaagcanaagctgcntcttgtgaangctnactgaccccagggtccttcttntaacctgggaccccntcctaaatagacctccttccctgaccanaacctccacttccntgcagnacccccatcttnacntgggccctctctcctcacctgtgggccccatcctatcttggatcccctcctgacctggggccccttcctctgatccgagcctccctcctccccattctgggcccctaattctgactcaccatccccaattccttacccaggacccccgttcttatccggggttggccctgacctctctctacccacagaacacgaccctggacctcctagaccgggggctgcaggtccatgtggtggtggacgcctgctcctcacgcagccaggtggaccggctggtggctctggcccgcatgagacagagtggtgccttcctctccaccagcgaagggctcattctgcagcttgtgggcgatgccgtccacccccagttcaaggagatccagaaactcatcaaggagcccgccccagacagcggactgctgggcctcttccaaggccagaactccctcctccactgaactccaaccctgccttgagggaagaccaccctcctgtcacccggacctcagtggaagcccgttccccccatccctggatcccaagagtggtgcgatccaccaggagtgccgcccccttgttgggggggcagggtgctgccttcccattggacagctgctcccggaaatgcaaatgagactcctggaaactgggtgggaattggctgagccgagatggaggcggggctcggccccgggccacttcacggggcgggaaggggaggggaagaagagtctcagactgtgggacacggactcgcagaataaacatatatgtggctgtgg

SEQ ID NO: 258312 - DNA, 871 bp, Homo Sapiens
ggggcggattggccggagagagcggcgaggcagagcatgatgagtgtcgattggacggctgggcccaagtgggcggaaaacggacggtgcagggggtgggccacgtgtccagccctaacgaaacggtaaccagccctgggaagcccgcaagaggcctcagcggtggccgtccgagagccgagaggtgagggtgcccccgcctcacctgcagaggggccgttccgggctcgaacccggcaccttccggaaaatggcggctgccaggcccagcctgggccgagtcctcccaggatcctctgtcctgttcctgtgtgacatgcaggagaagttccgccacaacatcgcctacttcccacagatcgtctcagtggctgcccgcatgctcaaggtggcccggctgcttgaggtgccagtcatgctgacggagcagtacccacaaggcctgggccccacggtgcccgagctggggactgagggccttcggccgctggccaagacctgcttcagcatggtgcctgccctgcagcaggagctggacagtcggccccagctgcgctctgtgctgctctgtggcattgaggcacaggcctgcatcttgaacacgaccctggacctcctagaccgggggctgcaggtccatgtggtggtggacgcctgctcctcacgcagccaggtggaccggctggtggctctggcccgcatgagacagagtggtgccttcctctccaccagcgaaagggctcattctgcagcttgtggggcgatgccgtccaccccccagttcaaggagatccagaaactcatcaaggaggcccgccccaaaacaacggaactggctggggccttcttcccaggggcaaaaacttcccta

SEQ ID NO: 258313 - DNA, 2300 bp, Homo Sapiens
  misc_feature (2032)..(2036): n is a, c, g, or t
  misc_feature (2038)..(2040): n is a, c, g, or t
  misc_feature (2042)..(2043): n is a, c, g, or t
  misc_feature (2045)..(2046): n is a, c, g, or t
  misc_feature (2048)..(2049): n is a, c, g, or t
ggatcaggccttggctggtcccaggatgagcgacgagtttggttttagctggggattgtgctggcatcctgcgaactcctcccagccggtctctctgtgctcggttgtcttggggtggggcccatccgccgaggtggggaccgataggagaagccggtgggttgtacccttacacttgtggagtctcctcttgcctctacctactccgcctttgtccttaaggtttttgcaggccagtgccaaacacacactaactgtcctggcctctccgtgacacaagtctcttcccaggccttcctcacaggcttctgccgcccccctcatctccaccctcccccatatctgtttgcattaggagttccacgaccatggtggaatgttaaggtgaaccccaccccttcttacagatggggacccagagcctgctcttgggaacagccagagtaagattggaacccagacttgcagtccagcgctgtttgcattaaaagggtgggtgagtcaggacccctggctcaggagccgcctctcctaaaagagggtttcaaggccaaatgggtttgtcaacggtgctgtctccctttcttggagatgctcattagcttatcaaagactgagaagtcccgctgttacagaaataatttagtttgctgtattaactgctcctgggcctggagcagtattcccaccttaagattcccagcatccctgtgctgtcccggctctcattcatgccgaagggcccaacccattggctgtgttctgtttgaagatttggggggcgccttctctttcttccccagggaattctctagcagagggaggggacccaccccagtgaggaagtagattgctgcctctagccagagacctgaactggggaatttgaacattcctttacattgttggagaaatgaagccaaagttattcagatggttttcccaggctaaaggaaagtcacctgcaagagatcccggcactgatctggagcagctgacagggtgggtctcccttaccaaagagaagaaccactctctggcgctggggtgacctgctggctgggcctgtaaggtttccatgttgctgaggccatggagattcccagagctggtcacaccgaccgctctcagggcccgctgccctgggctggcaacaccattctggccttggcctgcagaagctttcagagtcttcactggcagtagggggagatggggagaggaatgatctctgcccagccccttcctttccaaaccatgcaatggaagagcccagatgggtgaagattgattttgccttaactcaagagaattcctgttctccttgtgctatgatttggacacaagattctggatacctggaacttagctgtgtactcctgtaccctaaacagtggatttgagttccagcgtttattcttttttccttttttcagatcaccatctaagttacatctttagctcaggtccatccttctcaagatctccttcttagccccccagcccctggtgctgtctgtggtcaggtgaccttactcaggagcagatatctccttggccgccatggagcctcatccatccacacgtgcctgtagcattccagagctcactgcccttctagatgtgccttcccgcttggcttccagcggcttgtgctcactctgtctgccaggtatgagaagaacacgtaagaccgccaccacactcaccctccctcaaggccctgtgccataggggtggccacccgacctgcccccagaacttttggatactggaggcagttgcataggtctccctctctgggcaccaggactcagtccagcccaagactactctgggcagctcccatcccagtctggggccatttgcagactcaggaaaggatttctacagtgttctataaaagccaaaagagagagtgggtttgggaagagtgagggtggttggggagaggggaccgatgtgcctcattgtttagtggtgattacaaatatgcttttctggataaagtttggttgtttgctcttggaannnnncnnnannannannaaaaaaaagaaactttgtcggcccgccctcgggcccttcggaggaagtcttttctagaacccatttcgttttgggcggccgcggggcccccagttaagggtaaagggggaacattgggtccaataaggctgggtttcccttaggaaaaatcccttggggccatgaaactaagggggctttgggaattctccccacccaaataggaaaaaaaggccccgggggcggggaaaaacccgaagagcgtttcctgg

SEQ ID NO: 258314 - DNA, 1181 bp, Homo Sapiens
  misc_feature (49)..(49): n is a, c, g, or t
  misc_feature (304)..(304): n is a, c, g, or t
  misc_feature (335)..(335): n is a, c, g, or t
cctggagtacttggaggggctggagtcaagatagcggggccctggctgngggcacccactgcacactcagggccagacccaccatcctggactggcgaggaagatcagtgcctcctgctctgcccaaacacactcccatggggcaagcactggagtggatgctgggctatcttgctcccccttccactgtgggcagggcttttcgcttgtcccatgggcgggtggttggccaaggaggagcttagcaagtcttgcagcccagccccacctccatagggtcctgcaggcctgtgctgagaggccntggtgctgcctggcagagtgacaaaggctcnaggacggctggctctgggggactcaggccaagccccttggcaccatcctggcttttggcagggatgagtgaggccctgcagagagcatcccaggccaaggttcccactcagcctgccccctctgcatgtgggtagaggatgtactgggacttggcatttaggattccatctggcccagcccctgaaggtcctggggaagcaggtctcaattctgaatagccagtggggcacactgactgtcctccccaggggaactgcagcgccctcctccccactgccccctgcagcccctgagatattttgctcactatccctccccacttgcttccctgatatgtgctctgagcttccctgaaccaggatctgcctataactgctgtgccccatggggggctccttccctgcctgacccactgttgcagaatgaagtcacctcgcccccctcttcctttaatcttcaggcctcactggcctgtcctgctcagcttgggccagtgacaatctgcaaggctgaacaacagcccctggggttgaggcccctgtggctcctggtcaggctgcccgttgtggggaggggcagtgttagagcagggctggtcataccctctggagttcagaggaagaggtaggaccagtgcttttttgtttcttttgttatttttggttgggtgggtgggaaggtctctttaaaatggggcaggccacacccccattccgtgcctcaatttccccatctgtaaactgtagatatgactactgacctacctcgcagggggctgtggggaggcataagctgatgtttgtaaagcgctttgtaaataaacgcgctctctgaatgccaaaaaa

SEQ ID NO: 258315 - DNA, 1052 bp, Homo Sapiens
  misc_feature (92)..(92): n is a, c, g, or t
  misc_feature (243)..(243): n is a, c, g, or t
  misc_feature (809)..(810): n is a, c, g, or t
  misc_feature (823)..(823): n is a, c, g, or t
  misc_feature (838)..(839): n is a, c, g, or t
  misc_feature (847)..(847): n is a, c, g, or t
  misc_feature (905)..(905): n is a, c, g, or t
  misc_feature (933)..(933): n is a, c, g, or t
  misc_feature (949)..(949): n is a, c, g, or t
  misc_feature (969)..(969): n is a, c, g, or t
  misc_feature (972)..(973): n is a, c, g, or t
  misc_feature (983)..(984): n is a, c, g, or t
  misc_feature (999)..(999): n is a, c, g, or t
  misc_feature (1002)..(1002): n is a, c, g, or t
  misc_feature (1005)..(1005): n is a, c, g, or t
  misc_feature (1007)..(1007): n is a, c, g, or t
  misc_feature (1015)..(1015): n is a, c, g, or t
  misc_feature (1035)..(1035): n is a, c, g, or t
gacaggacggggcaggtggtgatgcagctgtagctcgtgagtctgagcgggaaacagcccccgcgcagtcggtgtcgctgtgaacggaaaanggccttccttacacaggaaacggggtctctgggggatccagtgacgtgcccaaccacagagaccagacccctcctcctgtagagagtggtgctgccctcccgggatgtacctgcaggtggagacccgcaccagctcccgcctccatctgangagggctccaggcatccggtcctggtccctgctggttgatagcctgggctggaagctcttctacgtcacaggctgcctgtttgtggctgtgcagaacttggaggactgggaggaagccatcttcgacaagagcacagggaaggttgttttgaagacgttcagcctctacaagaagctgctgactcttttcagagctggccacgaccaggtggtggtcctgctccatgatgtccgtgatgtgagcgtggaggaggagaaggtccggtacttcgggaaaggctacatggtggtgctccggcttgcgacgggcttctcccaccccctcacgcagagtgcagtcatgggccaccgcagtgatgtggaagccatcgccaagctcatcaccagcttcctgggagctgcactgcctcgagagccccacagagctgtctcagagcagcgacagtgaggccggtgaccctgcaagccagagctgacagccccactgtgccttgagcccgtgcaccgcccacagggacccatgggcacattcccggtgtgcctgagcccgtgcaccgcccacaggnnccgtggcacattncccggtgtgcctgannccgtgcancgcccacaggacccgtggcacatttcccggtgtgcctgagaccgtgcaccgcccacangacccgtggcacattcccggtgtgtctnaagccgtgccaccgcncacaggaccgtggcttttgnttnnttggtgctcnngcgcattggctattnctnctntntgctgttnacactgctgaaaagaggccnacaggaatcaaattttc

SEQ ID NO: 258316 - DNA, 618 bp, Homo Sapiens
ctgtcgctgctctgagacagctctgtggggctctcaaggcagtgcagctccaggaagctggtgatgagcttggcgatggcttccacatcactgcggtggcccatgactgcactctgcgtgagggggtgggagaagcccgtcgcaagccggagcaccaccatgtagcctttcccgaagtaccggaccttctcctcctccacgctcacatcacggacatcatggagcaggaccaccacctggtcgtggccagctctcccagtcctccaagttctgcacagccacaaacaggcagcctgtgacgtagaagagcttccagcccaggctatctccgctgtagtaggcagcagccaggccaatcgacaagattccaaccagcagggaccaggaccggatgcctggagccctcttcagatggaggcgggagctggtgcgggtctccacctgcaggtacatcccgagagggcagcaccactctctacaggaggaggggtctggtctctgtggttgggcacgtcactggatcccccagagaccccgtttccgagagcacagcggtccccgcgccgcagcagagagacgcgaaccggcgggggcggggccgcgcgcacttccgggata

SEQ ID NO: 258317 - DNA, 1028 bp, Homo Sapiens
  misc_feature (720)..(720): n is a, c, g, or t
  misc_feature (921)..(921): n is a, c, g, or t
  misc_feature (933)..(933): n is a, c, g, or t
  misc_feature (951)..(951): n is a, c, g, or t
  misc_feature (953)..(953): n is a, c, g, or t
  misc_feature (956)..(956): n is a, c, g, or t
  misc_feature (967)..(967): n is a, c, g, or t
  misc_feature (977)..(977): n is a, c, g, or t
  misc_feature (979)..(979): n is a, c, g, or t
  misc_feature (981)..(981): n is a, c, g, or t
  misc_feature (986)..(987): n is a, c, g, or t
  misc_feature (990)..(990): n is a, c, g, or t
  misc_feature (992)..(992): n is a, c, g, or t
  misc_feature (999)..(999): n is a, c, g, or t
  misc_feature (1014)..(1014): n is a, c, g, or t
ttaccggtcccgaagttatgggatatgtcgaccacgcgtacgcgtcatggatagccaccgggtgctgccgttcgtgcgtggcgtggacctcagcggcaacaacttcataggacggctacttccctgagaatgtcaaggccatgaccagcctgcggtggctgaagctgaaccgcactggcctctgctatcctgtcccgaggagctggccgccctgcagaagctggaacacttgtctgtgagccacaacaacctgaccacgcttcatggggagctgtccagcctgccatcgctgcgcgccatcgtggcccgagccaacagtctgaagaattccggagtccccgatgacatcttcaagctagatgatctctcagtcctggacttgagccacaaccagctgacagagtgcccgcgggagctggagaacgccaagaacatgctggtgctgaacctcagccacaacagcatcgacaccatccccaaacagctcttcatcaacctcaactgatcctactatacctggacctcagcgagaaccgcctggagagcctgcccccgcagatgcgccgcctggtgcacctgcagacgctcgtgctcaatggaaaccccctgctgcatgcacagctccggcagctcccagcgatgacggccctgcagaacctgcacctgcggagaaccagcgcacccagagcaacctgcccaccagcctggagggtctgagcnacctcgcagacgtggatctgtcctgcaatgacctgacacgggtgcccgagtgtctgtacaccctccccagcctgcgccgcctcaacctcagcagcaaccagatcacggagctgtccctgtgcatagaccagtgggtgcacgtggaaactctgaacctgtcccgaaatcagccacctcactgccctcagccatttgcaagcngagcaagccgangagctgttcctgaattcnanaanctggatttgangggctgcctnangnattgnnaancnacaaccngaagagttatggctncaaaaaaactggag

SEQ ID NO: 258318 - DNA, 438 bp, Homo Sapiens
tgccgttgacagttttatttactggttcccttgtgaagctgaaaaggaacattaagcgggacaaaaaatgcccgattttatttataaaagtgggtacttaataaatgagtcgttatactatgcataaagaaaaatcctagcagtattgtcaggtggtggtgcgccggcattgattttagggcagataaaagaattctgtgtgagagctttatgtttctcttttaattcagagtttttccaaggtctacttttgagttgcaaacttgactttgaaatattcctgttggtcatgatcaaggatatttgaaatcactactgtgttttgctgcgtatctggggcgggggcaggttggggggcacaaagttaacatattcttggttaaccatggttaaatatgctattttaataaaatattgaaactcaccagtcatggacaa

SEQ ID NO: 258319 - DNA, 670 bp, Homo Sapiens
  misc_feature (275)..(275): n is a, c, g, or t
  misc_feature (284)..(284): n is a, c, g, or t
  misc_feature (446)..(446): n is a, c, g, or t
  misc_feature (451)..(451): n is a, c, g, or t
  misc_feature (461)..(461): n is a, c, g, or t
  misc_feature (473)..(489): n is a, c, g, or t
  misc_feature (497)..(497): n is a, c, g, or t
  misc_feature (538)..(538): n is a, c, g, or t
  misc_feature (569)..(569): n is a, c, g, or t
  misc_feature (579)..(579): n is a, c, g, or t
  misc_feature (591)..(591): n is a, c, g, or t
  misc_feature (615)..(615): n is a, c, g, or t
  misc_feature (649)..(649): n is a, c, g, or t
tcagtttctctccgaagcccaggatgacccacagaaaagaaaaccagacatcaaaaaagcaaagctgatgctggggtgggagcccgtggtcccgctggaggaaggtttaaacaaagcaattcactacttccgtaaagaactcgagtaccaggcaaataatcagtacatccccaaaccaaagcctgccagaataaagaaaggacggactcgccacagctgaactcctcacttttaggacacaagactaccattgtacacttgatgggatgtatttntggctttcntttgttgtcgtttaaagaaagactttaacaggtgtcatgaagaacaaactgggatttcattctgaagcttgcttttaatggaatgggatgtggcctaaaagctccccttcaaaaaactgcaggtttttgccttgcacttttttgaatctctctttttatgtnaaatngcgtagatgnctctctgcgtannnnnnnnnnnnnnnnnatcttggngtgagggccttatggttgtgactgttcgttgacagttttanttactggtttcttgtgaaggtgaaagggacnttaggcgggncaaaatggccgntttattttttaaagtggggacttnataatgaggcgtatacttgccttaaggaaatccngcagtttgtccggtggtggtc

SEQ ID NO: 258320 - DNA, 1420 bp, Homo Sapiens
  misc_feature (8)..(8): n is a, c, g, or t
  misc_feature (11)..(11): n is a, c, g, or t
  misc_feature (50)..(50): n is a, c, g, or t
  misc_feature (99)..(99): n is a, c, g, or t
  misc_feature (106)..(106): n is a, c, g, or t
  misc_feature (312)..(312): n is a, c, g, or t
  misc_feature (365)..(365): n is a, c, g, or t
  misc_feature (465)..(465): n is a, c, g, or t
  misc_feature (467)..(467): n is a, c, g, or t
  misc_feature (1323)..(1323): n is a, c, g, or t
  misc_feature (1349)..(1349): n is a, c, g, or t
  misc_feature (1379)..(1379): n is a, c, g, or t
  misc_feature (1383)..(1383): n is a, c, g, or t
  misc_feature (1398)..(1398): n is a, c, g, or t
  misc_feature (1407)..(1407): n is a, c, g, or t
  misc_feature (1411)..(1411): n is a, c, g, or t
  misc_feature (1419)..(1419): n is a, c, g, or t
gactgggngcncagcggcgtgtactgggatttctgtgagcagaggctgtngagagggggcgcttggagggccaccggcggcttcgaaagcttcgcagcnggaagcngccggttggcggcctggatttaccttacgaaaggttttaaccaaggacttgaggtttctcaggttttaaatttaaactaatatgctgtgtcctttaatcggaaaaggctctgaccttattttttcccgttaagaaacaagcgattacttcattggagggaaaatgaatcgttcctcaaatgtaccacgtaaaggtattctgaaatnaggtacaagatccttacaaaaagtttgcagagtacatttcgcaaatgcacganatgcaagatcattactatcaatgcttaaagacatttcagctcaaataatacagagggcttggttatctcatacaaacaaaatgatatttcgactcctaananacgcaatttgtgcagcggaattctatgtaacacatgagatactgaagagagtggcccccttagaggctaagcttattaaggatcctactatgcagtgtaaaattagattcagatttagaggtgaaacgtttccacctttcatcgtgtttaaaatttttcttcatactgatggccatggttacaagtattttagtggaaaaaatgtattaatgccgtcaagtaaggcagtggatgatgcttgcaaactaatggggggaaaggaaatttcaccgtataattatggaagatgaacgtattttcccgaagtccaaagtaactgatataatggatgttgtcaccatgcaagattatgtacaatatcgcagttttttcgatgaggcccctgcattttctggcggcagaaataacagctggcgcaaattaaatcttgaaaatattcccaggacaatgctaatgtatcaaatagttcattattcagagtctggagtgatctcaaaccgtctacgaaatgaaatgaagtttctgttacagagaccagtaacgcaagagatccataagcaccagctacggattgtttctgaaattaggggtccatacttaactgtccaacctctatatcggccctacaaacagcaaaatcaagttaaatttctgggtcgtcgatccaagcaagctcaaatgaaagttgaaaaaatgagaaaagtttatttggctaaagaaaaaaatacttctgaggtgactgaaccaaaaacgggcccatcaggtacaaaggataactatcatctccactccatcttttgacattgtgaaaactaaggaatctatgtcagagtgtcagctggaaaaagaaaaaagnactcattttcctggtatcaaaacttngcagctggtgattctccatcatgataatgnacanttaattcacacaaanccaaagttntttnacaatctnc

SEQ ID NO: 258321 - DNA, 1507 bp, Homo Sapiens
tgcggctgctacggcggcgcatgctaggggattctgccgggtagaagagctgggcctggaacccagccctgaggacatcctgcggcccaggggcaagtgacacctgctgagagaggcccaggatggtggaggctgaggaactggcacagctgcggctgctcaatctggagctcctgaggcagctgtgggtggggcaggatgctgtgcggcggtcagtggccagggcagcctcggagtcaagcctggaatccagcagcagctacaactcagagactccatcgaccccagagacgtcctcaacttccttgagcacctcctgcccacggggccggtcctccgtgtggggcccaccagatgcctgtcgaggggacctccgtgatgtggccagatcgggggtggcctctctcccacctgccaattgccagcaccaggagtccctgggccgaccgagaccccactcagcaccctcgctgggcacctcaagcctgagggacccagagccctcagggaggctgggtgatccaggaccccaggaggcacagaccccgaggtccatcctggctcaacagagcaagctgtccaagcccagggtgaccttctctgaggagtctgcagttcctgagaggagctggcgcctcaggccatacctgggctatgactggattgcagggtctctggacaccagctcttccatcaccagccagcctgaggccttcttctccaagctgcaggagtttcgggaaaccaacaaggaggagtgtatctgcagccatcctgaaccccagttgccaggcctgcgtgagagcagtggcagcggcgtggaggaagaccatgaatgcgtgtactgttaccgtgtcaaccggcgcctgttcccggtgcctgtggatcccggtaccccctgccgcctgtgcaggacaccgcgagaccagcagggccctgggaccctggcgcagccagcgcacgtcagggtgagcatcccgctgtcgatcctggagcccccgcaccggtaccacatccaccggcgaaagagctttgacgcctctgacacactggccctgccccggcactgcctgctgggctgggacatttttcctccgaagtctgagaaaagctcagcccccaggaacctggacctctggtcctctgtctccgctgaggcccagcaccagaagctgtccggcaccagcagcccttttcacccggcctcaccaatgcagatgctgcccccgaccccgacctggtcagtgccccaggtccctcggccccacgtcccacggcagaagccctgaggactgactcctgggggagaacagcattcccgccgcctccagcctctcccctctggcaggcgcacccaggagatggaatcccctgcccgcccagctcaggcccagctgtcctaggttgggcaggtgggtggacccaagcttgtctgctgcctgagttccagagagggaggaccctggggtggagggtgagggattctgtggaagtttgtaaataaagc

SEQ ID NO: 258322 - DNA, 712 bp, Homo Sapiens
aattatcaaatgtttcttatgaaattttcaggggatagaaggaaagcgcttgtgctcctagcttaagacaataatgtgttttttctggggagctgtagttttgtgtctctgattcccaaagtgaaaagcagtgatttcattagtaggcgattacatctaggaataacatttggtaaggccaataaaatagcaggtgctttcgttagagatatgtgtgcgtcattgtactgggtcattaaatcttaagaataaaaatagaatgacttatttagaattaatgcttattagcagtgagaacaaatgacagattgttctatttattaatttgttctaggatcttattctattttattcaaagacaagactaaatgctcttgtgatagcattctttccatgaaacaacaggaaagctgtatcatacatacagtgactggcctccagtttaaccaagaccctggaaaagcagctctccttcagggctggagttctgctgctgctttcttggtggggataaagccttcagggcatgacttccgtcgtggctttaaaacagctttgcttacctggcataaaaattgagtggtacctctactgaaaccagttacataaaacactgtgaatgacacttcataaacccattgtgtaccttaaaattgttactgattgtttaagacgcgtgactgtcagtggtgaataaaggaaccaaaagatt

SEQ ID NO: 258323 - DNA, 500 bp, Homo Sapiens
  misc_feature (32)..(32): n is a, c, g, or t
  misc_feature (43)..(43): n is a, c, g, or t
  misc_feature (71)..(71): n is a, c, g, or t
  misc_feature (95)..(95): n is a, c, g, or t
  misc_feature (176)..(176): n is a, c, g, or t
cccccgggtccggggttaaaaaccgggagggncccggtccacngtaaggtaagggataacggccttccccngttggttttcccagggaaaagtanggcctatccaacaagtgtcattttagtccttgtcctttgaaataaaaatagaaataaggatccctagtaacaaattaaatnaaatagaacaatcctgtccatttgttcctcactgcctaataagcattaattcctaaataagtcattctatttttattcttaagatttaatgacccagtacaatgacgcacacatatctctaacgaaagcacctgctattttattggccttaccaaatgttattcctagatgtaatcgcctactaatgaaatcactgcttttcactttgggaatcagagacacaaaactacagctccccagaaaaaacacattattgtcttaagctaggagcacaagcgctttccttctatcccctgaaaatttcataagaaacatttgataatt

SEQ ID NO: 258324 - DNA, 1261 bp, Homo Sapiens
  misc_feature (69)..(69): n is a, c, g, or t
  misc_feature (852)..(852): n is a, c, g, or t
  misc_feature (1046)..(1046): n is a, c, g, or t
  misc_feature (1230)..(1230): n is a, c, g, or t
cccgggatcgcagggactccggggcgaccgccgcgagtccgcagtagttcgggccatggaggcggaccncgctctacccgatggcgggggctgcggggccgcagggcgacgaggacctgctcggggtcccggacgggcccgaggccccgctggacgagctggtgggcgcgtaccccaactacaacgaggaggaggaggagcgccgctactaccgccgcaagcgcctgggcgtgctcaagaacgtgctggctgccagcgccgggggcatgctcacctacggcgtctacctgggcctcctgcagatgcagctgatcctgcactacgacgagacctaccgcgaggtgaagtatggcaacatggggctgcccgacatcgacagcaaaatgctgatgggcatcaacgtgactcccatcgccgccctgctctacacacctgtgctcatcaggttttttggaacgaagtggatgatgttcctcgctgtgggcatctacgccctctttgtctccaccaactactgggagcgctactacacgcttgtgccctcggctgtggccctgggcatggccatcgtgcctctttgggcttccatgggcaactacatcaccaggatggcgcagaagtaccatgagtactcccactacaaggagcaggatgggcaggggatgaagcagcggcctccgcggggctcccacgcgccctatctcctggtcttccaagccatcttctacagcttcttccatctgagcttcgcctgcgcccagctgcccatgatttatttcctgaaccactacctgtatgacctgaaccacacgctgtacaatgtgcagagctgcggcaccaacagccacgggnatcctcagcggcttcaacaagacggttctgcggacgctcccgcggagcggaaacctcattgtggtggagagcgtgctcatggcagtggccttcctggccatgctgctggtgctgggtttgtgcggagccgcttaccggcccacggaggagatcgatctgcgcagcgtgggctggggcaaacatcttcagctgcnccttcagcacgtgcgtgactaccgcctgcgccacctcgtgcctttctttatctacagccggcttcgaggtgctctttgcctgcactggtatcgccctggggctatggcgtgtgctccgtgggggcttggagcgggctggctttacctccctcggggctttacagccctgggcggcctcagccgnccttactccctggggcctggctggggccctg

SEQ ID NO: 258325 - DNA, 1507 bp, Homo Sapiens
ccttggcagggcacgtgcgggaggaagtggagctccctgtacgcgcggccctagtcggctcctcaacgtggagcgatgggaggccttgagaagaagaagtatgaacgaggctcggccaccaactacatcacccggaacaaagcccggaagaagctccagctgagcttggctgactttaggcggctgtgcattctgaagggcatttatccccatgaacccaaacacaagaagaaggttaacaagggttctacagcagcccgaacgttttaccttatcaaagacatcaggtttctcctccacgaacccattgtcaacaagttccgtgaatacaaggtgttcgtccggaagctccggaaggcttatgggaagagcgagtggaacactgtagagcgtttaaaggacaataagcccaactacaaactcgaccacatcatcaaggaacggtatcccacgttcatcgatgccctgcgggacctggacgatgccctctccatgtgcttcctgttttccaccttcccgcggactggcaagtgccacgtgcagaccattcagctgtgccgccggctcactgtggagttcatgcactacattatcgctgcccgtgccctgcgcaaggtcttcctgtccatcaaaggcatttactaccaggccgaggtactggggcagcccatcgtgtggatcactccctatgccttctcccatgaccacccgacagacgtggactacagggtcatggccaccttcaccgagttctacaccacgctgctgggctttgtcaacttccgcctttaccagttgctcaacctccactatcccccgaagctcgagggtcaggcccaagcagaggcaaaggccggtgagggcacctacgcgttggactccgagagttgtatggagaaactggcagccctcagtgccagcctggcccgcgtggtggtgcctgccacagaggaggaggccgaggtggatgagtttcccaccgatggggagatgtcagcgcaggaggaagaccgcaggaaggagctggaggcgcaggagaagcacaagaagctttttgagggcctgaagttcttcctgaaccgagaggtgccccgtgaggccctggccttcatcatcaggagttttggtggggaagtgtcctgggacaaatctttgtgcattggggccacctatgacgtcacagactcccgcatcacccatcaaatggtcgaccggccctgggcagcaaacctcagtcattggcaggggctacgtgcagccccagtgggtgtttgactcagtgaacgccaggctccttctccccgttggcagagtacttctctggggtgcagctgaccccaacaactttcaccctatagtgaccgagaaggcacggagataacgttccaccttgagaagctgaagctgctggctcttgcagggggggagaggacccaggaagacctgaatgagtcagaagaggaggaggaacgaggacgacaacaacgaacgtgatggtgatgaacgg

SEQ ID NO: 258326 - DNA, 996 bp, Homo Sapiens
  misc_feature (19)..(19): n is a, c, g, or t
  misc_feature (21)..(21): n is a, c, g, or t
  misc_feature (83)..(83): n is a, c, g, or t
  misc_feature (94)..(94): n is a, c, g, or t
  misc_feature (96)..(96): n is a, c, g, or t
  misc_feature (117)..(117): n is a, c, g, or t
  misc_feature (143)..(143): n is a, c, g, or t
  misc_feature (148)..(148): n is a, c, g, or t
  misc_feature (184)..(184): n is a, c, g, or t
  misc_feature (213)..(213): n is a, c, g, or t
  misc_feature (273)..(273): n is a, c, g, or t
gaccctcgccctacacccncncaatatagacaggtctagccgggcccgccccaccttgtgcgcctcaggcagacactcatgtngataaggcagncncccgggatcccagcgggcggntgtcgaacgtcctgtgcgagaccacntgcgnccacacgagaaggctctggcctgttcctgtcagaancgctcacctgaagaggggctgagtcctgnccccacagctgctgggatcggggtcccccactccacggctgtgactacagcaccggacanaaagttatgccccagacccttcttgaccacgtagtccctgtagtagtgggcgatgtccccggcagtggcccggctgttgcgaagacctcttcgcttcttctgcatccagtccttgacctccaggtccgggagccccatccactggccttggctcaggatcaccatggagccttcgatggagtgccaggctcccccggggaggttccggcccagaaccacgtgggggatggcgtgctccttccggtgcttccaggtgaggaccgacttcatgtttcccccaaagtctgtgtctgggcgtagaagggcatcaaagagcagggccacggggctttgggatcggccttcgaggccttcggacaggtagtccaggtcctggtccaggatggagacccccggggcctcggtgagcttcctctgcagcagggggtgtgggtggatggcatctggcttcgtgtagggtgtgtagccggagagcaggtaggacaggcagataccagaggggccgttacccacaatgatgaccgggaggggctctgagctgctggcgccgaggtggtcctttctggaggagctcatggctggtggggggcttggggctggcagcggacctgacaggcagtggtgcaggagcccagtgagcccggccaagttgtgcactaggagggtcaggggaacacggatcacagagtcccccgtgacatcgggacacccattaccctgtgg

SEQ ID NO: 258327 - DNA, 1244 bp, Homo Sapiens
  misc_feature (545)..(545): n is a, c, g, or t
  misc_feature (590)..(590): n is a, c, g, or t
  misc_feature (603)..(603): n is a, c, g, or t
  misc_feature (618)..(618): n is a, c, g, or t
  misc_feature (631)..(631): n is a, c, g, or t
  misc_feature (636)..(636): n is a, c, g, or t
tatatgcacttcaggcttgttgaaacgaccaagactctgtgacgttaatttgggtctttgtcctggcagtgcctctgccagtcactgtcatcgttgtgtcccccacaactgtcctcttgctagctcggcccagctttgtccctggagcccgatgctacccctgtcagacagaggctgcggcctgggccagagtcggggagtagctgctgcttcacggcgtctccactgtgcgattggcccggagccccgaagactcggagggagctgctcagggccgatgagcgcagcaggaagccctggccagtgaggagctcacaggtcctccctggtggtcccgccgcacctctgcatctcctgggcgtcaccaggaaggctctgaagtcccgggctgctctcagcacttctcctgcagactgaagactctggactcattgctgattggaacaccaggaggaggttggatttctgccagtgggggatgtttctggaggcagctggtccccccacaccgcgtcctgctgagcctgccccctggattggctgtnatttgcctcgaagttcagcagttcatcttcatgggaaatttgctnagcccccaccagngaaccggatgatganacagggatacctnacagnttggccatttgaggcaaaggcaagcttcccgagctgatgctaaagaagacagactttcccttcctcccagccgcagcagtgcagagcccgcctggagggatgtgggggctgtgcagggtgcagcgctcaggtggatcctgggaagcagcctctggatgctgagtggagggagccactgagcacagcaaggcaccaaagcccctggagaaaaccccagggcgaggtgcgaccatcatcaggatcaaagcagacggggcgtgggtggggaaggggctctgggaccagaccccccacactactgcgtctttgtttctatcagtctttgtagaagcaggtggtggtggaaattccagcaggtgggtcccgcagagccctgaggcctcacttttcggatcttctgtcccagatcctgctccctccctgctgagcctggggttcccctggcattggccccagccttctgaaagccggcgctgcagccagaggccgcacgctgcactgtcgcgacgcagagaggcttctgtgcaggctgggatcgggccccatgtctgtgctgtctagtttgtgttcaaaatgtcagaataaacacagaataaatgttcccacga

SEQ ID NO: 258328 - DNA, 1288 bp, Homo Sapiens
cgcgggtgcagccacgatggaagggggtgcgtacggagcgggcaaagccgggggcgccttcgacccctacaccctggtccggcagccgcacaccatcctgcgcgtcgtgtcttggctgttctccatagtggtgttcggctccatcgtgaacgagggctacctcaacagcgcctccgagggggaggagttctgcatctacaaccgcaaccccaacgcctgcagctatggcgtggccgtgggcgtgctcgccttcctcacctgcctgctgtacctggccctggacgtgtacttcccgcagatcagcagcgtcaaggaccgcaagaaagccgtcctgtccgacatcggtgtctcggccttctgggctttcctctggttcgtgggattctgctacctggccaaccagtggcaggtctccaagcccaaggacaacccactgaacgaagggacggacgcagcccgggccgccatcgccttctcctttttctccatcttcacctggagcctgaccgcagccctggccgtgcggagattcaaggacctaagcttccaggaggagtacagcacactgttccctgcctcggcacagccgtaggcttccccggcttgcagaggccggcagccctgtatcacccctggcagtgaggtggcaggagcagcctagtgccagaaatgtccaagatgccagggcatgcagggcagtggaaggctggcttgaggaaccaattcaggttctccactgactcattcattccttcaccgcctccttcattgattcttcatgcgttcattcattcagtaaacatttattgagcagctgttttgtgcctagtgatgaattaggtggggtcctttggctccaggagcccacaggctggggaggagaaaacacaacacatcaatatctcttccaaatggacagccgtggacagttaccaggtaggtagcggccccatacatgggctgccctagaggcgttcatggtccccattgctgagctgtgggtgcagagcaatagcctctcccttcacagcggtgtgaagagtgaccgtcactgtccttagggttagcatcctggccgaggatgtcacagggctcctggtctggctctgtcctcatgtgctatgtgaccctgacaaacccgtgcacctctctcagcctcagtccacttaccctgaactgaggggtgataatggaccaacctctcaaggctgttgtgccaatgaaacaaaggccagcccaggggcttagcacaagcatgctcaataaatggaagctcttttgttcattc

SEQ ID NO: 258329 - DNA, 538 bp, Homo Sapiens
  misc_feature (235)..(235): n is a, c, g, or t
  misc_feature (242)..(242): n is a, c, g, or t
  misc_feature (245)..(245): n is a, c, g, or t
  misc_feature (302)..(302): n is a, c, g, or t
  misc_feature (388)..(388): n is a, c, g, or t
  misc_feature (423)..(423): n is a, c, g, or t
  misc_feature (479)..(479): n is a, c, g, or t
  misc_feature (506)..(506): n is a, c, g, or t
  misc_feature (511)..(511): n is a, c, g, or t
atgcctccttggtctcatgttgaccttagagtttgggattctggaattcgatccttcatggataggcagctggacacagaggtcgtgggtgagctggaggagcaggcccggatgtgagctgttctccatagtggtgttcggctccatcgtgaacgagggctacctcaacagcgcctccgagggggaggagttctgcatctacaaccgcaaccccaacgcctgcagctatggcgtnggccgtnggncgtgctcgcttcctcacctgcctgctgtacctggccctggacgtgtacttcccgcangatcagcagccgtcaaggaccgcaagaaagccgtcctgtccggacatccggttgtctcggccttctggggctttcctctggttcantggggattcttgctaccttggccaaccagtggcanggtctccaagcccaaggacaacccactgaacgaagggacggacgcagcccgggccngccatcgccttctcctttttctccatnttcanctggagcctgaccgcagccctggcgga

SEQ ID NO: 258330 - DNA, 1715 bp, Homo Sapiens
  misc_feature (39)..(39): n is a, c, g, or t
aagcctgtctggcaatacggtatacagtccatccattgnagacacttcaaagctgctgcttaatactgccctacttttcaacagacaatgccttctgacttgcaacaaaaatcacagtagccaaactcaccagaagttcttgtgctttgtctgtggctgatcgtccaatcaccttgtacagctccatgaggtcaccaagcatcccatcacccagcaccggcagttgcatggcaatggctgccaggcaatggcacatcaaaatccgggcagcgtcttgagcactgtgcaattgagtcaacaaggtctcaactactgactggctaagatggggcctgcccttggccaacttcaccatacagtttagagcaatctttaaagtggcctgagcacctggactatcatcttgactacaaagtaccagtagggattccaggccaaagacagcatcttgttccagtgccaaaagatccttttcttgacaagaaacagttatattagttaggactctaactccatgagctgcaatgcccctgttattatggtaacagcactcttgggctaatttgactaaatcagaagatctgggagaagaactcacatttcctggaactatactgaagtaatgtttgatggcgatggtccctgatagtgtggaaaggacagacaacatccctagttttaagctgccataaggaatctggagggcacactcacaaagtgcctgaatattctccctactccaagtatgtggtgttttattagcaagtaatttcagatcttgaatagcaagtctctttactgccttcctgggatcattcttcaaatactgcaacagaagctgaatctgcttaggtgtatcaaccaaagatgacgctgcaagcagagtgaaagtgtgcaaagacacaatcaccattttggtggacggataggatgtgaccagctgttgtaaaagctgacgagcactggaagccaagattgcatcatggtgcatgtgctgtagaatgggtatcaattttagcttcaagtctactggtgtcgctaaaccttgaatcatttcactgattttgttacagattcctacagcaaaatcctttgactgtgcagagaagtttgcagcagcaaaaacagcagcttcaacttctacattatcatgtgaatctaaactctgacgaatactatgatgagcattcttcctctcaggaattattgatgccagacttcccaacatccggagggtgatggctcttgccacaggatcattactatgaatcacagaaaaaattctcttcacaaattcatccacatttagaatcttctccaaatgtttctcactttgttgggtaactttaagaacacatagcctcaggaaattatttccaactctgaaaacatcagctaactttaggaatgcagaattgataagaatagggaatggatacttctgaaaaagtctgggaaagcgaacaactgcttcacactgttcaccaagtttgccagatcttaggcctttgtccaattccataagggcagagttggcatccagttcctgttcgccatagccggcatctgccaggaaagacttagttgagtttgacgccatgacccgaatagttactcgactagcctagtcagaaagcttgcaaactctaccccaggaccgccatcttcccccgccgccttcttgctggtttttctatcccgggaattccggacct

SEQ ID NO: 258331 - DNA, 1335 bp, Homo Sapiens
  misc_feature (81)..(81): n is a, c, g, or t
  misc_feature (339)..(339): n is a, c, g, or t
  misc_feature (1157)..(1157): n is a, c, g, or t
  misc_feature (1208)..(1208): n is a, c, g, or t
ggatcgcatgcctgcccgcccgccagcctgccgggtacggccttttccgccggggcttccaggtcaaagaattcgcctttnccgctaccgctttcttaccctccgcacccgttaagttctccggtcgggcggcagtctctgaacacttagccgcgccatccggggtcacaccgcctggaaggaggtgacgggggcggcgcggggcgcggacactccccgctgagagtccgcctgccatggactcggaatattacagcggcgaccagtcaaatgatggtggtgctaccccagtacaggatgaacgggattcagggtcagacggtgaggatgatgtaaatnagcaacactccggatcagacactggaagtgtagaacgtcattcagagaatgaaactagtgatcgagaagatggcctccccaaaggacatcatgtgacagactctgagaacgatgagcccttaaatcttaatgctagtgactctgaaagtgaggagcttcacaggcaaaaggacagcgactctgaatctgaggaacgtgcagagcctcctgcaagcgattctgaaaatgaggatgtcaatcagcatgggagcgactctgagagtgaagagaccaggaaattacctggtagtgactctgaaaatgaggaacttcttaatgggcatgcaagtgactcagaaaacgaagatgttgggaagcatcccgccagtgattctgagattgaggagctccagaagagtcctgctagtgactctgaaacagaagatgctctaaaacctcaaatcagtgactctgagagtgaggaacccccaaggcaccaagccagtgactccgaaaatgaggagcctcccaaacctcgaatgagtgattctgaaagtgaggagcttcctaaacctcaggtcagtgattcagaaagtgaggaacccccaaggcaccaggccagtgactctgaaaatgaggagcttcccaaacctcgtatcagtgactcagaaagtgaggaccctccgaggcaccaggccagtgactcagaaaaatgaagagcttcccaaaccccgaatcagtgattcggaaagtgaggatcccccaaggaaccaggccagtgattcggaaaatgaggagctaccccaaaccccgagtcagtgactctgagagtgaggggncctcagaggggggcctggcagtgactcagaaacggaggatgcgtccggacncaaaccggaagcccgaagtcagatgatgacagcgaacagggaagaataagggagaggataccggaaatgcagaatgaacttccttcccattcagacaggccatattggaccgaaaaaaagttttccc

SEQ ID NO: 258332 - DNA, 1718 bp, Homo Sapiens
  misc_feature (64)..(64): n is a, c, g, or t
  misc_feature (127)..(136): n is a, c, g, or t
tcatcacactccccaagggagaaaatggttatcaacctcctcccaagggcaattggcaaggttnttttttgcaagtgccctccccagtgtctccaaccaggcttgcaaaacacattaaatgggaaannnnnnnnnntaactgggatcaaagcccccaaagcccccagctggtggctcaccgcttaacactcagagttgagagattgctcctgtgaggggcaacaagagcatccaggccctcatggggcacaggcttcagcctggtgctctcagctaatgtcggattcggggctcatatgtggccatgctcattacccggttagtgggttacacatgccccgaccaacaggacacaatcggcgttaggttcccataaaggtgcaaaggcacggccctaggaaggaaccacatcagctccatgaaggagtgggtgggaaacctaagcacagcaggcgccaaacttccaaccatcctatagcgtccccccaggggccagataggccctgtccagagccagatcaccttccacacacaacctcagggtgttggttattctttccttctgagaagagatattccttcatcgatggttttcagaggttggaagagacattgacagacgaagaagtgtaggaggtaacacgatgacgtgccaagaactccttgctgaccaggccatgcatagccaggatcttgaggaatccatggcgaaaattttggccgatgaaggcgtagatgatggggttgaggcagctatggagaaatcccagaatctcagtggcatccagggcccggccgatgttgttgcggcgctcacaggtctcctggatcacctgggtcctcatgagggtgtctgccagcaggaccaggtgtagggcagccagcaaagcaggaagatgaggacgacagcaaagatgaccctcatggctcggtgcttctgccccatgtgggccttaaacagtgtacgcagggtgaatccatagcagaacagcatgacaaacagcggcacgatgaagccaaaggtgtgaggcaggatccgcaacaccatccgccattttgctgtgtcatttcccaggacctcatagcaaactggactggaattgtttggatggtaagcctggcggaaaaggaagaagggcagggacagattcatagacagtccccagcagccaagacaaacaaacttgaccaagtgacgcttctgggtcagtgtgcgtgtggcatggacaatggccaggtaacggtccacactgatgcaggccaacagcaggatgccactgtagaagttgacttccttcaggagtgagaccaccttgcacaggaatgtgccaaaaatccagccattcaccttggaggcggcccagatgggcaaggtcagggcaaagagtaggtcggccaaggccaggttcagcaggtagacatcagtgacggagcggccgaccctactgtataagatgaccagcatcaccagggagtttcccagcaggctcagcaggaacactagggcataggcgatgatcacaacatacttgttgagtgtctcagtttctagcatacaggggctgtaatcttcatctgcaggtggcatgccagtgaaatttagatcatcaaaatcccacatctgtggatctgtaatatttgacatgtcctcttcagtttcagcaatggtttgatctaactgaagcaccggccaggtgtgtccaacagtaggagctgca

SEQ ID NO: 258333 - DNA, 2944 bp, Homo Sapiens
  misc_feature (361)..(413): n is a, c, g, or t
  misc_feature (2680)..(2802): n is a, c, g, or t
  misc_feature (2804)..(2810): n is a, c, g, or t
  misc_feature (2818)..(2832): n is a, c, g, or t
  misc_feature (2857)..(2866): n is a, c, g, or t
ctggcgtccatcttcgacaagaaccacgagcgattccgcatcgtcagttggaagctggacgagctgcactgccagttcctggtgccgcagcagggcagcccgcactcgctgccgccgccactcacgctccactgcaacatcacggaatcctatccatcttcttcaccgatatggtttgtggattctgaagacccaaatctgacatcagttctggaacgtctagaagatactaagaacaacaatttgcttcgtcagcaattgaagtggttgatatgtgaactctgcagtttatataaccttcctaagcacctggatgttgagatgctagatcaaccactacccacgggtcagaatgggacannnnnnnnnnnnnnnnnnnnnnnnnnnnnnnnnnnnnnnnnnnnnnnnnnnnntatagaagacttagatcactatgagatgaaggaagaagagcctattagtgggaaaaagtcagaggatgaaggaattgaaaaagaaaatttggcaatattagagaaaattaggaagactcaaaggcaagaccatttaaatggtgcagtgtctgggtcagtgcaagcttcagatagacttatgaaagagctcagggacatatacagatcacagagttataaaacagggatttattcagtggaactcataaatgacagtttatatgactggcatgttaaactgcagaaggttgaccctgatagtcctttgcacagtgatcttcagatcttaaaagaaaaagaaggcatagaatatattttgcttaacttctcttttaaggataactttccatttgatcctccatttgttcgagtggtgttacctgttctctcaggagggtatgtattgggtggaggagcattatgtatggaacttttcacaaaacagggctggagcagtgcctactcaatagaatcggtcatcatgcaaataaatgccaccttagtcaaaggcaaagccagagtgcagtttggagcaaataagaatcaatataatctagcaagagcccaacaatcctataattccattgtacagatacatgagaaaaatggctggtacacccctccaaaggaagatggctaaatatgttgactgttgtatgtttggactaatgttgctttaaagaaaatctttccaacatgcagacaaaagctttgagtgcccctattacagcagtaccgaagatgttagttaatagatattttagtggataatctgtcatctgacatccagtataagttacagccttcgcattttgctcattttagatatcttggactgagcagtggggcctttactgtatttttcctgataaatacacatactggccactccttatctctttttcttgaaaagtgaactttttaaagcagccaagtcaacatcaggctactgaagttgaggctttagggtaactttcctatattgagcccatgggttaacaaggatttgcaatatatttgttccatttacagccaatacaggtttaatcgatgttcaatattggtttaggaaatttaaggccttctaaatcataatagctctttcatgtctaaaaccattttatgatattgccaaaatgtgataggaaacctactcattaaattgttaaactttttaatgactatgtgaagatatgaattgtttcctgaagataatactcttaattgagttgtattgtacttcttaggcaaagcagtgtaaaactgtatcaattaaggcttgtgagtagtgatttccactggggcatcagagtcttggctgggctgaatctgctgcttgttggttcagtgtttcttatgaacaagagccacagtacagagcttcaagttatttaaaatactaagtcatcttacgtttccattttattaacgggatgttgcaatcgtttgtaaactaataaacttataaagtgattggcacaaagactccttgagcaaaagctgtgcagttaagtacaaaaagatacttaatttggagacttcttacagtaatttttgccatgtcaaaacaatggcttttacattgaaagattaatagaaactctacatatgttaatttttttatagaacctgactcaaatcaaggtactctccattttattgccttacctgaatcagtcctttttggttggtaatagatttttttatacacccacgtttgatttaaaagtaaattctagttcttaagcacttttaacaagaaatccagaagcacatttttctgcacaaacaagttacaaagttcaaaagtgtttcttgtgcattagctttgagattcagtttttaactttgtaaaccacatctgagagacttgtcatttctacattgtgtgtgtttaatttcttttgattccattttggttaagagagcagtaaatagattttctggtattcttgttcacttgattacatttgtataaagttctgattgccagttgctcagataacaagtgacaaggcagaattctttaaatcagtaaagttccttaagcctaaggctaaatcttgaatacattgttgaattctttaatatcctgatggcaagcagactgatagctgcacatttggcatgctttgtttaatggattttatttttaattgcagatttatttggcaatgtacagtaaattttgtaaacttgcatcaagtttatgaataaagaaccatttnnnnnnnnnnnnnnnnnnnnnnnnnnnnnnnnnnnnnnnnnnnnnnnnnnnnnnnnnnnnnnnnnnnnnnnnnnnnnnnnnnnnnnnnnnnnnnnnnnnnnnnnnnnnnnnnnnnnnnnnnnnannnnnnngggggggnnnnnnnnnnnnnnnaaaaaactttttaaacccttttttnnnnnnnnnncccccaagggagaaggaacccgggcttaatttttccccaaaaaaaccggggccagaacaagggggttgggtccccccc

SEQ ID NO: 258334 - DNA, 454 bp, Homo Sapiens
cgcatgttcagccaatcgtgtttaaggagaaactaacaatgaaaacgggcttgttgatggaggaaaagttggaatgcagcctctggtgctgtttgagcgatccctctatcccgggtcgctgctgtgttctggaaaggcacattgtaccctggatgcagcagcttcatcagcaatggaagtggctgatatgtggactctgcagattatataaccttcctaagcacccgaatgttgagatgccagatcaaccactacccatgggtcagaatgggacaacagaagaagtgacttcaaaagaagaggaagaagaagagatggatgaagatatagaagacttagatcactgtgagatgaaagaagagcctactagtgagaagaagttggaggatgaaggaactgaaaaagaaaactgggcaatattagagaaaattaggaagactgaaaggcaaggcca

SEQ ID NO: 258335 - DNA, 1856 bp, Homo Sapiens
  misc_feature (893)..(954): n is a, c, g, or t
  misc_feature (1215)..(1215): n is a, c, g, or t
  misc_feature (1219)..(1219): n is a, c, g, or t
  misc_feature (1291)..(1291): n is a, c, g, or t
  misc_feature (1300)..(1300): n is a, c, g, or t
  misc_feature (1304)..(1304): n is a, c, g, or t
  misc_feature (1341)..(1341): n is a, c, g, or t
  misc_feature (1343)..(1343): n is a, c, g, or t
  misc_feature (1356)..(1356): n is a, c, g, or t
  misc_feature (1362)..(1362): n is a, c, g, or t
  misc_feature (1416)..(1416): n is a, c, g, or t
  misc_feature (1424)..(1455): n is a, c, g, or t
  misc_feature (1465)..(1465): n is a, c, g, or t
  misc_feature (1468)..(1468): n is a, c, g, or t
  misc_feature (1483)..(1483): n is a, c, g, or t
  misc_feature (1485)..(1485): n is a, c, g, or t
  misc_feature (1493)..(1494): n is a, c, g, or t
  misc_feature (1511)..(1512): n is a, c, g, or t
  misc_feature (1519)..(1519): n is a, c, g, or t
  misc_feature (1530)..(1530): n is a, c, g, or t
  misc_feature (1539)..(1542): n is a, c, g, or t
  misc_feature (1550)..(1550): n is a, c, g, or t
  misc_feature (1552)..(1554): n is a, c, g, or t
  misc_feature (1556)..(1558): n is a, c, g, or t
  misc_feature (1562)..(1562): n is a, c, g, or t
  misc_feature (1568)..(1568): n is a, c, g, or t
  misc_feature (1570)..(1570): n is a, c, g, or t
  misc_feature (1599)..(1599): n is a, c, g, or t
  misc_feature (1603)..(1603): n is a, c, g, or t
  misc_feature (1607)..(1609): n is a, c, g, or t
  misc_feature (1612)..(1613): n is a, c, g, or t
  misc_feature (1615)..(1615): n is a, c, g, or t
  misc_feature (1617)..(1617): n is a, c, g, or t
  misc_feature (1624)..(1624): n is a, c, g, or t
  misc_feature (1637)..(1637): n is a, c, g, or t
  misc_feature (1704)..(1704): n is a, c, g, or t
ggcggtcagacttcatcaatataggtgggtttgatctggacatcaaaggctggggcggagaggatgtgcacctttatcgcaagtatctccacagcaacctcatagtggtacggacgcctgtgcgaggactcttccacctctggcatgagaagcgctgcatggacgagctgacccccgagcagtacaagatgtgcatgcagtccaaggccatgaacgaggcatcccacggccagctgggcatgctggtgttcaggcacgagatagaggctcaccttcgcaaacagaaacagaagacaagtagcaaaaaaacatgaactcccagagaaggattgtgggagacactttttctttccttttgcaattactgaaagtggctgcaacagagaaaagacttccataaaggacgacaaaagaattggactgatgggtcagagatgagaaagcctccgatttctctctgttgggctttttacaacagaaatcaaaatctccgctttgcctgcaaaagtaacccagttgcaccctgtgaagtgtctgacaaaggcagaatgcttgtgagattataagcctaatggtgtggaggttttgatggtgtttacaatacactgagacctgttgttttgtgtgctcattgaaatattcatgatttaagagcagttttgtaaaaaattcattagcatgaaaggcaagcatatttctcctcatatgaatgagcctatcagcagggctctagtttctaggaatgctaaaatatcagaaggcaggagaggagataggcttattatgatactagtgagtacattaagtaaaataaaatggaccagaaaagaaaagaaaccataaatatcgtgtcatattttccccaagattaaccaaaaataatctgcttatcnnnnnnnnnnnnnnnnnnnnnnnnnnnnnnnnnnnnnnnnnnnnnnnnnnnnnnnnnnnnnnccttgtgagttatagtctgcttatttaattaccactttgcaagccttacaagagagcacaagttggcctacatttttatattttttaagaagatactttgagatgcattatgagaactttcagttcaaagcatcaaattgatgccatatccaaggacatgccaaatgctgattctgtcaggcactgaatgtcaggcattgagacatagggaaggaatggtttgtactaatacagacgtacagatactttctctgaagagtntttncgaagaggagcaactgaacactggaggaaaagaaaatgacactttctgctttacagaaaaggaaactcattnagactggtnatancgtgatgtacctaaaagtcagaaaccacattttctcntnagaagtagggacngctttnttacctgtttaaataaaccaaagtataccgtgtgaaccaaacaatctcttttcnaaaacagnnnnnnnnnnnnnnnnnnnnnnnnnnnnnnnngaagaaatgnagnaaaatatatataaananatatattnngaaagataaaaccatanncaagaanatagtaggganggaagtttnnnntaaatgtnannnannnaagncaagangnaagtaactgaattattttttaaattaagnagtnctannngannananaagatgnttctgaaaattgnattttattaccatttcaaactattttttaaaaataaatacagttaacatagagtggtttcttcattnatgtgaaaattattagccagcaccagatgcatgagctaattatctctttgagtccttgcttctgtttgctcacagtaaactcattgtttaaaagcttcaagaacattcaagctgttggtgtgttaaaaaatgcattgtattgatttgtactg

SEQ ID NO: 258336 - DNA, 1347 bp, Homo Sapiens
  misc_feature (786)..(786): n is a, c, g, or t
  misc_feature (911)..(911): n is a, c, g, or t
  misc_feature (915)..(915): n is a, c, g, or t
  misc_feature (1018)..(1018): n is a, c, g, or t
  misc_feature (1049)..(1049): n is a, c, g, or t
  misc_feature (1123)..(1123): n is a, c, g, or t
ggacacagtgtacgtcaccgtgtcgtgctgcgctggatctgcttagctccgtacattgatctcagacgcagtgggggatgggctgccccttctttggtcagaaggaaagtgtcaaaatacccccgtgactgacacagcagggtcatgttctctcctgaggccactgtggggcccggctgtgctgacagggagacggtgtcatagatctgtcctgtgatcaggatgtccagggggtcactgggggccgaccactcggaggagaggttgtgtgcaccgtagcacctgtactggcccccgtaggagcggctcacagggcccagggtgaagttggcctgggagagcccagcctggggctgctggccagggcgctggaggaagtcacgttccccctccttatacagaacaaatctgtcgtagccgacatcagagccacactggagggtcaggctctgcccaggggccaggacagggccctgcagggtcaggagggagggcttcctagacacgcctgagggcagaatctccagggggtcactgtggtgggaccacacccaggggtgtttgtataatagtaatagcatgtgaacctccacctgtggctgggggtcacggggcccacagggaacagggcctggaaccccccactgtggagctgctgtgagtccagggtccgggggagctggtgttctccttccttcatcagaacaaaatggtgatatcccttctgtgagccacatcggagggtcatattcccccctgaggccaccacagggctgggcagggctnagagggtgggtttgttgtagaatcctgtcatcaccagctccagggggtcgctgggctctgaccagcctgcagagctgtaatagtggcagcggtatctccctgcatggtgctgtgtcatggatggnatgnagaatctggccttgttcttgggttccagtgggttatttctgtcccagggctctgggcttccctctttatccagttggtactcctgggcctccaggctcccctnacaccagatggtcacggggctcccccagctnatcacagagcctggctcagcccagagggtgggtttggggaagggccctgcctgcatgcgggtcctggggcccanactcagccctggaagagagttccctgtgaggcatttgccctgaagcctgagcaggtccccgcccgggtgcctcctgagcttttgaggtctcctgatggaccagggcttgtgtgtggggtggggttcctccaagactcggatctccccctcgcccatcttgaaatctcaccaaggcagagcagggctgtgagggcgggcgtcatggcgtctcctcccggtgaccc

SEQ ID NO: 258337 - DNA, 929 bp, Homo Sapiens
  misc_feature (182)..(191): n is a, c, g, or t
  misc_feature (339)..(339): n is a, c, g, or t
tctgtttgggaaaagcggagggtctctgtgagcagtggcctcacatgggtcttccggcccccaagattagacccatcatttttgttatataacataccccgtcgaaggttcttttaagaacaagaaaaacggtctcgggccgtctcccccaccccaggagccgtgctcccaaccgggggccnnnnnnnnnnccaagccaggcggggcctgtcggaaatgcagggtttttgccgccaaagctacaggaggtgtcctgtgccccccacagggccacaggtcctgcccccacctggtctcccggggctcagacaccagccgccagcccacgaaggtagtccnccgccaagggcagcacggcccagtcatcggtccgcagggccacaggcactccatctgccagggccgcctccagccgcagcagcagctttgagtccgggggcaggtggattgctacacagtagctggtaggaggctgggccaccaccacaaaaggctccaggtggcgggacaccaagccctccaggccctgtggcccaagtggacaccacacacgactctcagcaccctctggcaggcaggaatcccagagctcctcaaagaagcccagcccggccccctctggaggctgcgggaaaggcagaaagaggtcggcaaagttcacgaacaggggtggcaagtgggcatggcacgtgagaccagtggatgtggtgtaaagggcatggacatccagccgtgcgggggccgggcatcggggctgcagaggcaggagcagagggcgggcagggcggccaggacacaggcagggcacatggacagcctccaggggtgcatacagctggtccttccacacggaagcgcagctccagagagtagatgggctccagcgcctccggctggagcttcaacactgggagtgggccccttacccg

SEQ ID NO: 258338 - DNA, 1353 bp, Homo Sapiens
gggctttggaaggcgcacggggcgaagatggcggcggagcgacaggaggcgctgagggagttcgtggcggtgacgggcgccgaggaggaccgggcccgcttctttctcgagtcggccggctgggacttgcagatcgcgctagcgagcttttatgaggacggaggggatgaagacattgtgaccatttcgcaggcaacccccagttcagtgtccagaggcacagcccccagtgataatagagtgacatccttcagagacctcattcatgaccaagatgaagatgaggaggaagaggaaggccagaggttttatgctgggggctcagagagaagtggacagcagattgttggccctcccaggaagaaaagtcccaacgagctggtggatgatctctttaaaggtgccaaagagcatggagctgtagctgtggagcgagtgaccaagagccctggagagaccagtaaaccgagaccatttgcaggaggtggctaccgccttggggcagcaccagaggaagagtctgcctatgtggcaggagaaaagaggcagcattccagccaagatgttcatgtagtattgaaactctggaagagtggattcagcctggataatggagaactcagaagctaccaagacccatccaatgcccagtttctggagtctatccgcagaggggaggtgccagcagagcttcggaggctagctcacggtggacaggtgaacttggatatggaggaccatcgggacgaggactttgtgaagcccaaaggagccttcaaagccttcactggcgagggtcagaaactgggcagcactgccccccaggtgttgagtaccagctctccagcccaacaggcagaaaatgaagccaaagccagctcttccatcttaatcgacgaatcagagcctaccacaaacatccaaattcggcttgcagacggcgggaggctggtgcagaaatttaaccacagccacaggatcagcgacatccgactcttcatcgtggatgcccggccagccatggctgccaccagctttatcctcatgactactttcccgaacaaagagctggctgatgagagccagaccctgaaggaagccaacctgctcaatgctgtcatcgtgcagcggttaacataaccgcccagccagctgcctggcctccctcctgtgtttccccatgcccagtggccatgccccatggggatcgcccctcctgcccccttgtgcacacccagcagtccagtgcaacgtctcctccatagctctgggttcttagatcttggttggacgtttgttttctccttagttgcatttcctgggtttttgtgatgatcaatggactttaatgaa

SEQ ID NO: 258339 - DNA, 2082 bp, Homo Sapiens
  misc_feature (23)..(23): n is a, c, g, or t
  misc_feature (60)..(60): n is a, c, g, or t
  misc_feature (84)..(84): n is a, c, g, or t
  misc_feature (492)..(492): n is a, c, g, or t
  misc_feature (568)..(568): n is a, c, g, or t
  misc_feature (574)..(574): n is a, c, g, or t
  misc_feature (828)..(828): n is a, c, g, or t
  misc_feature (971)..(971): n is a, c, g, or t
  misc_feature (1968)..(1982): n is a, c, g, or t
atcataaacccgaatcacatttnaaatgtctattgtcttggagacaataagctgttttanaggggaatgggtgggtggaaaaangggagcagggcttctgaagctgactaatacctgaagaatacggcaacgtgagaaagcactgacccggctgctttggtaaatggaagaaaatcatctcagggttgctaggaacatgggtaagaccagactgtagaaagatccttcaaaacaaaacagtttgccattcctttaacaattactaacgtcaagaacttggaattgtgccacggaagacagagcttaagatggggtggagcccttacctccactgctcccctgggcctaaagcctggtttccttatgggtgttggggccacacaaacaagtctctgttttcaacacagtgacagtggggagtgggtcatgtcccagatgatttggaacaaggccagggtcctatgaccctgctggcatgatgggtgaggtctntaaggaaatgggcagagggtcaacttgtctcttctttcaccgaaaagactgcgaggtctatagttcacggtcaccntagggntgctgccatctttcatgcccagagtctaatcctgcatttcttttatgcatattccctatcctgccaataccacagatacctttagggggtagggtgggggttcagaagaatccttcaccagctatgaggcaagtacagctaggtgggatcctggaggcttgagggagcacactgtggtggctggtctggatggtagagcgtttggtgaagcagggcacgagtcacagggaggtcgtcaggatacacgcccagcntcctgcagcaagctgtggtactccggcttggtctccagcagtttcaccagattggtagactccatccgctccagctgcacctcccagtacacatagatcttctggttgaaagtgacatatacgaggcaggggctgttgcggcncctctttgcaggcgtacaggcctgcacagaaggcacggatattttcatccacttggaagcggacgacggtgcggttgtgatcaatgatatatgtctgtccatcccaggcgcatgcaactacctcctcatgcccgttgccggtgacatccagtttctccagggcaaagagctggtgatccacctgcactgaccacagcagcttgtctgcttcttccatttcttccatgagcttcagtgtcccatccagggtgcacagggcaaagaggccagagccactactctcagtgccgtggccttgtttgatgttgccaattaggtgagtggagacattcttgttgtggatacggccagatgtctggtgcagcaccacgtctcgggcagctggggtctccctactaccatccgtgggcccttcagaggcaggaggggacccagtgtcctttttccaggtacacagtagaattgcatacgcacaacctggctgagacaccatcagttcaggaagacccagtggccccagagtcactgagaggctgtccacctgaccctccagcatccatttcttgagggacaccagctgccctgtcagatgttcaggaccctcacctagctcctcccagcggaaagctcgcaccacacggtctgtgtagcccaccaccagctcacgacacccatctccatctgtgggcatgaaagacaagatgggctctggagtcccacgagcagcccccgctcctctgctaacagtggcaccttccagccagtgcggcttcacacccgatctgcggtgctactcacttcaccctcagtctgcccccgcccctgcctgtgtttgcggcatcttgcccgtccatttggtccatctgttccgcagctcctatccgctctctgccttcatattacttctcaaacatgcaactcaaagtgtcccaattcatcccacgtatctcccaccacctacaagccccctatctggatggttcccttgcttgccacnnnnnnnnnnnnnnncaccaaatgttaccttctcagtgaggatttccctaacatctccatttaaaattgctacctctacctcgacactctagctctttctgtgaattattttctc

SEQ ID NO: 258340 - DNA, 1776 bp, Homo Sapiens
  misc_feature (197)..(197): n is a, c, g, or t
  misc_feature (201)..(201): n is a, c, g, or t
  misc_feature (244)..(244): n is a, c, g, or t
  misc_feature (1232)..(1232): n is a, c, g, or t
  misc_feature (1361)..(1361): n is a, c, g, or t
tttgcagagtcctgagaaaatactaggcttgccagttggagaacgggaggcagggcattccaagttgaagaaacaccacatacaaaggcagagtcctgaaaacataaggtctctgctgctgatgaagctgtgaccaaacgcacccaacccttggcagccatctgtccctgcagccatagcccacattcccatgaccncccnctgcttgttttgggaccatgtctgtacagcctctaggccccanccccggaggtgaatgccatgccatgattctggtgtgctccatggcatccccagcctagctcccaatcccactttggcacgatgttagccaacagctcctcaaccaacagttctgttctcccgtgtcctgactaccgacctacccaccgcctgcacttggtggtctacagcttggtgctggctgccgggctccccctcaacgcgctaccctctgggtcttcctgcgcgcgctgcgtgcactcggtggtgagcgtgtacatgtgtaactggcggccagcgacctgctcttcaccctctcgctgcccgttcgtctctcctactacgcactgcaccactggcccttccccgacctcctgtgccagacgacgggcgccatcttccagatgaacatgtacggcagctgcatcttcctgatgctcatcaacgtggaccgctacgccgccatcgtgcacccgctgcgactgcgccacctgcggcggccccgcgtggcgcggctgctctgcctgggcgtgtgggcgctcatcctgttgcttgccgtgcccgccgcccgcgtgcacaggccctcgcgttgccgctaccgggacctcgaggtgcgcctatgcttcgagagcttcagcgacgagctgtggaaaggcaggctgctgcccctcgtgctgctggccgaggcgctgggcttcctgctgcccctggcggcggtggtctactcgtcgggccgagtcttctggacgctggcgcgccccgacgccacgcagagccagcggcggcggaagaccgtgcgcctcctgctggctaacctcgtcatcttcctgctgtgcttcgtgccctacaacagcacgctggcggtctacgggctgctgcggagcaagctggtggcggccagcgtgcctgcccgcgatcgcgtgcgcggggtgctgatggtgatggtgctgctggccggcgccaactgcgtgctggacccgctggtgtactactttagcgccgagggcttncgcaacaccctgcgcggcctgggcactccgcaccgggccaggacctcggccaccaacgggacgcgggcggcgctcgcgcaaatccgaaaggtccgccgttaccaccgacgccaccaggccggatgcccncagtcagggggctggttcgaccttccgacttccactcttttgtttttctttacacaggaggccccgggattccggcctttgaacacacatgcccatggggctggccgtgccccgactccaaagccttttgtttttgggaggcttccagggggtcccacaaaaaagggggctgggcccttggacctttggggggcaatccagtttacaccccaaaaaagccaagtgtggaaccaggccccaggaaggcaggcttctgaaaggctcctttaactgggggcccgcgggcaccctttccagggggaaggttccaaaagccacccctcacgggcaaaagggacaaagcctttgtgggcgggcattaactctataaactgttataggacaaaaaggcattttggttaaaccgccagggccg

SEQ ID NO: 258341 - DNA, 1816 bp, Homo Sapiens
  misc_feature (97)..(97): n is a, c, g, or t
  misc_feature (122)..(122): n is a, c, g, or t
  misc_feature (247)..(247): n is a, c, g, or t
  misc_feature (910)..(910): n is a, c, g, or t
  misc_feature (932)..(945): n is a, c, g, or t
tcttctgccgttggactttgccaataaaaactaacctttgattttccccaaaaaaacctaatgtacatcccttttctacccccaacctgccgcggtntgattcttagagtctgtcagagagnagatatcctgagcctatcatgtgacaatgataccttattgatatgataatgatatgggtattggagacaccaactcttttataagtctttgaaatccagggggttgtgaggcctcacccctcacnccgcctgagcttggagcttggcgtggaggagtgctgcttcggtctacgtgtgtacacggcactccatgtgcctgtggttgtgcttgcgtcagcctgggagtgcgcaggcatcagtggtgcttgggagcgaggcccctcagtctgcactgggatcatctgcactgcctataaacaaggcagcctctcttagctccagtttcctcatctgcaaagtaggaaagtaggaataataacaggagataactcatccagcagcacgaagtgcgtataaatgtcccggcacggagtctgacacatcctaagtgctggatccgtgctgggcatgtttatataattgcacatgagactgtggttcccggagcacgtaacttgagcatatgtttatgtgtgtgtatacggcaggtcctgggttaaagggacaggagccactgtcattattccaattcagtcactgaggaggtgaggctgagaggcattctcatgtctgaagaggatgggcttgcctgacccccgcccccgtgcccagcccagcccagcagcccaagcagttctccaggactcaggtttcagaccttcaacactggccttgggagacaaacagcggtgcagcccttgcttgcaagccattccacattagacttcggattgatttatggcaggatnccctgctgtgcgagaactgcannnnnnnnnnnnnncggctatttcttgctgctaactcaggcaggatgtgtctatatcctgtctcagtttatgtagctgctcatcagagccagaggttagagcggagaggacccacttccgccaggccggcctgctctgctcagctcagctgggctaggccccaatgccacagttactgcgcgtgagtcatgcacagcaatccattgccttgcccttggatggaaggggtcaaggctcagtgagaagacggccaggtttggcagctttatatagaattcaccgcctctggcagaagcagaggattgcattaagtgccaaatgaaattccacctcagccattgctcaattcctccagatgtcactggcactgggagtcacatgatgctggtggtcagcagctggacccttccaagggtccccgtggttgggcaagtatttctgggggacttgcagagctccctggggagcaaagggttgtgaagtacaaggcattctgcgcttgtggtgggaacaagtgaacccctctgcagtgagtaggaagaggtcccctcaacagaggtgagaggttgggccaagtcaagtcagtttgcctcttcaggtggcagacctgtatgtacatctatgcctcaagtgcctgtctgaggccacagccaaaacatcttccagtaactgagcatacccagtgggccaacaagcacgctctaaatacaaaaccaaacaaacagtaaagttaacagtgaatgaagagttaaaaataggagaaagacaccttctccctacctcaatggcaattactttatttattgaggataatccttctagaagtaaatttgctgatacaaatatttcttattttacataataaaaatgcattttatatattaa

SEQ ID NO: 258342 - DNA, 2211 bp, Homo Sapiens
  misc_feature (479)..(479): n is a, c, g, or t
  misc_feature (483)..(483): n is a, c, g, or t
  misc_feature (591)..(591): n is a, c, g, or t
  misc_feature (668)..(668): n is a, c, g, or t
  misc_feature (2185)..(2185): n is a, c, g, or t
gggctgctctcccccagcccccgccggctccccccgggctgggctgcagccgctcagggccacgatccccttccagctgcagcagccgcaccagcgccgggacgggggtggccgtgcagccagcgtcccatgctcggtggccccagaaaagtcagtgtgtaggcctcagccacttcaggtccggcgtacattctccctggacaccatcctcagctcctaccttctgggccagtggccacgagatgctgatggggccttcacctgctgcaccaatgacaaggccacccagacgcccctgtcctggcaagagctagaaggtgagcgtgccagttcctgtgcacacaagcgctcagcatcctggggcagcacagaccaccgaaaagagatttccaagttgaagcaacaactgcagaggacgaagctgagccgcagtgggaaagagaaggagcgaggttcaccactcctaggggaccacgcancggnggagcactgagggcgtcccctcccagcttcccctcagggtcccctgtcttgcgactcagcccctgcctgcacaggagcctgaaagggctcaaacaaagagctggaganaggtatttgtaaaggagcagggagaaggaggagctgctaaggatccttgatatccctgatgggcaccgggccccagnctcctcccaagagtggcagctgtgatcatcccctcctcctcctggagcctggcaaccttgccagctctccttccatgtccttggcatctccccagccttgtggcctggccagtcatgaggaacatcggggtgccgccgaggagctggcatccacccccaacgacaaagcctcctctccaggacacccagcctttcttgaagatggcagcccatctccagtccttgcctttgctgcctcccctcgacctaatcatagctacatcttcaaacgggagcccccagaaggctgtgagaaagtgcgtgtgtttgaagaagccacgtctccagggtcctgaccgggcctttcctgacttcctgtcctgacaaggaacaaagtccatttcaacccgactggctcagccttctgccccgtcaacctgatgaagcccctcttccccggcatgggcttcatcttccgtaactgcccctcaaacccgggatctccccttcccccggccagccccaggccaccacctcggaaggatccggaagcctccaaggcctccccactgccattcgagccatggcagcgcaccccaccatcagaagagcctgtgcttttccagagctccctgatggtctgagggtcccacccctgccccactttaccatagagaccagtgccttggtggcaggtccctccccaggtcccctgagatggggtatggaggggcccttccctctcggccttcgagcactttctttcacttactgtgtcaaagccctgggtcctctttttgatgggcaccggccctctgaacgtgatgggacctgccttctccactagtagctgggcagctcacaattcacacctgtgtacctgccacatccctcacttggtggaaaacacccagaaggtcttgagtcccccacccctgggtgtcagtccaaatgactgtataggaggcccttatttttgtcacagagcaagctggccatgaacgaaggagagaagacgccacagatttccttccctctcctccaggagaccataagatagatcccccatcctctcagccctattcccatgcctccctctcattggaggagctgaccaaagcagccctaacgggccataacacttgaccaattcagctgctggcagagggaggaaacaagtgttttcccaagtggcattttcatctcgctttcaccctgactaaagattgtcttaagtagcagcccagcccgcccagccccaggtgggtagtggggaggagagctggcattcctccaggtggcaaatggcgactctatactctccgcccgccccagggctggatggattagaaaaatgcctatttttcttgtatcgatgtagagactctattttctcccaaagacactatttttgcagctgtttgaagtttgtatattttccgtactgcagagcttacacaaaattgaagaatgttaatgttcgagttttcttatcttgtgtttagaggttgttttttgcagatcttggtgttaatagnccaaataaataaataaatattcccag

SEQ ID NO: 258343 - DNA, 966 bp, Homo Sapiens
attaactagtattaaatgaaaaacagggactgaaatagttctgtattccgtgtttgcaacagccagccaactaagcagaggataaaccgttagcaaatgaatgtaataattactcatttccaagatatctaagcacataagcaaatacaggaacagacttcattctttttcttaacaaaaaagcatcttcagtgtgtgatttaaaagaaagaagattctggtttcctagaaaacaaaattatggcctggggtgattcttattcggaaagtgtgtttacataatgtacagtatatattcagaaagtatttttgcttcaacgtttactttctataatgcagtgctttggtattcctacagcaccccaccttccccaacagatgtacagtgttctgtctccattcgaaatctacaatgtaatatgagtgcattgtatgggtttgaaaccaaaggatgaatgaagcattcagagacttaatatttgaaaaaggaatagtcagtattttatattttattacaggtactgatatttataaatttaataaactgtaccatgctgctgcatgttttcaagtacatgttgaacagtaaggattggggagttgttttttaatggtcacctaaagcagctgctataggaatgttgaactaaaattttgcatctggtcataccttcatgcatttatcatttgcagatatttttcccatcattattaaaaaacaggaacttttaggctctgaagatcatgtggaccagagcaaattaaagttcagtttgtgtcacaattcattgccagacttcattggaatgctttgtttgatgatgtatgttcattctcagctttattttcagatgcttaactgggcaatgaagtctaacttcaggttgaactttctcatgtttaatctcaggctaaatgtaaatgatatttgtaaagtttaataaatcagttacgcattttagttag

SEQ ID NO: 258344 - DNA, 648 bp, Homo Sapiens
  misc_feature (6)..(6): n is a, c, g, or t
  misc_feature (24)..(24): n is a, c, g, or t
  misc_feature (26)..(26): n is a, c, g, or t
  misc_feature (38)..(38): n is a, c, g, or t
  misc_feature (42)..(43): n is a, c, g, or t
  misc_feature (74)..(74): n is a, c, g, or t
  misc_feature (82)..(82): n is a, c, g, or t
  misc_feature (131)..(131): n is a, c, g, or t
  misc_feature (172)..(172): n is a, c, g, or t
  misc_feature (183)..(183): n is a, c, g, or t
gccaanatacgagaagaacaactncnaccagaagcttngggnntttgcgcacgagaagttaaggcacgcagagngcgtgggncgacggcgagtcgtttgagacggcagaccgcgaaaagacacgcccggtntgggagggggcggagccaagggggctggggctagcacgggngtaggaaggcngtctgcaggacctgtccggcaggatctccagagctcggcacaacgaactctgaaggcattggggagcccagcccggcagggaaaaggccagcgtgaaggacctgggctcttggccgtggcatttccgtggacagcccgccgtcagggtggctggggctggcacgggtgtcgaggcaggaaggattgtttctggtgactgcagccgctgccgtcgtgacacagggcttggtggtggtagcatttgggtctgagatcggcccagctctgactgaaggggcttggcttccactcagcatcagcgtggcagtcaccaccccagtgaggacctcgatgtccagctgctgtcaggtctgatagtcctctgctaaaacaacacgatttacataaaaaatcttacacatctgccaccggaaataccatgcacagagtccttaaaaaatagagtgcagtatttaaccatccaaa

SEQ ID NO: 258345 - DNA, 1666 bp, Homo Sapiens
  misc_feature (40)..(40): n is a, c, g, or t
cccctcgccccccctttttcccgtcgtattacccttttcnttccccgcccgggtggcgaattcggcacgaggctgacgggcgtgcggccgctgcgccgcaaactcgtgtgggaggcaccgctccagccgcccgcgggccagcgcaccggtcccccagcggcagccgagcccgcccgcgcgccgttcgtgccctcgtgaggctggcatgcaggatggcaggacagcccggccacatgccccatggagggagttccaacaacctctgccacaccctggggcctgtgcatcctcctgacccacagaggcatcccaacacgctgtcttttcgctgctcgctggcggacttccagatcgaaaagaagataggccgaggacagttcagcgaggtgtacaaggccacctgcctgctggacaggaagacagtggctctgaagaaggtgcagatctttgacatgatggacgccaaggcgaggcaggactgtgtcaaggagatcggcctcttgaagcaactgaaccacccaaatatcatcaagtatttggactcgtttatcgaagacaacgagctgaacattgtgctggagttggctgacgcaggggacctctcgcagatgatcaagtactttaagaagcagaagcggctcatcccggagaggacagtatggaagtactttgtgcagctgtgcagcgccgtggagcacatgcattcacgccgggtgatgcaccgagacatcaagcctgccaacgtgttcatcacagccacgggcgtacgtgaagctcggtgaccttggtctgggccgcttcttcagctctgagaccaccgcagcccactccctagtggggacgccctactacatgttcaccggagaggatccatgagaacggctacaacttcaagtccgacatctggttccttgggctgtcttgctgttacgagatgggcagccctccagagccccttctatggagataagatgaatctcttctccctgtgccagaagatcgagcagtgtgactaccccccactccccggggagcactactccgagaagttacgagaactggtcagcatgtgcatctgccctgacccccaccagagacctgacatcggatacgtgcaccaggtggccaagcagatgcacatctggatgtccagcacctgagcgtggatgcaccgtgccttatcaaagccagcaccactttgccttacttgagtcgtcttctcttcgagtggccacctggtagcctagaacagctaagaccacagggttcagcaggttccccaaaaggctgcccagccttacagcagatgctgaaggcagagcagctgagggaggggcgctggccacatgtcactgatggtcagattccaaagtcctttctttatactgttgtggacaatctcagctgggtcaataagggcaggtggttcagcgagccacggcagccccctgtatctggattgtaatgtgaatctttagggtaattcctccagtgacctgtcaaggcttatgctaacaggagacttgcaggagaccgtgtgatttgtgtagtgagcctttgaaaatggttagtaccgggttcagtttagttcttagtatcttttcaatcaagctgtgtgcttaatttactctgttgtaaagggataaagtggaaatcatttttaaaa

SEQ ID NO: 258346 - DNA, 1126 bp, Homo Sapiens
  misc_feature (7)..(7): n is a, c, g, or t
  misc_feature (18)..(19): n is a, c, g, or t
  misc_feature (25)..(26): n is a, c, g, or t
  misc_feature (36)..(36): n is a, c, g, or t
  misc_feature (40)..(40): n is a, c, g, or t
  misc_feature (49)..(49): n is a, c, g, or t
  misc_feature (54)..(54): n is a, c, g, or t
  misc_feature (62)..(62): n is a, c, g, or t
  misc_feature (71)..(71): n is a, c, g, or t
  misc_feature (77)..(77): n is a, c, g, or t
  misc_feature (90)..(90): n is a, c, g, or t
  misc_feature (124)..(125): n is a, c, g, or t
  misc_feature (135)..(136): n is a, c, g, or t
  misc_feature (139)..(139): n is a, c, g, or t
  misc_feature (150)..(151): n is a, c, g, or t
  misc_feature (181)..(181): n is a, c, g, or t
  misc_feature (216)..(216): n is a, c, g, or t
  misc_feature (242)..(242): n is a, c, g, or t
  misc_feature (245)..(245): n is a, c, g, or t
  misc_feature (890)..(899): n is a, c, g, or t
aaacccngttagtatctnnatctcnnaccttttaancaanttgtaactncgtgntttttttnataaaaacncatgtntaaataaaaaatncctgtatagctgttttaaagaaaatatcaagtgnngaaaaaaagnnctnatctctttatnnacttaccttgtataacattaagaaccctcntagaaactcaagactagtaatatcgacatcatatnttaaactatgctggaattttacaaanaanatatagattagccatattgcataggtgtgtgctctctgtctgtgacactaatgtgacacttgacatgttttcacagtcatagtagggatatccatttatgaaacaagttctcaataaactttccacagcatgggaaataaatttcacttaataaatgtgaagtcagaaaaactatgtatttgtgtggatggtagctgtgcaattaatgctttttatgcagaaaagttgcagtgtttgccactattgctggcactactaattatgaaaatggtttaactggggtggttatagccagccaatcacagtgctcatgttactagcaaataggacctaggaagaatattttggtgtataagtttcactggaatttggtcaggcagtcaacactacagttagtaaacatatttgaaaacaagtatcaagagtatcacaagccatttacagtctgaaataatgcctgtacatatcaccatagcttttcgggttctgttttttcagacatcacaaattgtcaaagaacaaggatctgcactttttaagtataatttctgcccttaattattattgtagcttctaatttaccagcaacagtcaaagttctcagtaggctgctgcaataagggaggagggggaagagggagtgannnnnnnnnnaaaggctttctgtccaaagatgaacttttatcgattctttcaattattgccacaattgaaaaggtgtatgtccaattatttttcatggttctgtttttgcttactgtcataggatttcatcccatctcatttgagttgcaatttcaaaaagcaaagccttgctcttttctgactgaattcaacatgcataaagaattttatggcttggatcctatggctcaaaaagg

SEQ ID NO: 258347 - DNA, 965 bp, Homo Sapiens
  misc_feature (24)..(24): n is a, c, g, or t
  misc_feature (39)..(39): n is a, c, g, or t
  misc_feature (51)..(51): n is a, c, g, or t
  misc_feature (71)..(71): n is a, c, g, or t
  misc_feature (82)..(82): n is a, c, g, or t
  misc_feature (119)..(119): n is a, c, g, or t
  misc_feature (132)..(132): n is a, c, g, or t
  misc_feature (137)..(137): n is a, c, g, or t
  misc_feature (146)..(146): n is a, c, g, or t
  misc_feature (150)..(150): n is a, c, g, or t
  misc_feature (152)..(152): n is a, c, g, or t
  misc_feature (155)..(155): n is a, c, g, or t
  misc_feature (167)..(167): n is a, c, g, or t
  misc_feature (171)..(171): n is a, c, g, or t
  misc_feature (181)..(181): n is a, c, g, or t
  misc_feature (192)..(192): n is a, c, g, or t
  misc_feature (196)..(196): n is a, c, g, or t
  misc_feature (198)..(198): n is a, c, g, or t
  misc_feature (204)..(204): n is a, c, g, or t
  misc_feature (216)..(216): n is a, c, g, or t
  misc_feature (222)..(222): n is a, c, g, or t
  misc_feature (228)..(228): n is a, c, g, or t
  misc_feature (235)..(235): n is a, c, g, or t
  misc_feature (240)..(240): n is a, c, g, or t
  misc_feature (251)..(251): n is a, c, g, or t
  misc_feature (254)..(254): n is a, c, g, or t
  misc_feature (256)..(256): n is a, c, g, or t
  misc_feature (265)..(265): n is a, c, g, or t
  misc_feature (289)..(289): n is a, c, g, or t
  misc_feature (292)..(292): n is a, c, g, or t
  misc_feature (300)..(301): n is a, c, g, or t
  misc_feature (315)..(315): n is a, c, g, or t
  misc_feature (321)..(321): n is a, c, g, or t
  misc_feature (335)..(335): n is a, c, g, or t
  misc_feature (338)..(340): n is a, c, g, or t
  misc_feature (343)..(345): n is a, c, g, or t
  misc_feature (643)..(644): n is a, c, g, or t
  misc_feature (661)..(661): n is a, c, g, or t
  misc_feature (664)..(664): n is a, c, g, or t
  misc_feature (672)..(672): n is a, c, g, or t
  misc_feature (675)..(675): n is a, c, g, or t
  misc_feature (682)..(682): n is a, c, g, or t
  misc_feature (688)..(688): n is a, c, g, or t
  misc_feature (691)..(691): n is a, c, g, or t
  misc_feature (694)..(694): n is a, c, g, or t
  misc_feature (696)..(696): n is a, c, g, or t
  misc_feature (703)..(703): n is a, c, g, or t
  misc_feature (705)..(706): n is a, c, g, or t
  misc_feature (719)..(719): n is a, c, g, or t
  misc_feature (729)..(729): n is a, c, g, or t
  misc_feature (732)..(732): n is a, c, g, or t
  misc_feature (739)..(739): n is a, c, g, or t
  misc_feature (745)..(745): n is a, c, g, or t
  misc_feature (752)..(752): n is a, c, g, or t
  misc_feature (757)..(759): n is a, c, g, or t
  misc_feature (772)..(772): n is a, c, g, or t
  misc_feature (794)..(795): n is a, c, g, or t
  misc_feature (798)..(798): n is a, c, g, or t
  misc_feature (804)..(804): n is a, c, g, or t
  misc_feature (817)..(817): n is a, c, g, or t
  misc_feature (820)..(820): n is a, c, g, or t
  misc_feature (888)..(889): n is a, c, g, or t
  misc_feature (897)..(897): n is a, c, g, or t
  misc_feature (899)..(899): n is a, c, g, or t
  misc_feature (912)..(912): n is a, c, g, or t
  misc_feature (915)..(915): n is a, c, g, or t
  misc_feature (923)..(923): n is a, c, g, or t
  misc_feature (935)..(935): n is a, c, g, or t
  misc_feature (945)..(945): n is a, c, g, or t
  misc_feature (947)..(947): n is a, c, g, or t
  misc_feature (949)..(950): n is a, c, g, or t
  misc_feature (952)..(952): n is a, c, g, or t
  misc_feature (957)..(957): n is a, c, g, or t
  misc_feature (962)..(962): n is a, c, g, or t
gtaccggtccggaattcccgggancgtcaccgctgcggntgcctcagctantgcagcagtcgccgcggaantcggcgagtanaaacgctgaggcgggcgcgggcacgggtggggcaaangttcaggccaatntgcanaaaggaaanaaananganaaaatttaaaantaancttcaaaaantgtaaaaagcnaaanangaagcngaattcttcgcnaacgangggganttttcangaaanaatgaaggaanttnantctctgcantaaaaaaaggttttgaaaatccanaanaaaagtannagaagcttaaaaancaatcnaaggaatttttgcnaannnaannnggcctttgcaattttaagtaagaatacacagaatcaaagtatataacgaagtcatttaacttctatgctttcccgaaacccttcaatagatcctcaccagatgtcaaatttgtttgtcagagctccagcattgactttatagcaagccagggatttgattttaataaagtttttcgaaatggaattccatatttaaatcaggaagaagaaagacagttaagagagcagtatgatgaaaaacgttcacaggcgaatggtgcaggagctctgtcctatgtatctcctaacacttcaaaanntcctgtcacgattcctnagnatcaaaanaantttattnaccaantgntananaaaatanannatttattacaaantgaagaaaanaanaacttgnatttanagccatntaccnnnttccaaagaaaantaatttatcagactttgagctnnaantatccnaaagccattcatnttnagactttagaaactgaaaagaaggagcgatatatagttatcagcaaagtagatgagaagaacgcaaannagagagcncngaaacatgccaanaanaggaggantgaatgatgctntgggatttcnananncntcacncattncta

SEQ ID NO: 258348 - DNA, 1041 bp, Homo Sapiens
  misc_feature (958)..(958): n is a, c, g, or t
  misc_feature (983)..(983): n is a, c, g, or t
  misc_feature (991)..(991): n is a, c, g, or t
  misc_feature (1011)..(1011): n is a, c, g, or t
  misc_feature (1014)..(1014): n is a, c, g, or t
  misc_feature (1019)..(1019): n is a, c, g, or t
gcacgagacaccctctccgcgatgactgtgagtggtccagggacccccgagccccggccggccacccccggggccagctcagtggagcagctgcggaaggagggcaatgagctgttcaaatgtggagactacgggggcgccctggcggcctacactcaggccctgggtctggacgcgacgccccaggaccaggccgttctgcaccggaaccgggccgcctgccacctcaagctggaagattacgacaaagcagaaacagaggcatccaaagccattgaaaaggatggtggggatgtcaaagcactctaccggcggagccaagccctagagaagctgggccgcctggaccaggctgtccttgacctgcagagatgtgtgagcttggagcccaagaacaaagttttccaggaggccttgcggaacatcgggggccagattcaggagaaggtgcgatacatgtcctcgacggatgccaaagtggaacagatgtttcagatactgttggacccagaagagaagggcactgagaaaaagcaaaaggcttctcagaacctggtggtgctggccagggaggatgctggagcggagaagatcttccggagtaatggggttcagctcttgcaacgtttactggacatgggagagactgacctcatgctggcggctctgcgtacgctggttggcatttgctctgagcatcagtcacggacagtggcaaccctgagcatactgggaactcggcgagtagtctccatcctgggcgtggaaagccaggctgtgtccctggctgcctgccacctgctgcaggttatgtttgatgccctcaaggaaggtgtcaaaaaaggcttccgaggcaaagaaggtgccatcattgtggatcctgcccgggagctgaaggtcctcatcagtaacctcttagatctgctgacagaggtgggggtctctggcaaggcgaganaatgcctgaccctcctgattaaagnggtgcccnggagtctctcaaggccccanaanagctncacctcttggtcatcgacaagg

SEQ ID NO: 258349 - DNA, 1611 bp, Homo Sapiens
  misc_feature (31)..(31): n is a, c, g, or t
  misc_feature (72)..(72): n is a, c, g, or t
agcaggctggtaccggtccggaattcccggngatccgggcttcctgcagccaccgccgctgcgccacccagngacgaccccgccgccaggggcccagttcgaggtccccgccagcccccagcggccttcccggcccggggcgctcccagagcaaacaaggcccctaaaagctccacctagttcacaggataaaatcccacagcagaactcggagtcagcaatggctaagccccaggtggttgtagctcctgtattaatgtctaagctgtctgtgaatgcccctgaattttacccttcaggttattcttccagttacacagaatcctatgaggatggttgtgaggattatcctactctatcagaatatgttcaggattttttgaatcatcttacagagcagcctggcagttttgaaactgaaattgaacagtttgcagagaccctgaatggttgtgttacaacagatgatgctttgcaagaacttgtggaactcatctatcaacaggccacatctatcccaaatttctcttatatgggagctcgcctgtgtaattacctgtcccatcatctgacaattagcccacagagtggcaacttccgccaattgctacttcaaagatgtcggactgaatatgaagttaaagatcaagctgcaaaaggggatgaagttactcgaaaacgatttcatgcatttgtactctttctgggagaactttatcttaacctggagatcaagggaacaaatggacaggttacaagagcagatattcttcaggttggtcttcgagaattgctgaatgccctgttttctaatcctatggatgacaatttaatttgtgcagtaaaattgttaaagttgacaggatcagttttggaagatgcttggaaggaaaaaggaaagatggatatggaagaaattattcagagaattgaaaacgttgtcctagatgcaaactgcagtagagatgtaaaacagatgctcttgaagcttgtagaactccggtcaagtaactggggcagagtccatgcaacttcaacatatagagaagcaacaccagaaaatgatcctaactactttatgaatgaaccaacattttatacatctgatggtgttcctttcactgcagctgatccagattaccaagagaaataccaagaattacttgaaagagaggacttttttccagattatgaagaaaatggaacagatttatccggggctggtgatccatacttggatgatattgatgatgagatggacccagagatagaagaagcttatgaaaagttttgtttggaatcagagcgtaagcgaaaacagtaaagttaaatttcagcatatcagttttataaagcagtttaggtatggtgatttagcagaacacaagagagcaagaaaatgtgtcacatctataccaaattgaggatgttgagttatgttactaatgtatgcaactttaattttgtttaacactatctgccaaaataaactttattccctataacttaaaatgtgtatatatatataatagtttattatgtacagttaattctactgttttggctgcaataaaatcgattttgaaataaatgaaatgttgaaaattttac

SEQ ID NO: 258350 - DNA, 1651 bp, Homo Sapiens
  misc_feature (6)..(6): n is a, c, g, or t
  misc_feature (15)..(15): n is a, c, g, or t
  misc_feature (28)..(28): n is a, c, g, or t
  misc_feature (1134)..(1134): n is a, c, g, or t
  misc_feature (1214)..(1214): n is a, c, g, or t
  misc_feature (1302)..(1302): n is a, c, g, or t
  misc_feature (1471)..(1471): n is a, c, g, or t
ttaatnccaccaatnaaatctgaaaggntgcaggaagctgccgccatccccctgggtgccttggcccaggctgtccctgaagtggccatcagcaggcaggaggcttgcatagccaagcagcccaagcaattgctgacatccttttgtcctctgccctaaatgccccaggttcctcctcagctggggaaagaaagaggaggaagtggaaaaagagtaggaggagggtggttctctccagggcacccttcctgctttgggatggtgactcacccagcaggccctgggagaggcaatttatcagccccaacgaagacaggccaggcctcgggctccagaaggggcagaggaggttcttctgatgcagtggccaggaggagtcaccagcagaagccaaggggcggtggaccatccctctgctgcctctgtcactttgggcctttctttagtacaacattgtcatactcagttcctggctgccagccagaagcagagaaatcctgcccagctggctggacatgctggaggccagcagggtccctgtcagctgtcgcctgcctcctccatgcctcaccccggggctcctgcgggctgtcatagagggacagggcagccactccctcgggctcatcgtatatgtggtcaggtcgagggggcagggtctcctcaatgctgtcgtacagagggtcggccaggagctgaggagggactgccaagatgcccctgaagttcttccccaaggaacgggccaccgcatcgaagggcacggcatactccccctcctggccccgaggccgtggagcaggcaccggtgtggtgggtgaaggcggcggcagtgagtcatgcggccgagagtaggggctatcaggccggggcagcgaggcgggggattgtggctggctgcggttggggtgtagcggggtgcagcattcttctgggcagagatggcctcttccaggggccaagaagatctcattgccttgccgggtttcgaactcaaagttgccctctccagaaacgcagcgacggcctgcctcaaaggaaaaggttaccttgtcccgcccaaagcgccgcagaaacctgtagggccagtcgtacagctgggtccctggctcgggcccaccccacagctccagngaactctccccagcccggagggtataggacccccgcaggtggcacctctaactggcttctgtaggtctcatggtcacagnaaattccttgtgggggccgaggggaaggccaggaggaagatggcctgcacccagtcgccgcgctccgctgcaggggccgccaggaggnacaggcgctccttggtctccaggaagaaggaactggtgtcccgggggctgctggcctctccgccggcctcggccacccgcaggcagtcactgaggcggatgaccttccgggcagcctcacaccgacgaggcttctccgggccctcctgcagctccagccgggccaaggngcagtccgaccctccatacagtggaggccgaagcggcgccatttctttccaaacgtctgctgctgctgaagatacaagaagccttgtttcactgccccgtctcccatcctctgaccatctcggagccccaggcttcagctctctcctttactcctgcccttgcctctctctttttagccg

SEQ ID NO: 258351 - DNA, 1346 bp, Homo Sapiens
  misc_feature (1225)..(1234): n is a, c, g, or t
gtcgagtagaaggaccgccgctccggcctcccgcgacttctcgaaggtgggcaggtcccaccttgtggaggatggaggtgaccggggacgccggggtaccagaatctggcgagatccggactctaaagccgtgtctgctgcgccgcaactacagccgcgaacagcacggcgtggccgcctcctgcctcgaagacctgaggagcaaggcctgtgacattctggccattgataagtccctgacaccagtcaccctggtcctggcagaggatggcaccatagtggatgatgacgattactttctgtgtctaccttccaatactaagtttgtggcattggctagtaatgagaaatgggcatacaacaattcagatggaggtacagcttggatttcccaagagtcctttgatgtagatgaaacagacagcggggcagggttgaagtggaagaatgtggccaggcagctgaaagaagatctgtccagcatcatcctcctatcagaggaggacctccagatgcttgttgacgctccctgctcagacctggctcaggaactacgtcagagttgtgccaccgtccagcggctgcagcacacactccaacaggtgcttgaccaaagagaggaagtgcgtcagtccaagcagctcctgcagctgtacctccaggctttggagaaagagggcagcctcttgtcaaagcaggaagagtccaaagctgcctttggtgaggaggtggatgcagtagacacgggtatcagcagagagacctcctcggacgttgcgctggcgagccacatccttactgcactgagggagaagcaggctccagagctgagcttatctagtcaggatttggagttggttaccaaggaagaccccaaagcactggctgttgccttgaactgggacataaagaagacggagactgttcaggaggcctgtgagcgggagctcgccctgcgcctgcagcagacgcagagcttgcattctctccggagcatctcagcaagcaaggcctcaccacctggtgacctgcagaatcctaagcgagccagacaggatcccacatagcagcagcgggaagtgtgccaaggaagctctgtggcgttgtgttattggtagacaccctcagcctcatcatttgactacctatgtactactctaccccctgccttagagcaccttccagagaagctattccaggtctcaacatacgccgttccaccaannnnnnnnnnagccccaccagcttcaggacttctgccaattttgaatgatatagctgcaccaacaatatcccgcctcctctaattacatatgatgttctctgttcaaaagtaattggcagtg

SEQ ID NO: 258352 - DNA, 1074 bp, Homo Sapiens
  misc_feature (891)..(891): n is a, c, g, or t
gtagcgaggcctgggtggcgattcggcacgaggccaccttgtggaggatggaggtgaccggggacgccggggtaccagaatctggcgagatccggactctaaagccgtgtctgctgcgccgcaactacagccgcgaacagcacggcgtggccgcctcctgcctcgaagacctgaggagcaaggcctgtgacattctggccattgataagtccctgacaccagtcaccctggtcctggcagaggatggcaccatagtggatgatgacgattactttctgtgtctaccttccaatactaagtttgtggcattggctagtaatgagaaatgggcatacaacaattcagatggaggtacagcttggatttcccaagagtcctttgatgtagatgaaacagacagcggggcagggttgaagtggaagaatgtggccaggcagctgaaagaagatctgtccagcatcatcctcctatcagaggaggacctccagatgcttgttgacgctccctgctcagacctggctcaggaactacgtcagagttgtgccaccgtccagcggctgcagcacacactccaacaggtgcttgaccaaagagaggaagtgcgtcagtccaagcagctcctgcagctgtacctccaggctttggagaaagagggcagcctcttgtcaaagcaggaagagtccaaagctgccttttggtgaggaggtggatgcagtagacacgggtatcagcagagagacctcctcggacgttgcgctggcgagccacatcccttactgcactgaaggggagaagcaggctccagagctggagcttatcttagtccagggattttggagtttggttaccaagggaagaccccaaaagcactgggctgttgcctttgactgnggacctaaagaaagacgggagaactggttcaggaggccctgtggaaccgggaaactcgcccctggcccctgccagcaaaacgcaaaagctttgccttcctcctccgggagccatctccaccaagcaaagcccttcacccacctgggtggacctggcaaaaattcctaagcgaaacccaacagg

SEQ ID NO: 258353 - DNA, 373 bp, Homo Sapiens; identical to SEQ ID NO: 178191

SEQ ID NO: 258354 - DNA, 1210 bp, Homo Sapiens
aagaaaaaaaagactggcagcaagagtgtggatgtatcaaaactcggtgcttcagaaaaaaatgaaagattgctgatgaaaccacagtggcatgatttgcttccatgcaaactggggatttggttttgccttacactaaaagcattacctcacctcatccaggatgctgggcagttttatgctaaatataaagaaacaagattgaaggaaaaggaagatgcactgactagaactgaacttgaaacacttcaaaaacagaagaaagttaaaaaaccaaaacctgaatttcctgtatacacacctttagaaactacatatattcagtcttatgatcatggaacttccatagaagaaattgaggaacaaatggatgattggttggaaaacaggaaccgaacacagaaaaaacaggcacctgaatggacagaagaggacctcagccaactgacaagaagtatggttaagttcccaggagggactccaggtcgatgggaaaagattgcccacgaattgggtcgatctgtgacagatgtgacaaccaaagccaagcaactgaaggattcagtgacctgctccccaggaatggttagactctccgaactcaaatcgacagttcagaattccaggcccatcaaaacggccaccaccttgcccgatgacatgatcacccagcgagaggacgcagagggggtggcagcggaggaggagcaggagggagactccggtgagcaggagaccggggccactgatgcccggcctcggaggcggaagccaggccaggctgctggaggctacagcgaagccggagccagaggagaagtccagagccaagcggcagaaggactttgacatagcagaacaaaacgagtccagcgacgaggagagcctgagaaaagagagagctcggtctgcagaggagccgtggactcaaaatcaacagaaacttctggaactggcgttgcagcagtacccaaggggatcctctgaccgctgggacaaaatagccagatgtgtcccgtccaagagcaaggaagactgtatcgctaggtacaagttgctggttgaactggtccaaaagaaaaaacaagctaaaagctgaatattctgggagatgatgttcaccttcattttccaaaatgaatatcttaaaaatcttatgcagaaatttgcattttgtacctcaatatttctacgtcatgtgccttagtaa

SEQ ID NO: 258355 - DNA, 1037 bp, Homo Sapiens
  misc_feature (963)..(963): n is a, c, g, or t
  misc_feature (1010)..(1010): n is a, c, g, or t
  misc_feature (1022)..(1022): n is a, c, g, or t
ttcttctggggttccccagggttgaccgggctgctgacgttgctgttcatgagagccacgaggccattcactagatcgctgacgtactggaacgcccttgtctgagacccggatccgtataccgtgagtggctccccctggagcggcctgcaggatgaagttgctgactactcgcccatcgttcatgtgcatgcgtggcccaaaggtgttgaagattctggccactcgcacttccacgccttcctgcttcatgtaggcatagcacatggtctctgcaacacgtttgccttcatcgtagcaggcccgaggtcctattggattcacgtgggccccagtaatcctcactttgaggggtggacttcaggatctccatacacctccgatgtggaggccaggagcagacgggcaccgactcgttttgccagccccaacatgtttaatgtcccaatcgtattggtctttaatgtcttgataggattatacatgtagtttggaggggaggctggagatgccagatggtatatctggtcaacctcgatgtagaggggctcccacacgtcgtggttaatcaactcgaagttctcatgtccgatccagtgctccacgtttctcttcctgcccgtgaagaaattgtccaccacggtcacctcgtggccgtccatcatgagtttgtcagttagatgggagcccacgaaccctgcgcctcctgttataaaaattcttttccgatccttttctgataaaaactttactggtgggtatttctgggtaaagcttttttctaaatctctgattttctctcttagtggttcaaccatctcttcaatcttgctttcaatttttagttcaccattttcctggatagacctcatattaacgaagttgccccaaacagaggcgacgtaggccagcaaggcgatgcccagcagcagcttcatcctctgcggttgacggcagacacgnagcgcagcagcgccttgctcaaccatccccgggagccgcgcgggtcncagggccctgcngcgcgggggcccgcc

SEQ ID NO: 258356 - DNA, 1260 bp, Homo Sapiens
ctttggaatcggagaggcagattcgctgctccgcagcacggccggagctggtcgggtcaagagtcgggatttgtggggagaggttttccactggtcaagagaaggctttaagaaagacggtattaatctcccgttgcggctcccgcctggtcccatcttctgcccgctcctccaggaaatgaatctgctgccgaatattgagagtccagtgactcggcaggagaagatggcgaccgtgtgggatgaggccgagcaagatggaattggggaggaggtgctcaagatgtccacggaggagatcatccagcgcacacggctgctggacagtgagatcaagatcatgaagagtgaagtgttgagagtcacccatgagctccaagccatgaaggacaagataaaagagaacagtgagaaaatcaaagtgaacaagaccctgccgtaccttgtctccaacgtcatcgagctcctggatgttgatcctaatgaccaagaggaggatggtgccaatattgacctggactcccagaggaagggcaagtgtgctgtgatcaaaacctctacacgacagacgtacttccttcctgtgattgggttggtggatgctgaaaagctaaagccaggagacctggtgggtgtgaacaaagactcctatctgatcctggagacgctgcccacagagtatgactcgcgggtgaaggccatggaggtagacgagaggcccacggagcaatacagtgacattgggggtttggacaagcagatccaggagctggtggaggccattgtcttgccaatgaaccacaaggagaagtttgagaacttggggatccaacctccaaaaggggtgctgatgtatgggcccccagggacggggaagaccctcctggcccgggcctgtgccgcacagactaaggccaccttcctaaagctggctggcccccagctggtgcagatgttcattggagatggtgccaagctagtccgggatgcctttgccctggccaaggagaaagcgccctctatcatcttcattgatgaagttggatgccatcggcaccaagcgctttgacagtgagaaaggctgggggaccgggaagggcggaaaaggaaaatgctgggagccttctgaaaccagctgggatggcttttcagcccaaaaccccaagtttaagggtaattgcacgccaccaaaacaggggtgggaaccttccttgggaaccccgggcctttttttcgggtttgggggccgcccctggaacc

SEQ ID NO: 258357 - DNA, 1603 bp, Homo Sapiens
  misc_feature (1303)..(1324): n is a, c, g, or t
  misc_feature (1333)..(1371): n is a, c, g, or t
  misc_feature (1418)..(1490): n is a, c, g, or t
  misc_feature (1531)..(1540): n is a, c, g, or t
gtggaatttggggaggaggtgctcaagatgtccacggaggagatcatccagcgcacacggctgctggacagtgagatcaagatcatgaagagtgaagtgttgagagtcacccatgagctccaagccatgaaggacaagataaaagagaacagtgagaaaatcaaagtgaacaagaccctgccgtaccttgtctccaacgtcatcgagctcctggatgttgatcctaatgaccaagaggaggatggtgccaatattgacctggactcccagaggaagggcaagtgtgctgtgatcaaaacctctacacgacagacgtacttccttcctgtgattgggttggtggatgctgaaaagctaaagccaggagacctggtgggtgtgaacaaagactcctatctgatcctggagacgctgcccacagagtatgactcgcgggtgaaggccatggaggtagacgagaggcccacggagcaatacagtgacattgggggtttggacaagcagatccaggagctggtggaggccattgtctcgccaatgaaccacaaggagaagtttgagaacttggggatccaacctccaaaaggggtgctgatgtatgggcccccagggacggggaagaccctcctggcccgggcctgtgccgcacagactaaggccaccttcctaaagctggctggcccccagctggtgcagatgttcattggagatggtgccaagctagtccgggatgcctttgccctggccaaggagaaagcgccctctatcatcttcattgatgagttggatgccatcggcaccaagcgctttgacagtgagaaggctggggaccgggaggtgcagaggacaatgctggagcttctgaaccagctggatggcttccagcccaacacccaagttaaggtaattgcagccacaaacagggtggacatcctggaccccgccctcctccgctcgggccgccttgaccgcaagatagagttcccgatgcccaatgaggaggcccgggccagaatcatgcagatccactcccgaaagatgaatgtcagtcctgacgtgaactacgaggagctggcccgctgcacagatgacttcaatggggcccagtgcaaggctgtgtgtgtggaggcgggcatgatcgcactgcgcaggggtgccacggagctcacccacgaggactacatggaaggcatcctggaggtgcaggccaagaagaaagccaacctacaatactacgcctagggcacacaggccagccccagtctcacggctgaagtgcgcaataaaacacggtttagggtcnnnnnnnnnnnnnnnnnnnnnnctcgaggcnnnnnnnnnnnnnnnnnnnnnnnnnnnnnnnnnnnnnnnctgggtcatagctgtttcctgacccagctttcttgtacaaagtggtnnnnnnnnnnnnnnnnnnnnnnnnnnnnnnnnnnnnnnnnnnnnnnnnnnnnnnnnnnnnnnnnnnnnnnnnntgcagtaccccgggaaatttaacccgcctaatgagcgggcnnnnnnnnnngtgatccaaaggatctttcttgaaatccctttttttctgcgaataatcctgctgctttgaaac

SEQ ID NO: 258358 - DNA, 1867 bp, Homo Sapiens
  misc_feature (1512)..(1555): n is a, c, g, or t
  misc_feature (1563)..(1575): n is a, c, g, or t
gggatcggaggagggacgcgccggagcgggaccgacgggaccgagcgagcgaccgacgcgccacccgccgacgcctcagccgcttggggcccgcacggaccctctacttcagtgtagaatgagccaaggagactcaaacccagcagctattccgcatgcagcagaagatattcaaggagatgaccgatggatgtctcagcacaacagatttgttttggactgtaaagacaaagagcctgatgtactgttcgtgggagactccatggtgcagttaatgcagcaatatgagatatggcgagagcttttttccccacttcatgcactgaattttggaattgggggagatacaacaagacatgttttgtggagactaaagaatggagaactggagaatattaagcctaaggtcattgttgtctgggtaggaacaaataaccacgaaaatacagcagaagaagtagcaggtgggatcgaggccattgtacaacttatcaacacaaggcagccacaggccaaaatcattgtattgggtttgttacctcgaggtgagaaacccaatcctttgaggcaaaagaacgccaaggtgaaccaactcctcaaggtttcgctgccgaagcttgccaacgtgcagctcctggataccgacgggggttttgtgcactcggacggtgccatctcctgccacgacatgtttgattttctgcatctgacaggagggggctatgcaaagatctgcaaacccctgcatgaactgatcatgcagttgttggaggaaacacctgaggagaaacaaaccaccattgcctgactggctcttatcagtgttaatagcatctcagcttcctcagatcagttctatcactggcactacagaatccttctctttcttaaggcactttgcattgtagaatgttcctggatgttcatatctagtgtttgaaggggaggagggatttaaactggtcctgtacatagaaggtttgtttgacagaggagaaaaattagccaaggaagattgttgtttaaattcatttgaaaccagaaggggactttttagttgtatgtgtaacacattcattgaattattatcactgttttcttgggacaacatcaagcctaaatactgaacaatatgaagattcttttcttggcctttctgtggattatgtcatatataataattatcagaatcattctacttggctttaaaacatgttttctccaatttttttaaggttcataatttagccttttgtttttatgtggcttagattcttatgtatactgaatattttattaacatgtagcatcaggttgaacatgcttgtcattgatatatggaagatgctatagttagaagtgaatttgttctgctttcttaatcttttccatgcttagcagtgaaaaacaggttttgccccagtagagggattctttggagggtattattttttatgctgctgaatatcatgtctataatagacccgggcatgcagcctttcctccttattnnnnnnnnnnnnnnnnnnnnnnnnnnnnnnnnnnnnnnnnnnnntttgttgnnnnnnnnnnnnnggttcttgttgacataacaagcttttaacacatttttgacctaggagccctgttgctggaagtatagtctccagccagttactctcatgatagtactgctataaaactcattcttgtgtggtgttctgtgctatagagtctgtgtattgctgttcatattcggagttctggttttgtttttcccttaaaacctgttaacagttttttttgggggtggggggattcagaactcttgtttcccattccatagcacctgacattatttcaagttttataatatcttaaggtgtat

SEQ ID NO: 258359 - DNA, 898 bp, Homo Sapiens
  misc_feature (8)..(8): n is a, c, g, or t
tctctcangggtttcatagtttaaaaagctacaatcacatcatgttgtaactacgtaaaaaacagagctgtaaatggaactgcttggctttgaccatacacatttctgcccagcccttacagaatctgcacaaagaaatatctccctttgctccagttaattgttcttgtatgtaagtggctttctattccagtatatccagagtggtgaaataacaaggccagccacgtagccaaaggtcgctccaagcgtacaggagatgggccatacctgccatggtctttcccaatccagtggaataggaagtgctccaagccatgctcctacaaagctagaaattgtagtgatctggagactattctcccatatggatgtaactccatttctactgaacactcttagccatgctttgaggtttggtcctaacaaacataagcaaggcacagtagtaaaagtagacaaaataactgcaaataaaaatgtttccaacgccaactctatcagtggtgctccatacagaacaaaaattacatgaaaggagaaacaagacataagaaagtagatacagcatttcaaaaatccagttaccttgtgtgataatgaacttcttttagaggatgtatttggtttcactactaaatatagtactagattgacagcagttacaaaaccagaacagatgcacaaccatgtcaagtgtgtttccaatattgagaagttctccaagaagagtgatggaatgaagacacttaggataattgaaaatatgcataaaagatgggtatacagtagtctcttgatatcgttatctttcatggtgtgttcttggatggctagctaactctccctcccgcggaagggaagcggggaactactgcctcctaccatcaggtacgac

SEQ ID NO: 258360 - DNA, 2842 bp, Homo Sapiens
  misc_feature (647)..(647): n is a, c, g, or t
  misc_feature (654)..(654): n is a, c, g, or t
  misc_feature (666)..(666): n is a, c, g, or t
  misc_feature (679)..(679): n is a, c, g, or t
  misc_feature (823)..(841): n is a, c, g, or t
  misc_feature (1187)..(1198): n is a, c, g, or t
  misc_feature (2357)..(2357): n is a, c, g, or t
  misc_feature (2447)..(2447): n is a, c, g, or t
  misc_feature (2510)..(2510): n is a, c, g, or t
  misc_feature (2512)..(2512): n is a, c, g, or t
  misc_feature (2519)..(2519): n is a, c, g, or t
  misc_feature (2687)..(2778): n is a, c, g, or t
ttttttttggaaatgtgtaatagtttactgttgtaattcgtttataccatgtgttggacaactcagctaatatgttaattgatttatacaattcctttcaattttatctaaaaataagcagaccaaaattaaataagaaagttacataagattccatttgagcatacataaggccatgatactttaatgtgaaccaccatttcttggaagaaagaagacatccaaatgtccgattcagagagaaagttcctggccagtcatccagtagactctctccactcttcaatgggaaggtgatgcttatatttttaaaaatctctacaaagctcacatacaacaagacagtacatcctagatttgtgactgatatgagcatttaaggctgtcattttcaagtataaaagtttagtgttccattacccaatctgtgcagtagacatagctataagctcaagtcatgtgaattaacagaagcccaccaaagacatttaaaaaattataatttgggcaacagcaagtttaaatgtaggaaaggctagaaaaaatgtgatgagattgtttctctaaaatgcattaggttgttcacaatgaagctttgtctaacaccattatctgatgcatccattatctgatgcatggcatatgcnatagggnagatccacagcngaccaaacaaggnagctgaattaggtaatagaactagtaattaagatggttcacctctaacacagttctgtggcctgttccccccagagaaagattagaaatggctccagtgtaccaaataagcttcacagaagaacatgaaaattttcctccaacnnnnnnnnnnnnnnnnnnncaagcagagcctttcacttagggaccaactgcttgtagatgaaataaatcaacattaattacttctagcctgatgtaatatggctggagaaaaggggtctctggaagccggtattttgtttaacttacattctaggtgtgtatataagttgtcgctctataacttctgctgtggttccaacatctatatctgaaaggtggaagcagctgctctgttacaattttcatgtaacacgcttggattctaggtctttcctctttaacacaacttaaagaaagtttcttgtggtttggtcagcatacacacttctcatttcatttgatgtacacagccaaagtgggaattnnnnnnnnnnnnttaccaactagttcagagagctaaattgagtctatcattatggcaaagtctgacccaaaattttaatttgtaattttagcatgtgtctcatgcactttggggagcgtcaaactaaatctacaattgccagaagccttgttacagtttaatgcacattaactaaaatgtgtacatttttagtgttcatgataaatgcagctatgaccttattacacttttggcattctttaagaaagcacattaagctttaatatagaaatatttaggttacacttgtgctcaagtaataataaaacatttgttcttttttgatctcatacattctctcctcaggtatggcccatctcctgtacgcttggagcgacctttggctacgtggctggccttgttatttcaccactctggatatactggaatagaaagcaacttacatacaagaacaattaactggagcaaagggagatatttctttgtgcagattctgtaagggctgggcagaaatgtgtatggtcaaagccaagcagttccatttacagctctgttttttacgtagttacaacatgatgtgattgtagctttttaaactatgaaacccctgagagattgtaccttctagttgaaataaagtatttataatagattgtggcttcagatgctgcttactgcttcttaaacctttaaggaacattcttaatacactttatagaattctgaggacaggttttgttttctttcaagttttgaactgcttcattacctataaaaggtctgggtatagctgtagcatttcatttgctttctgagagaaatggacagtttccttggccactgaagatgtttctcacgtaattaaacaacagtttatacatcttgatcctattcttttttttacagtgtgtttctttggagttaaaatggctatgatagcctcatcaaaaacagtcttcaatcccttctgggttaaagctgaacattccacatagcagcatgctcctatctcttttgctagtttctgtccttgttccacacatataggtttttctttcatatcattcagtcttgctaaagttttggggtcatctcggagatcaatctgagttcctattaataaaaagggtacatttggtgcgtatccctgaagttccggtacccactcctntttcacattttgaaatgaggctggatttaccaccgagaagcatataaggaagacatcggtcattgggtaagataaaggcctcagacggtnatagtcttcctgtccggccgtgtcatagagtcctaggaggtactgcttgccccctacggtgangntgactgngtagtggtcgaagacggtgggcacgtactcctccgggaaggcgtcgttggcatagctcatgagtaggcacgtcttgcccaccgccccgtcgccgaccaccacgcacttgagcatcagcgcgccgggcccgtgagccatgctgctgccggccggcctccgggcatggtnnnnnnnnnnnnnnnnnnnnnnnnnnnnnnnnnnnnnnnnnnnnnnnnnnnnnnnnnnnnnnnnnnnnnnnnnnnnnnnnnnnnnnnnnnnncccggccccatgcagcggctcccctcgcaggaggggagggggcggcgggcccggggcgctgccg

SEQ ID NO: 258361 - DNA, 1057 bp, Homo Sapiens
ggggcctgggccgcccgtcgtacctgatggtaggaggcagtagttccccgcttcccttccgcgggagggagagttagctagccatccaagaaaacaccatgaaagataacgatatcaagagactactgtatacccatcttttatgcatattttcaattatcctaagtgtcttcattccatcactcttcttggagaacttctcaatattggaaacacacttgacatggttgtgcatctgttctggttttgtaactgctgtcaatctagtactatatttagtagtgaaaccaaatacatcctctaaaagaagttcattatcacacaaggtaactggatttttgaaatgctgtatctactttcttatgtcttgtttctcctttcatgtaatttttgttctgtatggagcaccactgatagagttggcattggaaacatttttatttgcagttattttgtctacttttactactgtgccttgcttatgtttgttaggaccaaacctcaaagcatggctaagagtgttcagtagaaatggagttacatccatatgggagaatagtctccagatcactacaatttctagctttgtaggagcatggcttggagcacttcctattccactggattgggaaagaccatggcagatgacagtagaaagaaaacgtagcacttatagatctctccatgtaccctgcagggggcttggtactgtgaaatgagtaacttaatcctgacaaccgtagtgcaaggtatggcccatctcctgtacgcttggagcgacctttggctacgtggctggccttgttatttcaccactctggatatactggaatagaaagcaacttacatacaagaacaattaactggagcaaagggagatatttctttgtgcagattctgtaagggctgggcagaaatgtgtatggtcaaagccaagcagttccatttacagctctgttttttacgtagttacaacatgatgtgattgtagctttttaaactatgaaacccctgagagattgtaccttctagttgaaataaagtatttataataaaa

SEQ ID NO: 258362 - DNA, 1797 bp, Homo Sapiens
  misc_feature (20)..(20): n is a, c, g, or t
  misc_feature (146)..(146): n is a, c, g, or t
  misc_feature (220)..(220): n is a, c, g, or t
  misc_feature (257)..(258): n is a, c, g, or t
  misc_feature (284)..(284): n is a, c, g, or t
  misc_feature (288)..(288): n is a, c, g, or t
  misc_feature (319)..(319): n is a, c, g, or t
  misc_feature (344)..(344): n is a, c, g, or t
  misc_feature (431)..(431): n is a, c, g, or t
  misc_feature (462)..(462): n is a, c, g, or t
  misc_feature (467)..(467): n is a, c, g, or t
  misc_feature (642)..(642): n is a, c, g, or t
  misc_feature (673)..(673): n is a, c, g, or t
  misc_feature (675)..(675): n is a, c, g, or t
  misc_feature (715)..(715): n is a, c, g, or t
  misc_feature (1693)..(1693): n is a, c, g, or t
  misc_feature (1740)..(1740): n is a, c, g, or t
gaattcccgggatggaaccnactctggacacactagcacacaataagtgcccccataagctttagcaggtattctaatttccagtagtatctgaggaagaatcaccttattgtactagacttcctgaacactactgcgtacctgtngaccatgtgttgggctggggatggtacttggtacacaagagcacatactctgtatcacattagctgccatcccncaatctatcctctgagttggaggcttatgaagccccnnagacggtagaaaagaatgtgtgttcnaganctggaaaggtgagacagaattcacgacaccncaaattgtggagagaccatcttttncccgaggtggacataacagggccacgtgaaggagcctggtgagcacagctgcctgtcctctggggagaaggcagagaagaagtgccncatcctgtgatgtggtgaacgccccagtccnaggcnaacacaatagctacattgtttatctctcagccaactttaccgcccatcgtagcatgcccagaagcctctccccgtatgtcatagccacactgcagacgggattatgtgattatgaagtcagtaactcctttccttgattaaacatgaactcagacagtcattcactctggggganacccatttttctgcttgtctggagaagcaananacaggtaacatacagcaatgttaggtttcaactaattaanaatgggaatgaacacacgcacacgcacgcacacacttcttcagttccctgtcaaatcttcctgaggacaacatagtttggttatgatgaaaactttagaaacgggaaacattctgcttagattgttaaaattgagaacaacgcagagctggttggggctcatcatcccaccaggagaaagttctgcttacaatttatctagcaaaatagagtaaggcagcagaaaaaaatcttggtttcctagtgacctttaagtaagtgctcccatttcaaatagactcagtaccataaaaactttcttgggctgagaactctcaattcctttgaatataacttttgcgctaacattctttcatttcttcttcttcagacaatcattgtttcttcctttaactcaaacctgcctctgttccccggttttcacggttgacagggcatagcccaggtgatgtacagcccacatgggaatcaaggcagttcccacacagcaccagcacaaagtcatttcttggtagaagctgggcttcttcagggctgtgtaactcataggtgtcgtggagggtctcagaaggaaacgagggaaggcaattctgtgttgcagaaaaagagtttttctaaaaagaagctgaaataattaccagagacaaaaattaacattgctttatatttacagaagaaactaagaggaagtaggctgagaattgtagcatcagggaatgagaagtttattaaggcttctccccactacagaaccatttattaaactgtttccagaatggatacattttcacaatgatcctactcaatctctcttcatagaaggctctgtgataaaagaagatatagatcccctgctccacagacggctgacactgggtaaaagatgcacacatacttggaagcccctcaggaaaattagatcattatcttctcgttttttctttgcctccaaagacttagatttttacctatgtactcngaaaagcaactgcagacttccaatcaagatgctgtaagttcaaaccnggaagcgttcccttctactccaaatccctagtaatgacaggtaaagataaaaacagg

SEQ ID NO: 258363 - DNA, 1194 bp, Homo Sapiens
  misc_feature (749)..(764): n is a, c, g, or t
gtccctcagctgggcaactggctctgcccatccctgccctcatttccccatcatgcattccagataattgatttttaaagtgtatttttccgtattctggaagatgttttaagaagcattttaaatgtcagttacaatatgagaaagatttggaaaacgagactgggactatggcttattcagtgatgactggcttgagatgataagagaattctcgaactgcatgtattgtgccaatctgtcctgagtgttcatgctttgtaccaaatttaatgaacgcgtgttctgtaatcaaactgcaaatattgtcataaccaacatccaaaatgacggctgctatatataagtgtttgtcatatggaatttaatcgtaagccatgatcataatgttaactaaataactttatgtggcactgcctagtaagggaactatggaaaggtttggatttctccaaatctgggagaattttcaaaataagaaaataacctttatatgatatactatgactaggctgtgtatttcttttcagggatttttctaccttcagggttggatgtagtttagttactattaccatagccaacctgtagttttacatatacattttcttgtggagcaatagagttctccattttacagaagcattttaaatgtagtttgaatattttccacaagatgctgcaatgtgagttatcacttcatttatcttaaagaaagactaaactggttgtcagttacatctgacagnnnnnnnnnnnnnnnntcactgtgtaaccaggttaagtggtaaaataatccaggcgtcagtcaaaggcattttgctgactttaatattgattatatttttaacaggaatttaagaaaatatgactggaattaaaaatatatatatattaaacaagaattttctttgctctgtctagcttaaactactactcaagctgcttaagttcttaagtattgtttgtaatcaccaataaataagtgcatttgtaattcatcagtcattattagctttttattaaaagaagattacgttttacaatgtaactataatctcttgaatttggtatcttattaatgagttttaaagatgtaaaacctaaccttttttaaagctccattgtcttatgtttttagaggcttttccataaacatatatcattacatataataaacttttcaaatcttgc

SEQ ID NO: 258364 - DNA, 942 bp, Homo Sapiens
  misc_feature (5)..(5): n is a, c, g, or t
  misc_feature (8)..(8): n is a, c, g, or t
  misc_feature (11)..(11): n is a, c, g, or t
  misc_feature (15)..(15): n is a, c, g, or t
  misc_feature (17)..(17): n is a, c, g, or t
  misc_feature (21)..(21): n is a, c, g, or t
  misc_feature (45)..(45): n is a, c, g, or t
  misc_feature (48)..(48): n is a, c, g, or t
  misc_feature (57)..(57): n is a, c, g, or t
  misc_feature (78)..(78): n is a, c, g, or t
  misc_feature (90)..(93): n is a, c, g, or t
  misc_feature (103)..(103): n is a, c, g, or t
  misc_feature (108)..(108): n is a, c, g, or t
  misc_feature (114)..(114): n is a, c, g, or t
  misc_feature (118)..(118): n is a, c, g, or t
  misc_feature (123)..(123): n is a, c, g, or t
  misc_feature (125)..(125): n is a, c, g, or t
  misc_feature (127)..(127): n is a, c, g, or t
  misc_feature (131)..(131): n is a, c, g, or t
  misc_feature (157)..(157): n is a, c, g, or t
  misc_feature (171)..(171): n is a, c, g, or t
  misc_feature (209)..(209): n is a, c, g, or t
  misc_feature (216)..(216): n is a, c, g, or t
  misc_feature (222)..(222): n is a, c, g, or t
  misc_feature (249)..(249): n is a, c, g, or t
  misc_feature (254)..(254): n is a, c, g, or t
  misc_feature (258)..(258): n is a, c, g, or t
  misc_feature (263)..(263): n is a, c, g, or t
  misc_feature (265)..(265): n is a, c, g, or t
  misc_feature (300)..(300): n is a, c, g, or t
  misc_feature (313)..(313): n is a, c, g, or t
  misc_feature (343)..(343): n is a, c, g, or t
  misc_feature (345)..(345): n is a, c, g, or t
ggaanggncancctncngttntggcattgaggaccctgtgccaangcngcaccctgncggagcgagacatcaccctgnggcagaacatcnnnnacttccggcnttcanccccancccnccccngncngctntccagaggtggaacatgaaccgtgtncgcttgggtgtctngtccaactgggcccctgtgcccctcacccaaggaggcngcgtctnatcagnaggccatggaagaggccgcctggcacnacatncctnacccntntgactctgggcgtattcggcagtacctcccccggnacccctgtccgangcccccttaccaccaccagatgccaccccnanactcggacactgtggaattctaccagcgcctgtcgaccgaaacactcttcttcatcttctactatctggagggcactaaggcacagtatctggcagccaaggccctaaagaagcagtcatggcgattccacaccaagtacatgatgtggttccaaaggcacgaggagcccaagaccatcactgacgagtttgagcagggcacctacatctactttgactacgagaagtggggccagcggaagaaggaaggcttcacctttgagtaccgctacctggaggaccgggacctccagtgacaccggcccctccctctacccacccccttcccccgcatgctgatccccctgcccaggtgagggccctgccctggaagactggagggaggccccaagccacggggcatccccctctcccaggaagcagggagggggccgggaggttttcctctcagccccaccctgggggcccgggggcgagggctgccccctcctcccctccccagtgagggacattttttggtaaacctattttcattttggaaaatatttatgaataaatagttttatatgagcggctggcagcagcggcctctcctgt

SEQ ID NO: 258365 - DNA, 1144 bp, Homo Sapiens
  misc_feature (537)..(620): n is a, c, g, or t
  misc_feature (807)..(807): n is a, c, g, or t
  misc_feature (1016)..(1016): n is a, c, g, or t
gttggtgtgttctacagtgatgtttttttccaccaaatacttccctgatgccgagccccttcatggggatgaagtagtacaaggtccttgtcctcagagaactcagtcccctctcctggttctcccaggttgccatctttgaagcacttaagacattcatttagaacctaggtcctctcccattgtgtcctcagatgttaaccacagacttcctgtcctttcctggtttggcccaaaaccatcctccaagttagtacatttcagggcatccagtcattcagaaattcccacaccacttccgtcaccaataaaatgtccctgcagagtgcttggatttagactctgagactgttccattctctagaacaagggtgacagtacccactgcctcgaggtctttgtgaagattaaatgctaggctgtgcatcctgtactcacgtgagaggtgctcaaaagccacagccctcgaggaaacgaaggctgtgcactcacacctggggctggggcccgtctctggcagctggcttcggtggaacnnnnnnnnnnnnnnnnnnnnnnnnnnnnnnnnnnnnnnnnnnnnnnnnnnnnnnnnnnnnnnnnnnnnnnnnnnnnnnnnnnnnagtgtgtgcgtgcagggcagctggcccggtgcctgacacatccacagccctaagaattgtcccctttgtctgttggtccggcccaagatcccagaccacctcctcgtcccactcactgaccgccttctcccccggcccagggcaccctaaatctactttgactacgagaagtggggccagcggaaanaaggaaggcttcacctttgagtaccgctaccctggaggaccgggacctccagtgaaaccggcccctccctctacccacccccttcccccgcatgctgatccccctgcccaggtgagagccctgccctggaagactggagggaggccccaagccacggggcatccccctctcccaggaagcagggagggggcccgggaggttttcctctncaaccccaccctgggggccccgggggcgagggctgccccctcctcccctccccagtgagggacattttttggtaaacctattttcattttggaaaatatttatgaataaatagttttatatgaaaaaa

SEQ ID NO: 258366 - DNA, 738 bp, Homo Sapiens
  misc_feature (116)..(116): n is a, c, g, or t
  misc_feature (141)..(224): n is a, c, g, or t
  misc_feature (254)..(254): n is a, c, g, or t
  misc_feature (299)..(299): n is a, c, g, or t
  misc_feature (470)..(513): n is a, c, g, or t
  misc_feature (515)..(516): n is a, c, g, or t
  misc_feature (522)..(524): n is a, c, g, or t
  misc_feature (551)..(551): n is a, c, g, or t
  misc_feature (616)..(616): n is a, c, g, or t
  misc_feature (620)..(620): n is a, c, g, or t
  misc_feature (634)..(634): n is a, c, g, or t
tctttgtgaagattaaatgctaggctgtgcatcctgtactcacgtgagaggtgctcaaaagccacagccctcgaggaaacgaaggctgtgcactcacacctggggctggggccgtntctggcagctggcttcggtggaacnnnnnnnnnnnnnnnnnnnnnnnnnnnnnnnnnnnnnnnnnnnnnnnnnnnnnnnnnnnnnnnnnnnnnnnnnnnnnnnnnnnnagtgtgtgcgtgcagggcagctggcccggntgcctgacacatccacagccctaagaattgtcccctttgtctgtnggtccggcccagatcccagaccacctcctcgtccactcactgaccgccttctcccccggccagggcacctacatctactttgactacgagaagtgggggccagcggaagaaaggaaggcttcacctttgagtaccgctacctggaggaccgggacctccagtgacaccggnnnnnnnnnnnnnnnnnnnnnnnnnnnnnnnnnnnnnnnnnnnngnncaggtnnngccctgccctggaagactggagggagnccccaagccgacggggcatccccctctcccaggaagcagggagggggccgggaggttttcctctngatnccaccctgggggcncgggggcgagggctgccccctcctcccctccccagtgagggacattttttggtaaacctattttcattttggaaaatatttatgaataaatagttttatatgaa

SEQ ID NO: 258367 - DNA, 1035 bp, Homo Sapiens
  misc_feature (264)..(279): n is a, c, g, or t
gcttccaacccgcacgagtccagtagctggtgagggggctgggacttgggcaggaaggcatcctggaggaagggttcctgtggccagcaccctatgtggctaagggggcgggggatggctgggagacaaggccgccttttctcatcagctctggcactgtctggaggaaaggactcagttcggggctggactggcagtgaaggaagatggtgtaccctctccccttcactgacccttgatggccttctccctctttgcttggannnnnnnnnnnnnnnngcctgtcctgggcacattggctggctgcccatccaatggctctgtctaaatgccctcctgccccctggcctcggagcccggaaacacctgccccctgtctcccacttctgcccaccggattactggctgcacctcggtgtgtcccactctcactctccctcttactggcctgcctatacatcagtctctctggctctccaggacccacgaggaggaaccaggctactttccccagtactgaggtggtggacatcggctctgacactcctgacccagccctgaacaaagcacctcaagtgcaaggaccaaagggggccctggcttggagtgggttggcttgctgatggctgctggaggggacgctggctaaagtgggtaggccttggcccacctgaggccccaggtgggaacatggtcacccccactctgcataccctcatcaaaaacactctcactatgctgctatggacgacctccagctctcagttacaagtgcaggcgactggaggcaggactcctgggtccctgggaaagagggtactaggggcccggatccaggattctgggaggcttcagttaccgctggccgagctgaagaactgggtatgaggctggggcggggctggaggtggcgccccctggtgggacaacaaagaggacaccatttttccagagctgcagagagcacctggtggggaggaagaagtgtaactcaccagcctctgctcttatctttgtaataaatgttaaagccag

SEQ ID NO: 258368 - DNA, 897 bp, Homo Sapiens
  misc_feature (729)..(729): n is a, c, g, or t
  misc_feature (808)..(808): n is a, c, g, or t
  misc_feature (820)..(820): n is a, c, g, or t
  misc_feature (823)..(823): n is a, c, g, or t
tcaagggtgtgccttggggccactcaggaacccctctggctgtgtcggactggggagggatatgatggagagccagccagtggggctgtcagcagtggggggctttttaaaagaaaactattttgatgaatatatttaaaaaacctttttttattgtggagcataggaattgcccccctccaggcttcaccctccctgcctaagcagggtgggggcagagccatgacatttttggtttaaaggagccttctcatctctggccgagaacactgctgggctcccaggtagctgaaggcctcagcccacccactcccttcttccctgtgtggggctcaagcctggtgcacttagtatagaagagctaacgtactcaggcttgtgccacgggtgagcactgaggccccaggtgtcctccctcccccactgtctgggacacaggacaggtgttgcgtctgactctgtctccccctgtccaagagctataggctggttgaggcaagtggaaccttatcagtgacttggccaacaagggaagccttggggcctcagaattcattgaagatttgttttgggacaactggaagaatcagcaccatggatactcgcccgtgggcagggctgtggtcagccaagaatagaggtcatatagttgggccatggggcaattgttggcagccatgactgacggccccttgtgcaagctcattcttcagtggatccttcagtggnagtggtgacacgtgccagcggtcactctgccacatcacttccttctttgaagccctagagtgcgtatgcgtgtgtgtgngtgctgtgtgtnttntacctaagccagaagaatatgacagaggtcagccttctccctgtggcagaggaattgtccttgaagcttgcagg

SEQ ID NO: 258369 - DNA, 1798 bp, Homo Sapiens
  misc_feature (649)..(649): n is a, c, g, or t
  misc_feature (654)..(673): n is a, c, g, or t
  misc_feature (676)..(705): n is a, c, g, or t
caagcgaaatggccggcgtgcgggggatgacgtaatctcatatctatacctccgttaagcctctatatcacgatcctcgcccggtgcgtcggttagggcgggacccaacatcgtagtcggagaatgttattatggtcctcacccgcgcggcgggcgaataagatgggggacagagagtggagtgataatgaacatgtcaaccgtcgccggctgccgggcggcgaggagagataggaaataatgcatattggacgaatcgagagagatccgggaataaagtgcatcagcctacaaaacacagcgagcagacgtaggcaaagagagaataaaagaagaaccgcagtgccgcgcgacgggccatacgggtattcacatgaccctacgatggagtgatgatattcaaggcgatgcgtccgccaagggaagtacaaaaccgacgggcccaagctggcggcggagtcccctgcaggcaagcagagcaggccatggcgttacggcccctgaaaagcacgaaatttcctgacaccggtcgagggcgcatttcgcgggcactgatgcgttcaacgccaagaaaaatacggaaagcgagcaccgggcgccggatcaacaacaaagccccacgagacccaccagccccaaacacgaaccncaacnnnnnnnnnnnnnnnnnnnnagnnnnnnnnnnnnnnnnnnnnnnnnnnnnnntgtgggcgacgagggcactggcggctgctcctccttgggctccgtcaagtcaggggcagaaggtgctggaaggtcggtgggcagtgccctcggaccggtacttgtccctgatggcggcccagacgcggtcgtagaaagaggtggcgtctgtctgtgtgtccccactgaggagggcctgagcttccgcttctgacaacgccccatccccatctgtgtccagctccgggtgagtctgcagctcagtcaccgagaccgtcccgtccatgtcatcatccagctccttgaaggcatcagccgccagctcctgctcctgttgggccttggcagcagccagctgctcttcccacagcttctggtgctgctctttggcctctctctctggcttctcagcttcctccttcactgtccgcagcatctccacctggtcttccagagacttcttcccagcctgtagctcaatgagctttttctgcttctcctcccgtgccttcttccagtcctcaataaggatcttcttcagacggaacccttcgcgggtgacctcggccatctgctgcagggactctctctccttacggcccttctctttgcaggtgttctcacagatgacgccgctgttgtactcgtctgttccatcgcagcagtcacaaacaccatcgttgacccggttggaggggatatacaggggcttatagccagtgttggtgcagtggaagctgccattaggacaggcagccgtgcctggctcgtcagagccatctttgcagtcgcaatagtcatcgttgacctgatcaaatgggatggtggccgaaccgtccaggcaggtgaaaggcttggactcatcgtagaagtgatgattggtgagggagacgccccggggcctcttgacctccacggcccagcacatgggtagcagcagcagcagcggcaacagcatctcaccagacgctctgaggcccgaaacgggttctgtgggaggaagcctacagcggggagatgcgctgtgtcttcacgacgaggccggagcaaaggtcagtatccaccgcacccctcttgtccagcagccgcggttcctgctgcagaaagaaagcgg

SEQ ID NO: 258370 - DNA, 970 bp, Homo Sapiens
aggtaaggtaagtattactagtcccactaggaggggtggcagggacagggctgggggtggtggggcgaagtcaccaaggtggggggcccagggagggcaagctcctttacccatctttgaaggctgttggggcctgggaatgtggaccagccccgcctgggccccagagcaggggcacgaagccccacaaaaggtcctgccgccacagaggagggcaacagagccacaggcaggcccagaggggcgggtggacggcactgcaggggctggcttcatgccttcttgaggttctctgcgcccatccagctagagctcgtcatggtcgtcttcggtgggtgcttcaggcggtggctccgggcaggcggctggcgtcatcagctccatgaggtactcgcagcgactgggctctgtggtgctggtcaccatggtctctttcccgcacaggaggcgcacggtggtggagcggttggggccctgccagcagcccgtgccttgctcatacttcatggcactgaacttgtcgtggtcggggccaatccatgagccccaggtgccaaggctggtgggagagcccccgagtttgggtttctgcgagacaagcttgaaggggcagaggcggtagacgtattcgttggtggtgagctcgtagcactggctgtacaggtaagcaaactccccgttggggccaaagtcaaaagaaatctcttgctccaggttcctgatggactcctccatgtccttcagcgaccgctcggcctcctcgaacttgttgcgggcctcctgggcagcatcgatgaaggcctgcgtctgctcgtcgtagggcggcattttgtcttcctcagcagggctggccggctgcgggggtgacagtggcggtggggcctccttgggctgctccccctgcacctcggaatcctcctcctcctcctcttcttcagcctctcctcgtgccgaattcgccacccaggcc

SEQ ID NO: 258371 - DNA, 954 bp, Homo Sapiens
  misc_feature (237)..(237): n is a, c, g, or t
  misc_feature (242)..(242): n is a, c, g, or t
  misc_feature (249)..(250): n is a, c, g, or t
  misc_feature (253)..(254): n is a, c, g, or t
  misc_feature (262)..(264): n is a, c, g, or t
  misc_feature (278)..(295): n is a, c, g, or t
cccgcgcggaccagcagtgggctaccttccccagggtcgcggggccttctcaaggcctcttcccagggccccagccgagcgtgcaaacccccaatccttttctcaaaaacattacgccccggccatggtgggtgcaccaccgtgtaattccgagcttacttgggggggttagagacccaggcaaattgtttgaaccccgggaggttgaaggttgcagtcagctgaggtacccaacantgccntccaagnnggnncaaagaannnagactccacctccnnnnnnnnnnnnnnnnnngcagggaacatggggacacaggttgatagagtggccatgtgggtccatcttcctcagggcccgccgcctccccttgctggggcagaccgacgagactccacctccccgcccacctctgcgcccatccagctagagctcgtcatggtcgtcttcggtgggtgcttcaggcggtggctaccgggcagcaggctggcgtcatcagctccatagaggtactcgcagcgactgggctctgtggtgctggtcaccatggtctcgtttcccgcacaggaggcgcacggtgctggagcggttggggccctgccagcagcccgtgccttgctcatacttcatggcactgaacttgtcgtggtcaggggccaatccatgagccccaggtgccaaggctggtgggagagcccccgagtttgggtttctgcgagacaagcttgaaggggcagaggcggtagacgtattcgttggtggtgagctcgtagcactggctgtacaggtaagcaaactccccgttggggccaaagtcaaaagaaatctcttgctccaggttcctgatggactcctccatgtccttcagcgaccgctcggcctcctcgaacttgttcgcgggcctcctgggcagcatcgatgaaggcctgcgtctgctcgtcgtagggcggcatttt

SEQ ID NO: 258372 - DNA, 354 bp, Homo Sapiens
  misc_feature (17)..(17): n is a, c, g, or t
  misc_feature (27)..(27): n is a, c, g, or t
  misc_feature (42)..(42): n is a, c, g, or t
  misc_feature (51)..(51): n is a, c, g, or t
  misc_feature (63)..(63): n is a, c, g, or t
  misc_feature (329)..(329): n is a, c, g, or t
ctggatgggcgcaaaanaacctcaaanaaggcatgaagccancccctgcantgccgtccaacnccgccctctgggcctgcctgtggctctgttgccctcctctgtggcggcaggacctttgtggggcttcgtgccctgctctggggcccaggcggggctggtccacattcccaggccccaaaagccttcaaagatgggtaaaggagcttgccctccctgggccccccaccttggtgactcgccccaccacccccagccctgtccctgccacccctcctagtggggactagtgaatgacttgacctgtgacctcaatacaataaatgtgntcccccacccaaaaaaattttacaa

SEQ ID NO: 258373 - DNA, 489 bp, Homo Sapiens
  misc_feature (295)..(295): n is a, c, g, or t
  misc_feature (364)..(424): n is a, c, g, or t
ccgtgcgcctcttgtgcggaaaagagaccatggtgaccagcaccacagagcccagtcgctgcgagtacctcatggagctgatgacgccagccgcctgcccggagccaccgcttgaagcacccaccgaagacgaccatgacgagctctagctggatgggcgcagagaacctcaagaaggcatgaagccagcccctgcagtgccgtccacccgcccctctgggcctgcctgtggctgctgttgccctcctctgtggcggcaggacctttgtggggcttcgtgccctgctctggggcnccaggcggggctggtccacattcccagggccccaacagccttcaaagatgggtaaaggagcttgccctnnnnnnnnnnnnnnnnnnnnnnnnnnnnnnnnnnnnnnnnnnnnnnnnnnnnnnnnnnnnncctagtggggactagtgaatgacttgacctgtgacctcaatacaataaatgtgatcccccaccca

SEQ ID NO: 258374 - DNA, 2569 bp, Homo Sapiens
  misc_feature (118)..(118): n is a, c, g, or t
  misc_feature (129)..(129): n is a, c, g, or t
  misc_feature (311)..(334): n is a, c, g, or t
  misc_feature (374)..(375): n is a, c, g, or t
  misc_feature (683)..(683): n is a, c, g, or t
  misc_feature (749)..(749): n is a, c, g, or t
  misc_feature (2244)..(2244): n is a, c, g, or t
gaatctaagaaaatgagctacaggtattgagcaagagacagagaaacaggcagaagaggtaggcattcacagaagaaacaaagcctactttgtgctcccttggttttagagttcagangctctcggggnggtttaaatccatcattatcttctggagtgacagactccgaggaaacaaattccatttttttcccattgtgttgaaaaatggctgtcttggattcaggatctctaataactgaatgatattgaattcttgaaatattatcatatttcgtttccacagtaagctccttgggattattattgannnnnnnnnnnnnnnnnnnnnnnnagcagttctaggatgtgtgtccaatcctaatgggagagcnncaacttcacaatctgaacatgcaacttctaatttcctcttttttgaaaatatatttttcatagtattctcatctctcccgttttcatcaataccataagatttttcagtgttagctctgcttagtaatcttcctgaataaatgcaaacaaatgtccctctgtcaatgtcatctagacagcgtacaccccatcccttctgctcagttttgaacacctgtaacctcacttgaggaccatgttggacaactcggttttgacacaattgtcgattacatttgcacaaaaggctgcattcataaatgccagtnggaatctgtctctgtagtcttttatatttatatccagtggttattttgtcacttgacaagggggangttttggcattccttgctgtcagttgaagacatgcacattttgttatgtctatgcagccctcagagcagtcacaggaatcagtaaacatgctggaaaagttggttagattatatgctcgaggccacacagtctttctgtacttaaactgtgggagctttctactgtcaatttcattacagaaagaaatgggcactgattccactccattgctaatatccacatcagaaacaacttctttttgctttgggtaattccgagccaactgaacataggtattgaaagaaaaagttatctgtaaataaaaaagttacactctgtctcaagcaggtaacgaaaaacttcctccacgtttcgtagactccttccacaaggggttttataactcacgtggagtgctgaagaatgagagtttgtctttgcatgtcgtctttggaagtgacatttgattggcagctgcagagggttttctcccttcaagttcagtggcattttcatcagacaagcaccagagcagtcatgactttggtaagataaattcgaagatgagtctttttctctaaagtctacaactttatcttcaagagagagaatttccttattttctgttgttagaaatgtacagtcttctggaaaggagttttcacatgatgtagagggaaatgcattggatttgttttcctgttccttctgagtcacaggcataggatcctttattgatgttgaactgttaattatagttgcttcattcactagaatcattgcttggatgtattctttattggtggcagacccatctttgatcttttgtttcagtgactgcagcacattttgtacttgttcaaaaatgaagtccacttttccatcatcttctagctccatccagaaagtttttgcatcgccatttttttctcccatcttttgatgtcgcttataaatataaaatgcttcaaaaataggtttatcaaatcactttggattgcagaatatcactggaatccaactgtggtctctataaaatttgcagtcctcagacaaaatacatcattataccattctaaacctggtatcctttgatacttgaattttcaaatagaaattgtggctgaagaaactttcagaaatgagtgacagtccaaccaaaagacaagtccatgaatcttctcacgtaaatatttgtagtggtatcagatcattaacattatctttttaaaaataaaaaccaactccatcttttggtccacaaatggatgaaacattctgtgaaatgggctagtggtttaaccttcaagttctgcttctgggttttatactgctgtccatttcctgccgcccctttgacaacctcaggttcccagcagcttaggaatcacctctcattaaggctgcaccctgagacagacaggctgaaatggaggttggaaactcagtgcgcccgcggccccttctgcagccaggactgcacttgggtgccaggagaagggaggctgcaagggntggggtccagcccacatgactcgggcggccgagggtccgcggcgttttcagctcctccaacctcccggctagaggaactgtcgggggccagccacggcggtgccttggtttcacctggtccgctgcgttttctacgccgcccgcctgacctgaggagtgagtccgccagctccgttggcaaggctgggttcctccgcgggtggggctctcctccgacgccaagccgcccaaacctcccgagcgcaggtgccctctggccgggaagtacttcaccatttactagccttcatctcaaccacaacagtcccgccctgatcccgggaat

SEQ ID NO: 258375 - DNA, 1681 bp, Homo Sapiens
  misc_feature (406)..(488): n is a, c, g, or t
gggcccaaaggagagtgttgtaccctgggcccaaaaatagattgatttcgcttaaacccttgattcgaaaatagtcttcgtaagaggcgcctttccaccaaagattggccagatagaggttttataattaggatcaagttcatggtgtaatggaaaaatggtttgaaaatataacaaacccacggggtgtctcattggcgccatttctactgaggaacaaaaataacttggtcgccttggaccctgtcacttcctaaataagctagttatgtcagaccaaaaagatccggttttcatcaatattaggctgcaacccacaaacatacaccaatcatttattcgttcattaagcaaatatgcagcctccgcaagatgagctctcctgcagacaagcatggtctgaaannnnnnnnnnnnnnnnnnnnnnnnnnnnnnnnnnnnnnnnnnnnnnnnnnnnnnnnnnnnnnnnnnnnnnnnnnnnnnnnnnncagctctaacctcacctcattctccaggttacaaaggccatgtgcccctttgaatctggcagagaaagtttcctcgttgtaagtatttgcatctacttcaagccagattcttctgcctctttctcctttccagacccctactctgtgcagtgctgaccacagctagagccaccgccccattgctcaaccagtatttatttccctaaacgacccttcctcacattcccctccctccacctctccttaccaagcacccaaaagaggatttagaactagcagggtggacatcatctggtggtttctacttttctctgcctagcacaaaattgggagaaaactggagcctccatccgcagtcacacgtgtacagatctggggatttggatgtaggctttttctaacttctctctcagaagcttctacagaaacccttccatctgtagcctcaagggcccacctccaagggaaggcttaggcaatgatcctgtttctaccaacactgcaccttatcccaggaacctgccctagacctccagagaccatattttctctccctccatttctacccagacctccaggccaccttcaggaatcatagaaccgtacaattggaaggaattttagaggttttctagttggagttgtgtccaacagaattcattaacaccagcctgggcttgtttttcctcctccctctggacttttttcatcttttcctccacctcaaaaaatacttacacacagattcttcttgtacaggcatcaaaaccaactcctctgcccctaaggctgtgtccctgtggtctccagccacccctaccccagtcactcgccccttcctcatctctggaatttggccaggcagtcccagaagactctggagtgacctcctttgcctaaaaagcagacagataggcatgccccaggccctgagtgagcagaggaggactgtagggtgagagggaaagaaaatgaaggtgactttcatggaagtttcatttcttttccccgattgtaccaactgcatgtacttttggcctggctgcaaggagcaatattggtttactctcgtatccttaaaaagttacagaactgtgtcttaagagaattatttatagttactataactgaattgacaaatgtcaacttaactgataaattatatttggtaaaataaagaggacgtttattta

SEQ ID NO: 258376 - DNA, 735 bp, Homo Sapiens
  misc_feature (11)..(11): n is a, c, g, or t
  misc_feature (28)..(28): n is a, c, g, or t
  misc_feature (44)..(44): n is a, c, g, or t
  misc_feature (67)..(67): n is a, c, g, or t
  misc_feature (73)..(73): n is a, c, g, or t
  misc_feature (95)..(95): n is a, c, g, or t
  misc_feature (122)..(122): n is a, c, g, or t
  misc_feature (131)..(131): n is a, c, g, or t
  misc_feature (622)..(622): n is a, c, g, or t
  misc_feature (625)..(625): n is a, c, g, or t
aaaacctccgnccccctcaaaaccaaangggaccccattaaccngaaccatctttaatccccaaatnaaatgnaaaaatgaaaacctttgccagncccatatatgccatacattttaataanagtaatacnatatgtccttaagcaaatcaacaagcatgccagtgtccgtgcctgctggagatataggaaaatatagatgatgtaaaatacagctttattagaattctcttaaaatgtttgataatatacaagcagtctgactcccaatgctttgtgtcattatacaaataagaaaataacttgcttttaattctaatgcagcattttttaacctgctaaatagaactaacttcttgtttctgaaatcctgaacatatgcctcattgaaataccattttcaggacatcgttttcccagcaaaaagcttctttagataacagaatcatttggtatacacagaacacgaatgatgactgcaaggggaggctgcagggctggaggagggttagagcaacacagtttccagttacagttgagtcctggaagccagcaccagaaagaggggaatgataagacccgccctttgttctgtataaagacttggggcttttctttgagtnagngctgctgccgactttaaggcacagtcaggatgggtgctgtggtccacgcactgtaagagcttcactggtcggtaatcattaatacagctgtactggaaccccatgtcctt

SEQ ID NO: 258377 - DNA, 857 bp, Homo Sapiens
  misc_feature (6)..(6): n is a, c, g, or t
  misc_feature (17)..(17): n is a, c, g, or t
  misc_feature (21)..(21): n is a, c, g, or t
  misc_feature (31)..(32): n is a, c, g, or t
  misc_feature (50)..(50): n is a, c, g, or t
  misc_feature (52)..(52): n is a, c, g, or t
  misc_feature (78)..(78): n is a, c, g, or t
  misc_feature (92)..(92): n is a, c, g, or t
  misc_feature (124)..(125): n is a, c, g, or t
  misc_feature (134)..(135): n is a, c, g, or t
  misc_feature (147)..(147): n is a, c, g, or t
  misc_feature (163)..(163): n is a, c, g, or t
  misc_feature (173)..(173): n is a, c, g, or t
  misc_feature (178)..(178): n is a, c, g, or t
  misc_feature (180)..(180): n is a, c, g, or t
  misc_feature (199)..(199): n is a, c, g, or t
  misc_feature (207)..(207): n is a, c, g, or t
  misc_feature (212)..(212): n is a, c, g, or t
  misc_feature (214)..(214): n is a, c, g, or t
  misc_feature (248)..(248): n is a, c, g, or t
  misc_feature (262)..(262): n is a, c, g, or t
  misc_feature (268)..(269): n is a, c, g, or t
  misc_feature (704)..(704): n is a, c, g, or t
tgggcnaattcaagagngcanggaggggacnnaaagtgtcaatttttccnangtacacaagtaacaatttccatacancacaaacaatggcntgagacaacaaatcaagttcaaggcaagacannaagtggcannaaagatgtcacntgaagagggctgtcanacaatgacanatcanancaatcaaattttcattgangggacacnaaagntncaaatgtcaagatgtttcaaggacacactcaccntggctcctcaccangcaggnncggcatagcaccaacaacaggtcatgtgtagccacacacaccagctcacgacacaccatctccatcgatgtcgctgatcagcatgaccttggtgttggcagggatgtgctgcttgaagactggacgctgctcctctccgattagtgtctcgtggtgcccagaagcatccaacaccttggcaggtgtcaggtcaaacaaatgaaaccagccttcagcactcactgccaccaacaggttctttcctttattacacacgtctccaaccccaacgcaagtcagcattccctggcaggaacaggtgagccatggccgactgtcatcatttttatacacagacaccttcccgctggtgtctcccaccaccagttcatttaacgtatcgttatcaacgtctccgaggcagattgcgtgcgggaagaggctcccgctgaactnccagcgccacgcgctgcacgtagctaactgacctcatggcacctccaagagcagagggagcggagaggcccagtaaatattccctgaacccccgtcgcgacagccgccagagcggaaggccacctaaggcagcaagttacgtcactgcctccc

SEQ ID NO: 258378 - DNA, 1758 bp, Homo Sapiens
  misc_feature (210)..(210): n is a, c, g, or t
  misc_feature (613)..(613): n is a, c, g, or t
  misc_feature (1515)..(1526): n is a, c, g, or t
agtgtgaaaggaaactgaagccaaaggggtctttgcccccaaagtatgccttggagctgctcaccatctatgcctgggagcaggggagtggagtgccggattttgacactgcagaaggtttccggacagtcctggagctggtcacacaatatcagcagctctgcatcttctggaaggtcaattacaactttgaagatgagaccgtgaggnagtttctactgagccagttgcagaaaaccaggcctgtgatcttggacccagccgaacccacaggtgacgtgggtggaggggaccgttggtgttggcatcttctggcaaaagaagcaaaggaatggttatcctctccctgcttcaaggatgggactggaaacccaataccaccttggaaagtgccggtaaaagtcatctaaaggaggcgttgtctggaaatagccctgtaacaggcttgaatcaaagaacttctcctactgtagcaacctgaaattaactcagacacaaataaaggaaacccagctcacaggagcttaaacagctggtcagccccctaagcccccactacaagtgatcctcaggcaggtaaccccagattcatgcactgtagggtgctgcgcanatccctagtctctacccagtagatgccactagccctcctctcccagtgacaaccaaaagtcttcagacattgtcaaacgttcccctgggttcacagatctttctgcctttggcttttggctccaccctctttagctgttaatttgagtacttatggccctgaaagcggccacggtgcctccagatggcaggtttgcaatccaagcaggaagaaggaaaagatacccaaaggtcaagaacacagtgattttattagaagtttcatccgcaaattttcttccatttcattgctcagaaatgtcatgtggttacctgtaacttgaaggtggctacaaagatgactgtggacgtgggttgcactggccacccaaggatgtctgccacacctctccaaagccctccctacctaccaagatatacctgatatattccaccaggatatcctccctccagatatacttggttctctccaccaggttctttctttaaagcaggatttctcaactttgatacttactcacatttggggctagacagttctttgtttggaggctctcttgtgcattgtaggatgttgagcagcatctctggcctgtacccagtagatgccacccagttgtgacaattaaaagtgtcttgagactttatcatgtgtcttctgccctaggtgagaacccttgcactagaggaaccctacaccccaaccctggggggaatgtagggaagaggtggccaagccaaccgtggggttagctctaattattaagatatgcattataaataaataccaaaaaattggctctggcaatagttaccttcccagatacagggccccccttttttcccctaactcttttaagcaatgattgtaactattaggagacattgctctcccacgtatgnnnnnnnnnnnnagacaatgccagccacccagaagttggggagctaggatccatcctattgtcaatgagaaggtctcatccagagccatagaaatccgaataaatatcctaaagaaacttctggagataatttggcaatcgctttttatgacccggcctaccgcggagaaagaaaacctcccatctattttttccttggtggggacctattcctccttcctttggttcttggactttttgaaat

SEQ ID NO: 258379 - DNA, 937 bp, Homo Sapiens
  misc_feature (27)..(27): n is a, c, g, or t
  misc_feature (34)..(34): n is a, c, g, or t
  misc_feature (39)..(39): n is a, c, g, or t
  misc_feature (51)..(51): n is a, c, g, or t
  misc_feature (68)..(68): n is a, c, g, or t
  misc_feature (76)..(76): n is a, c, g, or t
  misc_feature (85)..(85): n is a, c, g, or t
  misc_feature (90)..(90): n is a, c, g, or t
  misc_feature (108)..(108): n is a, c, g, or t
  misc_feature (115)..(115): n is a, c, g, or t
  misc_feature (557)..(557): n is a, c, g, or t
  misc_feature (711)..(752): n is a, c, g, or t
acaatccccggaaagtaacaatggccnaaggttnaaggncggggtaaaaanaggggggaaatgttgcnagcgtaancccttcaanacccncccgggttccttggatantctgccnccctgttccaagttcaagaataaaagcgaacagcaggacccaaatgcagctcccaacccactccccaggctagacatgcttgtgtccacacagcacaccaatgtgatacttccactgaccggctgcagctctgcatgaaggactcggggtctggatgccatggaatcactgtggctcttgttgcagttttgtactctatacttggtttttcaattaagcttaatggcttttttaaaacatgacttgaagctctagttttctagatcttttacagtgtacagtattttacataactaagctgtattaaaagcttgttcatttacttgccaggaccctggctctacttttagagtcattgtaagaaactctaacttgcatcaaggtactaataagcttaattttaataacccaaagtttaaaggttccgatctttctccttggnggtggagtgatctcattctcaggacaaccgtttacttacctgattcctcggagcattatcaacttctgctctgttgtcctgaccatacctatgtcccagaactaccgttaaatgtgctgcgggattctacgcttgaatcccgcactgcaaaccnnnnnnnnnnnnnnnnnnnnnnnnnnnnnnnnnnnnnnnnnntgggttgtttgccgcggccccccggcgactcttcgcgctttactccttccgcctcgcggcctccttttgcgcccgccccccctcggcagtacgcggcgactccgaatcgccgcggcccgtgcgtttgtccctttttattccctgaccggcgcggccccattcggggtgttcagccgtcctcggcc

SEQ ID NO: 258380 - DNA, 1042 bp, Homo Sapiens
  misc_feature (315)..(346): n is a, c, g, or t
  misc_feature (360)..(589): n is a, c, g, or t
  misc_feature (859)..(859): n is a, c, g, or t
  misc_feature (961)..(961): n is a, c, g, or t
tgatgactctgtcctgctcagctgttgtgacactgtccagatgaagataacccatataaaacctttagcacatgttctgagacacactaggtgctcagtatatgttagtgacctaagttaacagtagacctaagtttaaaaccaaagtctcctgagtcccaggctagcagtattcactaaattgccaatacttttatagaggaggaaaccataaaaacggttgagagattagctgccttatagcctttttataacaagacatggggtaggtaaaaagataataaaatagttccagttgtgtaagtttagaagagnnnnnnnnnnnnnnnnnnnnnnnnnnnnnnnnaaagacagggtctnnnnnnnnnnnnnnnnnnnnnnnnnnnnnnnnnnnnnnnnnnnnnnnnnnnnnnnnnnnnnnnnnnnnnnnnnnnnnnnnnnnnnnnnnnnnnnnnnnnnnnnnnnnnnnnnnnnnnnnnnnnnnnnnnnnnnnnnnnnnnnnnnnnnnnnnnnnnnnnnnnnnnnnnnnnnnnnnnnnnnnnnnnnnnnnnnnnnnnnnnnnnnnnnnnnnnnnnnnnnnnnnnnnnnngtatgagccaccctgcctggccaacagcaactatttgtataactttctacaaacggcgtaactgaggcacagattggttagcgtcttttctttctatagaacatctagaatttataaacgtaactgagttatgtaaaggtaaagagaaagatgtttctcttatgtatagaaaaggagtgttaggttacttgttctccccctttcaagtgaaaaactgcttggaatttagaaataaattagagcttaggaataatcattactttttttggntctaggcattattatctacttttacctggaacaattacaagcaattggaaattagactagggaagccatactacaggcaaagagaaaacaaaatctaagctntctgctgccctctacacgagatattgtgaaatgcaattgtcaacctgtttttcaactttgtaattatatttgtaacgacat

SEQ ID NO: 258381 - DNA, 500 bp, Homo Sapiens
  misc_feature (463)..(463): n is a, c, g, or t
  misc_feature (477)..(477): n is a, c, g, or t
gggttcgagcgaccatggtggcccgggtgtggtcgctgatgaggttcctcatcaagggaagtgtggctgggggcgccgtctacctggtgtacgaccaggagctgctggggcccagccacaagagccaggcagccctacagaaggctggggaggtggtcccccccgccatgtaccagttcagccagtacgtgtgtcagcaaaaaggcctgcagataccccagctcccagcccctccaaagatttactttcccatccgtgactcctggaatgcaggcatcatgacggtgatgtcagctctgtcggtggccccctccaaggcccgcgagtactccaaggagggctgggagtatgtaaaggcgcgcaccaagtagcgagtcagcaggggccgcctgccccggccagaacgggcagagctgccactaacctgaagactccggactgggaccccacttcgagggcagcncccggccttgccgncccaataaaggacttcagaagtg

SEQ ID NO: 258382 - DNA, 555 bp, Homo Sapiens
ggatgagaagtgaatgcgtgctcggagctgcgagtgacagcgggcaggaggcgcccagggacacttggtttctccagggctggaaggcttctagaaggttcctcatcaagggaagtgtggctgggggcgccgtctacctggtgtacgaccaggagctgctggggcccagcgacaagagccaggcagccctacagaaggctggggaggtggtcccccccgccatgtaccagttcagccagtacgtgtgtcagcagacaggcctgcagataccccagctcccagcccctccaaagatttactttcccatccgtgactcctggaatgcaggcatcatgacggtgatgtcagctctgtcggtggccccctccaaggcccgcgagtactccaaggagggctgggagtatgtgaaggcgcgcaccaagtagcgagtcagcagggccgcctgccccggccagaacgagcagggctgccactgacctgaagactccggactgggaccccactccgagggcagcatcccccttgccggcccaataaaggacttcagaagtgaaa

SEQ ID NO: 258383 - DNA, 2192 bp, Homo Sapiens
  misc_feature (247)..(256): n is a, c, g, or t
  misc_feature (485)..(500): n is a, c, g, or t
  misc_feature (1994)..(1994): n is a, c, g, or t
tcactttgcaaactctgtatttatttggattaaaaagctttagatgaacaacaaaaaaaagatacatacatgttataagactagttaccacgtaaacctcagatgatatgatacagaaattagaataaaccaagtcttaatcaggtatgaaaacattcaagctcaaaatcatcaacaccaatttggggattttacagaaataggtgcccctctcaattcttcctcataggaaggggagagtggcttnnnnnnnnnncaacaaccaaaacagttaaaggccttttaaatcagttggctgacaaacatactgttttaaacctacaggttcccctcagtccccccgtttgcaatataaacaattcttctccacaggaacttacattttgaaaacatttaggccattatactttctaagccacattactacagttcctaaaacttatgaaaaaaaggtgtatagtttacttgtactttcttgagtcaannnnnnnnnnnnnnnngaagatggctgacctcaaatcttatatcctaaatattaacgatatcccccaagttaatatacagaaaaacatgattctaaaataaatacacaggctttttaaaaaaaacttaattagggcctgtctagtgatgccctgggccggtgctgcactgctttagggaagcccctggctggatctatgtttcctatagcacctctaggcactgggaaggagcctggaggagagctctggcttctaatgacccacgtggcccccagtgaaaaatttttttagaggctccccaaagaagtctcatccagaccttaagggaaataaaatgaatgcatgaaataaataaataatttaaccacaactaaatttcatgttctttgggggtaattccaggatgtcctagaaacaaaataatctggattgcattatacagtccatgatgattcaattgcccaaatagccaggaattgaagatttatctgactcactttaacaataaggtactgacacactactgcaatacatttttttaaattcaatattatttaaaatacttgatgcaaattcaaatccagtggttgactaaaggcaattaagttaaagggcctcccatatttaaagtatctagatacaagagacttttttccattctacactcttttgccctcatgatttaataagtacagtaattaaacatctgggtactgattcatagcagattaaaaggaaaaaagcatcctctgaggattaactctctcagattataaacagcagtggaagctctaccacaatggcaatcacccagttactataaagcaggtttcaaaaacatgccgccaagtgaaacaatgttcctactgtctgccatcctatgctgccttcaaatgtttattgtagggtcatataagaaagacagggtcaccaaacccaagtgtttgggatctgtaatggtctttctagtaagcgttttattaaattatgattcccttctcctgtaattcaaaagcacaagctaaatttaaaaaatattttagaaagtattaaatttctggttgagaattataacaacattgaaacttaaaagaaaaaatacatctgataataaggaaataaggaatactaaaacatacttgtatatgaaggcaatcaatctacttgttcacaattatgcttcttatacagctcatatctagttccatactctcttacccatgttaggttaggtgttatgtttaaaaataaatcacctccatgcataccttaatgctttcttcaagacgaacttcaatgtttttcaatgtaacaggtttaaaattttaaatcatctgaaatttataggcataaattgtgaattcattataaatagatcaaaatatccttaaacgtacctgccctagattaaacatacctcagggttgtgcacgtgttctgcaaaaatcactgacaccatagtctaactcacagatgtctaactcagcacaattgaaaaagtgctttttncccctcctggtgtccaggaggtacattagctgcagacagatgcacagcactgattacatatttccgtagtgagcctctgagttaatagagcaaatgtgctgtgtctattaaacatctaaaacctaaataaccacctttcaaagaaagcacttcatctgtaagaaacagcttttgcagaaagtggcttaagatattcag

SEQ ID NO: 258384 - DNA, 1092 bp, Homo Sapiens
  misc_feature (52)..(52): n is a, c, g, or t
  misc_feature (354)..(354): n is a, c, g, or t
  misc_feature (363)..(363): n is a, c, g, or t
  misc_feature (367)..(370): n is a, c, g, or t
  misc_feature (397)..(397): n is a, c, g, or t
  misc_feature (412)..(412): n is a, c, g, or t
  misc_feature (415)..(415): n is a, c, g, or t
  misc_feature (423)..(431): n is a, c, g, or t
  misc_feature (447)..(447): n is a, c, g, or t
  misc_feature (454)..(581): n is a, c, g, or t
  misc_feature (584)..(619): n is a, c, g, or t
  misc_feature (628)..(1026): n is a, c, g, or t
  misc_feature (1029)..(1029): n is a, c, g, or t
  misc_feature (1037)..(1037): n is a, c, g, or t
  misc_feature (1047)..(1047): n is a, c, g, or t
  misc_feature (1052)..(1052): n is a, c, g, or t
  misc_feature (1055)..(1055): n is a, c, g, or t
  misc_feature (1061)..(1062): n is a, c, g, or t
  misc_feature (1075)..(1075): n is a, c, g, or t
  misc_feature (1080)..(1082): n is a, c, g, or t
  misc_feature (1085)..(1085): n is a, c, g, or t
attaggaaattgtagataattttaatgaagtcaacatcaagaatataatctnggttgtaataccaatacaatgtgttctaaaataatttttctattgagttaaatattcatctgtagatcctataacagcatgttcatattcacaaaatctgaatgaaaagtaaacacaacttggcatttctgacgcagggtaacacaaagttcacttcggaggggactgagatttttgtttaattttgcttttgaaaccaagcacagttatagtcaaaatgagggacattattcagaatgaggttatgtatttatttaacaaaatactgcttctctgaagtacatttcattagggagagtganagtgatgcnaaannnnagaacatgaaaatgcacacagcatttntgagaggttatgatnatntatttgannnnnnnnngagacagagtctcacnctgtcannnnnnnnnnnnnnnnnnnnnnnnnnnnnnnnnnnnnnnnnnnnnnnnnnnnnnnnnnnnnnnnnnnnnnnnnnnnnnnnnnnnnnnnnnnnnnnnnnnnnnnnnnnnnnnnnnnnnnnnnnnnnnnnatnnnnnnnnnnnnnnnnnnnnnnnnnnnnnnnnnnnngaggcagannnnnnnnnnnnnnnnnnnnnnnnnnnnnnnnnnnnnnnnnnnnnnnnnnnnnnnnnnnnnnnnnnnnnnnnnnnnnnnnnnnnnnnnnnnnnnnnnnnnnnnnnnnnnnnnnnnnnnnnnnnnnnnnnnnnnnnnnnnnnnnnnnnnnnnnnnnnnnnnnnnnnnnnnnnnnnnnnnnnnnnnnnnnnnnnnnnnnnnnnnnnnnnnnnnnnnnnnnnnnnnnnnnnnnnnnnnnnnnnnnnnnnnnnnnnnnnnnnnnnnnnnnnnnnnnnnnnnnnnnnnnnnnnnnnnnnnnnnnnnnnnnnnnnnnnnnnnnnnnnnnnnnnnnnnnnnnnnnnnnnnnnnnnnnnnnnnnnnnnnnnnnnnnnnnnnnnnnnnnnnnnnnnnnnnnnnnnnnnacntgccaaanggtattttcnggccnttntttcgnnactcttttatccnacttnnntcntttagat

SEQ ID NO: 258385 - DNA, 1299 bp, Homo Sapiens
cggcggcggcggtcgaaagcggagtgaagagggaggcagggagccggagagccggaaccggagtcgcagcggcggtaatagagacccctgtgcggtgcggagggggcggcggccccgactctgacccgcgccgggggtgggccatggcggagatcagcgacctggaccggcagatcgagcagctgcgtcgctgcgagctcatcaaggagagcgaagtcaaggccctgtgcgctaaggccagagagatcttggtagaggagagcaacgtgcagagggtggactcgccagtcacagtgtgcggcgacatccatggacaattctatgacctcaaagagctgttcagagtaggtggcgacgtccctgagaccaactacctcttcatgggggactttgtggaccgtggcttctatagcgtcgaaacgttcctcctgctgctggcacttaaggttcgctatcctgatcgcatcacactgatccggggcaaccatgagagtcgccagatcacgcaggtctatggcttctacgatgagtgcctgcgcaagtacggctcggtgactgtgtggcgctactgcactgagatctttgactacctcagcctgtcagccatcatcgatggcaagatcttctgcgtgcacgggggcctctccccctccatccagaccctggatcagattcggacaatcgaccgaaagcaagaggtgcctcatgatgggcccatgtgtgacctcctctggtctgacccagaagacaccacaggctggggcgtgagcccccgaggagccggctacctatttggcagtgacgtggtggcccagttcaacgcagccaatgacattgacatgatctgccgtgcccaccaactggtgatggaaggttacaagtggcacttcaatgagacggtgctcactgtgtggtcggcacccaactactgctaccgctgtgggaatgtggcagccatcttggagctggacgagcatctccagaaagatttcatcatctttgaggctgctccccaagagacacggggcatcccctccaagaagcccgtggccgactacttcctgtgaccccgcccggcccctgccccctccaacccttctggccctcgcaccactgtgactctgccatcttcctcagacggaggctgggcgtggggggggctgtcctggctctgctgtcccccaagagggtgcttcgagggtgaggacttctctggagaggcctggagacctagctccatgttcctcctcctctctccccacttgaaccatgaagtttccaaaaaaagaggaagagaag

SEQ ID NO: 258386 - DNA, 933 bp, Homo Sapiens
  misc_feature (632)..(632): n is a, c, g, or t
  misc_feature (636)..(636): n is a, c, g, or t
  misc_feature (642)..(642): n is a, c, g, or t
  misc_feature (647)..(649): n is a, c, g, or t
  misc_feature (658)..(658): n is a, c, g, or t
  misc_feature (660)..(661): n is a, c, g, or t
  misc_feature (671)..(672): n is a, c, g, or t
  misc_feature (753)..(753): n is a, c, g, or t
  misc_feature (779)..(788): n is a, c, g, or t
  misc_feature (793)..(793): n is a, c, g, or t
  misc_feature (802)..(802): n is a, c, g, or t
  misc_feature (859)..(859): n is a, c, g, or t
  misc_feature (863)..(863): n is a, c, g, or t
  misc_feature (888)..(888): n is a, c, g, or t
  misc_feature (891)..(891): n is a, c, g, or t
  misc_feature (924)..(924): n is a, c, g, or t
attaactgtggcggcgggaaggcggagcctgcagctggctgggcggttaggagggcccggggccgagacgatggctgaccacaaccctgacagcgactccacgccgcgcacgctgctgcgacgcgtgctggatacagcggacccgcgcaccccgcggcgaccccggagtgctcgggctggagcccggagagccctgcttgaaacggcttcccccaggaagttgagtggccaaacaaggacgatagccagagggcgttcccatggagccaggtctgttggcagatcggcccatattcaggccagtgggcacttggaggaacagacacctcggacgctgctgaagaacatcctactaactgccccagaatcttccatcctgatgcctgagtcggtagtgaagccagtgccagcaccgcaggcggtccaaccctccagacaagagagcagttgcggcagcctggagctgcaacttcctgagctcgagccccccacaaccctggctccaggtctgctggcccctggcaggaggaaacagaggctgagactgtcagtgtttcagcagggagtggaccaggggctgtctctctcccaagagcctcaagggaatgctgatgcctcttccctcaccatancccncaaccntaccnnngccacaccncnncagccacagnnagggcagaggccgggcggggcccgcagaccgccagcccgccgagcgggagacgggggggccgggggcgcgggagcggcganagacggcccgggcgccgccaaggaannnnnnnnnnccccngcgggccgngcggggaaagcgcgccccgcgaggacagagaggaggggaggcggaggcacgggggcncccncccgggggggcaaggacagcgagcnagnggggcagggggcgacaaggaaggccgcgggcgncgacagggg

SEQ ID NO: 258387 - DNA, 1105 bp, Homo Sapiens
  misc_feature (514)..(522): n is a, c, g, or t
aagtgtgtatataataaatgttggattgaggatagaaatttaagctgagaaatgtttaatttggacctaaaaaagtttattattactattattattgtggaaggaaatacatacaggcacattttagtatctacaacagtatttgggaagctgtcatgaaacacaaaacttcatttaaattttattataaagacctttattaggagaaaggacatattttctatttcttacttttattttgtgccttgaaggacttgtgaatgtatagaataattattttttcttactgcttcctctttgcaacccaacctccaccaagtcaatcgtgaaggtaggaagaaagctgtatttctgttacttttaaaaatgataacgagaagaaattaaaacaatggcttaagagaaagaggatgtaaggagtacaaagcaaaacttaacaaagagttagtaaaggaacttgcattgacaattcactcagccatgttaattttatcattaatactgtcttcatcannnnnnnnnccaggtctctctgctcgtatttgcttggtgctccgaaatgcacgggaacagacagctatgggaaagctgcacagagcagttggcaatcaacatgtcctagaagggtgtgtggagtagcaaaacaagtggaacggatgaagaacttccaagctccttcgcagagttttgggccctagtgtgcagggctgctccctcatgagatggaggacaatgtcgcccacacctacttggacctctcaccaaggacactgccctcagagataaatctgttggacggcagcaaagagaccccaaattgtctcaacctccaggacacggcaagttgcaagtttccgagttgggggaggcaaagcgggaaaacatgtttggcgatttcctcctgccactcaccgaccggagaaatggggaggcggactccaggtctttcgtggactgccaagagccctatagggcgtccagccttcgatcggctcgagtccctcggacagttgcccattcacagcgtgcaaaggggtcgcactccctgtgggttctccgccctcagaagcggctgcgcaggaaagtcacctccactgcccggcgg

SEQ ID NO: 258388 - DNA, 1964 bp, Homo Sapiens
  misc_feature (12)..(12): n is a, c, g, or t
  misc_feature (1940)..(1940): n is a, c, g, or t
  misc_feature (1950)..(1950): n is a, c, g, or t
gggcaaccaccncagtcgagacagcaggcggctcaagtggacagccgggatggcagagcgtgcggcgctggaggagctggtgaaacttcagggagagcgcgtgcgaggcctcaagcagcagaaggccagcgccgagctgatcgaggaggaggtggcgaaactcctgaaactgaaggcacagctgggtcctgatgaaagcaaacagaaatttgtgctcaaaacccccaagggcacaagagactatagtccccggcagatggcagttcgcgagaaggtgtttgacgtaatcatccgttgcttcaagcgccacggtgcagaagtcattgatacacctgtatttgaactaaaggaaacactgatgggaaagtatggggaagactccaagcttatctatgacctgaaggaccagggcggggagctcctgtcccttcgctatgacctcactgttccttttgctcggtatttggcaatgaataaactgaccaacattaaacgctaccacatagcaaaggtatatcggcgggataacccagccatgacccgtggccgataccgggaattctaccagtgtgattttgacattgctgggaactttgatcccatgatccctgatgcagagtgcctgaagatcatgtgcgagatcctgagttcacttcagataggcgacttcctggtcaaggtaaacgatcgacgcattctagatgggatgtttgctatctgtggtgtttctgacagcaagttccgtaccatctgctcctcagtagacaagctggacaaggtgtcctgggaagaggtgaagaatgagatggtgggagagaagggccttgcacctgaggtggctgaccgcattggggactatgtccagcaacatggtggggtatccctggtggaacagctgctccaggatcctaaactatcccaaaacaagcaggccttggagggcctgggagacctgaagttgctctttgagtacctgaccctatttggcattgatgacaaaatctcctttgacctgagccttgctcgagggctggattactacactggggtgatctatgaggcagtgctgctacagaccccagcccaggcaggggaagagcccctgggtgtgggcagtgtggctgctggaggacgctatgatgggctagtgggcatgttcgaccccaaagggcgcaaggtgccatgtgtggggctcagcattggggtggagcggattttctccatcgtggaacagagactagaggctttggaggagaagatacggaccacggagacacaggtgcttgtggcatctgcacagaagaagctgctagaggaaagactaaagcttgtctcagaactgtgggatgctgggatcaaggctgagctgctgtacaagaagaacccaaagctactgaaccagttacagtactgtgaggaggcaggcatcccactggtggctatcatcggcgagcaggaactcaaggatggggtcatcaagctccgttcagtgacgagcagggaagaggtggatgtccgaagagaagaccttgtggaggaaatcaaaaggagaacaggccagcccctctgcatctgctgaactgaacaaactatcagaggaaaggaagtgggactggcactatttgaggttaagacaaactgcatatgtacttcaattgctttgcacttttccgtttcagcggaagacctgaagagtggtcagaacagagcctttgatttttattatggttattttattgattattactggcaaaaacggccaggtacaacacctttttcatacaaggcccaggaggcttagtccagtctgtgctcctgggctacaaggacccagcctgagatggtcccatctgcagggccccgcaccagttggagcagatgcctccccaccaccaattgccaaaggtccaataaaatgcctcaaccacggtaaaaacccntccccccccnaatacaaaaattgt

SEQ ID NO: 258389 - DNA, 913 bp, Homo Sapiens
  misc_feature (191)..(207): n is a, c, g, or t
  misc_feature (382)..(382): n is a, c, g, or t
  misc_feature (585)..(596): n is a, c, g, or t
catagggttagattttttttatccttttctagttcagttaattcatcctgttgaattgcaccatcgtgaaagatgggaaaaatcgtgatgatgggtaaggggaaaacttcccggaaggcaatggggcaaggaaaaagaaagcctatgggaaatggctgtgctcccaacatagctttgcagatgatgtgggnnnnnnnnnnnnnnnnnggttgtttgttttgagagagagtcttgctctgtctcccgggctagggtgtggtggtgtgatcttggctcacggcagccttgccctcccgggctcaagcagtcttcatctcagcctccagagtagctggggacttacaggcatgtgatatgatgctcggccgaatttttgtttacntttttagagagatggggtcttgccaaatttgccaggctggtttgaactcctacaactcaagcattcctcccaccttggtctcccaaaatgttgggaccacgggtgtgagccaccgcgcccagctagctcctgtgttttgtttttgttttgtaactttggttgatgttaaggccctctcattttggaaagcaggaaaacaggannnnnnnnnnnnatcttgttccctggaggatccagggatgaggatagagtggcctgagagcagtgcttggattcagcctcctgctgggtccttctgctggatacaggcaccaagaggcgggggtggagcagggagctgcgccttcctggggtgcccggtggtgtgtagagaaaagctgcttgtttactccttaagtcaatgtattggtgactgttgatttgttgaacaattcaggaatcaagggctgtggagaaactccctcatgttgttggcaacaggtgaatgaacctagagcggtgacatgaaaataaagctcactgttactcgca

SEQ ID NO: 258390 - DNA, 802 bp, Homo Sapiens
ctattgtcttatacaggaagaaggaagcggcgccgccatcgcctcccggcgctccctccccgactcctaagtccttcggccgccaccatgtccgcctcggctgtcttcattctggacgttaagggcaagccattgatcagccgcaactacaagggcgatgtggccatgagcaagattgagcacttcatgcctttgctggtacagcgggaggaggaaggcgccctggccccgctgctgagccacggccaggtccacttcctatggatcaaacacagcaacctctacttggtggccaccacatcgaagaatgccaatgcctccctggtgtactccttcctgtataagacaatagaggtattctgcgaatacttcaaggagctggaggaggagagcatccgggacaactttgtcatcgtctacgagttgctggacgagctcatggactttggcttcccgcagaccaccgacagcaagatcctgcaggagtacatcactcagcagagcaacaagctggagacgggcaagtcacggggtgccacccactgtcaccaacgctgtgtcctggcgctccgagggtatcaagtataagaagaacgaggtcttcattgatgtcatagagtctgtcaacctgctggtcaatggcaacggcagcgtcccttctgagcggaatcggtcggtaccatcaagcctcaaggtggtttctgtcaagaaatggcaaaagctgcggctggggccctccatggacggcgtggctccttcgaggctccctgggccctttccgggcagccaagaacccaattct

SEQ ID NO: 258391 - DNA, 2332 bp, Homo Sapiens
taggtagcgaggcctgggtggcgaattcggcacgaggtgagctgtcgcgggcggcgcccggccttgctcaacgcccagcagtccccaccgtcgctgccgccgccaccgccctcggccgctgccgaggcctcctgcagccatcatgtccgccagcgccgtctacgtgctggacctgaagggcaaggtgctcatctgccggaactaccgtggcgacgtggacatgtcagaggtggagcacttcatgcccatcctgatggagaaggaggaggaggggatgctgtcgcccatcctggcccacgggggggtccgtttcatgtggatcaaacacaacaacctgtatctggttgccacatccaagaagaacgcgtgcgtgtcgctggtcttttctttcctctataaggtggtgcaggtgttttccgagtacttcaaggagctggaggaggagagcatccgggacaactttgttatcatctacgagctgctggacgagctcatggacttcggctacccccagaccaccgacagcaagatcctgcaggagtacatcactcaggaaggccacaagctggaaacaggggccccgcggccaccagccaccgtcaccaacgcggtgtcctggcggtccgaaggcatcaagtatcggaagaatgaggtgttcttggacgtcatcgagtctgtcaacctcttggtcagcgccaacggcaatgtcctgcgcagcgagatcgtgggctccatcaagatgcgagtcttcctctcgggcatgcccgagctgcgcctgggcctcaacgacaaggtcctctttgacaacacgggccgcggcaaaagcaaatcccctggaactggaaggatgtgaaagttccaccagtgtgtgcggctatcacgcttcgagaatgaccgcaccatctccttcatcccacccgacggcgagttcgagctcatgtcctaccgtctcaacacccacgtcaagcctttgatatggatcgagtcggtgatcgagaagcactcccacagccgcatcgagtacatgatcaaggccaaaagccagttcaagcggcggtcaacagccaacaacgtggagatccacattcccgtgcccaatgatgccgactcacccaagttcaagacgacggtggggagcgttaagtgggtccccgagaacagcgagatcgtgtggtccatcaagtccttcccgggcggcaaggagtacctgatgcgggcccacttcggcctgcctagtgtggaggccgaagacaaggagggcaagcccccgatcagtgtcaagttcgagatcccttacttcactacctccggcatccaggtgcgctacctgaagatcattgagaagagtgggtaccaggccctgccctgggtgcgttatatcacgcagaatggagattaccagctccggacccagtgaggggctgtcgcagccaacaccccggcctcggggctcctggtggcagcaccaggggacacacctgccaaacccaccagatggaggggccctccctggtctctggccaccctcccagcctctgcccagggacccctgccttccccaggccatctgctctgccgtcgacactcgtctcagaagcccctttcccagaagaggctggtcttcaagaagtctcgtttctttgcccctgaagtcagtttcaggggaaggatgtgaaatttttccgtgtagaggttacagccttttatgctgttgagctcccaggtaccaaaaagcttggccaacgcttgccagccagccagctgcaggtggcatctgccacgaaggaagcgccagcctcgccaggccagcaggggcgtcgttttgttgccattttgttgaacgttatgggtttatgggtgttcctggaacttgtctttgtgcattcgttgctgtttgtgttaccctcactgtccccatgtcccacccacgtcctacggcactcaggaagcacttggtgaggacgagccctcacccttcttgtcttccttcccggcagcgcccgcagcgggccatttacacgtcgaggctggcacctggcgcgctcgggggccactgtagcgtctgcctgctccctggactcgcaggccctccctgtggcgccttcccagggccagcctgggtcacgagatgctgtcactcagccagatcagtattgacccaccaggggaggtggggtttggtgagagacgccagcctcagactttttcccactgagggtccagagagcggggccacgtgtcacccacgtctgcgcttggtcacccgtcctccccaccctgtgtgtgtttatgtcatagttacattaaattccattcattgaatactccaaaa

SEQ ID NO: 258392 - DNA, 1188 bp, Homo Sapiens
  misc_feature (2)..(2): n is a, c, g, or t
  misc_feature (29)..(29): n is a, c, g, or t
  misc_feature (32)..(32): n is a, c, g, or t
  misc_feature (60)..(60): n is a, c, g, or t
  misc_feature (77)..(77): n is a, c, g, or t
  misc_feature (80)..(81): n is a, c, g, or t
  misc_feature (85)..(85): n is a, c, g, or t
  misc_feature (87)..(88): n is a, c, g, or t
  misc_feature (105)..(105): n is a, c, g, or t
  misc_feature (116)..(116): n is a, c, g, or t
  misc_feature (122)..(122): n is a, c, g, or t
  misc_feature (148)..(148): n is a, c, g, or t
  misc_feature (152)..(152): n is a, c, g, or t
  misc_feature (168)..(169): n is a, c, g, or t
  misc_feature (299)..(299): n is a, c, g, or t
  misc_feature (306)..(306): n is a, c, g, or t
  misc_feature (959)..(959): n is a, c, g, or t
  misc_feature (961)..(961): n is a, c, g, or t
  misc_feature (980)..(980): n is a, c, g, or t
gngcctgttctctatccaccaccctgtgnctnctcccttgccagccttcattcctcccantgtccaagcccctccanganngtcntnngttttgccatatgcctncccacctcttncccctncctcttctcctcttcccttcttatanccanaacttttatcttctcnncaaccttcactttgtccttgtccctttaccattccccatcaaagagtagtctgctatatcaatttgtgtagatatgtctgtctttttgggtcctcagagaaaatgcccattttctcggagaattctctgnactcctntctgcttcacattcaacttccctgttctcatctttggtaggattctgccagtcgcttttgcatcttctgttcctgggtaatggggggtcttaatggaggctgggtggaccactgcccgtccactcttcaacaggaggaacagcatgccaccacagtaacacacattagagaaaggacagaggtctgctccttcctgccacctttctcctggccccttagcattcccccagtccctccctcttcaccttgctccgtctatgtcttcccagctcagccttttccccactcttaaatactgtactacttcactgtaagaacgaaagaatagttaggataccaatgagtaaaagggttcctgttcactctgactctgtgcaaattgtattacagtagaccgctgacgttcccaagtgacagatccagggcctttcaaacatccccaaagtcatggccatactcaccattagccagtttctaacatctgtttcagggtatccagctgtagatgttcttatcccccatacttgtgagttattggggttgctcacaaatactaggggtttttgttgtatttttaacaaatatatcctaatgtcatatttattctcttttgtaactgctgtctttacaataaagaaatcatctgcaaaacncnacaatccgtcgacagtganccctgtccggccgcctcgggccctcaaaaagttttccagaccatttcctttgtgcgcgcggggcccagtaaggtaagggaaacatggggcataggctgggttcccaaggaaaaacccggggccatggaactaaggccttgggattcctccaccaaataaaaaaacaccccccggtgggacaaccgaaagcgtttccgtgaacaaaaaa

SEQ ID NO: 258393 - DNA, 1691 bp, Homo Sapiens
  misc_feature (16)..(16): n is a, c, g, or t
  misc_feature (46)..(46): n is a, c, g, or t
  misc_feature (60)..(64): n is a, c, g, or t
  misc_feature (66)..(68): n is a, c, g, or t
  misc_feature (73)..(73): n is a, c, g, or t
  misc_feature (95)..(95): n is a, c, g, or t
  misc_feature (102)..(104): n is a, c, g, or t
  misc_feature (124)..(124): n is a, c, g, or t
  misc_feature (226)..(227): n is a, c, g, or t
  misc_feature (231)..(231): n is a, c, g, or t
  misc_feature (336)..(336): n is a, c, g, or t
  misc_feature (1537)..(1537): n is a, c, g, or t
cggagctatttctttnagccaccatttactacattaacagcagggntctttaaataaggnnnnngnnnttcanctcactgattttatacttaganggtttannntttttttgaatatgtgaagnccggaattaaaccattctcaccatattttttcaggactgtttgctaactggcttgtttttacataaagctttaaacatgtctaccatgggtagtaaacaagnnaggnctatttgaaactataaaacctaccaaacaaagtgcggcaaatggcattatcactgctttttccttcttttataagaatcattactatgaactcgtactcgttggngcacagagggtgctattttcatactctctttctttgtaaaagtcttctctatagctacaggtttccaaagtaacaactgtgcatcttctccctccagtcaacaaagaatcatcttgcacattccaacagaaagaacggactgtagcagcatgccctccctgaaggctagtcacatgggtcagtcctgacatgctgcagttcatcaaatgaatccttcctttgtttgttcctccaataacatgcaatgtgtctgtcttttcatgatataggccaccaatcaaatagtccaaagcatcttctttcatgttaactacttctctgacatcctggatgttcaaacgtgtaactggttcatcagtgtccagatgattaagatcccaccaataaaatccttcatcatgtgtcatgcagtaaatctgtttataacctttcccagaccaaccaatacagcttactgatgaaattgagttacaggttgtaaccagtgcatcctcctcattatcaatattaatatcaaatacatttaccaggccatcagatgaacctgagactaccatgttgggattgctgggatggaaacgtacttgagtgacatcatcactatgtgtctctgaatatgcaccaagtgagtctttagttgtagataaattctgagaattcatccttgcatcccaaaacaccaacaatgcatcatcatcaactttttctgtaccagcacaaataatatgatcattacaattaatatcaaaactgataaaaatattggaagggtaacccttgaagagctgaacaggtttttctctggctactcgagcatcccagcatttcacagtgccatcagtacatgctgaatatacactgtcacaggaatttgcaaatctgactccattaagaagtccaggatatccactaaattctcgtagtacatttaacctttctttatcatatattctgattgatccattagaacataaaacagcaaccaagttttcctttcctgcttggacagtctttgatgtgtctataccaagaaggtaagtgggctctttggttcctaaggaacatttaacaatgtgcagattaccaaattgttcctcaatcttttccatgtcaacagcagcatccaagggtagtaaaactccagcaagcccacttttaggtatttactcaagagaaatgacaacttatgtccgtacaaacncctgtacacgtgttcatcactattttatttataatagccaaatacctctttagatagccatgtggtttaaatgatataatagaccagttgctggtatcataccacatcccatactacgggtcgtctcttcccaagtgaaaatctgctttctggc

SEQ ID NO: 258394 - DNA, 1637 bp, Homo Sapiens
  misc_feature (1012)..(1012): n is a, c, g, or t
  misc_feature (1114)..(1114): n is a, c, g, or t
  misc_feature (1118)..(1119): n is a, c, g, or t
  misc_feature (1138)..(1138): n is a, c, g, or t
  misc_feature (1145)..(1146): n is a, c, g, or t
  misc_feature (1258)..(1258): n is a, c, g, or t
agaaaataccaggtttaaaactctcctttgagaatcgttaagaaattcagaaaagaattcccttgggtgtcacaaactgctgtgtttaggtgtggaaatcgggcagcccctccacttttgggggcgccccctttaaaaacccccaaccaaaccccaagggttccaccccggtggccttgtaaaaaaaatttcgcgtgagggggaaacaaggaggaccaagggagggaatgagcctttcaaaaggggaccggtaacccgccccctcaggctcttcaacaggaatggtttctggggttcccgggctcccaagcaaaagtagaggtgggggtctcgggcgttcccctgaggctcccggagggcctggggctcctttaattccaggaccacccggctcagaaggcctttgagcagctgcatttctcggagcaagaaggtccacgtcgggtttcagggctccagccgattgtccaagggcgtcggcggagcgcaggcgggtggccccgcagtcggggcgccgctcgccgggaactgcagtccggtggaggtggtgttccggacggaggtgaccaaagggaccgatctggacaccgggggctttctgaaggaaagcggcctattaccaggagccaaggctgcggcccatggaggtggggcggtggtggaggccgggtccaggggagaacccggccccgggagctgcagccacggactgcgtttccggacactgcgggtggcggtagccgcctcgcaccagtacgattcgagctcctcgacctcgggctccgggactgtgtactcggcgccccagtcgaaagcggcgcaccgcgcggctgtacttgtaaaacgcgaactgcagcggcgtgtcgcgcttctgcgggtgcaggcgcgtgtcgcagcgcagcaccaccccacccagcggcgcgcgcgggcctcccgcggacccatcaccctcagcaccggcgcccggaacagctctacggagagggcggggagcaacggcgccggcttgtcncacctccgcgaccccgctccttcctgcttcccgcgagggctccttgcagacccacagaccaaggggggaggggaggaggccgtgtgtccacgtggagggggnaggnngccttctgaaatgtggggnaggggtnncgagtccacgagggacggggaaagcttgaaaggaagagggaccaggccagacgcttcatgtcacatcccgactgacactcagctcgggttctgcagcctagaataggagacntgcgcctgccttgcaggacgctagggagtcgctccttcgtcccagtcccacagtggcccctgcccctgccagagctgccctctctgtgggagtccccagccagagtgagaagccagggtgtgcgtcggggaaagggaccagcctccaagcaggcggcggatcaagcgctgcttcacggcaaaggagaggagacagcgtccatagtctaagagaaaccctccaagtggcagctatttgaacttccgccccttcttttctcgccgagctcctgtcccagaatttctcaatgctcatttgcctccctcccggggcccctggtctctcccaccttgcactgtcacagccaccttagcggagaacatgggcgcgctctccaccg

SEQ ID NO: 258395 - DNA, 1100 bp, Homo Sapiens
ggcttacttcttggccacacttcctgctccagcctcatctccctggggggcagccccttttgacacacttgcccacactcagacctcaatctgggggacctgaactcacagggtcaccaggccccaggggcaacgtcctggcctggtctggggaggaccgatcctcaagcatctccaggagactggcaggggtggggtgggccccccagcagaaagcccacagaggcagccgggaaggcgtgtggggaggaagctggcctgtcccttcccttgatcttgggatgcattttgtccgcttgtcctttgatttggaaatgcacaaggtgatcatttattccaaaaagtgagtccggggaaggggcagtcctcacgctgccgggacccagccccaccccggcccacacctcaccacagcggctcccgggcccccgacacagacgagcagggcacggccaccacactggggagctggggctgcagggcgggagctgtgctcagacggtgagggagatgaagctgttgtaacgctgaatgttcctcttgaggatctcagagcagggccccagcacacgctcgaagcggggccggtccagcttcacacacttgaggggcccccgggccacgacagtggccgcccggggccggttcagcagcagtgcaatctccccgaagtagtcagagggtcccaggcgccccacctccacgtactcctcattgggggaccggcgctgcagcacggacgcggtgccctccgtgatgatgtaaaagtcgtccccaggctctccctggaccacaattttctctccatcttcaaactggacgggctccagcgcatccgccacggtcagacgctcccacttctccagggactctaggatggagaccttgctgaggaactcctcgtacatcttgcgtttcctcagcgtgctgcccataaggatgcgccggtagctgtcccggtcgatcccccagagcttgaggtccgtcttggccttcacggtagcagccctgggggtgccgtagatgagagccagctccccgaagctgcccccctcactgatgttggtcacccactccccgttcacgtacacatccacttc

SEQ ID NO: 258396 - DNA, 1765 bp, Homo Sapiens
cttgttcccaatcagtttccagccaacaccagggtgtcctagtccgcagaggtgtgggggacacactccataatctctacttttctttttgtgcagctgagtcatggagctttcagccccagcacatggctcctccttaactgcgtctgctcaacctccctcagccctgtgaacagcatccccgcacacagacgcagagcaggactctctctgctgccacttcaccttcctgagagaggaccagcggccagagcctcagtgactgccaccctggaggacagggcacaacaaccgtttctggagagaatgggaggattccagaggggcaaatatggaactatggctgaaggtagatcagaagataacttgtctgcaacaccaccggcattgaggattatcctagtgggcaaaacaggctgcgggaaaagtgccacagggaacagcatccttggccagcccgtgtttgagtccaagctgagggcccagtcagtgaccaggacgtgccaggtgaaaacaggaacatggaacgggaggaaagtcctggtggttgacacgccctccatctttgagtcacaggctgatacccaagagctgtacaagaacatcggggactgctacctgctctctgccccggggccccacgtcctgcttctggtgatccagctggggcgtttcactgctcaggacacagtggccatcaggaaggtgaaagaggtctttgggacaggggccatgagacatgtggtcatcctcttcacccacaaagaggacttagggggccaggccctggatgactatgtagcaaacacggacaactgcagcctgaaagacctggtgcgggagtgtgagagaaggtactgtgccttcaacaactggggctctgtggaggagcagaggcagcagcaggcagagctcctggctgtgattgagaggctggggagggagcgagagggctccttccacagcaatgacctcttcttggatgcccagctgctccaaagaactggagctggggcctgccaggaagactacaggcagtaccaggccaaagtggaatggcaggtggagaagcacaagcaagagctgagggagaacgagagtaactgggcatacaaggcgcttctcagagtcaaacacttgatgcttttgcattatgagatttttgtttttctattgttgtgcagcatactttttttcattatttttctggtcatctttcattacatttaaatctctggaccctggagcacttctaatgtatcaccccatggagtcattgttctaataatcaccaattcagactcagatcctcgtggtctatcgagcatgctgcttgctgtctgtgcagctcccatttccccttcttcctgatagacttggagctgtgtgcctccactccaaggctgcctgcctgctgtaaacactattccactctgtctgccaacaactgcttcaggaatgggcctgagatcccatgcaggtccctgagaagtgagtaaaagtccgcagaggtggggatggaagatctcttccttagatagaacctgtcttccttccctggcattgtggggtctgggcgtgacactgggactctcagcagctttgtgctgccaacctgagattgaaggcagtgcctcagagcagcacagagagttggggccccctgagccctgagccaccagccctgcagcctgccctatctccgcatttccagttgtattagccaataaatttcctacttatttaagctatttgagatccgggt

SEQ ID NO: 258397 - DNA, 2238 bp, Homo Sapiens
  misc_feature (9)..(9): n is a, c, g, or t
  misc_feature (22)..(22): n is a, c, g, or t
  misc_feature (51)..(53): n is a, c, g, or t
  misc_feature (150)..(150): n is a, c, g, or t
  misc_feature (226)..(226): n is a, c, g, or t
  misc_feature (272)..(272): n is a, c, g, or t
  misc_feature (490)..(524): n is a, c, g, or t
gcggcggangctggcctcgganaccccctccctgcctatgagggcttgtcnnngctcccctggaacacagctcagccaggcaaggctgggagagggctgggccccccaggtgacctgcagacgcctcccccacctacatgccccacgctnggggagccctggagcccggcctgccttgacaggaaggagataggtgaaaaataaatacacggctgggccgcctgcngcaagcgcgacagtgcccgggacccccagggccactcctgcctctngtggcctcaccgcggcccaggccctcgtccccaagggttcagacaccactgtcggcgagcaccgtgctgggcgcagaggccacgtgtggtgggacggcagcctgctggcccctccaggtgaggaccaggagcacaggctgtggcaactccagcccgggcaggggccgggacctgtgtggataatccacccaaacaccccacggccctcatagccccgnnnnnnnnnnnnnnnnnnnnnnnnnnnnnnnnnnnggtggggggagggcggggcggcatgcgagcagggcccagtccccagcggccggcagctgcccaccgtgctggccccaagcagggctctgcgctgaggcctggaagttcccacagccgtggtgggcggctcctgggggctgtgtctgagctcgggagccagactgggccctggaggaaagggggccccgggtcagggaggggcaggttggctgggtgtggtcagcagcagcatgacggggttagagatcaggcccagggcctgggctgcctgccttgaggttccagagaagcatcctggaagctgaagctcgggccctacctggccgcgccgggctgccctgaggagcaggtggggccaggtggcctcaggacgccagagcccccccatccacgggtcccctccgtccagccacagtgagtccaatgtccgtggtcctccagccgcactcgctaaggtttatgcttgaagtgcgcctccactgcgtactcctggggcagcatgggcctgtccaccgccttctggaaggccgccacccactccctctggtcggactccgtctcgcaggcaaacagaaacttgcggtcgggcgtgacgatggtgatgccatgtggccagtggtggccctgggtggacggcgggaacccatgcagcaccgtgtagccactctccttgctgccaatgaagacttcccctcgggcgaaggcgtccagggggtctgtgaagtacatgagcctgcggtcatccatggtgaaccagcgcttccggaagccttccgtttgcttgggccccgtcttctccatgtagccttccttcaggtagttcctggagagctttggcaccagatctgcgtcgctggcccctgggaatgccacctgcaggtagtggaagcgagcagctcggagtgcattgaaccagtccacaatctcctaggggcaaaggcaggcaaaggcgggcacaggcttgggctgaggaggctgcagggctggggtccccacagaggggcttggggtccccacagaggggccgcttcccccagagcccagccccttcctcctccccggcacctcagctcccagcagtcctgccgcaggccttggcccctgtgcccacgctgaggccggggctgctacacagcggctgcccctctgcgggagggcaggtgcagcctcccccggcgaagtcctgagaagggccgaagggccgggccgggccgggctggacagggtcgggggctgccatccaagctcactctgtggccctggtgctgctggggcctgggccaacttgccttcctttcagatggtgctatttttatgaagatccttattttgtagctcaagcaagtcttggggtggtgggagaagggaggctcatctgtttataaacgcccttggagctgtagcccctaccgagagtgggcagagagcaaaactgctctccagggagccgccctggtcctctggagagcgtggggtgggccagcaccctggaacagagggcccatagcccaggcctggcacccagccccacgtcgggtgccctctgggtctagacttcagcctggctgtcccctgcccctagacccagcgcccctcctggggtctgcccagacccttggccccatgacattataacctgcgccctgggcctcctgttcagcctacagcctggagctggtgacctctggaaaggtgcccatctttactcttggct

SEQ ID NO: 258398 - DNA, 1888 bp, Homo Sapiens
  misc_feature (217)..(217): n is a, c, g, or t
  misc_feature (1458)..(1458): n is a, c, g, or t
  misc_feature (1486)..(1486): n is a, c, g, or t
  misc_feature (1508)..(1508): n is a, c, g, or t
  misc_feature (1544)..(1544): n is a, c, g, or t
  misc_feature (1589)..(1589): n is a, c, g, or t
  misc_feature (1602)..(1603): n is a, c, g, or t
  misc_feature (1626)..(1626): n is a, c, g, or t
  misc_feature (1862)..(1862): n is a, c, g, or t
gattgtgcatatagagaaaaacctagaaatttatctcatggcagatacatttgaaagtacttcagaagaatttatgctgtatattaaaactaggctcaaaataaatctatcgtatctttaaaagtccaattctgttattactgtgatgtttgtagtgttactattaaacattgtgaacatacacatttttaaaacaacttgaaacccattttaaaanctgggtaagagagaaggaatcttcagaacaaaatcacatcattagggtgtccagtttatgattgaatttttaagcaaattactgtatttgaaactacaacttgatttggttttcagttttaaaaggcaacatgtgggttttatccattttatttatacctttagatttcagaaacatcttcatgttttagatgcattctacagacatcatgttacttaaaaactcagggcccctttcatccctttgtacactgaaaaagttaaattgttagcaagtaagcaattagatccagttgaatatttaaagtgtttgttgcacagttcatttaatgtttcatcttatttgactttttcacatagatataatatcagatttcattaattataaaaagttgcccagttctgtaattactgaacagagggaatgactcaactaattggctacatgttgcaacaaatttaggcctttagagttgaagcactgacttaaaacgacttacatttctgttctttggtcaaatgaccatacatgatatgggacaaattgtttcattttgtttgttttttaataagggaacttggtaaagtagttcctgtcagataggattttctcaagagacaatttaacgttataaagccttctaaaagtgaactaaatattttataactttagtaatagcttggatggttttgagaaaataacctgtatttatcacattgtcaaacagaatttttctttgaatcagacaagttcaagctctaaattgatgtgctatatacttaaaatcctaggaagttatctgtaaccagtctcttgtctcaggctcttcaccttgttaccaatcctcgtaagtatgtaaaggaaacatatttttaaagaagcttaacagtaagaaaaaattactaaaagatgcaattcaaagataggtcccagtttaacactgaattgcttgacttctgtggcttttctttttctggccacatttatttatttaagcaatttttgtatgccttggtatttcatttccatagagattatattgtatcagtgtttatgtaagctggaatcatcctcagttttttgctgataatttttcaaataaagatacatggataattgtaaaatacactaactcttagggtgttgtagtagctgaaacatggagatgcgtagctgtcatgctttttctgaatggacaggagaaacataagctacggagtattcacttctgaggatgcttntccggaaaaagaaaggctagaaaagacncgcacttcctcagaaccctctntcttgttaacgggtatcttttgttggtgtgtttagntcttacatgacagatagactatcatatatgactttatgaataatntcaggtatttggnntttgtataagctgtctgaagccntgctatgctgtataagttgtgtttgatggatcagtgtgagtataaaataaagcaaatcacttttcttttgtattatctatggatgccactatgaaagctgacattaagccactaaagagttttctatgaataagtgtaagtaaatgctttgatatatataaacctaaataaaacagattgtattgatacagagacattggagaaggagattttaaggcagttctttaggtttaaanaaggattgatgtaaaataatgattta

SEQ ID NO: 258399 - DNA, 2557 bp, Homo Sapiens
  misc_feature (471)..(471): n is a, c, g, or t
cgtggaggctccatgtcctgtttggcactgcttcagctagtgtttcatccttggaaacttccctggctcctagcatgcactgaagcccagatacccagacttccccctctggccacacacaataccgctctggaatcatgccgcagggaacaccaaggtcgtaggagaggccacaggttctgctacaaactaattttattgattcaccccttggtcctgggccaacagtatatcttcaagctcttacttcccccagcaatgccccagacaaccgaacacatgttgcaggggctcccagactggcttacctctgacggggcccagcacccggtgggtgaccttttgggtactagagcccaggcctggcagccctgcaggccgactgccatgaaaaggaaagctgggggaattcttcatctgtggagaattttgttggctgctgctgctaccaccggcacttgtgccggtgcntaaaacttcgtgcccgactcaaggtgttttcggagcaggagacaggcaacccattgtgacttttgggtggagttcgaaggcccctcttctggttgacacccacattcagagtgctgcttaggcctcggctgttgcgtacatgtttcagcatccaggcccgtagattagtaaggctgctgtgctctgacagtacaattcggggccacggattacattccgccatgtccagggctgcaatggccatagctcgtcccacctgctcaaatagttccacagtgtatctggaggggaaagccggcgggggaggggggctggcacgcccattgtcatggcaggcagcagggatgctgtttactgagcgtccagtgttgtagttgcattcaagtgtgtagctgtggattatccctgaggctttgtagattgcaacacggccgcttccctctttagactggccatctctacggtctcgggcatacatattcttctctgagaaattgcagccctggaagtcgaagtgggctgaattcaaggagatgagctttggatatagcatgttttccacctgggtgctctcatcactaaagctgtttccgtacatgaagcagccccttttggaagcatgtccatgcaggtccacatagtaagcaacgccactctctttgggggggatggtatcaggggctgactcttcaagccccgcagactgttgtggcataatccacacactgttgagcttctgttctgctggctctgtttgtttccaggcttcagcgttatgcctgtcagctgagtgcccacactgagcttcattttggagattgttggctttctccaggtcagaaacaggagcatcaggagggagacaggaactgggctggtgctcagaggaactctgggagttcagacgagagtgcacatggtggtagagaagcacagctttggccccatagatggccgggtgcaggacggcatcaggcttcaggtactgacggttcagattcactccacgtgagtctgtgcggtagtgtccccggaccacaccatcggggttcaacatgggaatcagcttaaagacgaagaggcgacggagggtttgggcccggggatcatcaggtcggaggatgaagtccagaaagccattgaagacaaagctagatggagtctcccctgggtgtactctactgcttaagaagaatatcctcttgcctgcgaaacggaatggtcgaggggtgctggtatcaggaaatagctgctctagacggggctctcgatcttctcgaagcccatggcaggaagtgatcgtcagcagatctacacgaagtccatccagagaatagcaaaggagctcccgatggtaatagatggtatccagggggctgctatgggtagggtggttctccggaaagcgctggtctagctggtttagcagttcctggcagtcactgtaggagaaggggtagcagaaggcgaagaaggtggtggccccacggccctccacgaaacgatgaacaaaggataacacaaactgcgtctctgtcatctcaaaggtgggccggtctcgaatgcgttcccagcgtggccgggtgggcagtgtgcgcacaaagggggccatgccctgggaatacagcttgctctgcttgttcatgttcataatgttgatcttgatgagttttcctggcattcctccccggacgctgaagtagaaccatgacctgttcccattctcaaattccgtttcagcacagtctggtcgggtccacacgttgaattcatagtcaggggaagaggcaatgccactggtcagggctgacgccccacctcctaccccttccccatcactggacaaagattccaccttctccacgtgggctagattccctgaatcaaagcgagaactgaacagcaatcccccacagcgcagctccatggtggggctgggaaagcatcctcctgccccgctctggccctgagagctctctccgggccggtgatcccgctccctctcccgctagcgaggccgcaccttgggccccggcacccgggccctccacccgggcccccaaaaacacccgagcgccgcggtgcc

SEQ ID NO: 258400 - DNA, 746 bp, Homo Sapiens
cattctcacattcctctccttctcagcggtgtgatggcagatggacactgagtggggaggatgcactgctgctgggcaggttgttctggcagcttctcaggtgcccgcacagaggctccgtgtgacttccgtccagggagcatgtgggcctgcaactttctccattcccagctgggccccattcctgggatttaagatggtggctatccctgaggagtcaccataaggagaaaactcaggaattctgagtcttccctgctacaggaccagttctgtgcaatgaacttgagactcctgatgtacactgtgatattgaccgaaggctacatacagatctgtgaatcttggctgggacttcctctgagtgatgcctgagggtcagctcctctagacattgactgcaagagaatctctgcaacctcctatataaaagcatttctgttaattcattcagaatccattctttacaatatgcagtgagatgggcttaagtttgggctagagtttgactttatgaaggaggtcattgaaaaagagaacagtgacgtaggcaaatgtttcaagcactttagaaacagtacttttcctataattagttgatatactaatgagaaaatatactagcctggccatgccaataagtttcctgctgtgtctgttaggcagcattgctttgatgcaatttctattgtcctatatattcaaaagtaatgtctacattccagtaaaaatatcccgtaattaaa

SEQ ID NO: 258401 - DNA, 1053 bp, Homo Sapiens
aaaggccccacaaaagtgagcaagggcccttccaggcaaggacaaaaaaagcgcctccagttttccaagccaagccaaggcaagttgccaaggtgggcaccaatcatttttcggttttcatggaaacaaacccataaaatcaatgtaagaaaccagccaaaccggcagtttctgaacacaagccaacgtttactgaccgtccctgcgtcttggaccagcctacttttgacccagtgaactattttcactggaagccagcacagaaggttttcaggcccagaatgctgtctaaatcgggttgatggacaaagagaggctgtttgagcctctgagccaggtgagtttgggatccacagccctcagaaaaccttcaccccttaggaacagagaccaaactgaaataatgacctgtggaatgattccatgcctgctaaaaactcgagggacaaggaacagactcataaattattaattggcctttgtttatgtttcaaagtaaatggtcgttttctttatgctaagtctttgtacctggcacccccatccatacacttttttaaggtaggttagatgtggttaaaaatgacagtaaacccaccagcaagcaaaaataatcttagaaagtgagaggaggtcactgaaacctggcctgaggtttgaagaagatggagaagagttatatttattgagaaccggctctgtgccaggcactagatgttcctccacttacgatggggttacctcccgttgaaactattgtaagttgaaaatatggtaatttgaaaatgcacttaatacccctaacctactaaacatcatggcttagcctagcctaccttaaacatgctcagaacacctaaagttgagcaaaatcatctaacagaaagcctgttttataataacaatgttgaatatctcatgtaatttattgcatactgtactaaaagtgacacaagaatggttctatgagtacttaaagtactatttctactgaatgtcacttttgtaccattgtacagtcgaaaaatcataagtcaaaccatcttaagtcgg

SEQ ID NO: 258402 - DNA, 2095 bp, Homo Sapiens
  misc_feature (845)..(845): n is a, c, g, or t
  misc_feature (1461)..(1661): n is a, c, g, or t
  misc_feature (1670)..(1670): n is a, c, g, or t
  misc_feature (1676)..(1676): n is a, c, g, or t
  misc_feature (1680)..(1680): n is a, c, g, or t
  misc_feature (1683)..(1683): n is a, c, g, or t
  misc_feature (1696)..(1696): n is a, c, g, or t
  misc_feature (1699)..(1700): n is a, c, g, or t
  misc_feature (1721)..(1721): n is a, c, g, or t
  misc_feature (1729)..(1729): n is a, c, g, or t
  misc_feature (1731)..(1802): n is a, c, g, or t
  misc_feature (1815)..(1815): n is a, c, g, or t
  misc_feature (1817)..(1817): n is a, c, g, or t
  misc_feature (1829)..(1829): n is a, c, g, or t
  misc_feature (1831)..(1831): n is a, c, g, or t
  misc_feature (1833)..(1833): n is a, c, g, or t
  misc_feature (1840)..(1841): n is a, c, g, or t
  misc_feature (1844)..(1844): n is a, c, g, or t
  misc_feature (1847)..(1847): n is a, c, g, or t
  misc_feature (1851)..(1852): n is a, c, g, or t
  misc_feature (1854)..(1855): n is a, c, g, or t
  misc_feature (1859)..(1859): n is a, c, g, or t
  misc_feature (1874)..(1875): n is a, c, g, or t
  misc_feature (1884)..(1884): n is a, c, g, or t
  misc_feature (1887)..(1887): n is a, c, g, or t
  misc_feature (1896)..(1896): n is a, c, g, or t
  misc_feature (1906)..(1906): n is a, c, g, or t
  misc_feature (1935)..(1935): n is a, c, g, or t
  misc_feature (1977)..(1977): n is a, c, g, or t
  misc_feature (1980)..(1980): n is a, c, g, or t
  misc_feature (1994)..(2023): n is a, c, g, or t
  misc_feature (2025)..(2025): n is a, c, g, or t
  misc_feature (2037)..(2037): n is a, c, g, or t
  misc_feature (2054)..(2054): n is a, c, g, or t
  misc_feature (2064)..(2065): n is a, c, g, or t
ggggcagtggcgggcacgcgcagccgagaagatgtctccgacgccgccgctcttcagtttgcccgaagcgcggacgcggtttacgaagtctaccaaagaggccttgaacaacaaaaacatcaagccattgttaagtaccttcagccaggtacctggcagtgaaaatgaaaaaaaatgtacccttgaccaagctttcagaggtattctagaagaagaaattataaatcattcatcatgtgaaaacgttttagctattatttctcttgctattgggggagtaactgaaggtatttgtaccgcatctacaccttttgtattgttgggagatgttttggattgtcttcctttggatcagtgtgacacaatattcacttttgtggaaaaaaatgttgctacttggaaatcaaatacatcctattctgctgggaaaaattacttactacgtatgtgcaatgatctcctaagaagattgtctaaatcccagaatacagtcttctgtggacggattcagctctttttggccaggcttttccctctgtctgagaaatcaggtcttaacttgcagagtcagtttaatctggaaaatgtcactgttttcaatacaaatgagcaggaaagcaccctgggtcagaagcacactgaagatagagaagaaggaatggatgtagaagaaggcgaaatgggagatgaggaagctccaacaacgtgctctattccaattgattacaacctgtatcgaaaattctggtcacttcaggattacttcaggaaccctgtgcaatgctatgagaagatttcatggaaaacttttctcaagtattctgaagaagttttagctgtttttnaagagttataaattagatgatactcaggcctcaagaaaaaagatggaagaattgaaaacaggaggagaacatgtatattttgcaaaattttaacaagtgaaaagctgatggatttacaactgagtgacagtaactttcgtcgacacatcctgttgcagtatctcattttattccaatatctcaaggggcaggtcaaattcaaaagttcaaactatgttttaactgatgagcaatcactttggattgaagatactacaaaatcagtttatcaactactatctgaaaacccccccgatggagaaagattttcaaagatggtagagcatatattaaacactgaagaaaactggaactcgtggaaaaatgaaggttgcccaagttttgtgaaagaaagaacatcagataccaaacctacgagaataattcggaagagaacagcacccgaggacttcctagggaaaggacccaccaaaaaaattctgatgggaaatgaggagttaacaaggctttggaatctttgccctgataatatggaagcctgtaaatcagagacaagggaacacatgcccactttggaggaattctttgaagaagccattgaacaggcagaccctgnnnnnnnnnnnnnnnnnnnnnnnnnnnnnnnnnnnnnnnnnnnnnnnnnnnnnnnnnnnnnnnnnnnnnnnnnnnnnnnnnnnnnnnnnnnnnnnnnnnnnnnnnnnnnnnnnnnnnnnnnnnnnnnnnnnnnnnnnnnnnnnnnnnnnnnnnnnnnnnnnnnnnnnnnnnnnnnnnnnnnnnnnnnnnnnnnnnnnnnnnggagaggangaagangaanaanataaagaagaaanaannaagaaaaatgaaagtaatgangatagganannnnnnnnnnnnnnnnnnnnnnnnnnnnnnnnnnnnnnnnnnnnnnnnnnnnnnnnnnnnnnnnnnnnnnnntggcaccataaanangaaatgaaagantnanaaattannaanaanaganngnnaaantgaagaaaagaagannaaaaaaaancanataatggangaatggaaanataaagagggaggtaaagaaaaaagtganaaaaatgaaataaaggaaatgaataagtatggaaataagtgnaanagaaagaaagtatnnnnnnnnnnnnnnnnnnnnnnnnnnnnnnanaacttataatantatttttataaaaaaanagatagaaanngtaaaaaagagaatagtaagagtcaatggt

SEQ ID NO: 258403 - DNA, 1651 bp, Homo Sapiens
ggtgatgaagagctgcaaaaatcttaagggaggtcttcaggaagttgctgatcagttggatttgcagaggattggaaggcagcaccaggcaggctcagactcactgctgacaggaatggctttctttaggatgaaagagttgttttttgaggacagcattgatgatgccaagtactgtgggcggctctatggcttaggcacaggagtggcccagaagcagaatgaggatgtggactctgcccaggagaagatgagcatcctgggcgattatcaacaacatgcagcagtgatgggcgccaggctctgcagggtgggcctgatcccagagtggtgcttactgtgctgactgtgtacttatcttccccaagagaaaatgcttctttttgagcacactgtacctaccatctgcattgagcagaaagacttttgttttactgaagacaaaagatgtttttattttagacccagaagagaggagtttgctctgaatttgtaaataagtcttccccattcctcatactcgagcctctcctctctggttgcctcctgccaccagcatccatggctcatttgacacctttttaaatatcaggacaagtctgaaacaaagtagtaaaatgtatataactcttacctgttgtcattctttttcttttaaatttgttgctaatctctgataatgaagattcttactctgattctcagctgagctgtgagggcttccagggaaaatggaacaaaatggtgttcttaggtaatgggttgtagatactgagtctttcctttccttttctgacccttctcgaggacatttgctttcctcacacttttgtagtctctctttacatattactatatggaaatgaattgctctgtgctgaaatttgaagaccagataatgaaactgaaaagcaaacaattttactgaatctgtctacccttcattcatgagaactccagaatgagtgttgaccactgaagcatcttttaagtctgtgttccattgtgccattcaggtttgctgtcacatatgcatcatctgaaatcatttgaaatttttgtacaataaaatatcctggatttgatcctgaaggaaactagtaagatcagatttttgggtcatgtctgttgtattttcagtaatgtgatttcagatggtcatctggattctcccacttctctactccattatttctctacttttccttccagcaaacctgaaacgtgagggagatggattaatgtgagtaacaggaatgtgtctttaaaaagctagagtggttacatttaatcaggcagtaagataatttgggttcttgagttgttttggagtaatatcccacaactggggtaggaagctcaggacttttttctttaaagctagtcatttcaaaagcatattgtatttttttgaatgactacagtatggacaatttcaaaaaccaaaacccactttggattggtggaagtaaaaactggtaactcactcaagtgaatgaatggtcttgcattttaaaagcttatgggaaactcaatttgaaatgattagaaaatgtcaagtattataagctggtatttaagatgcttgtaaatactatttatgtttttaattttgtaaaataaagatttctttttaaccactggcaaaaaa

SEQ ID NO: 258404 - DNA, 1981 bp, Homo Sapiens
  misc_feature (1357)..(1357): n is a, c, g, or t
  misc_feature (1560)..(1560): n is a, c, g, or t
  misc_feature (1768)..(1768): n is a, c, g, or t
  misc_feature (1935)..(1935): n is a, c, g, or t
  misc_feature (1940)..(1940): n is a, c, g, or t
  misc_feature (1970)..(1970): n is a, c, g, or t
  misc_feature (1973)..(1973): n is a, c, g, or t
ctcgactgcagaggaagcaggaagctgtcggcccagctctgagcccagctgctggagccccgagcagcggcatggagtccgtggccctgtacagctttcaggctacagagagcgacgagctggccttcaacaagggagacacactcaagatcctgaacatggaggatgaccagaactggtacaaggccgagctccggggtgtcgagggatttattcccaagaactacatccgcgtcaagccccatccgtggtactcgggcaggatttcccggcagctggccgaagagattctgatgaagcggaaccatcatgggagccttcctgatccgggagagtgagagctccccaggggagttctctgtgtctgtgaactatggagaccaggtgcagcacttcaaggtgctgcgtgaggcctcggggaagtacttcctgtgggaggagaagttcaactccctcaacgagctggtcgacttctaccgcaccaccaccatcgccaagaagcggcagatcttcctgcgcgacgaggagcccttgtctcaagtcacctggggcctgctttgcccaggcccagtttgacttctcagcccaggacccctcgcagctcagcttcccgccgtggcgacatcattgaggtcctggagcgcccagacccccactggtggcggggccggtcctgcgggcgcgttggcttcttcccacggagttacgtgcagcccgtgcacctgtgagcagcccggcggccgatctggccaacgggcctttttacaggaactgaggtccagagaggacatggacaccccagctctgtcagagtcacacggggctcagtggacggccttggactgaacgtgggctcctaactgcctccggccgctctgcacaaactgggatggcccaggtcccccagcaagggtacccagcaagggtagctccggggcttcctggctggttgctttccattggctgccagctgtgtgacaccacagggcggagtctgtggaggccccgcccacctcctcttgtcaatggccccatctgccaggaaggttgaggactcccaggtttcacccactggaggctcaacctaaggaaccctggccatggtgggtgggttcaccttgggctgaccacccactgggcctgcctgcccctccctcaaaaggcccctggagttgttcaggctgttgggaggtggctcagcctcgaaggacagactgcacacctgttgacctaaactcactggacagactccaggtggacaccaactcctcaacagccccatgacttcagctccacctggggcacccagcacccccaccacagggctagaggccctaagaccctgaaaaaggggcgngcagtagggaaggtggaggaacactcctcttctgttgaacaggtgagctctgagggcaagccctgggcccagccacgcagagaccctggctgccctgcctcttgtttgtttaggcccaggttctgcccagaccgggccccagcagagctctcaggaggctgagaaacctccaaggcagacagaaagttggggccagagctagnttttagagatcctacaggatcccacatgggacggctacctaggtggggcacggcccctacccgagaacaggagggtcctccagagaatgtgccatgatcagggatatgagcagggcctgcccagagcctgggcacctttgggagagggaaaagtgaggtgggacttggaaaggctttgaacgccaggctgatggttgagggatggtgngcagggagggagggcgaagaggctccctctggcatttgggagccggtgggtggagggaggagcccttggaggtggctgcagtcccttaatggggggccttgctctgggcatgtggggctcttcctccatccagtgctggcccaagacccttagaaccctgagtggtngcaantctaactgctcctgacccagcctgtgtatncanaaacagaa

SEQ ID NO: 258405 - DNA, 1052 bp, Homo Sapiens
  misc_feature (4)..(4): n is a, c, g, or t
  misc_feature (70)..(201): n is a, c, g, or t
  misc_feature (212)..(214): n is a, c, g, or t
  misc_feature (216)..(216): n is a, c, g, or t
  misc_feature (218)..(218): n is a, c, g, or t
  misc_feature (838)..(838): n is a, c, g, or t
  misc_feature (859)..(859): n is a, c, g, or t
  misc_feature (864)..(864): n is a, c, g, or t
  misc_feature (911)..(911): n is a, c, g, or t
  misc_feature (928)..(928): n is a, c, g, or t
  misc_feature (934)..(934): n is a, c, g, or t
  misc_feature (952)..(952): n is a, c, g, or t
  misc_feature (955)..(955): n is a, c, g, or t
  misc_feature (973)..(973): n is a, c, g, or t
  misc_feature (976)..(976): n is a, c, g, or t
  misc_feature (984)..(986): n is a, c, g, or t
  misc_feature (995)..(995): n is a, c, g, or t
  misc_feature (997)..(997): n is a, c, g, or t
  misc_feature (1001)..(1001): n is a, c, g, or t
  misc_feature (1007)..(1007): n is a, c, g, or t
  misc_feature (1015)..(1015): n is a, c, g, or t
  misc_feature (1033)..(1033): n is a, c, g, or t
  misc_feature (1036)..(1036): n is a, c, g, or t
gtcnttcctcgcgggggctcggtgggtcctgagttttctttggccggatttgctgatccgtctgctccannnnnnnnnnnnnnnnnnnnnnnnnnnnnnnnnnnnnnnnnnnnnnnnnnnnnnnnnnnnnnnnnnnnnnnnnnnnnnnnnnnnnnnnnnnnnnnnnnnnnnnnnnnnnnnnnnnnnnnnnnnnnnnnnnnnaggaaggattnnntntnttggacctgaggctgctttcttgaagaaaacttgactttatttcatttagtgggaagagcagcagcccagctattaagttctaatatgcaataggctgcaggctgtgaagtgttcgtggcagtagactctgaagctaaggagctgagggcttaacaagtttctagaagctgccatcaacatgcctaagtcatgtaaaactgatagttgatcagatttcaaggtctggggagtatatccactgtgtactgggtcttgagctctagagagctaggccttgctaaaataaaagaattaccttacctaccatctttgttcaagtctcaatggaatttgttacggcccctggctgacctccgagcagaggctagctgtcccatctgtctggactacttgaaagacccagtgaccatcagctgtgggcataacttctgtctctcctgcatcattatggccctggaaggatctacatggatagtttcccctgccccttttgccacttttgctgtccagaaaggaaatttataagcaatccccagctgggtagtttgactgaaattgctaagcaactccagataagaagcaagcaagaggaagaggcaggaagagaagcatgtgtgtnagaagcataatcaggttttgnctttnttctgtcagaaagacctagagcttttatgtccaaggtgcagtttgtncactgatcaccagcatnactgtntttggccataaagaaggngcntctatctaggaaaaactngangatacatnnncgtggaggngnagtngactanttgaaagnttactttcaacaggaatnctngactgagaaaaggtaa

SEQ ID NO: 258406 - DNA, 845 bp, Homo Sapiens
ggggcagtgagttcgacacaccatgccgactgtcagcgtgaagcgtgatctgctcttccaagccctgggccgcacctacactgacgaagaatttgatgaactatgttttgaatttggtctggagcttgatgaaattacatctgagaaggaaataataagtaaagaacaaggtaatgtaaaggcagcaggagcctctgatgttgttctttacaaaattgacgtccctgccaatagatatgatctcctgtgtctggaaggattggttcgaggacttcaggtcttcaaagaaaggataaaggctccagtgtataaacgggtaatgcctgatggaaaaatccagaaattgattatcacagaagagacagctaagatacgtccttttgcggtagcagcagttctccgtaatataaagtttactaaagatcgatatgacagcttcattgaacttcaggagaaattacatcagaatatttgcaggaaaagagcactggttgccattggtacccatgatttggacactttgtcgggcccatttacttatactgcaaagcgtccttcagatatcaaattcaagcctctaaataagacccaagagtatacagccctgtgaactgatgaacatatacaagactgaccatcacctgaaacattatttacatatcattgaaaacaaacccctgtatccagttatctatgatagccaatggtggtcgtccctttcaatgcctcccctcatcaatgggggatctttcccagaattaaccgtaaatactagaaattattttttattgaaatgccacggggaactggacctttactaagggcaaaaataaatccttggatat

SEQ ID NO: 258407 - DNA, 1217 bp, Homo Sapiens
  misc_feature (45)..(45): n is a, c, g, or t
  misc_feature (80)..(80): n is a, c, g, or t
  misc_feature (151)..(170): n is a, c, g, or t
  misc_feature (341)..(341): n is a, c, g, or t
  misc_feature (696)..(696): n is a, c, g, or t
  misc_feature (715)..(715): n is a, c, g, or t
  misc_feature (718)..(718): n is a, c, g, or t
  misc_feature (764)..(764): n is a, c, g, or t
  misc_feature (774)..(774): n is a, c, g, or t
  misc_feature (780)..(780): n is a, c, g, or t
  misc_feature (800)..(800): n is a, c, g, or t
  misc_feature (813)..(813): n is a, c, g, or t
  misc_feature (831)..(831): n is a, c, g, or t
  misc_feature (836)..(836): n is a, c, g, or t
  misc_feature (857)..(857): n is a, c, g, or t
  misc_feature (861)..(861): n is a, c, g, or t
  misc_feature (871)..(871): n is a, c, g, or t
  misc_feature (883)..(883): n is a, c, g, or t
  misc_feature (889)..(889): n is a, c, g, or t
  misc_feature (893)..(893): n is a, c, g, or t
  misc_feature (949)..(950): n is a, c, g, or t
  misc_feature (955)..(955): n is a, c, g, or t
  misc_feature (960)..(960): n is a, c, g, or t
  misc_feature (963)..(963): n is a, c, g, or t
  misc_feature (966)..(966): n is a, c, g, or t
  misc_feature (973)..(973): n is a, c, g, or t
  misc_feature (981)..(981): n is a, c, g, or t
  misc_feature (983)..(983): n is a, c, g, or t
  misc_feature (989)..(989): n is a, c, g, or t
  misc_feature (1005)..(1005): n is a, c, g, or t
  misc_feature (1009)..(1011): n is a, c, g, or t
  misc_feature (1015)..(1016): n is a, c, g, or t
  misc_feature (1028)..(1028): n is a, c, g, or t
  misc_feature (1030)..(1030): n is a, c, g, or t
  misc_feature (1034)..(1034): n is a, c, g, or t
  misc_feature (1036)..(1036): n is a, c, g, or t
  misc_feature (1038)..(1038): n is a, c, g, or t
  misc_feature (1040)..(1040): n is a, c, g, or t
  misc_feature (1042)..(1043): n is a, c, g, or t
  misc_feature (1050)..(1050): n is a, c, g, or t
  misc_feature (1052)..(1052): n is a, c, g, or t
  misc_feature (1056)..(1056): n is a, c, g, or t
  misc_feature (1066)..(1066): n is a, c, g, or t
  misc_feature (1071)..(1071): n is a, c, g, or t
  misc_feature (1076)..(1076): n is a, c, g, or t
  misc_feature (1088)..(1088): n is a, c, g, or t
  misc_feature (1091)..(1091): n is a, c, g, or t
  misc_feature (1095)..(1095): n is a, c, g, or t
  misc_feature (1099)..(1099): n is a, c, g, or t
  misc_feature (1112)..(1112): n is a, c, g, or t
  misc_feature (1125)..(1125): n is a, c, g, or t
  misc_feature (1127)..(1127): n is a, c, g, or t
  misc_feature (1142)..(1143): n is a, c, g, or t
  misc_feature (1145)..(1145): n is a, c, g, or t
  misc_feature (1147)..(1147): n is a, c, g, or t
  misc_feature (1164)..(1164): n is a, c, g, or t
  misc_feature (1175)..(1175): n is a, c, g, or t
  misc_feature (1179)..(1179): n is a, c, g, or t
  misc_feature (1183)..(1183): n is a, c, g, or t
  misc_feature (1190)..(1190): n is a, c, g, or t
  misc_feature (1197)..(1197): n is a, c, g, or t
  misc_feature (1199)..(1199): n is a, c, g, or t
  misc_feature (1214)..(1214): n is a, c, g, or t
gatccaccaagcacgcctatgaatacaaagtaaactatgattttnattgtgaaattttcatagatggaaaattgaatatnctgtccatttcattttacaattatcttaccacttatttttgtaccatgtatttcaattgcctgtttagtgnnnnnnnnnnnnnnnnnnnncctattcatttttggcttgtgtttagcttaaattttatcattaaattaaggagcccacaacaaaatgtgttgccagcagccatatcccaagcccctgcgtgaagaatgttttggctgctatttcaacctaaggaaacaacgtttgacctcagtcaccttaaaatgccagtntgggcagaagattttttattcctcacaattaaaaaccaaacaaaaccccctaggatcttgaaggtcctatttcagaaaatcttcatatatgcaaaatcgtcaccaaaataaatacatttgcctcaattatcattaccacccagtattcatgttttaatttttagggatataatttctaaatttagagcaatcaaatttcctgcttcctatcttaatgcttaaaccctcctccaacaccaagttaagccactcgtcgcgacgcgataaaatagttgaatctcgactgaaagcattgcgaagaaaaaacattaagcacacatttagtctcgatccatttcgccaaattaaggaaagngtgctcgcttttcttaccntcntacccacacgatcgcattttatcgaaatcgttcgatccaatcgaangctattttcnagatcngttttacgacgacgcgatcncgaacgataaccngcgctacgatacgcatancattnctaaaacttcgtttttacatnatangtttcgagcnccctcgaaccanctcganagtngggttaaattcccttacacacgcacacgaacgcccctcctacggtcatcgttattnngggantattnatntangaaacgnaaataacngngatgcnggctctgaacgatagngtcnnngaannaccttaagtttngnattngngnanannaaaaacngncgtnttcgattatnatcgnaccgntctattttcccnttnaacnctangaatcaaaaacantacttattcaccntnaacgtttgatattanntncnataacgtaaattatttnttaaaaatatntttncgtncgtttcntaaatantntgaaaaaatttaatnttc

SEQ ID NO: 258408 - DNA, 1071 bp, Homo Sapiens
tcacaggcaagtcaagctgggaggaccaaggccgggcagccgggagcacccaaggcaggaaaatgaggtggctgcttctctattatgctctgtgcttctccctgtcaaaggcttcagcccacaccgtggagctaaacaatatgtttggccagatccagtcgcctggttatccagactcctatcccagtgattcagaggtgacttggaatatcactgtcccagatgggtttcggatcaagctttacttcatgcacttcaacttggaatcctcctacctttgtgaatatgactatgtgaaggtagaaactgaggaccaggtgctggcaaccttctgtgggcagggagaccacagacacagagcagactcccggccaggaggtggtcctctcccctggctccttcatgtccatcactttccggtcagatttctccaatgaggagcgtttcacaggctttgatgcccactacatggctgtggatgtggacgagtgcaaggagagggaggacgaggagctgtcctgtgaccactactgccacaactacattggcggctactactgctcctgccgcttcggctacatcctccacacagacaacaggacctgccgagtggagtgcagtgacaacctcttcactcaaaggactggggtgatcaccagccctgacttcccaaacccttaccccaagagctctgaatgcctgtataccatcgagctggaggagggtttcatggtcaacctgcagtttgaggacatatttgacattgaggaccatcctgaggtgccctgcccctatgactacatcaagatcaaagttggtccaaaagttttggggcctttctgtggagagaaagccccagaacccatcagcacccagagccacagtgtcctgatcctgttccatagtgacaactcgggagagaaccggggctggaggctctcatacagggctgcaggaaatgagtgcccagagctacagcctcctgtccatgggaaaatcgagccctcccaagccaagtatttcttcaaagaccaagtgctcgtcagctgtgacacaggctacaaagtgctg

SEQ ID NO: 258409 - DNA, 1098 bp, Homo Sapiens
  misc_feature (14)..(14): n is a, c, g, or t
  misc_feature (16)..(16): n is a, c, g, or t
  misc_feature (18)..(18): n is a, c, g, or t
  misc_feature (37)..(38): n is a, c, g, or t
  misc_feature (49)..(49): n is a, c, g, or t
  misc_feature (60)..(60): n is a, c, g, or t
gtacaatcttcacncncncgtgaaaagccagagcacnngagttgcgttnccacctcaagntgggccaagatatttggtgctacagatgtggctggtcgtggtattgacatccaagatgtgtctatggttgtcaactatgatatggccaaaaatattgaagattacatccaccgcattggccgcacgggacgagcaggcaagagtggggtggccatcaccttcctcacaaaagaggactctgctgtgttctacgagctgaagcaagctatcctggaaagcccagtgtcttcctgtccccccgaactagccaaccacccagatgcccagcataagccaggcaccatcctcaccaagaagcgccgggaagagaccatctttgcctgacacagcactcttcctgtgggctgagggcatctccaaagctgcctgatgcctgtttttcagaaccctcacatccctctttccaggtcctcactcttgggatatgggggcttaggaaaacaatccaactccctagcccagaccctcaggtcaggaggcctgcgtgtggggctgcaaaaggagaggacgacgctgtcggaggcagggagagcaaattaccacagcttcttggcccagttctgcccttctttgctttgggattgcactgggccatcagctcatgccaggctatgggggcagccagttggcattgctccccagactgaacagaaacctggccgccggatgggacctcctttggcacagacttgactgtgtaactgcataaactgcagtagcatcattgccctagatgccccaggagacctggcaccatgaggattacagacagtggaatcttactgtcatctggacagctgttttcctgtttggatggtaaaggaagttgagagtctttagacctgtgcacagccccccaccaaggggtgctgtatgctctaggcatcccctcccccaggggattttctaagtagatggggggacacggtgaactggctgtgtccatctttgtcactgagtgaaatctctgttttctattctctgagaagataagtttgtatgttctgagaataaatacatgaatattaagactgttaa

SEQ ID NO: 258410 - DNA, 431 bp, Homo Sapiens
  misc_feature (22)..(22): n is a, c, g, or t
  misc_feature (32)..(32): n is a, c, g, or t
aattggggcaatgggctccccnagactgaaanaaaaaccctggccgccggaaggggaccccccttgggcacagacttgactgtgtaaactgcataaactgcaagtagcatcaattgcccctagatgccccccaggagaccctggcacccatgaggattacagacagtggaaccttactgtcatctggacagctgttttcctgtttggatggtaaaggaagttgagagtctttagacctgtgcacagccccccgaccaaggggtgctgtatgctctaggcatcccctcccccaggggattttctaagtagatggggggacacggtgaactggctgtgtccatctttgtcactgagtgaaatctctgttttctattctctgagaagataagtttgtatgttctgagaataaatacatgaatattaagactgtt

SEQ ID NO: 258411 - DNA, 1793 bp, Homo Sapiens
  misc_feature (58)..(58): n is a, c, g, or t
  misc_feature (60)..(60): n is a, c, g, or t
  misc_feature (70)..(70): n is a, c, g, or t
  misc_feature (77)..(77): n is a, c, g, or t
  misc_feature (81)..(81): n is a, c, g, or t
  misc_feature (83)..(84): n is a, c, g, or t
  misc_feature (91)..(91): n is a, c, g, or t
  misc_feature (93)..(93): n is a, c, g, or t
  misc_feature (96)..(96): n is a, c, g, or t
  misc_feature (100)..(100): n is a, c, g, or t
  misc_feature (102)..(102): n is a, c, g, or t
  misc_feature (109)..(109): n is a, c, g, or t
  misc_feature (112)..(112): n is a, c, g, or t
  misc_feature (116)..(116): n is a, c, g, or t
  misc_feature (123)..(124): n is a, c, g, or t
  misc_feature (127)..(127): n is a, c, g, or t
  misc_feature (144)..(144): n is a, c, g, or t
  misc_feature (148)..(148): n is a, c, g, or t
  misc_feature (162)..(162): n is a, c, g, or t
  misc_feature (172)..(172): n is a, c, g, or t
  misc_feature (178)..(178): n is a, c, g, or t
  misc_feature (185)..(185): n is a, c, g, or t
  misc_feature (190)..(190): n is a, c, g, or t
  misc_feature (192)..(192): n is a, c, g, or t
  misc_feature (204)..(204): n is a, c, g, or t
  misc_feature (218)..(219): n is a, c, g, or t
  misc_feature (224)..(224): n is a, c, g, or t
  misc_feature (239)..(240): n is a, c, g, or t
  misc_feature (245)..(246): n is a, c, g, or t
  misc_feature (249)..(249): n is a, c, g, or t
  misc_feature (252)..(252): n is a, c, g, or t
  misc_feature (256)..(256): n is a, c, g, or t
  misc_feature (258)..(259): n is a, c, g, or t
  misc_feature (262)..(262): n is a, c, g, or t
  misc_feature (279)..(279): n is a, c, g, or t
  misc_feature (290)..(290): n is a, c, g, or t
  misc_feature (305)..(305): n is a, c, g, or t
  misc_feature (307)..(307): n is a, c, g, or t
  misc_feature (311)..(311): n is a, c, g, or t
  misc_feature (313)..(314): n is a, c, g, or t
  misc_feature (324)..(324): n is a, c, g, or t
  misc_feature (335)..(335): n is a, c, g, or t
  misc_feature (337)..(337): n is a, c, g, or t
  misc_feature (341)..(341): n is a, c, g, or t
  misc_feature (343)..(343): n is a, c, g, or t
  misc_feature (345)..(346): n is a, c, g, or t
  misc_feature (359)..(359): n is a, c, g, or t
  misc_feature (375)..(375): n is a, c, g, or t
  misc_feature (385)..(385): n is a, c, g, or t
  misc_feature (400)..(400): n is a, c, g, or t
  misc_feature (402)..(402): n is a, c, g, or t
  misc_feature (411)..(413): n is a, c, g, or t
  misc_feature (416)..(416): n is a, c, g, or t
  misc_feature (418)..(418): n is a, c, g, or t
  misc_feature (421)..(421): n is a, c, g, or t
  misc_feature (423)..(423): n is a, c, g, or t
  misc_feature (425)..(425): n is a, c, g, or t
  misc_feature (431)..(431): n is a, c, g, or t
  misc_feature (433)..(433): n is a, c, g, or t
  misc_feature (455)..(455): n is a, c, g, or t
  misc_feature (463)..(463): n is a, c, g, or t
  misc_feature (476)..(476): n is a, c, g, or t
  misc_feature (517)..(517): n is a, c, g, or t
  misc_feature (853)..(853): n is a, c, g, or t
cggagctcagcagacaccaggcctctccgggcaggccctggcccaccgtgggccctcngngcctgctgcngggcgcnttcngnnccggccncnccnttgncnttgggcnccngacnccccgcnngtngcctgtttgcctggccntccncctgtccgtccccnggtttcgggnggcccnggggcgntgccngnccccgcggcgcncctgcccttcttcnncggcngcctctcgcgtgccnnggccnnggnccncctncnngcnggcgggcctggcggccnggctcttcctnctgccccactccctncnctcncnncgcgcggctntgtgctgctcncncgtncncnntgtcgcgcttccnccactttcccatcgancgccactcancggcacctacgccantnccggcggcnnngcncnctntngnccggcngngctctgcgaccttctactcgcncgaccccnacgggctgccctncaacctgcgcaaccgtccaaccgcgccgtcgcggcctcganccgcagccggggggtcttcgactgcctgcgagacgccatggtgcgtgactacgtgcgccagacgtggaagctggagggcgaggccctggagcaggccatcatcagccaggccccgcagtgggagaagctcattgctatgacggcccacgagcggatgccctggtaccacagcagcctgacgcgtgaggaggccgagcgcaaactttactctggggcgcagaccgacggcaagttcctgctgaggccgcggaaggagcagggcacatacgccctgtccctcatctatgggaagacggtgtaccactacctcatcagccaagacaaggcgggcaagtnctgcattcccgagggcacaaagtttgacacgctctggcagcctggtggagtatctgaagctgaaagcggacgggctcatctactgccctgaaggaggcctgccccaacagcagtgccagcaacgcctcaggggctgctgctcccacactcccagcccacccatccacgttgactcatcctcagagacgaatcgacaccctcaactcagatggatacacccctgagccagcacgcataacgtccccagacaaaccgcggccgatgcccatggacacgagcgtgtatgagagcccctacagcgacccagaggagctcaaggacaagaagctcttcctgaagcgcgataacctcctcatagctgacattgaacttggctgcggcaactttggctcagtgcgccagggcgtgtaccgcatgcgcaagaagcagatcgacgtggccatcaaggtgctgaagcagggcacggagaaggcagacacggaagagatgatgcgcgaggcgcagatcatgcaccagctggacaacccctacatcgtgcggctcattggcgtctgccaggccgaggccctcatgctggtcatggagatggctggggccgggccgctgcacaaggtcctggtcggcaagagggaggagatccctgtgagcaatgtggccgagctgctgcaccaggtgtccatggggatgaagtacctggaggagaaaaactttgtgcaccgtgacctggcggcccgcaacgtcctgctggttaaccggcactacgccaagatcagcgactttggcctcttcaagcactggttgccgacgacagctactacactgcccgctagaagggaagggcccctccagttgtacccaccccaatgcattaacttccgcagttttcaaccgaaggatggctgaagttatggggcacatgttggagccttgtctacggcca

SEQ ID NO: 258412 - DNA, 1694 bp, Homo Sapiens
  misc_feature (116)..(116): n is a, c, g, or t
  misc_feature (1046)..(1105): n is a, c, g, or t
  misc_feature (1327)..(1327): n is a, c, g, or t
  misc_feature (1349)..(1349): n is a, c, g, or t
  misc_feature (1446)..(1451): n is a, c, g, or t
  misc_feature (1455)..(1455): n is a, c, g, or t
  misc_feature (1457)..(1459): n is a, c, g, or t
  misc_feature (1464)..(1467): n is a, c, g, or t
  misc_feature (1469)..(1469): n is a, c, g, or t
  misc_feature (1475)..(1475): n is a, c, g, or t
cgcctccgggggacggtggcggctcccggcggtgaggccgcgcctgtccggggatcgtcgagggacggcgggacttgggccagcggcggcggcggcctgggacgcaggcggagccncgcgcaggcccaaggtcccggaggctatggcagcggctaccatcgtgcacgaaacgtctgaggccgtggagctctgccctgcttacggcttgtacctgaagcccatcaccaagatgaccatcagcgtggcactcccgcagctgaagcagccggggaagtccatctccaactgggaggtgatggagaggctgaagggcatggtgcagaaccaccagttctccacgctgcgtatttccaagagcaccatggacttcatccgcttcgagggggaggtggagaacaagagcctggtcaagtcttttctggcctgcctggacggcaagaccatcaagctcagcggcttctccgacatcctgaaggtgcgcgcggccgagttcaagatcgacttccccacccgccacgactgggactccttcttccgcgacgccaaggacatgaacgagaccctgccgggggagcggccggacaccatccaacctggaggggctgccctgcaagtggttcgccctgaaggagtcgggctccgagaagcccagcgaggacgtcctggtcaaggtgtttgagaagttcggggagatccggaatgtggacatccccatgctggacccctaccgggaggagatgacgggccgcaacttccacaccttcagtttcggggggcacttgaacttcgaggcctatgtgcagtaccgcgagtacatgggcttcatccaggccatgagcgccctgcgcgggatgaaactcatgtacaagggcgaggacggcaaggccgtggcctgcaacatcaaggtttcttttgattcgaccaaacacctgagtgatgcctcaattaagaagcggcagctggagaggcagaagcttcaggaactggagcagcaaagagaagaacaaaagcgcagagagaaggaagcggaggagaggcagcgagcnnnnnnnnnnnnnnnnnnnnnnnnnnnnnnnnnnnnnnnnnnnnnnnnnnnnnnnnnnnncttcgcaagagggagcagaagcagagggaccgtgagctgcgccggaatcagaagaagctggagaagctgcaggcggaggagcagaagcagctgcaggagaagatcaagctggaggagcgcaagctgctgctgggccagaggaacctgcagtcatccggctcatcgcgagctgctcgcagagccagggtacccgggggtcctctgcagcgccagcgggccggntgcctcatgcccccctgaatgngacgcgcagggcgttcccgcgtgcatgactcaacctttgagagagctcgaggcgcgcgtcagtatgatcttatgtgcacgcggcttgaactggcgtnnnnnnactngnnncgacnnnncnaccgcnacaccaaaacacacacaaactctccaccacgcacatactccccaccccccaccgacctcagctacacccggaactatcgccccccctcgcgctattctctgatacgaccgcgaactcgacatgcgcacacccgaatttaccatgtgcgctcccaccccccggcttaacgctaccctctgcatccggcttcgtaactcatccgccctcaataccggcccg

SEQ ID NO: 258413 - DNA, 1052 bp, Homo Sapiens
  misc_feature (7)..(7): n is a, c, g, or t
  misc_feature (10)..(10): n is a, c, g, or t
  misc_feature (24)..(24): n is a, c, g, or t
  misc_feature (47)..(48): n is a, c, g, or t
  misc_feature (54)..(55): n is a, c, g, or t
  misc_feature (58)..(58): n is a, c, g, or t
  misc_feature (60)..(60): n is a, c, g, or t
  misc_feature (65)..(65): n is a, c, g, or t
  misc_feature (68)..(68): n is a, c, g, or t
  misc_feature (80)..(80): n is a, c, g, or t
  misc_feature (82)..(82): n is a, c, g, or t
  misc_feature (88)..(88): n is a, c, g, or t
  misc_feature (92)..(93): n is a, c, g, or t
  misc_feature (156)..(156): n is a, c, g, or t
  misc_feature (164)..(164): n is a, c, g, or t
  misc_feature (170)..(170): n is a, c, g, or t
  misc_feature (213)..(213): n is a, c, g, or t
  misc_feature (292)..(292): n is a, c, g, or t
  misc_feature (526)..(545): n is a, c, g, or t
cctggcnganactctccgcaaagnccacttcttagaaaccgcgcaanncccggnnctnanacatnagnatgtcgtctatncncactanatcnnactggagatgtgtccagagtcttgccttgctggggtaagctaagccaagtttatagccagttntctgcagntgtatnttggtagaggtcctccttgatactcagttgtaattctctgagnatctctgcctccaaagtgactttgctggaccatcactgatagattcatcacaagattcagactccgaggaggaactggnactctcttttgagcaaaacgcttacactacctttccttttggctttaacaaggctgtttctagcagaaccttttggagaactacatctctgattggcccagtctttcactgcctgtactttcggagacttgggattcttagccttttttttatattcacatttctcctttttctttggtgattttcttttggcctcttcgttatcatcacccactgtgccacaggttgctttannnnnnnnnnnnnnnnnnnngctgacagtctgatctgtgacagcttttggttccaggatccaagaccttctcgattattgttatggttctcgcgactcttccacatgcgtcttggaatagttgcaatcgggttccagattcttcaccctcctctaacggaaatgcccgcttctttgcttttctaagagataaactaatgtcaccattactgatgactacagaattctcagcaactcctctctcttctaatttaactctgaggcagtcgttgtctctcacaaggcgcgcgctctcggcggcgggcaagagccccccctccaggtagaggcctaggaaggccccagaactgaagccgaagcgctggcggatgagactaatgagatctgtgacgactcggcatctgttcaagtcgaccagaagccagaaggccgtacagtgcggggtagctggcggcgggtaatcaaattgaagccgtagcctaaccgtctcggaagctgccatcttgcttggtgctcaacggaagcccc

SEQ ID NO: 258414 - DNA, 1336 bp, Homo Sapiens
gctggaccggtccggattcccgggatccatatggagtccgtcagttgctccgctgctgctgtcaggaccggagacatggagtcccagcgggacctgagcctggtgcctgagcggcttcagagacgcgaacaagaacggcagctggaagttgaaaggcggaaacaaaagcggcagaaccaggaggtagagaaggagaacagccactttttcgtcgccacctttgctcgggagcgagcggccgtggaagagcttctggagcgcgcggagtcggtcgagcggctggaggaggcggcctctcggctccagggctgcagaaactaatcaacgactcagtttttttcctagccgcttacgacctgcggcagggacaagaggcgctggcgcggctgcaggcggccttggccgagcggcgccgggggctgcagcccaagaagcgtttcgctttcaagacccggggaaaggatgctgcttcgtctaccaaagtagacgcggctcctggcatccccccggcagttgaaagcatacaggactccccgctgcccaagaaggcggaaggagacctcggccccagctgggtctgcggtttctccaacctggagtcccaagtcttggagaagagagccagcgagttgcaccagcgcgacgttcttttgaccgaactgagcaactgcacggtcagactgtatggaaatcccaacaccctgcggctaaccaaggcccacagctgcaagctgctctgcggtccggtgtctacctctgttttcctggaggactgcagtgactgcgtgctggcagtggcctgccaacagctccgcatacacagtacgaaagacacccgcatcttcctgcaggtgaccagcagggccatcgtggaggactgcagtgggatccagttcgccccttacacctggagctacccggagatcgacaaggacttcgagagctctggtttagataggagcaaaaataactggaacgatgttgacgattttaactggctggcccgggatatggcctccccaaactggagtattcttcctgaagaggagcgaaatatccagtgggactaagcagttgtcactctgttcttcactcctaccaaatactttccacgttggactttcccccttattgggtctcgaagtttacttattgtcacactgtgtatgttttcagcattttaaggctagagattgtaatgggctcctacttgtaatttccattaaattcgtaacaggtataacactaaagcatttttgctattttcgtcatgcctttgagactgagtcttactccgtcccccagcgtgggtgggcgcgctgggaattacagggcg

SEQ ID NO: 258415 - DNA, 1052 bp, Homo Sapiens
  misc_feature (11)..(12): n is a, c, g, or t
  misc_feature (14)..(14): n is a, c, g, or t
  misc_feature (16)..(17): n is a, c, g, or t
  misc_feature (21)..(21): n is a, c, g, or t
  misc_feature (24)..(24): n is a, c, g, or t
  misc_feature (26)..(26): n is a, c, g, or t
  misc_feature (35)..(35): n is a, c, g, or t
  misc_feature (38)..(38): n is a, c, g, or t
  misc_feature (42)..(42): n is a, c, g, or t
  misc_feature (44)..(44): n is a, c, g, or t
  misc_feature (50)..(50): n is a, c, g, or t
  misc_feature (52)..(52): n is a, c, g, or t
  misc_feature (58)..(58): n is a, c, g, or t
  misc_feature (62)..(63): n is a, c, g, or t
  misc_feature (70)..(70): n is a, c, g, or t
  misc_feature (75)..(75): n is a, c, g, or t
  misc_feature (85)..(85): n is a, c, g, or t
  misc_feature (87)..(87): n is a, c, g, or t
  misc_feature (90)..(90): n is a, c, g, or t
  misc_feature (96)..(96): n is a, c, g, or t
  misc_feature (102)..(102): n is a, c, g, or t
  misc_feature (120)..(120): n is a, c, g, or t
  misc_feature (129)..(129): n is a, c, g, or t
  misc_feature (139)..(139): n is a, c, g, or t
  misc_feature (147)..(147): n is a, c, g, or t
  misc_feature (165)..(165): n is a, c, g, or t
  misc_feature (173)..(174): n is a, c, g, or t
  misc_feature (184)..(184): n is a, c, g, or t
  misc_feature (188)..(188): n is a, c, g, or t
  misc_feature (190)..(190): n is a, c, g, or t
  misc_feature (217)..(217): n is a, c, g, or t
  misc_feature (241)..(241): n is a, c, g, or t
  misc_feature (247)..(247): n is a, c, g, or t
  misc_feature (274)..(274): n is a, c, g, or t
  misc_feature (358)..(358): n is a, c, g, or t
  misc_feature (438)..(438): n is a, c, g, or t
  misc_feature (441)..(776): n is a, c, g, or t
gccagcaaggnntntnnccantcnanttccatggngcntatnanaaaccncnaatttntttnntgaagcnggatntggcaaatcnanaangctccngccaanagaagtttgttgagggantcaactccntggcgctcantggagttntctactgggtcatctagngccctatnntttgaggaangcantntaaaaagcctactttggacccagcagntaactccttctcccacccctcttnttgctntctcctataccaataaatacgaagggntgtggaagatcagagcccttgttcacgagaagcaagaagccccctgaccccttgttccaaatatactcttttgtctttctcttnattcccacgttcgccctttgttcagtccaatacagggttgtggggcccttaacagtgccatattaattggtatcataatntcnnnnnnnnnnnnnnnnnnnnnnnnnnnnnnnnnnnnnnnnnnnnnnnnnnnnnnnnnnnnnnnnnnnnnnnnnnnnnnnnnnnnnnnnnnnnnnnnnnnnnnnnnnnnnnnnnnnnnnnnnnnnnnnnnnnnnnnnnnnnnnnnnnnnnnnnnnnnnnnnnnnnnnnnnnnnnnnnnnnnnnnnnnnnnnnnnnnnnnnnnnnnnnnnnnnnnnnnnnnnnnnnnnnnnnnnnnnnnnnnnnnnnnnnnnnnnnnnnnnnnnnnnnnnnnnnnnnnnnnnnnnnnnnnnnnnnnnnnnnnnnnnnnnnnnnnnnnnnnnnnnnnnnnnnnnnnnnntattttattatattagccaccatgcctgtcctattttcttatgttttaatatattttaatatattacatgtgcagtaattagattatcatgggtgaactttatgagtgagtatcttggtgatgactcctcctgaccagcccaggaccagctttcttgtcaccttgaggtcccctcgccccgtcacaccgttatgcattactctgtgtctactattatgtgtgcataatttataccgtaaatgtttactctttaaatagaaaacaatacacgcaaac

SEQ ID NO: 258416 - DNA, 1098 bp, Homo Sapiens
  misc_feature (403)..(426): n is a, c, g, or t
  misc_feature (623)..(625): n is a, c, g, or t
  misc_feature (636)..(637): n is a, c, g, or t
  misc_feature (650)..(650): n is a, c, g, or t
  misc_feature (846)..(846): n is a, c, g, or t
  misc_feature (995)..(1032): n is a, c, g, or t
agcaggtaacgtggtttcccttgcggccccctcctcccagctgcatagactcgtggtttgaagtgaacagatcttgtccggaacaccctgcggactgacctgcgggcttgcttgctgactcctctcaaagggacagagcgcccctgctccagggaggaggctcaccggaccctggggcagagctgagcttgggacaccagcgggaacagggcaccccttctgcactgacttccagatcatggttctcccttcctccctgaggacaccaaattggatgagagcaagtttgagagaagaatgaatcaactgctatccttcccctcacccctcagcccaggagggaaagggcattttctttttcatctttgaaaggcattgtgggtctgtctttaaagtgtttacnnnnnnnnnnnnnnnnnnnnnnnngtctagtgtcgactggtgttttccctcgtgatgtttacagcttgctgtttgctgcccagccataacccactcagtgacagacgaacacagctaaggcctcgctgccagccttctgacggcgggcgagcacacggtctcttcccctgccccaactggccctctccaccaccaacttctctactttgggtttgttgggnnntttccctctanntttctggcgggtnttttgctcttttctccccttgagaccctaatatcttgacttcattgccaaaaaacaacccattgagaactttcttcctactgatcccatctcttttcccttctttcctcctggttccggtcagttcagaggatttaacaatcacaagtgtcctgcaaaaatgcctgaacattattcttaggccctcgtggattttntttttcagaaaacttaaacaaaaaaagacttactaagaaatatgtacagctacccctgttttcaggcactatgtttgagaacattttagccattgatgttcacacgtggcatcagcccatgcaagataggtttctgtatttatatattnnnnnnnnnnnnnnnnnnnnnnnnnnnnnnnnnnnnnngttcaaagcttgggagaaaagctttcttcattagtcaaggtgttttgatatggtattaaaatgtct

SEQ ID NO: 258417 - DNA, 1039 bp, Homo Sapiens
  misc_feature (740)..(798): n is a, c, g, or t
  misc_feature (878)..(910): n is a, c, g, or t
  misc_feature (944)..(944): n is a, c, g, or t
  misc_feature (986)..(986): n is a, c, g, or t
  misc_feature (1006)..(1006): n is a, c, g, or t
  misc_feature (1010)..(1010): n is a, c, g, or t
  misc_feature (1015)..(1015): n is a, c, g, or t
  misc_feature (1024)..(1024): n is a, c, g, or t
cacatttccatttagtgacaggaatttaagcaaggacctgaagtagaatcaactgattcacacagttagtaaatacaaagtagtaacaatgatcttggcttcgctgtctggttcagtggtctgctggaatgcaatacacaagttaagtcacactgcagactgttttctagctgtggccgctggatgccacttctagcatagtagaactatgttaggaggaatgggaaaagtgagcaccacttctcaccatgttcccccctcctgctgccagtctctgctcccatgttggatgcagcagagatcacccaccagttggcccaggacagaccaataggaagggtccaatcactctaactacagccgaactcacctccacaacagtctctgtggctctagcctggactcctttacaggaatccagctctggcagtggcagctggagagggtaatagggcctcctgctgaatgaaggaagttgggtgaatgaatgggtgagctgcagggctcacttgcaaagggaccaggagtgataaggaaacaacaactcattcaggcagctgcttttgacctctaactcccaaacctgcctgttgcatgaggggaagccatctcccatgggagcgaagttaatggggtgggaggctatattctcactattgagtctttccaggagtctcaaggcacaaggctcctggtttcttactctcaaccaccccctacactctttatactctcactcnnnnnnnnnnnnnnnnnnnnnnnnnnnnnnnnnnnnnnnnnnnnnnnnnnnnnnnnnnnttgatgtgtgccttgccctcttgcctgtatcactctcagagtctgagctgtcagagtcagatgacttcctatctctatgnnnnnnnnnnnnnnnnnnnnnnnnnnnnnnnnnagaaggattccttgtagggtcaggcttctcaaantctgctgactttgcctcttccttttcctcttcctcatcaggnatcagagagtatttagtccncctnggtgnatgaaaaancttttgcaaaggggc

SEQ ID NO: 258418 - DNA, 1114 bp, Homo Sapiens
  misc_feature (7)..(7): n is a, c, g, or t
  misc_feature (12)..(12): n is a, c, g, or t
  misc_feature (21)..(22): n is a, c, g, or t
  misc_feature (24)..(26): n is a, c, g, or t
  misc_feature (29)..(29): n is a, c, g, or t
  misc_feature (31)..(31): n is a, c, g, or t
  misc_feature (35)..(35): n is a, c, g, or t
  misc_feature (42)..(42): n is a, c, g, or t
  misc_feature (48)..(48): n is a, c, g, or t
  misc_feature (51)..(51): n is a, c, g, or t
  misc_feature (55)..(55): n is a, c, g, or t
  misc_feature (76)..(77): n is a, c, g, or t
  misc_feature (106)..(106): n is a, c, g, or t
  misc_feature (175)..(175): n is a, c, g, or t
  misc_feature (197)..(197): n is a, c, g, or t
  misc_feature (212)..(212): n is a, c, g, or t
  misc_feature (231)..(231): n is a, c, g, or t
  misc_feature (265)..(320): n is a, c, g, or t
  misc_feature (397)..(429): n is a, c, g, or t
aaggaanttggnaataatggnnannncangntcanttgcaanggaccngantaanaagaaacacaactcattcagnngctgttttgacctctaactcccaaacctncctgttgcatgagggaagccatcccccatgggagcgaagttaatggggtgggaggctatatttctcacnattgagtcttcccaggagtctnaaggcacaaggctcntgtttcttactctcaaccnccccctacactctttatactctcactccttgtgnnnnnnnnnnnnnnnnnnnnnnnnnnnnnnnnnnnnnnnnnnnnnnnnnnnnnnnnatgtgtgccttgccctcttgcctgtatcactctcagagtctgagctgtcagagtcagatgacttcctatctctatgnnnnnnnnnnnnnnnnnnnnnnnnnnnnnnnnnagaaggattccttgtagggtcaggcttctcaaactctgctgactttgcctcttccttttcctcttcctcatcaggtatcagagagtatttagtcccacctggttgcatgaaacaatcttttgcaaagtggcctttacagccacacttcttgcaggtagtgttcaagacagcctcaagggtgatcttctgcccagtgtaatcctggaaggatcgcctccgcctctcttcttgctcaatgataacattgttgggatcaaggtctttcccagtcccttgattgacaaccttcatggagagggatacttttattctatcatttttcatctctcggccaataagcttcacccacactttatctccaacatctactatctcagagggcttatccacccgacaggatgacatatgagttcgatggaccagaccttgcttccgacagcctgggattttgataaaggccccatagtctgtcaccatagcaacctctccttggaaaatagtgtagagagcaggcaagttttccatggtctcaggccttcctgaattcatccttaatattctatggctcctccatttctcttctattaaagctaatacaagtgtctaggcgtcagctccaggtccccgagtcgctgcgctgaactaaacgccgaccccagtcagccagcgcgtttccacccacccc

SEQ ID NO: 258419 - DNA, 1257 bp, Homo Sapiens
  misc_feature (610)..(647): n is a, c, g, or t
  misc_feature (1194)..(1194): n is a, c, g, or t
agaagagaaatggaggagccatagaatattaaggatgaattcaggaaggcctgagaccatggaaaacttgcctgctctctacactattttccaaggagaggttgctatggtgacagactatggggcctttatcaaaatcccaggctgtcggaagcaagatgaaaaatgatagaataaaagtatccctctccatgaaggttgtcaatcaagggactgggaaagaccttgatcccaacaatgttatcattgagcaagaagagaggcggaggcgatccttccagaattacactgggcagaagatcacccttgaggctgtcttgaacactacctgcaagaagtgtggctgtaaaggccactttgcaaaagattgtttcatgcaaccaggtgggactaaatactctctgatacctgatgaggaagaggaaaaggaagaggcaaagtcagcagagtttgagaagcctgaccctacaaggaatccttctagaaaaagaaagaaggagaagaagaaaaagaaacatagagataggaagtcatctgactctgacagctcagactctgagagtgatacaggcaagagggcaaggcacacatcaaaagacagcaaggcagnnnnnnnnnnnnnnnnnnnnnnnnnnnnnnnnnnnnnncacaaggagtgagagtataaagagtgtagggggtggttgagagtaagaaaccaggagccttgtgccttgagactcctggaaagactcaatagtgagaatatagcctcccaccccattaacttcgctcccatgggagatggcttcccctcatgcaacaggcaggtttcggagttagaggtcaaaagcagctgcctgaatgagttgttagtttccttatcactcctggtccctttgcaagtgaaccctgcagctcacccattcattcacccaacttccttcattcagcaggaggtcctattaccctctccagctgccactgccagagctggcattcctgtaaaggagtccaggctagagccacagagactgttgtggaggtgagttcggctgtagttagagtgattggacccttcctattggtctgtcctgggccaactggtggggtgatctctgctgcatccaacatgggagcagagactggcagcagggagggggaacatgggtgagaagtggtgctcactttttcccatttcctccctaacatagnttctactatgcctagaaggggcattccagcgggccacaggctaggaaaacaggtctgcaatgt

SEQ ID NO: 258420 - DNA, 1023 bp, Homo Sapiens
  misc_feature (34)..(35): n is a, c, g, or t
  misc_feature (55)..(55): n is a, c, g, or t
  misc_feature (89)..(89): n is a, c, g, or t
  misc_feature (95)..(95): n is a, c, g, or t
  misc_feature (99)..(99): n is a, c, g, or t
  misc_feature (104)..(104): n is a, c, g, or t
  misc_feature (113)..(113): n is a, c, g, or t
  misc_feature (125)..(125): n is a, c, g, or t
  misc_feature (189)..(189): n is a, c, g, or t
  misc_feature (199)..(199): n is a, c, g, or t
  misc_feature (378)..(378): n is a, c, g, or t
gggacatatggcagtaggcagatgaaccaaggannaatagcaaagccctggagtnccggttgggttgactgagacagagggcccaaaantccttncccnttgtntcccaggcnggtgcccagacnccttgcatggcttgtgtggtcctcagactccccacagcgagcgtaggtctctgggtttcagatnaagtgcccangctccaggaagttgagggacccacaggagaggtgggcagagctggagttctcatccagggctgcttgtccccagagcccaggtttatactacctccctggggcgggggctggccgcagggtaggggagaggctctgcagtgtggagtggagcctcatcgaggggcgctgggttaggggngcacctgtttcagactgggcatgaagaagggagcacagcagctactagaccccattagcacctcattagcccacaagccagccaggggccccaggaagatgggcaccccccagcaccctccagattgagagcaaggtagaggaaggagtcccagcctctgggcagaccagaggcccagagggagagagtagcagaaggcttttgatttttttcttgcctgaggcttgaatctgacaaacccttggtgggcactgctcccttaggttcttccccacctcaatctacctgcctagagtagcagctcccagacccagttctgggactgaaggttaacccttcacctgctgtcccttcttaacacccaggcccccagagccagctgggcctgtccagcagccacctgtgggtatttatgagtttcatatgaagtactgtgccccttcccttcctcatcccgaccctgcccgagcttcctgaaggtcctcactgtttgcatatcgctcaggccacctccaaaccccacctaggttttataatgtatattatatatttttttgtgtatttttaaaatccagctgtgatgggttatatcataaatgcagcttggggttggagcaggggccctcaaaggcccagctcctgctc

SEQ ID NO: 258421 - DNA, 1229 bp, Homo Sapiens
  misc_feature (283)..(401): n is a, c, g, or t
  misc_feature (1008)..(1020): n is a, c, g, or t
  misc_feature (1053)..(1053): n is a, c, g, or t
  misc_feature (1097)..(1097): n is a, c, g, or t
  misc_feature (1099)..(1099): n is a, c, g, or t
  misc_feature (1107)..(1107): n is a, c, g, or t
  misc_feature (1114)..(1117): n is a, c, g, or t
  misc_feature (1120)..(1120): n is a, c, g, or t
  misc_feature (1123)..(1124): n is a, c, g, or t
  misc_feature (1135)..(1135): n is a, c, g, or t
  misc_feature (1138)..(1139): n is a, c, g, or t
  misc_feature (1149)..(1149): n is a, c, g, or t
  misc_feature (1154)..(1155): n is a, c, g, or t
  misc_feature (1163)..(1167): n is a, c, g, or t
  misc_feature (1171)..(1171): n is a, c, g, or t
  misc_feature (1187)..(1188): n is a, c, g, or t
  misc_feature (1193)..(1193): n is a, c, g, or t
  misc_feature (1197)..(1197): n is a, c, g, or t
  misc_feature (1200)..(1202): n is a, c, g, or t
  misc_feature (1204)..(1205): n is a, c, g, or t
  misc_feature (1209)..(1209): n is a, c, g, or t
  misc_feature (1215)..(1215): n is a, c, g, or t
  misc_feature (1218)..(1218): n is a, c, g, or t
  misc_feature (1227)..(1227): n is a, c, g, or t
gtcaaaatgggtgaatgagacttatacataaagacaggctttctcccctatagttaggaggtgaactcacacatgtgtacctgaacattcttgcttttgaggagacagactcccagtggtactactatgcttaggtgttggacaggataggggtaggaggagaggaggcaggctgctgtcctgaaagtggctgtggtttatggcatcactcccttctaatcagcaagtccagtggccacttagagcccagctcctacctcttcattcacttaacaagtagttnnnnnnnnnnnnnnnnnnnnnnnnnnnnnnnnnnnnnnnnnnnnnnnnnnnnnnnnnnnnnnnnnnnnnnnnnnnnnnnnnnnnnnnnnnnnnnnnnnnnnnnnnnnnnnnnnnnnnnngtttttttaaaagctagttgttgaccagctaccctgagccaggcaccaccctgaaggagcttcttttcctctggggagaagcaaattcatgatgtgtgtgctggagatctggcactcatggccagtgctttccagtatcttgaactcttcgggggtcctgttgacccatttcgtgacctacctccgtgactgctctttttcctctgtctcttaagtgtgatggttttccagagtccaatcctcaggactttcccgtccacacacaggcctggtagtcaggtgggctctaaaccattaggtgggttgtagacctctctcaagctgccacctccttgctgtcgccagatcgtatttcagtctgtcaggggttatctgtatctgggaggttccactgttgcttcagtctcagttacttagaatggaacccagagtcctgccccttttccacctacaagctcttacttgaaaagcacctgagacttattgggtccctgattcctgcttcgtctgtatccgcagagtagttgcatgtcatttggcctgttttctaaataatcccacatcatgtcctccctgcacttacattgccactgctctgatttgggcnnnnnnnnnnnnngggacaatgcctctgtccaattctgagtaacanctctggttcttgccactaccagagttctctagcaaatctgagcncngacagggngaaaatnnnnaanggnntcctgatgccngannttattggatnaattnnagttcacnnnnncacncattcacttctgtatnnctgcnaganaannncnncttnacacancanaataagtcntt

SEQ ID NO: 258422 - DNA, 2123 bp, Homo Sapiens
  misc_feature (1390)..(1535): n is a, c, g, or t
  misc_feature (1544)..(1544): n is a, c, g, or t
  misc_feature (1565)..(1578): n is a, c, g, or t
cgcccgccagtcctctcaacgcgcgcttggccgcccgacgacgcgggagccgcacgcgccggacgaggctcgctgcgctccctgttgcccagcgcgggcccgttgaggcggagcctcagttcccggccaggacacggtctgggccgccgaatctccggccgaagagcggcggcggcagcggcgggaaaaaaatgaagaatgaaattgctgccgttgtcttctttttcacaaggctagttcgaaaacatgataagttgaaaaaagaggcagttgagaggtttgctgagaaattgaccctaatacttcaagaaaaatataaaaatcactggtatccagaaaaaccatcgaaaggacaggcctacagatgtattcgtgtcaataaatttcagagagttgatcctgatgtcctgaaagcctgtgaaaacagctgcatcttgtatagtgacctgggcttgccaaaggagctcactctctgggtggacccatgtgaggtgtgctgtcggtatggagagaaaaacaatgcattcattgttgccagctttgaaaataaagatgagaacaaggatgagatctccaggaaagttaccagggcccttgataaggttacctctgattatcattcaggatcctcttcttcagatgaagaaacaagtaaggaaatggaagtgaaacccagttcggtgactgcagccgcaagtcctgtgtaccagatttcagaacttatatttccacctcttccaatgtggcaccctttgcccagaaaaaagccaggaatgtatcgagggaatggccatcagaatcactatcctcctcctgttccatttggttatccaaatcagggaagaaaaaataaaccatatcgcccaattccagtgacatgggtacctcctcctggaatgcattgtgaccggaatcactggattaatcctcacatgttagcacctcactaacttcgtttttgattgtgttggtgtcatgttgagaaaaaggtagaataaaccttactacacattaaaagttaaaagttcttactaatagtagtgaagttagatgggccaaaccatcaaacttatttttatagaagttattgagaataatctttcttaaaaaatatatgcactttagatattgatatagtttgagaaattttattaaagttagtcaagtgcctaagtttttaatattggacttgagtatttatatattgtgcatcaactctgttggatacgagaacactgtagaagtggacgatttgttctagcacctttgagaatttactttatggagcgtatgtaagttatttatatacaaggaaatctattttatgtcgttgtttaagagaattgtgtgaaatcatgtagttgcaaataaaaaatagtttgaggcatgnnnnnnnnnnnnnnnnnnnnnnnnnnnnnnnnnnnnnnnnnnnnnnnnnnnnnnnnnnnnnnnnnnnnnnnnnnnnnnnnnnnnnnnnnnnnnnnnnnnnnnnnnnnnnnnnnnnnnnnnnnnnnnnnnnnnnnnnnnnnnnnnnncaacccaancatctgcgccgtggacccacnnnnnnnnnnnnnncgcgcggcttcgtccttcccgcgcagaaaccaaatccacaacacaacgctctggggtctctccccccgaaaaaaaatcccgggagggtccaaacggaaggcgccttgtcacccaatcacaaaaattggacttctgcgcccgccctcctccgcgggacctgtcctgacaaacaagaccgaaaccccctctgtgcccccagattttggtaatttccattctccacacacctgcggggcggcggtatcgcggaaacgatgtgtgcctgaataaatacccatccaacgccctggcttcgcccttctgtggggataaaaccacctgtgcacctacgggcacggtaataccttcccgtgccccaccgcactcgtgcgctatacactcaaatacccttggcgcccccttgggcgtaataaattaattctgcccccgccgccgccgataaacaaatccgggattggctcgacggaatctcgggcttacatttcctgtggctggcgcgttctgatacagaaacaaatggtgggccacaacattttgccccccgg

SEQ ID NO: 258423 - DNA, 834 bp, Homo Sapiens
  misc_feature (583)..(583): n is a, c, g, or t
gctttggggctgcgctcactcgtgtgcgcgctcgtccgcccgccagtcctctcaacgcgcgcttggccgcccgacgacgcgggagccgcacgcgccggacgaggctcgctgcgctccctgttgcccagcgcgggcccgttgaggcggagccctcagttcccggccaggacacggtctgggccgccgaatctccggccgaagagcggcggcggcagcggcgggaaaaaaatgaagaatgaaattgctgccgttgtcttctttttcacaaggctagttcgaaaacatgataagttgaaaaaagaggcagttgagaggtttgctgagaaattgaccctaatacttcaagaaaaatataaaaatcactggtatccagaaaaaccatcgaaaggacaggcctacagatgtattcgtgtcaataaatttcagagagttgatcctgatgtcctgaaagcctgtgaaaacagctgcatcttgtatagtgacctgggcttgccaaaggagctcactctctgggtggacccatgtgaggtgtgctgtcggtatggagagaaaaacaatgcattcattgttgccagctttgaanaataaagatgagaacaaggatgagatctccaggaaagttaccagggcccttggataaggttacctcctgattaatcatttcacggatccctctttccttcagatggaaaaaaaccagttaaaggaaaatgggaaatggaaaaccccagcttcggggggaactgccacgcccgccaaggtcccctgggggtaacccagtaattttcccagaaaactttaattaatttttccccacccctttcgtttcccaaa

SEQ ID NO: 258424 - DNA, 917 bp, Homo Sapiens
  misc_feature (24)..(24): n is a, c, g, or t
  misc_feature (647)..(647): n is a, c, g, or t
  misc_feature (655)..(655): n is a, c, g, or t
  misc_feature (666)..(666): n is a, c, g, or t
  misc_feature (675)..(675): n is a, c, g, or t
  misc_feature (679)..(679): n is a, c, g, or t
  misc_feature (688)..(688): n is a, c, g, or t
  misc_feature (690)..(690): n is a, c, g, or t
  misc_feature (696)..(696): n is a, c, g, or t
  misc_feature (700)..(700): n is a, c, g, or t
  misc_feature (706)..(706): n is a, c, g, or t
  misc_feature (720)..(720): n is a, c, g, or t
  misc_feature (729)..(729): n is a, c, g, or t
  misc_feature (737)..(737): n is a, c, g, or t
  misc_feature (740)..(740): n is a, c, g, or t
  misc_feature (742)..(742): n is a, c, g, or t
  misc_feature (841)..(841): n is a, c, g, or t
  misc_feature (853)..(853): n is a, c, g, or t
  misc_feature (864)..(864): n is a, c, g, or t
  misc_feature (869)..(869): n is a, c, g, or t
  misc_feature (871)..(871): n is a, c, g, or t
  misc_feature (894)..(894): n is a, c, g, or t
  misc_feature (903)..(903): n is a, c, g, or t
ggatgtgcgggctgcgtagcggtngctgggtcgggccgacgtgccacccacccggagccgggatgccagaagggccgttggtgaggaaatttcaccatttggtctccccctttgtgggtcagcaggtggtcaagacagggggcagcagtaagaagctacagcccgccagcctgcagtctctgtggctccaggacacccaggtccatggaaagaaattattccttagatttgatctagatgaagaaatggggccccctggcagcagcccaacaccagagcctccacaaaaagaagtgcagaaggaaggggctgcggacccaaagcaggtcggggagcccagcgggcagaagacccttgatggatcctcacggtctgcagagctcgtcccccagggcgaggatgattctgagtatttggagagagacgcccctgcaggagatgctgggaggtggctgcgtgtcagctttggtttgtttggcagcgtttgggtgaacgatttctccagagccaagaaagccaacaagaggggggactggagggacccttccccgaggttggtcctgcactttggtggtggtggcttcctggcattttataattgtcagttgtcttggagctcttccccagtggtcacacccacctgtganatcctgtntgagaagttcnatcgagganaagngttagaagntntagggnaggntgagcntgtctgctatacantgctggacnagagatanttntnagggctagggaacatcattaagaatgaagccttgtacagagctgggatccatccctttctctcggttcagtcctgagtgcctcgcgtcgggaggtcctngtggatcacgtngtggagttcantacancntggctgcagggcaatttccaggnagaccgcanacacacaggtctac

SEQ ID NO: 258425 - DNA, 928 bp, Homo Sapiens
  misc_feature (5)..(5): n is a, c, g, or t
  misc_feature (95)..(95): n is a, c, g, or t
  misc_feature (97)..(97): n is a, c, g, or t
  misc_feature (111)..(111): n is a, c, g, or t
  misc_feature (139)..(139): n is a, c, g, or t
aaganccctagtcatctcttctcggggcatctgtgaggcacagctgtgggcagagggcaaggtcagcaggactatgtattgaagttggccttgantntctggaaggctgcntggcggagccgcctctcctcctcctacnccttccgctcatcttgctcagctttcaactctgcttcaaacttactggccgatgacaaggcttggaccttggcgttcaaagaagttctgggcacctttgacaccctccagggccacatcgatctcagaaagctttgcccagcgccatcagcccactgtcctcctgcagctccccgcccgcggccttgtggaaaatgagcaggaactcccggaagctgagcttgccatcgaagtcctcatccacctccttgatcatgctcttcaggcccaggtgggtctggggggcccccagcttctccatcatcagcttcagctccatcaggtcgatgaagccatcccgcccagcgtcatacagtttgaacatgctctccaggtccttgatgaggcggcggctgaactccgggaactccgtgtaggggttgaagaccctgcagcgccggggccgcgcagcgccctcgttgatgtccagccgccggctcagctgggcgctcagctccgcgtcggcgctggccgtgggcgcacgggcgggaggctcgggctcgggcttgggctccggggctggggcgccgaggggagccagctgggggccactctcctcggcctccttcgcgccgcagccggcgctccagcttgcacgccagctcctcactggccatggcggcggatcgcaggacgcgggaacgcggggacgcgggacgggacgcagggagctggcgggcggcgcgctcctcgcaggctcgaggctctacaacactccgccgaggcggcggggacccggcggtgggagggt

SEQ ID NO: 258426 - DNA, 1680 bp, Homo Sapiens
cgcggactaggtgcgcacttcagttctcggagagaagaggcgggagtggacctggtcagccctaccccactgaccccaccggacccaggcgcggcctccgccacagccacagcccctgcccctgctgcggcgcggcgaggcgaggcgatggccaaggtgtcggtgctgaacgtggcggtcctggagaacccgagccctttccacagccccttccggttcgagatcagcttcgagtgcagtgaagccctggcggacgacctggagtggaagatcatttatgttggctcggctgagagtgaggaatttgatcagatcctagactcggtgctggtgggccctgtgccagcagggagacacatgtttgtctttcaggccgacgcccccaacccatccctcatcccagagactgatgccgtgggtgtgactgtggtcctcatcacctgcacctaccatggacaggagttcatccgagtgggctactacgtcaacaacgagtacctcaaccctgagctgcgtgagaacccgcccatgaagccagatttctcccagctccagcggaacatcttggcctcgaacccccgggtgacccgcttccatatcaactgggacaacaacatggacaggctggaggccatagagacccaggacccctccctgggctgcggcctcccactcaactgcactcctatcaagggcttggggctccctggctgcatccctggcctcctccctgagaactccatggactgcatctaactgcaggaacccagagtgtcccagcacgccgggaggggcaaccaggcctcccagcgagtcctgcagggcccatctagaggactttgggggccatcagctgcaatccaggtctgtcaaactcagcccctaggaaagaacaggccttgggtctcccctagtcctggccagaaggatgatctcgcttttcctctacaggcctataagaagcaggtacttcagttctaaattctgacttgtgttcttttcgtcttcataaattctaactaaggccactgtgccactgtgcacccttgagtaccattgatccaaagctttcccacagacctccctggcccacctagaggctttcttggtcagtgcctgtcaaggctccagtcctgctgagccaaaggctttgtcattcctttctcttcctgtacatctgagcagaccaactccagctttctggtgtcacaggccgggaatgttagttagtaggtagacttagatcccatttctgtcctgctcccaggaagattcttaggtcctcttcaatccagcagcccctcccagaggtgtgatcagcaggatgctgaggaaccatgttgcctttcctgtcaatcacagccaccttcctgttatctcctaaatggatctggcttttcctggaggctgccatggttggaagatggtatcagagggcctgcctgggcagtctgtctccgggccagggtcagggaccctctgcctctggcagccttaacctgtcctctgctaggaccagggtgatttcaagccagggaagcaactgggaccctgaaaactgtccctccccagcccgctccccctctctgtgccctggtccccttgctgccatgtggatgctgttgtgattgctgtttgtatattatcaaaatgtttttatattaaaaatgtttggtctga

SEQ ID NO: 258427 - DNA, 1570 bp, Homo Sapiens
  misc_feature (1497)..(1497): n is a, c, g, or t
gtccccgccccacccccgcggctgagccaccaccggtgcagtggtctccgcttggcggagcgagccttgagcttcgttccacagcttctttgcatcttggatttcggggcggccccctcccccacctctctctgcctttttgtaccccgctttttttctgcgttctgctcggtttttgtagccgtctgtttttgcaccccatttcgttttgtttctagacggtttggtggggggtgaagctgcattcataccccttcctcttgttattctcccctgctctgacagcaccccttttcatcgcagttggggggcctaggatcggtgcatcttccgccgcgctgccagcaccccgcagcgcgtggtcgtgcaccccggaatctgcagcagctgcatatctgaggggggtctcctttgcccgcgccgccttcgctccccgtgcttttgggtgtgtggagggcttcagcgcgcggcgcccccgcttctccgcaaccccccgccccgcgcccggactcgccccgcgccaccaagatggtcatccagaaagagaagaagagctgcgggcaggtggttgaggagtggaaggagttcgtgtggaacccgaggacgcaccagtttatgggccgcaccgggaccagctgggcctttatcctcctcttctacctcgttttttatgggttcctcaccgccatgttcaccctcaccatgtgggtgatgctgcagactgtctccgaccatacccccaagtaccaggaccgactggccacaccgggcttgatgattcgccccaagactgagaaccttgatgtcattgtcaatgtcagtgacacctgaaagctggggaccagcatgttcagaagctcaacaagttcttggagccttacaacgactctatccaagcccaaaagaatgatgtctgccgccctgggcgtatttacgaacagccagataatggagtcctcaactaccccaaacgtgcctgccaattcaaccggacccagctgggcaactgctccggcattggggactccacccactatggttacagcactgggcagccctgtgtcttcatcaagatgaaccgggtcatcaacttctatgcaggagcaaaccagagcatgaatgttacctgtgctgggaagcgagatgaagatgctgagaatctcggcaacttcgtcatgttccccgccaacggaaacatcgacctcatgtacttcccctactatggcaaaaagtttcacgtgaactacacacaggccctggtggctgtgaagctcctgaatgtgacccccaacgtggtaggtgaatgtagaatggcacattaacgccgccaacatcgccacagacgatgagcgagacaagttctgccgatcgcgtggccttcaaactccgcatcaaaaaaacctgaggccccttcctcccaacccatctctctcctgtggatgctcctgggatgagcctgaccctgcctgatccctgcctcacccaccccaaagagancgttggatacagagctatgacttgagtgagcctcacataccttagacttgactagagaaccagcctggaagcc

SEQ ID NO: 258428 - DNA, 1594 bp, Homo Sapiens
  misc_feature (1543)..(1543): n is a, c, g, or t
aggctggaccggtccggaatttcgggatcgggcgaagcggtggcggctcctcggggtgctcggctccctcccacctaggccggccccggcccgactcgccctcagaaactcactgtttggggctgcggactttctcgtcgtgccccacaaaagtaaagcttggggacctggggggagccggaagtatcgcttcgagatccccaaatactatcggggaaacggaagtggccgtcggtggcagagacctgtcggccatggagcctaatgatagtaccagtaccgctgtggaggagcctgacagcttggaggtgttggtgaagaccttggactctcaaactcgtacctttattgtgggggcccagatgaatgtaaaagagtttaaggagcacattgctgcctctgtcagcatcccatctgaaaaacaacggctcatttaccagggacgagttctgcaagatgataagaagcttcaggaatacaatgttgggggaaaggttatccacctggtggaacgggctcctcctcagactcacctcccttctggggcatcttctgggacggggtctgcctcagccactcatgggtgggggatccccccctggtactcgggggcctggggcctctgttcatgaccggaatgccaacagctatgtcatggttggaaccttcaatcttcctagtgacggctctgctgtggatgttcacatcaacatggaacaggccccgattcagagtgagccccgggtacggctggtgatggctcagcacatgatcagggatatacagaccttactatcccggatggagtgtcgaggagggccccaaccgcagcacagtcagccgcccccgcagccaccggctgtgaccccggagccagtagccttgagctctcaaacatcagaaccagttgaaagtgaagcacctccccgggagcccatggaggcagaagaagtggaggagcgtgccccagcccagaacccggagctcactcctggcccagccccagcgggcccaacacctgccccggaaacaaatgcacccaaccatccttcccctgcggagtatgtcgaggtgctccaggagctacagcggctggagagtcgcctccagcccttcttgcagcgctactacgaggttctgggtgctgctgccaccacggactacaataacaatcacgagggccgggagaaggatcagcggttgatcaacttggtaggggagagcctgcgactgctgggcaacacctttgttgcactgtctgacctgcgctgcaatctggcctgcacgcccccacgacacctgcatgtggtccggcctatgtctcactacaccacccccatggtgctccagcagggcagccattcccatacagatcaatgtggggaaccactgtgaccatgacaggaaatgggactcggtcccccccaactcccaatgcagaggcaccttccctgttcctgggcaggccttatccggggctccgtcttctacaatgtggagtcctcagctgaaggggctcccccggcagtgccagcttccccgncagccaccagccacccgaggtcattccggattcctacagagtgggggaccc

SEQ ID NO: 258429 - DNA, 1016 bp, Homo Sapiens
  misc_feature (67)..(79): n is a, c, g, or t
  misc_feature (86)..(202): n is a, c, g, or t
  misc_feature (224)..(359): n is a, c, g, or t
ttgcctgtgcattttgccctggaacctaaacttatgaattgcgcctcagatttttcctttaacatcnnnnnnnnnnnnngacagannnnnnnnnnnnnnnnnnnnnnnnnnnnnnnnnnnnnnnnnnnnnnnnnnnnnnnnnnnnnnnnnnnnnnnnnnnnnnnnnnnnnnnnnnnnnnnnnnnnnnnnnnnnnnnnnnnnnatgtgccatcatacccagctannnnnnnnnnnnnnnnnnnnnnnnnnnnnnnnnnnnnnnnnnnnnnnnnnnnnnnnnnnnnnnnnnnnnnnnnnnnnnnnnnnnnnnnnnnnnnnnnnnnnnnnnnnnnnnnnnnnnnnnnnnnnnnnnnnnnnnncaatgtccagcctctttaacatcttctttcctatgccctctctgtggatccctactgctggtttctgccttctccatgctgagaacaaaatcacctattcactgcttatgcagtcggaagctccagaagaacaaagagcccaattaccagaaccacattaagtctcccttgttttgccttgggatttgagaagagaattagagaggtgaggatctggtatttcctggactaaattccccttggggaagacgaagggatgctgcagttccaaaagagaaggactcttccagagtcatctacctgagtcccaaagctccctgtcctgaaagccacagacaatatggtcccaaatgactgactgcaccttctgtgcctcagccgttcttgacatcaagaatcttctgttccacatccacacagccaatacaattagtcaaaccactgttattaacagatgtagcaacatgagaaacgcttatgttacaggttacatgagagcaatcatgtaagtctatatgacttcagaaatgttaaaatagactaacctctaacaacaaattaaaagtgattgtttcaaggtgatgcaattattgatgacctattttatttttctataatgatcatatattacctttgtaataaaacattataatcaaa

SEQ ID NO: 258430 - DNA, 875 bp, Homo Sapiens
  misc_feature (358)..(358): n is a, c, g, or t
gcaattccctgaaaagaatgcagctcaagtgactgctccactttttcaccttggcctttgcggaaggctgtggctgggctaccctatgcatcgatcaatgaggtcatatttacccagtgcttggcctagaggccaagacagggtcagcagtgcttgctttggctctagtttgggcgttggttttgcagcctcagcatcagcacaggcaggccctcttctccagcagtgctctggctgatatttcttctttttcccacagccaatcccactaatcctgatgaggctgacaaagttggggctgagaacacaatcacctattcacttctcatgcacccggatggctctgggaagagcctgnatgaccagaaccgtatttagtctccattgtcttgccattgggatttgagaagaaaatcagagagggaagatctggtatttcctggcctaaattccccttggggaggacagggagatgctgccagttccaaaagagaaggtttcttccagagtcatctacctgagtcctgaagctccctgtcctgaaagccacagacaatatggtcccaaatgaccgactgcaccttctgtgcttcagctcttcttgacatcaaggctcttccgttccacatccacacagccaatccaattaatcaaaccactgttattaacagataatagcaacttgggaaatgcttatgttacaggttacgtgagaacaatcatgtaaatctatatgatttcagaaatgttaaaatagactaacctctaccagcacattaaaagtgattgtttctgggtgataaaattattgatgatttttattttctttatttttctataaagatcatatattacttttataataaaacattata

SEQ ID NO: 258431 - DNA, 2064 bp, Homo Sapiens
  misc_feature (1982)..(1982): n is a, c, g, or t
  misc_feature (1989)..(1989): n is a, c, g, or t
  misc_feature (2041)..(2041): n is a, c, g, or t
gcagcacccctgtttgtcggccccccgagagaagaggtacggtcgaagccaggagccaggccgagcgggagctgaccaggcttgactcgggtacagaacgaggcaccagtccccttgcgaaccgaaggcctcgcagtggatggaggaggcccagccctgaggtcaacgccaaccaggctagcctggcacggggcctacagggtgggtaggcgggcgtgccgcagccgtccagggccttccctcaggtcccgggcgaggggcctacgctgcggcccggcaacaaggcccgactcggcccctcgggaccagagccccacccgatcggaagcggatcctttaccagggccataggcagtgactaggccgggcctgggcctcccatcggggccggactaggacgaggccccggggaggcccctggcctaccagacccttttctcaggccgacagccgccaggaagatgcaacgtgccctgccaggcgcccgccagcacttgggggccattctggccagcgccagcttggtggtgaaggctctgtgtgcggcggtactattcctctacctgctctccttcgccgtggacacaggctgcctggcggtcaccccgggctacctctttcctcccaacttctggatctggaccctggccacccatgggctgatggagcagcatgtgtgggacgtggccatcagcctgacaacggtggtggtggccgggcgtttgctggagcccctctggggggccttggagctgctcatcttcttctcagtggtgaatgtgtctgtagggctgctgggggccttcgcctacctcctcacctacatggcttcttcaacctggtctacctgttcactgtccgtatccacggcgccttgggcttcctaggtggcgtccgggtggcactcaagcaaaccatgggggactgtgtggtcctgcgagtgccccaggtgcgcgtcagtgtgatgcccatgctgctgctggcgctgctgctcctgctgcggctcgccacgctgctccagagcccggcgctggcttcctatggcttcgggctgctctccagttgggtatatcttcgcttctaccagcgccatagccggggccgaggggacatggctgaccactttgctttcgccactttcttccctgagatcctgcagcctgtggtgggtttgctggcgaacttggtgcacagcctcctggtgaaggtaaagatatgccagaagacggtgaagcgctacgatgtgggtgccccatcctccatcaccatcagcctgccaggcacagaccctcaagacgccgagcggagaaggcaactggccctgaaggcactcaatgagcggctgaagagagtggaagaccagtccatctggcccagcatggatgatgatgaagaggagtctggggccaaggtggacagccccctgccctcagacaaagctcccacacccccaggaaacgggggctgccccagaatccagtctaatacaccttcgaggcaagctcccccgacgctgtaactccagaccaacttgagtgtggccacctcccctcccaagccccccttgacatcctctcagctactccagggcacctgactgctctgaggagagggaagaaggcctgctggggctttccatggccttctgctgtttctcgccaacactacccaggactcttgctacctggttccaactccagacaaccactatgccaggcccggagcctctgaggcatcggccagtccaggccctcatctgaggtaagaatgtacatcagctggcagccccaagcaagtggctgcagggacactgatgccacagctcctgggccggccctcacatctgaaactggttgccgagagccctgagccaaggcaaggatttgccaaaaatgttctgggggcccagcaaatgcaggagccgacctggggctgcacatccctgcccatccccagaaagactgttcctgtcaggatttgtntccctcngctgtggcggtgactgcttctggaccagaaccgctccagctcccaggtattntctacaggaccacttgagtgggc

SEQ ID NO: 258432 - DNA, 416 bp, Homo Sapiens
tgacagccgggccagccgccagcgtacaagggttgtgcgacgcagcctcagccctgtgttcaatcacaccatggtgtacgatggctttgggcctgctgacctgcgccaggcttgtgccgagctctccctctgggaccatggggccctggccaaccgccagctgggaggcacacgcctcagcctgggcaccggcagcagctatgggctgcaggtgccctggatggattccacacctgaggagaagcagctgtggcaagccctcctggagcagccgtgcgagtgggtggatggccttctacccctcagaaccaacctggcccccaggacgtagccccaccaagcctctctctctggacccccatctcagggcctgcccttggctaaagtcaataaagtctattctaagagcaaaaaaa

SEQ ID NO: 258433 - DNA, 1416 bp, Homo Sapiens
  misc_feature (1391)..(1391): n is a, c, g, or t
  misc_feature (1400)..(1400): n is a, c, g, or t
gcggccgctccaccgcgaacttctccgcgcactgcgcgcacagcgcctgggcctgggtgtccgcccgcgacgccagcgtccgcgcctgctgctcgggctccaggtacgacacgcagatgaagtcctgtacggaggagcgggaggcccgggccttgttgagagtacgccggcgctcccagcggtggatggagtcctgcacctccacactcagctgccgggtcaccgtgatcttgtcgtagctcttgatgtgctccagggccccgtaggtggtggtcagatagtaggaaccctcccccagctgcagggcggggtccatgagctccatcatgtactccacattgagaagcatctccgtgaggttgctgcgggccagcacatacatgagcacaggcaggaagtcatccgccccatagggcttccctgggttgccgagggccatggagtcgtagatgagtttgcaggtcttgagcaggatggagatcttcttctcaggtgagtaggccttgggcatgctggtgaacttctgcaggatcttctccatcatggggcacctccggcacgctggtggtcacacctaggtcagtggtggtggtggccaggatcactaactggttctccttgagctgctgcagcgaaccatccttgctggtggatctgatgcaggcatgagttgatggcttccttcaggggcttcaggacacatttgtacaaggcagactctacaattgcttcgagctcctcctcagagtgcagggcggggtccaccagggccttgagctcggtgctctgcagcaggtagctcttgagctgggtcatcatggtgcgaatctcctgcagcatctccgtgctggaggtctggcgcgccatcatctccaggctgtacaccttgtagtcctgcaccaggctgccaaagtacgagcccttgtcctgcgccagctccaccaccttcttgtacagcttgcggttgttggagaggaaagcgtggaacatgctgctgaaactggcaaagctcagccggtgccgagccttgcccaggatcatggagggcttcttcttcacgctggggctgctgaactgctccagctcctcctccgtgctgctggtggagtaggagtcctggtcggtggccatgacagacacccccaagctgtctgagagggaggccagggagcccttgaactctggagagctctgggaatgggcagtggcctgggcaggagggtgctgagtcccagcctgagaagcagggctttggccctctctgggtggacccggcgtgggtgtctccaaggccatcgcctgtgtgcagagctcagcgttctctaagggagctgggagggtcgaggccagttgtcgagagatccgttttttctggggggcgggactggggngttgttgtngctgtccctggggcag

SEQ ID NO: 258434 - DNA, 1960 bp, Homo Sapiens
  misc_feature (1572)..(1572): n is a, c, g, or t
  misc_feature (1582)..(1582): n is a, c, g, or t
  misc_feature (1584)..(1584): n is a, c, g, or t
  misc_feature (1586)..(1588): n is a, c, g, or t
  misc_feature (1867)..(1867): n is a, c, g, or t
aggaagcagttcgctcgcgcctaggttggcgcgggctgggaggtgttccagccctttaagatgttgcgcgtggtgagctggaacatcaatgggattcggagacccctgcaaggggtggcaaatcaggaacccagcaactgtgccgccgtggccgtggggcgcattttggacgagctggatgcggatatcgtctgtctccaggaaaccaaagtgaccagggatgcactgacagagcccctggctatcgttgagggttataactcctatttcagcttcagccgcaaccgtagcggctattctggtgtagccaccttctgtaaggacaatgctaccccagtggctgctgaagaaggcctgagtggcctgtttgccacccagaatggggatgttggttgctatggaaacatggatgagtttacccaagaggaactccgggctctggatagtgagggcagggccctcctcacgcagcataagatccgcacatgggaaggtaaggagaagaccttgaccctaatcaacgtgtactgcccccatgcggaccctgggaggcctgagcggctagtctttaagatgcgcttctatcgtttgctgcaaatccgagcagaagccctcctggcggcaggcagccatgtgatcattctgggtgacctgaatacagcccaccgccccattgaccactgggatgcagtcaacctggaatgctttgaagaggacccagggcgcaagtggatggacagcttgctcagtaacttggggtgccagtctgcctctcatgtagggcccttcatcgatagctaccgctgcttccaaccaaagcaggagggggccttcacctgctggtcagcagtcactggcgcccgccatctcaactatggctcccggcttgactatgtgctgggggacaggaccctggtcatagacacctttcaggcctctttcctgctgcctgaggtgatgggctctgaccactgccctgtgggtgcagtcttgagtgtgtcctctgtgcctgcaaaacagtgcccacctctgtgcacccgcttcctccctgagtttgcaggcacccagctcaagatccttcgcttcctagttcctctcgaacaaagtcctgtgttggagcagtcgacgctgcagcacaacaatcaaacccgggtacagacatgccaaaacaaagcccaagtgcgctcaaccaggcctcagcccagtcaggttggctctagcagaggccagaaaaacctgaagagctactttcagccctcccctagctgtccccaagcctctcctgacatagagctgcctagcctaccactgatgagcgccctcatgaccccgaagactccagaagagaaagcagtggccaaagtggtgaaggggcaggcccaagacttcagaagccaaagatgagaaggagttaccggacctcatttctggaagtctgtgctggcgggggcccttgcgcacacccctttgtgggggccacaggaagccatgtgtgatgccgacttgtgaagaaaccacagacccaacttgggccgccgcttctacatgtgtgccaggccccggggtcctccnactgaccccncnannnggtgcaacttcttcctctggagcaggcccagctgaacccaatggaggcctggggaaatctggcatggtcacccctgcacatgatctgaggccagctcccctaccctgagctgcctcctgcttctccctcaaagccccctacccctctctccctcttttaagccctctcttcctcgctttccgttcctacctagctccttgttggtgagcttcttgtgccttaatcctgtgacccagccccttacaccactttccaccttcctgtccgaagtacacgganactagctgcctccaggaagttgtgtgattttaaatcacttctgtctttgctggaaagtgtatttgtgcataaataaagtctgtgtatttgttt

SEQ ID NO: 258435 - DNA, 1444 bp, Homo Sapiens
  misc_feature (6)..(6): n is a, c, g, or t
  misc_feature (32)..(32): n is a, c, g, or t
  misc_feature (46)..(46): n is a, c, g, or t
  misc_feature (53)..(53): n is a, c, g, or t
  misc_feature (135)..(135): n is a, c, g, or t
  misc_feature (147)..(147): n is a, c, g, or t
  misc_feature (155)..(155): n is a, c, g, or t
  misc_feature (206)..(206): n is a, c, g, or t
  misc_feature (1024)..(1024): n is a, c, g, or t
acttcnaacatccaattctttcttaatttgcntttcgacgaccccngtcatangttcatatataacaatttttgcattgatctttgcatcctattgaagatttcctcatcaggtcattctggtggaatggaagtncaaccgtgaggncgccagtnggccggcattgttaagcaagggcagcagaaggctgggagggacggccccanccccccaccctctcctccagcccccgcccaccacaaattcacagtgagaggcacctcactgccttgacattcagaaaagagtgaaataaagaaaccctcgcagcgcaggaaataactggattccaccttcaaggttattgaggttcctccctctctctccacgcccccagtcaaaccctgaaatcctaaggctgggggcaagcccttccccaacctgccaaaggaaaggagccagggctgctgccttctggccgcttttctgcctccagtcccaaaaggaatttctctggacagatgtgactgcagcggcccaaggccccccttctcctcctcctcccatcccactgggcgggcttgggaaggtacaatcaaccatgaacataaatatgaataaaaaatgaacttgaaaattacaagctattaattaaacaaatctataaaaatagttaggacataactctgttcaaataaatacaaaataaataggttccaagcagtgacacaagtggaatgtggggctggtcccgctgcgcccctgctggggttggacaggaacccccagggcgtcagaacagactctgagcagtcagccaagctcctgctccctcgtcttcctctggaagcacagaagtcgctcatttgtccggcttgtccttctggacaaaacccttttcccaacagtccataattaaggcctccaacaccttttccttccctccccagaagcacacaaacgctctgccctgtcgccctcaaacatgggtgctccactgccctcatgccacagtgggggacagtgagtttgggttctgagggtnggggcccatcctgaacagggtccaggccagctcagagcaccatgagccccatcacttgccttctgtgcagccaggccaggcagcccgagccccctgcactcccaagcatgcccgagagccccagccatcagcagggctcagatgccagtgaccacaaggccagatcctttcctcttccttcacaacaaagttggcgtcaatgctgtaggttgggaagtgcaggcctgggaggccacgtgacctcacctttcatcatggattatgggattggacgagggggtgggatgtggctgtagccctcctcccaccttacctcagcagacaggcaggcagcaagagggcacagggagatgcacggcagaccagagggcagggccgtggccaacagctggctgcaagggtgaaatggaagaactaagc

SEQ ID NO: 258436 - DNA, 820 bp, Homo Sapiens
  misc_feature (650)..(658): n is a, c, g, or t
aaaaatgttgagaatatatcaggtattcggagtcgacaggttaagaaaaggtagtcaagtgtgaggaaatcttcaattaaaaagatgagtaaaacaataatttttttaatttcagataaaggatataagaatgatgttaccaaaggcatataaaacaatgactgcaagtggagttctaaggaaaagataggcattttaacaaaagtttttgttaaaaaatgcgcaacttcagatttgtaaaacactcggagtgaagtttaggatgtttcacagactacagaagttcaacaaaatgaagccctattacttgtttgtaaaaattaacaaccttgcgctgaaaaactgaactgagacataacagtttgaaagtgttaactatttattccctgttaaaatttaacctactagaacaataatgtaagtacccagaataatttcctggggcacagtgggtcagaagatggggacaggtgaatggaggagtttaggggagagaaaaagtggatggaagtgtctggaaagggcacaagagagtcttccaggtactgatcctgtttcttgctctgagtgctagctaaccaactgtgttcacactgtaaacattcatcaaactgtacatttggtgcacttttctgtgtcataccacaatnnnnnnnnncctatcatcttacaaaaacaagacacccaagtccaggcccaaggagtaagtacaaatattcctgtttctgaaccattactgtaattggctcttaaggcttgaagtaaccttataggttactcataaggcatatacaaataaacttgtttgttttcttttttc

SEQ ID NO: 258437 - DNA, 459 bp, Homo Sapiens
  misc_feature (20)..(20): n is a, c, g, or t
  misc_feature (30)..(30): n is a, c, g, or t
  misc_feature (60)..(60): n is a, c, g, or t
  misc_feature (70)..(70): n is a, c, g, or t
  misc_feature (77)..(77): n is a, c, g, or t
  misc_feature (99)..(99): n is a, c, g, or t
  misc_feature (129)..(129): n is a, c, g, or t
acagcctaaacttcctaacnccctccagangtccggaatttccagggggcccatcctttncagggcctangtcctanccttccacctaactgaattaantcctggtccttaaggaatttaaataaatgnactgtaacattgtaaagagcaagcaaaacctccataagttgccccaaagttcctgaatgcccaggcaacaatcaccttgcatccatatggttcaggcccttctgcttccccatctcaccctggacccagggatagcaacactgcccaagtgggaacagcatacttatgatgcacttcacccaccagatttgaaactgtgggcggtttcaataatattttttaatttgagggggaggcacaaagtagagacatcatttttaaatcatgttttatatccaagtatctcacatctgcttgattcattatcttaacttaaaaataaaagaccta

SEQ ID NO: 258438 - DNA, 433 bp, Homo Sapiens
  misc_feature (34)..(34): n is a, c, g, or t
aaacccgccccccaagtttcaaaacctggtgggntgaaagtgccatccataagtatggctgttcccccactgggcagtgttgcctatccccgggccccaggtgagatggggaagcagaagggccctgaacccatatgatgccaaggtgattgttgccccggcatcagaacttgggcaactatgaggtttgctgctcttacaatgtacagtcattattaaatcctaagacagaataatcagtagtgaagctagactagcctgaaagatggcccctgaatcagactctgaggagtagaagttagctgtaataaaacactgcgaagaagccctgttaaccaccatgctacactctgctgttaatttatgctaggctttctgagaattatctaagttaatgctgagaaaataaaacagaattaaaaataacaacaaa

SEQ ID NO: 258439 - DNA, 1316 bp, Homo Sapiens
gaaaaaaattcaggccagcacctccccatcttcccagcatgggtgtatgagagacctgccctgatcggggatttcctgattggtgctggcatcagcacagacaccgctttgccgataggcacgttgcccctggcctcgcaggagtcggccgtggtggaggacctgctgtacgtgctggtgggcgtggacgggaggtacgtcagtgctcagcccctggctgggaggcagagccggaccttcctcgtggaccccaacctggacctgtccatcagggagctggtgcacaggatcctcccagtggccgccagctactccgctgtgaccaggttcattgaagagaagtcttccttcgagtacgggcaggtgaaccacgccctggcggccgccatgcgcaccctggtgaaggagcacctgattctggtgtcacagctggagcagctgcacaggcagggcctcctttcgctgcagaagctctggttctacatccagccagccatgcgcaccatggacatcctggcctccctcgccacctcggtggacaaaggcgaatgtcttggggggtccacgctgagcctgctccacgacaggagcttcagctacacaggggacagccaggcgcaggagctatgcctgtacctaaccaaggcggccagtgctccctacttcgaggttctggagaagtggatctacaggggcatcatccacgacccatacagtgagtttatggtcgaggagcacgagctgcggaaggagaggatccaggaggattacaacgacaagtactgggaccagcggtacaccatcgtccagcagcagatcccgtccttcctgcagaaaatggcggacaagatcctcagcacaggaaaatatctaaatgtggtcagagagtgtggccatgacgtcacctgcccggtggctaaagagatcatctacacgttaaaagagcgggcgtatgtggagcagatcgagaaggcgtttaactacgccagcaaggtgctgctggacttcctgatggaggagaaggagctggtggctcacctcaggtccatcaagcgctacttcctcatggaccagggcgacttcttcgtgcacttcatggacctcgcggaggaggagctccggaagccggtggaggacatcacgccccctcgcctggaagcgctcctggagctggcgctgcgcatgagcacggccaacactgaccccttcaaggacgacctcaagatcgacctgatgccccatgacctcatcactcagctcttgcgcgtcctggccatcgagaccaagcaggagaaggcgatggcgcacgccgaccc

SEQ ID NO: 258440 - DNA, 1133 bp, Homo Sapiens
agtctggcttccgcggtcggacttctacacccgcctccagacaggagaggggcacgtaccggcgctacggcttcctgcaggctgcctccggatagtccccgagagcttgttccgaagcaagcaccctgcagccctagcgatccagccctcccctggaccctaggtcacggcaatcaaccccctgctgtggttcccgaaccccaaggcccgatgggtcccgcgggggtcgcggcgaggccagggcgctttttcggcgtctacctgctctactgcctgaacccccggtaccggggccgcgtctacgtggggttcactgtcaacactgctcgtcgggtccagcagcacaatgggggccgcaaaaaaggcggggcctggcggaccagcgggcgagggccctgggagatggtgctcgtcgtgcacggcttcccgtcctccgtggccgcccttcggtttgagtgggcttggcagcacccgcacgcctcgcgccgcctggcgcacgtggggcctcgcctgcgaggagagacagccttcgctttccacctgcgcgtgctggcgcacatgctgcgcgcaccgccctgggctcgcctcccgctcacgctgcgctgggtgcgcccagacctccgccaggacctctgcctcccgccgccgccgcacgtgcctctggccttcgggcctccaccgccccaggccccggccccaaggcgccgcgcaggtccctttgatgacgcggagcctgagccagaccagggggatccaggggcctgctgctccctgtgcgcccagaccatccaggatgaagaggggcccttgtgttgcccccaccctggctgcctgctaagggcccatgtgatctgcctggcagaggagtttcttcaggaagaaccagggcagcttctgcccctagagggccaatgcccttgctgtgagaagtcactgctttggggagacctgatctggctgtgccagatggacactgagaaagaagtagaagactcagaattagaagaggcacactggacagacctgctggagacctgatcctcagtgtccttaccccctcctacctcttttctgtgccacctgctgtgggtccagcaggtttttacttgagtacaataaaaagtctgagtcaa

SEQ ID NO: 258441 - DNA, 1709 bp, Homo Sapiens
  misc_feature (470)..(470): n is a, c, g, or t
  misc_feature (1093)..(1103): n is a, c, g, or t
ttcccgggatgccgcgactcgggctgagggagctcgggccaatcagagggacggccccagaatggcatggtagatggaacgcagctgagaggcaggttccagtctgcgggggagatggagaaggtgccaccatgctgctgcacaaatcccaggatagctggggaatgagaatccagcactttgggcctaggacctggaaggagaggtcttttgggagaggtgcccaattacctgccctcggtgagctcagccatcggcgggggaggtgccccagcgctacgtgtggcgtttctgcatcggcctgcactcggcgcctcgcttcttggtggccttcgcctacgggaaccacaacctcaactgcacctccccgtgttcctgctattcgcccgctctgccgcctcaacttcggcctcaatgtcggtgggagaacctcggccgttgcctagtgctcacttatgtctcctcctccngaggacttcaccatcaacgaaaatgctttcattgtgttcattgcctcatccctcgggcacatgctcctcacctgcattctctggcggttgaccaagaagcacacagtaagtcaggaggatcgcaagtcctacagctggaaacagcggctcttcatcatcaacttcatctccttcttctcggcgctggctgtctactttcggcacaacatgtattgtgaggctggagtgtacaccatctttgccatcctggagtacactgttgtcttaaccaacatggcgttccacatgacggcctggtgggacttcgggaacaaggagctgctcataacctctcagcctgaggaaaagcgattctgaacccttcagtcctgcttgggaggacgcagcccactgcccagaaacaagaaacacgataccattctggccttccccaccccacatcctctcttggccttactgaagatgggggaagggtaagaaggaagggtgtaggccaaggctcaccccagtgctgctggcttctcctctccacccctcatatgggcgtggggtcctcaaacatcacctttacctgagaggccccaagaagctgagctggcagagagctccaccatttggtgctnnnnnnnnnnncgtcctgaggttcatgaccaccatccagtatctggccttaacacagtcacctttaactgaggtcaggagcccctgagctagaggcggcgcccagacaaccacagccatttctctgcacgggggtcattccatagagactaatgtatttcatgatctactgtgccaaatcccagccatgtggccacagtcccctgctaaagtagctcaggtgttctagtcctgacttcacctttttgatttggtgtgtgccctagggtatgtacccttccccatctgagcctcggtgtgtccatgtgtctggcgggggatgggtggactgtatgatttccaaggactctaccagtcagtggttctgatgtcatcgggtggaggtggtgttctatacctaaaggatgacctgctccagaaacagcaccagcacagcatgtattttcttctcttctgaaagttctggcttgtagacccctcccctcctttgcaaaggtatgggatagaggggtcagatgcagatctctactgtaaaatgggctccctggtatctcctgtcttccctactgctccaaaccctaaattttggttgtacattttatttgaaaggaaaataaa

SEQ ID NO: 258442 - DNA, 1040 bp, Homo Sapiens
  misc_feature (915)..(915): n is a, c, g, or t
  misc_feature (948)..(948): n is a, c, g, or t
  misc_feature (964)..(964): n is a, c, g, or t
  misc_feature (976)..(976): n is a, c, g, or t
  misc_feature (987)..(988): n is a, c, g, or t
  misc_feature (1012)..(1012): n is a, c, g, or t
  misc_feature (1014)..(1014): n is a, c, g, or t
  misc_feature (1017)..(1017): n is a, c, g, or t
  misc_feature (1022)..(1023): n is a, c, g, or t
  misc_feature (1036)..(1036): n is a, c, g, or t
gaaaaacatttaggcataggtcaggccttatgcagcatcagagaacacacaccagagtttaactctgtgggtaagagttgtacaattgtgaaatgcaaggagttcactgtaggggtgagactccacagaaaagaaaagtttcctgagagcagaacttctgtccttccctcccagttcggtactataagaagacatgcacacaaagatgtttgttatgattattgaagtgttaaatggaagaaaaatgttacccaagtcttctccaaaaagaatggtagatatttccttgaaatgcctaacccatttctggatgagactcatcaatatccccttcactccactctctgccaactcagatataatttccattgggcaccttcacagtaatgccaggattggggcagagatcctgaaagagcttcttataagatggcaaatgtgcctggcaagagcatttgtattttgtcaggtggaggcatgtgctgagagttattcaactatctgaaatgttgaatttggaggttgtgaaaatattgaattatgctattagtttaataatatctgaggcagtaaaatagtacctgaggaatggtgcctcattctgcccccttgccagttgtctcctcaatcctgagcttcctgctgaggttaattcaagtctactagtttattgagcacctgctatgtgctaggcattgaggtagacctggtcattgccctcccagagttaagggctaataggatatgcatatatactaaacagtaattacagtaaagtgtggtaagtgctttggtaggaaaaatgcgggtttccatcaaagtacatggcagggatacctaaatctggtctatgagtcactaaagacttcctggatatgatggtatctcagacataaaggtgggtagaaggtagcnagggcaggggagaagagacaggatctggagaantccatgaagactctcnctactgcagaantgtcatagacnnattttaaaaaatgatctgaagggnantcnacaannttattgcctcaanataa

SEQ ID NO: 258443 - DNA, 1314 bp, Homo Sapiens
  misc_feature (97)..(166): n is a, c, g, or t
gacggcggtcgcgtcggcgtcagggtcggggtcggtaaggggtgcggcaatgctgcaactgcgggactcggtggactcggccggtacgagccccacnnnnnnnnnnnnnnnnnnnnnnnnnnnnnnnnnnnnnnnnnnnnnnnnnnnnnnnnnnnnnnnnnnnnnnacgccgctgcgccaaacactctggcctctcagcatccacgaccccacgcgccgcgcccgcgtcaaggagtacttcgtgttccggcccggcagcatcgagcaggcagtggaggagatccgcgtggtggtgcggcccgtggaggacggcgagatccagggagtgtggctgcttaccgaggtggatcactggaacaatgagaaggagcggctggtgctggtcacggagcagtccctgcttatctgtaaatacgacttcatcagtctccagtgccagcaggtggtgcggatagcgctcaacgcagtagacaccatttcctacggagaattccagtttccccctaaatcgctcaacaagcgagaaggttttgggattcgaattcagtgggacaagcaaagtcgtccttccttcataaacagatggaatccctggtctaccaacgtgccctatgccactttcacagaacacccgatggctggcgcagatgagaagacagcatctctgtgtcagttggaaagcgtcaaggctctgttaatccaagctgtcaaaaaagcccaaaaagaaagccctttgccaggacaggcgaatggcgtgctgatcctggagcgccccctgctcatcgagaccaacgtgggactcatgtccttcattaacaacgaggcgaaactgggctactccatgaccagggggcaaaataggcttttagccgctgcgttctgggagctcctccccctccccagaaggccaagggatgtgggggctgggggactgggaggcctggcagtcttcatgctgccctgctgctgctggaaggatggggatctttcacctttagggatctcagcacaattagaatcgtaaagtgaattctatctatttaattggatattggactctgctcatataagctacagacaaaagccaaaagactctcgctgtccctgtgctgctggtatttcattctctgtaacttcagttctggtgttttccttgagtatctacttggcttctcgtggtttttcccaccccagctgccccagcacgcgggacccatagcacaccccttagcgcttgcctaggttgctgaaaacagggaggcacctggtatctcgagtgcctgcagttgcaagtgtgtttacacctggtgtcca

SEQ ID NO: 258444 - DNA, 1066 bp, Homo Sapiens
  misc_feature (38)..(38): n is a, c, g, or t
  misc_feature (43)..(43): n is a, c, g, or t
  misc_feature (64)..(64): n is a, c, g, or t
  misc_feature (68)..(68): n is a, c, g, or t
  misc_feature (72)..(72): n is a, c, g, or t
  misc_feature (100)..(100): n is a, c, g, or t
  misc_feature (107)..(108): n is a, c, g, or t
  misc_feature (114)..(114): n is a, c, g, or t
  misc_feature (128)..(128): n is a, c, g, or t
  misc_feature (142)..(142): n is a, c, g, or t
  misc_feature (149)..(149): n is a, c, g, or t
  misc_feature (164)..(164): n is a, c, g, or t
  misc_feature (189)..(189): n is a, c, g, or t
  misc_feature (239)..(239): n is a, c, g, or t
  misc_feature (248)..(248): n is a, c, g, or t
  misc_feature (267)..(267): n is a, c, g, or t
  misc_feature (282)..(282): n is a, c, g, or t
  misc_feature (326)..(326): n is a, c, g, or t
caatatccccggtcccagaggtctgagaaactggtatnaaacncctgatccctgtgggctaggnaccnttcnctgccccttggatgatgctgctagtcancctgcannatcctngctgaatggagagnccccatgtctgcanactactngtattctgtagggcnacactaaataaagccaaaccttggnactgtttttctccctgtgctcagagcacctgtgggaaaggttgctgtctntctcagtanaatccaaaatttgtcgtanacttgtgcaatatanactgttgtgggttggagaaaagtggaaagctacactgggaaganactcccttccttcaatttctcagtgacattgatgagggtcctcaaaagacctcgagtttcccaaaccgaatcaccttaagaaggacagggctagggcatttggccaggatggccaccctcctgctgttgccccttagtgaggaatcttcaccccacttcctctacccccaggttctcctccccacagccagtcccctttcctggatttctaaactgctcaattttgactcaaaggtgctatttaccaaacactctccctacccattcctgccagctctgcctccttttcaactctccacattttgtattgccttcccagacctgcttccagtctttattgctttaaagttcactttgggcccacagacccaagagctaattttctggtttgtgggttgaaacaaagctgtgaatcactgcaggctgtgttcttgcatcttgtctgcaaacaggtccctgcctttttagaagcagcctcatggtctcatgcttaatcttgtctctcttctcttctttatgatgttcactttaaaaacaacaaaacccctgagctggactgttgagcaggcctgtctctcctattaagtaaaaataaatagtagtagtatgtttgtaagctattctgacagaaaagacaaaggttactaattgtatgatagtgtttttatatggaagaatgtacagcttatggacaaatgtacacctttttgttactttaataaaaatgtagtaggataaaa

SEQ ID NO: 258445 - DNA, 784 bp, Homo Sapiens
  misc_feature (14)..(14): n is a, c, g, or t
  misc_feature (479)..(514): n is a, c, g, or t
  misc_feature (570)..(588): n is a, c, g, or t
  misc_feature (731)..(740): n is a, c, g, or t
taatctccccaaantttgtaatggccctccccccgaacccgcctcccggtccttaatgcctttaaaagttccaccttggggccccccacagacccccaagagcctaaatttccgggtttgtggggttgaaaacaaagcctgtgaatccacctgcaggctgtgttccttgcaaccttgtcctgcaaacaggtcccctgccctttttagaagcagccctcatggtcctcatgccttaatcttgtctctcttctcttctttatgatgttcactttaaaaacaacaaaacccctgagctggactgttgagcaggcctgtctctcctattaagtaaaaataaatagtagtagtatgtttgtaagctattctgacagaaaagacaaaggttactaattgtatgatagtgtttttatatggaagaatgtacagcttatggacaaatgtacacctttttgttactttaataaaaatgtagtaggatnnnnnnnnnnnnnnnnnnnnnnnnnnnnnnnnnnnngaggggggaagaacaaaaaacaacaaaagaaccaccacgcgaacacacaccacacnnnnnnnnnnnnnnnnnnncaaacttggccgcccgcccgcccccccaaaaatttttaaaaactttgttttggccggggggcccaaaagggaaaggaaaagggccaataattgtttccccgagaaaacccggggcaaggaataggggtttggatctccccccnnnnnnnnnnccccccgggcggaaccccccagcgttttttaaacaaaaccccaa

SEQ ID NO: 258446 - DNA, 1602 bp, Homo Sapiens
cgggatcgcccgggaagctgcgcgagggtcgacagcctccgccacatcctccacctctcttggtccagcgagcgttgccgggccagggtcaagcggagggctccgacggcgcggacggagcgaacccgagccatggcgcaccaaacgggcatccacgccacggaagagctgaaggaattctttgccaaggcacgggctggctctgtgcggctcatcaaggttgtgattgaggacgagcagctcgtgctgggtgcctcgcaggagccagtaggccgctgggatcaggactatgacagggccgtgctgccactgctggacgcccagcagccctgctacctgctctaccgcctcgactcacagaatgctcagggcttcgaatggctcttcctcgcctggtcgcctgataactcccccgtgcggctgaagatgctgtacgcggccacgcgggccacagtgaaaaaggagtttggaggtggccacatcaaggatgagctcttcgggactgtgaaggatgacctctcttttgctgggtaccagaaacacctgtcgtcctgtgcggcacctgccccgctgacctcggctgagagagagctccagcagatccgcattaacgaggtgaagacagagatcagtgtggaaagcaagcaccagaccctgcagggcctcgccttccccctgcagcctgaggcccagcgggcactccagcagctcaagcagaaaatggtcaactacatccagatgaagctggacctagagcgggaaaccattgagctggtgcacacagagcccacggatgtggcccagctgccctccccggtgccccgagatgctgcccgctaccacttcttcctctacaagcacacccatgagggcgacccccttgagtctgtagtgttcatctactccatgccggggtacaagtgcagcatcaaggagcgaatgctctactccagctgcaagagccgcctcctcgactccgtggagcaggacttccatctggagatcgccaagaaaattgagattggcgatggggcagagctgacggcagagttcctctacgacgaggtgcaccccaagcaacacgccttcaagcaggccttcgccaagcccaagggcccagggggcaagcggggccataagcgcctcatccgcggcccgggtgaaaatggggatgacagctaggaggctggagcagggccggccacgtgtggactgtggggctgcccaccttccgctccctgccaccatcctccttcctgggctccaggaaagtgtttctgggaggtcaggagggctggcagctgaacgcacttgcagcgtccgagggccaccgggctggcattttgtgacccttccctgttgctgtccctgcatctcgtctgtgtgcccagggtgtccggggaccctgcctggctggcttaagggggctgggtcaggggcctggcatgaacctggcctcccggggagctgagactagggtcccagcacagcccagaaacctttggccacaagaagtggggtcagtcagggctggggcaggggtcactgcagtttgggatggttgaatgctgtattttctaaagaataaaatatttttaaacc

SEQ ID NO: 258447 - DNA, 1325 bp, Homo Sapiens
  misc_feature (118)..(118): n is a, c, g, or t
  misc_feature (120)..(121): n is a, c, g, or t
  misc_feature (141)..(141): n is a, c, g, or t
  misc_feature (223)..(223): n is a, c, g, or t
  misc_feature (239)..(240): n is a, c, g, or t
  misc_feature (556)..(604): n is a, c, g, or t
gagggaactccacccccaccaggccaaccatggagctagaaacagagacagcaggaagggcaaagctggccactagcctgctccaccccttcacagcccagagcagaacagggtctantnnactctcaaggtgagtcacanagagccggtactgtttctgcccctggcataccctgagaacccatgtgacttctgtagtgctcagcccctgtgcccttcctgnagcctagatccacatnntagtcaacacacacactccctctcacagtctccaaacagcactgcagagcctagctgcatctgccaggttcaaagaggaatttttcacatttgctcacttccaatctccatcttccttcctctgtctcccactctcccactctcagtagccgcatcccagccctgccatactcccttctcagggacaggagactcagtgggcagctggcctcagctctcctaacaggaaaaaaacctgtacagcattagtgccagggctcctgccctcccaagcgctgagcccagaaatttggacaaatgagctgcctcttaactnnnnnnnnnnnnnnnnnnnnnnnnnnnnnnnnnnnnnnnnnnnnnnnnngcataaataaacagcagctgggccagcaaggaggaaggcagggtgaccctcagtggctccctgtgcccatctcagcctcttgccataaaactcagccatcagtggccaggatgacagcagttccgaagatgcccacactctctccaaggagcttcatctggttccagaactcaacacgccgcgtgttgtgccagtaagcaacattgccatcaatgagcagcatgacagggggcagcagtacagccaggatctgggcagcgagggtcacgtagtagcctgacagaaaggccagggccaggatgccatacagcacgaagaacagctggatcatcagctcccctcctgggagatggttcagatacgccagccggtcctccttgctgtgctgcagtgagtaggccacacagatgaggtagatacccaggaacacctggccggtggactgcagggagcggctgcgaggtttccggcggtacagctccccagcaccgctggccaacacaagaaagccgccgatgatggcaactgtgcgcgagtacatacggaccttcagccagtccccgtagtggacgtagcccccgatgtaggcggcgtaggtgctaatggccaattggagtgcggcccccagcgcgaaccagcgccgcttcacgccaaaggaccctcgtgccgaattcgccacccaggcctcgctaccttaaaaccccgtagagttactgccgtc

SEQ ID NO: 258448 - DNA, 1519 bp, Homo Sapiens
gcgaagataggttcgagacggtggatgttgcagctgatcatgcagttgggttcggtgctgctcacacgctgccccttttggggctgcttcagccagctcatgctgtacgctgagagggctgaggcacgccggaagcccgacatcccagtgccttacctgtatttcgacatgggggcagccgtgctgtgcgctagtttcatgtcctttggcgtgaagcggcgctggttcgcgctgggggccgcactccaattggccattagcacctacgccgcctacatcgggggctacgtccactacggggactggctgaaggtccgtatgtactcgcgcacagttgccatcatcggcggctttcttgtgttggccagcggtgctggggagctgtaccgccggaaacctcgcagccgctccctgcagtccaccggccaggtgttcctgggtatctacctcatctgtgtggcctactcactgcagcacagcaaggaggaccggctggcgtatctgaaccatctcccaggaggggagctgatgatccagctgttcttcgtgctgtatggcatcctggccctggcctttctgtcaggctactacgtgaccctcgctgcccagatcctggctgtactgctgccccctgtcatgctgctcattgatggcaatgttgcttactggcacaacacgcggcgtgttgagttctggaaccagatgaagctccttggagagagtgtgggcatcttcggaactgctgtcatcctggccactgatggctgagttttatggcaagaggctgagatgggcacagggagccactgagggtcaccctgccttcctccttgctggcccagctgctgtttatttaagctttttggtctgtttgtcttgatcgttagcttttctaacaattgtttttctagcagttaagaggcagctcagtttgtccaaatttctgggctcagcgcttgggagggcaggagccctggcactaatgctgtacaggtttttttcctgttaggagagctgaggccagctgcccactgagtctcctgtccctgagaagggagctatgtgccagcgcgctgggatgcggctactgagagtgcggagagtgggagacagaggaaggaagactgcgagattcggaagtgagcaaatgtgaaaaattcctctttgaacctggcagatgcagctaggctctgcagtgctgtttggagactgtgagagggagtgtgtgtgttgacacatgtggatcaggcccaggaagggcacaggggctgagcactacagaagtcacatgggttctcagggtatgccaggggcagaaacagtaccggctctctgtcactcaccttgagagtagagcagaccctgttctgctctgggctgtgaaggggtggagcaggcagtggccagctttgcccttcctgctgtctctgtttctagctccatggttggcctggtgggggtggagttccctcccaaacaccagaccacacagtcctccaaaaataaacattttatatag

SEQ ID NO: 258449 - DNA, 1065 bp, Homo Sapiens
  misc_feature (142)..(142): n is a, c, g, or t
  misc_feature (144)..(144): n is a, c, g, or t
ccggaattcccgggatcggcgggccccttggtcctcaggcggccgtggcggcggtggcggcggttgggccgaggcaggcggcctcagtggccgaggtggctggacgcgtacaggtggaaggagggagggagccgcacgcgangnacccacccgccatgaagccccccgcagcctgtgcaggagacatggcggacgcagcatctccgtgctctgtggtaaacgacctgcggtgggacctgagtgcccagcagatagaggagcgcaccagggagctcatcgagcagaccaagcgcgtgtatgaccaggttggcacccaggagtttgaggacgtgtcctacgagagcacgctcaaggcgctggccgatgtggaggtcacctacacagttcagaggaatatccttgacttcccccagcatgtttccccctccaaggacatccggacagccagcacagaggccgacaagaagctctctgagttcgacgtggagatgagcatgagggaggacgtgtaccagaggatcgtgtggctccaggagaaagttcagaaggactcactgaggcccgaggctgcgcggtacctggagcggctaatcaagctgggccggagaaatgggcttcacctccccagagagactcaggaaaacatcaaacgcatcaagaagaagctgagccttctgtgcatcgacttcaacaagaacctgaacgaggacacgaccttcctgcccttcacgctccaggagctaggagggctccccgaggactttctgaactccctggagaagatggaggacggcaagttgaaggtcaccctcaagtacccccattacttccccctcctgaagaaatgccacgtgcctgagaccaggaggaaagtggaggaggccttcaactgccggtgcaaggaggagaactgcgctatcctcaaggagctggtgacgctgcgggcccagaagtcccgcttgctggggttccacacgcacgccgactatgtcctggagatgaacatggccaagaccagccagacgtggcaccttcctagatgagctggcgcagaagctgaagccc

SEQ ID NO: 258450 - DNA, 904 bp, Homo Sapiens
  misc_feature (791)..(805): n is a, c, g, or t
taccagaggatcgtgtggctccaggagaaagttcagaaggactcaggaaaacatcaaacgcatcaagaagaagctgagccttctgtgcatcgacttcaagcaagaacctgaacgaggacacgaccttcctgcccttcacgctccaggagctaggagggctcccctgaggactttctgaactccctggagaagatggaggacggcgaagttgaaggtcagccctcaatgtacccccattacttccccctcctgaagaaatgccacgtgcctgagaccaggaggaaagtgcaggaggccttcaactgccgtgtgcaaggaggagaactgcgctatcctcaaggagctggtgacgctgcgggccccagaagtcccgcctgctggggttccacactgcacgccgactatgtcctggagatgcaacatggccaagaccagccagaccgtggccaccttcctagatgagctggcgcagaagctgaagcccctgggggagcaggagcgtgcggtgattctggagctgaagcgtgcggagtgcgagcgccggggcctgcccttcgacggccgcatccgtgcctgggacatgcgctactacatgacccagttgaaggagacgcgctactgcggggaccaaaacctgctcaggaatacttccccgtgcaggtggtcacgcacgggctgctgggcatctaccaggagctccctggggctggccttccaccacgagggagggcgccagtgcctgggcatgagggacgtgcgggctctacaccgccgagggacgcggcccttcnnnnnnnnnnnnnnntcgggcaaagttcctacctgggaccctgtaccccgccgggaaaaggaaaagtaaacggggcacggcgggccctgccttttgggccctgtgcaagcccgg

SEQ ID NO: 258451 - DNA, 997 bp, Homo Sapiens
  misc_feature (690)..(690): n is a, c, g, or t
  misc_feature (943)..(955): n is a, c, g, or t
tcgtccagcggaggcctgggtggcgaattcggcacgaggcctgcattgccttcctaatcatcattggcgaccagcaggacaagattatagctgtgatggcgaaagagccggagggggccagcggcccttggtacacagaccgcaagttcaccatcagcctcactgccttcctcttcatcctgcccctctccatccccagggagattggtttccagaaatatgccagcttcctgagcgtcgtgggtacctggtacgtcacagccatcgttatcatcaagtacatctggccagataaagagatgaccccagggaacatcctgaccaggccggcttcctggatggctgtgttcaatgccatgcccaccatctgcttcggatttcagtgccacgtcagcagtgtgcccgtcttcaacagcatgcagcagcctgaagtgaagacctggggtggagtggtgacagctgccatggtcatagccctcgctgtctacatggggacaggcatctgtggcttcctgacctttggagctgctgtggatcctgacgtgctcctgtcctatccctcggaggacatggccgtggccgttgcccgagccttcatcatcctgagcgtgctcacctcctaccctatcctgcacttctgtgggcgggcgggggtggaaagcctgtggctgcgctaccagggggtgcaantggaaggaggacttggggccggaaacggcggcggccaattgctgcaaaaccctgggtctgggttcctgctcaaccctgctgctgggggctctttcatccctggaaattgggcaagggggatctccagtccattgggaaggcctggcccgccctgctttcatcctccgtctttccccagggggttggggccttctttccagcccaaaactcctctggaaaaatggaaaaaaggtccaaaaccagcccaggcctnnnnnnnnnnnnnccggggccaaaccttttacggagaggcccctcccttgggggt

SEQ ID NO: 258452 - DNA, 1371 bp, Homo Sapiens
  misc_feature (1063)..(1063): n is a, c, g, or t
gaagccggcgtcgtcggatgttgtgttgcccgccaccatgagctacacaggctttgtccagggatctgaaaccactttgcagtcgacatactcggataccagcgctcagcccacctgtgattatggatatggaacttggaactctgggacaaatagaggctacgagggctatggctatggctatggctatggccaggataacaccaccaactatggaattaaccagcgcttagatatggtgccgcatttggagacagacatgatgcaaggaggcgtgtacggctcaggtggagaaaggtatgactcttatgagttctgcgactcgagggccgtcctgagtgagcgcgacctgtaccggtcaggctatgactacagcgagcttgaccctgagatggaaatggcctatgagggccaatacgatgcctaccgcgaccagttccgcatgcgtggcaacgacaccttcggtcccagggcacagggctgggcccgggatgcccggagcggccggccaatggcctcaggctatgggcgcatgtgggaagaccccatgggggcccggggccagtgcatgtctggtgcctctcggctgccctccctcttctcccagaacatcatccccgagtacggcatgttccagggcatgcgaggtgggggcgccttcccgggcggctcccgctttggtttcgggtttggcaatggcatgaagcagatgaggcggacctggaagacctggaccacagccgacttccgaaccaagaagaagaagagaaagcagggcggcagtcctgatgagccagatagcaaagccacccgcacggactgctcggacaacagcgactcagacaatgatgagggcaccgagggggaagccacagagggccttgaaggcaccgaggctgtggagaagggctccagagtggacggagaggatgaggagggaaaagaggatgggagagaagaaggcaaagaggatccagagaagggggccctaaccacccaggatgaaaatggccagaccaagcgcaagttgcaggcaggcaagaagagtcaggacaagcagaanaagcggcagcgagaccgcatggtggaaaggatccagttttgtgtgttctctgtgcaaataccggaccttctatgaggacgagatggccagccatcttgacagcaagttccacaaggaaacactttagtacgtaggcaccaagctccctaagcagacggctgactttctgcaggagtacgtccctaaccagaccaagaagaccgaggagctccgaaaaaccctggaaggaccttgatgccctcttccagcaaatctaccgagaccaggaatctggaccaagaaatttggcctggagcatttttgtggag

SEQ ID NO: 258453 - DNA, 590 bp, Homo Sapiens
atcgcagcgtcggatgttcagagcagcagaagccggcgtcgtcggatgttgtgttgcccgccaccatgagctacacaggctttgtccagggatctgaaaccactttgcagtcgacatactcggataccagcgctcagcccacctgtgattatggatatggaacttggaactctgggacaaatagaggctacgagggctatggctatggctatggctatggccaggataacaccaccaactatgggtatggtatggccacttcacactcttgggaaatgcctagctctgacacaaatgcaaacactagtgcctcgggtagcgccagtgccgattccgttttatccagaattaaccagcgcttagatatggtgccgcatttggagacagacatgatgcaaggaggcgtgtacggctcaggtggagaaaggtatgactcttatgagtcctgcgactcgagggccgtcctgagtgagcgcgacctgtaccggtcaggctatgactacagcgagcttgaccctgagatggaaatggcctatgagggccaatacgatgcctaccgcgaccagttccgcatgcgtggcaacgacacc

SEQ ID NO: 258454 - DNA, 1147 bp, Homo Sapiens
ggagcgaggcctgggtggcgaattcggcacgagggaggatccagagaagggggccctaaccacccaggatgaaaatggccagaccaagcgcaagttgcaggcaggcaagaagagtcaggacaagcagaaaaagcggcagcgagaccgcatggtggaaagggctcccgcactggcgcttgcctcctccgcctcagactcttgctcttgctggaccttcctcagcctcgccggcgcccggcccctgggctctccagacaaagctgaccccgtggcccagataaggacgtccggcagaggatccagtttgtgtgttctctgtgcaaataccggaccttctatgaggacgagatggccagccatcttgacagcaagttccacaaggaacactttaagtacgtaggcaccaagctccctaagcagacggctgactttctgcaggagtacgtcactaacaagaccaagaagacagaggagctccgaaaaaccgtggaggaccttgatggcctcatccagcaaatctacagagaccaggatctgacccaggaaattgccatggagcattttgtgaagaaggtggaggcagcccattgtgcagcctgcgacctcttcattcccatgcagtttgggatcatccagaagcatctgaagaccatggatcacaaccggaaccgcaggctcatgatggagcagtccaagaagtcctccctcatggtggcccgcagtattctcaacaacaagctcatcagcaagaagctggagcgctacctgaagggcgagaaccctttcaccgacagccccgaaggaggagaaggagcacgaggaggctgagggcggtgcctggacgagggggcgcagggcgaagcaggcagggatctcggagggcgcagagggcgtgccggcgcagcctcccgtgcccccagagccagcccccggggccgtgtcgccgccaccgccgccgcccccagaggaggaggaggagggcgccgtgcccttgctgggaggggcgctgcaacgccagatccgcggcatcccgggcctcgacgtggaggacgacgaggagggcggcggggcgccccgtgacccgagctcgtggcggagcccgcgtggccgaagctggaaaccaaacctaataaagttttcccatccc

SEQ ID NO: 258455 - DNA, 484 bp, Homo Sapiens
  misc_feature (421)..(433): n is a, c, g, or t
  misc_feature (460)..(460): n is a, c, g, or t
  misc_feature (473)..(473): n is a, c, g, or t
ggatgttgtgttgcccgccaccatgagctacacaggctttgtccagggatctgaaacctttgcagtcgacatactcggataccagcgctcagccacctgtgattatggatatggaacttggaactctgggacaaatagaggcaagtgtcaatcctgtgattgctgtcctgtcccttggggtttgtcctggctgtgtttctctgccactgccctgcttggccaaggttgggagtggggagggggcatgtttctggggttacctactccttaacaggaggccctcatcagaatgaccaggggcctatctagcttcagtgggctagggtcttctctctctgtgacagaagatacccttgtatctgtgtttgtctctgtctctgtctgcctcccctctgcctgcccccaccatctgtctgtctcnnnnnnnnnnnnngttggaaaatacgggagaggtgatagnaaaatataaactnaaacttgatcc

SEQ ID NO: 258456 - DNA, 1596 bp, Homo Sapiens
  misc_feature (434)..(482): n is a, c, g, or t
  misc_feature (614)..(654): n is a, c, g, or t
aaagttatttttttcacagtcagagtggacttttattaggaaatcaccctgcaaacacaccacggaggctgtgggttcaacgcgcttcctgaggaaggagggtcacagtattggagctgtcggagggacgggtggcacagcctgtgagcctggcggtgactcgaggctgcctgcggccagcactccctcacagcaacaggactccaccgcaagagccgacacgcaaacgcgacacgagaaacacgcccaagcacacacatctgcgctacacttaaataataataaatacagaattccatttgctgttatccgtgcctgaaacaaaaggaacccaaaatggaaaaagaaaaccaaaatgtctttctctccattagaccaagggaaaacaaaatccccaaattatcaaaattcctcagttacaaaatactttttannnnnnnnnnnnnnnnnnnnnnnnnnnnnnnnnnnnnnnnnnnnnnnnncttggttgcatcaaaattataactaggagttatatcaagattttttgtggcctatattatagtcaaatagttatttttgctttgaattcacttttttcccctcttagggtgccctggtgtggggtctagttnnnnnnnnnnnnnnnnnnnnnnnnnnnnnnnnnnnnnnnnngcaaacgttaacataagaggctgtgaatataaatacttacatcttgacaaaattaaataatttacagaataattaaactaactactttttaattttttccaggaagtgcaatttctctatttttaaatactaacttggaattgcagtcacaattgacttggattctatttacacggtagggacattgtgtttttaacacattaaattaaaatgtacccttttttcgcatattggatggatctaaaagaagtgaaacctttgtggtctcctgttaggaatttaccctctgaccttgatgatgtcattgccacttccgtcaccatggatgcagaggtcaagctcggccatgacccggagaatgtggcagtgatgggtcgggggcctgggtggatgcacagaagccagagtggtccctagacgtggatcccagacccagggtctaaaggctgcagccccagtagggagctgtgacccaaggccatacacatctgcacagcctcagcgccagctgcccccagacattaggctgattttcaggagtctcccaggttaaaattccttgacctgacaggggctgcgatgcttgtcaactgtctggagtatcctctgggaggcctattcctaactttccctctagaacagagctttgttccacccttaacacaaaactgaattaaatgaaaacagaaaacgcactttcttcatcggccctcactgagcacagacacgctgccccaggcgtgtcctccaggccaagatgccactcacaccacccacccaccacgctcacggctaccctcccagcctcgacagacaaaggaatactgtggttgcaaactccaaaacttccctgagaaccttgtccatgagcttccactggagactttgagctgctcttcagatttctttcagaaaacaaaaataaatcactttgtaattctt

SEQ ID NO: 258457 - DNA, 651 bp, Homo Sapiens
  misc_feature (75)..(75): n is a, c, g, or t
  misc_feature (85)..(85): n is a, c, g, or t
  misc_feature (109)..(109): n is a, c, g, or t
  misc_feature (123)..(123): n is a, c, g, or t
  misc_feature (148)..(148): n is a, c, g, or t
  misc_feature (202)..(202): n is a, c, g, or t
  misc_feature (490)..(490): n is a, c, g, or t
  misc_feature (529)..(529): n is a, c, g, or t
  misc_feature (586)..(586): n is a, c, g, or t
  misc_feature (621)..(621): n is a, c, g, or t
  misc_feature (629)..(629): n is a, c, g, or t
gacttttattggaaatcaccctgcaaaacacacccaggagtgctgtgggttcaacacgccttcctgagaaagganggtcacagtnattggagctgtcggagggacgggntgcacagcctgtgnagcctggcggtgacttcgcagagcntgcggccagcactccctcacagcaaacaggactccaccgcaagaagccgaacancaaacgcgacacgagaaacacgcccaagcacacacatctgcgctacacttaaataataataaatacagaattccatttgctgttatccgtgcctgaaacaaaaggaacccaaaatggaaaaagaaaaccaaaatgtctttctctccattagaccaagggaaaacaaaatccccaaattatcaaaattcctcagttacaaaatactttttaaaaaaattccattattaaaagaataaataacaaaatatataaaaaataacttggttgcatcaaaattataactaggangttatatcaaggattttttgtggcctatattataggtcnaaataggttatttttgctttggaattcacttttttcccctcttggggtgccctgggngtgggggtctaggttggaaataggtataaaaattnaataaatnaaaatggttaaattaaatggcc

SEQ ID NO: 258458 - DNA, 446 bp, Homo Sapiens
agacccctcacacagcgctaccggcaacttgcttaacctagaggtggggggtgacgtccctgtcggccccgtcacctggggccccagcacctctccttggctttgcagacgatgttccacaggagcccgtgcccacgctgtggaacgagccggccgagctgccgtcgggagaaggccccgtggagagcaccagccccggccgggagcccgtggacaccggtcccccagcccccaccgtcgcgccaggacccgaggacagcaccgcgcaggagcggctggaccagggcggcgggtcgctggggcccggcgctatcgcggccatcgtgatcgccgccctgctggccacctgcgtggtgctggcgctcgtggtcgtcgcgctgagaaagttttctgcctcctgaagcgaataaaggggccgcgcccggccgcggcgcgacttggctgca

SEQ ID NO: 258459 - DNA, 1037 bp, Homo Sapiens
  misc_feature (507)..(507): n is a, c, g, or t
  misc_feature (540)..(540): n is a, c, g, or t
  misc_feature (556)..(556): n is a, c, g, or t
  misc_feature (588)..(588): n is a, c, g, or t
  misc_feature (703)..(703): n is a, c, g, or t
  misc_feature (826)..(826): n is a, c, g, or t
  misc_feature (828)..(828): n is a, c, g, or t
  misc_feature (830)..(830): n is a, c, g, or t
  misc_feature (924)..(924): n is a, c, g, or t
  misc_feature (1025)..(1025): n is a, c, g, or t
tgactgaccaatccaaaaaggcaaacctctttttctctgatcccatttcttccattgcagattgatttgaggctcctcacctccagggacaggctgcagctccagcgagtggcagtggagctgattctgagccagctcgccatatcttctccttttcctggttgaactccctaaatgaatgatattcattccaactgctgcccctctgtctgcctggctgagatgcatgtgggcagcaggaagcccaagtgaaattaatattatgcagatgatgaaagggacctctgaacaggatttctgcaaaaatagccccaaactgcaattccatatgacttatctaacatcttggggggaaagaatattttgagaaaatagttgcagaaagcactggaaataataaacttgatcttatacaaatcttctattgtgtggaaaatgttgtgaagggtgtgtaggtgtggtacatgtgtatgtcactaacaagtggcaaatggtgaaaaaagtggncactaggcttttgtctctcataggcactgactntttgttattatattanggtagctttcatttcctttactctttaacagngcaggtggtcagtgaaaatcagtgtcaactcagaagtgactgatttatcaatacatggacaaaaagtaaatcattgaccaaagctatgaaatgtttcacaaagttttcctctttngcataacagatgtcactggatgtacattcagaaatgttctttgaatttggtgacactttcatggtccagaaagctgaaggcctgggcatctcttgtgacatttttctaatattagttttagantntnacgtattaggcactttagttgaatcttccagcaaaagctgtctactttctcttttattcactgtggcaccaatctggtaaattgtagaacaatngcatgtgtttaaatatatatacaaacatatcacacattaaatatatatatatttaaatcatgctttgttaatatttgtcccaccataatgcctccttcagnacataagtgtaa

SEQ ID NO: 258460 - DNA, 1036 bp, Homo Sapiens
  misc_feature (9)..(9): n is a, c, g, or t
  misc_feature (18)..(18): n is a, c, g, or t
  misc_feature (24)..(24): n is a, c, g, or t
  misc_feature (40)..(40): n is a, c, g, or t
  misc_feature (43)..(43): n is a, c, g, or t
  misc_feature (69)..(69): n is a, c, g, or t
  misc_feature (137)..(137): n is a, c, g, or t
  misc_feature (909)..(909): n is a, c, g, or t
  misc_feature (914)..(914): n is a, c, g, or t
  misc_feature (942)..(963): n is a, c, g, or t
acaagccanccgagaagnaggaanatgaaagcccaaatgnaanatcctagtacctcccccctctccggngtacccgtgcagccagccagccaccctaactccttcagaggctggccggaagccctgggagcggagcntactcggtggagaagctctgtgtccctcgattctgtccagaacccccgtctgtggcaaagagcccccgaagctaagagcccccttcagtcgcagcctcactctaggatgaagcctgctgggagcgtgaataacatggccctggatgccttcgacttggaccggatgaagcaggagatcctagaggaggtggtgagagagctccacaaggtgaaggaggagatcatcgacgccatcaggcaggagctgagtgggatcagcaccacgtaaggggccggccttgtgcgctgattcgtcgagcccatccggcgacagaggacagccagaagcccagccagccccagactccagtgcaccagagcacgcacaggagcctgggcgcgctgctgtgaaacgtcctgacctgtgatcacacatgacagtgaggaaaccaagtgcaactcctgggtttttttagattctgcctgacacggaacaccaggtctgctcgtcttttttgtgttttatatttgcttatttaaggtacatttctttgggtttctagagacgcccctaagtcacctgcttcattagacggtttccaggttttctcccaggtgacgctgttagcgcctcagctggcggtgacagccggcccagcgtggcgccaccacacaccgcagagctgtccaggcacagctccgtccccagcgctcatggtgttgaaactgtctgtcatgcaccacggtggtctgtgtccacacagtaataaacggtttactgtccgacaaccancggantttaccgccacccaagctacaaaagttnnnnnnnnnnnnnnnnnnnnnngtacctctttatccgccccataatctccgctagaaggataattccgggtcggggcgcgccttggggccctcat

SEQ ID NO: 258461 - DNA, 860 bp, Homo Sapiens
  misc_feature (12)..(12): n is a, c, g, or t
  misc_feature (17)..(17): n is a, c, g, or t
  misc_feature (24)..(24): n is a, c, g, or t
  misc_feature (26)..(26): n is a, c, g, or t
gtacccacactntcctntactctntntcatcctatttgagttttattgttttaacacagctgggaaatgcttaaggtacaaattaataaattttaaactcagtatggaaaatacatttaataaattaaagcaaaaaccaaagatctgaggagatccaagagatcaagacaatctgtaaccagagtctgaagtatccaaggagctactctttttgaggcatatcctcctcagcttccagtcatcatttgataaacacatcagcaaaaggttcagtgttttaaacaaatgtagactttattttgtactgtacaaagtgctaatgtcagtagatccattaaaatatagaatatttaagaaagatcattaataaaagtaatggtcattcaatttaatgttacagtttacagcgttttactgctagtgttttaagtcagcatgagcagtatcaaagtacttatgtagctagtctctaaaactttacagaaaacccagtacaattccaagtccttatagccaatataagcatatctcatattagaaatagttatccatatgtcaacaagaaactatggtcctcaaatatgcgcaattttagagtctaataactactgatagtaactatgtaaatattttggaataaacagttatctacgcaagcgcacacttcagccgagatgatcactagacatctgtttccagagcttcaacaatgtgtgcagcagaaggacgatctttagggtcttcattagtgcataaagagaagagttcaattactttctggtatgagtaatccagttcttccatatgaataggtggcctagttcccaaggctgcatagtatgcgtcagcatcaaaatcac

SEQ ID NO: 258462 - DNA, 2044 bp, Homo Sapiens
  misc_feature (3)..(3): n is a, c, g, or t
  misc_feature (5)..(5): n is a, c, g, or t
  misc_feature (22)..(22): n is a, c, g, or t
  misc_feature (35)..(36): n is a, c, g, or t
  misc_feature (76)..(77): n is a, c, g, or t
  misc_feature (79)..(79): n is a, c, g, or t
  misc_feature (87)..(87): n is a, c, g, or t
  misc_feature (90)..(90): n is a, c, g, or t
  misc_feature (96)..(97): n is a, c, g, or t
  misc_feature (108)..(109): n is a, c, g, or t
  misc_feature (118)..(118): n is a, c, g, or t
  misc_feature (148)..(148): n is a, c, g, or t
  misc_feature (199)..(199): n is a, c, g, or t
  misc_feature (283)..(284): n is a, c, g, or t
  misc_feature (293)..(294): n is a, c, g, or t
  misc_feature (307)..(307): n is a, c, g, or t
  misc_feature (310)..(310): n is a, c, g, or t
  misc_feature (328)..(328): n is a, c, g, or t
  misc_feature (333)..(333): n is a, c, g, or t
  misc_feature (355)..(355): n is a, c, g, or t
  misc_feature (376)..(379): n is a, c, g, or t
  misc_feature (385)..(385): n is a, c, g, or t
  misc_feature (390)..(390): n is a, c, g, or t
  misc_feature (396)..(397): n is a, c, g, or t
  misc_feature (399)..(400): n is a, c, g, or t
  misc_feature (405)..(406): n is a, c, g, or t
  misc_feature (1495)..(1495): n is a, c, g, or t
  misc_feature (1570)..(1571): n is a, c, g, or t
  misc_feature (1606)..(1623): n is a, c, g, or t
  misc_feature (1904)..(1904): n is a, c, g, or t
ttncngagggtgtgattttcanaatactttttaanngtattaatttaatgtaagacataaccagctagtaggtagnncnctccaaanccngaatannctaccttaggnngcagtttgngtctcataagagtttaaagtacagaaaggntttacacttgataggctggatgggtacgtgggctggataacctttggggtngaattcttcatgccctttaaagtctcttccaattctgacatttaccccaaattaaaaaggtatttagtcttaagaccgggaggnncctacaagnngtagggctaattnganaaaaatattctgtaagtngtccnatgtcaactaatcttaattgcngagtttattattgttattttnnnnacaaantcttnctacanngnnctggnngggcttgaactcctgcactcaagcagtcttcctgcctcagactcccgggtagctcgaactacaggcatgtgctactgcagtaggcttttatttagtaaagtgatttcaatgtcaacaaagaataacaaaaaggtatttccaatgaaaagatacataaagttaaacaaagtacaagttttagaatctgaactaaataaaattatatttccttttgaagcagtatcttgctcattgaatttgtgccacaataaacattttttattaaatctcattaaaaagaaacgtgttgtgatttggatagatgtactagtgaaaaatggtaaggaatgagaaacacaaagtccaagaagctaattttcaactcataatttttcttacttgtatttctattttaggttcaaagtcaaggctactgcttaacactatggtaggactttaaacataactgaggaaaaaccatattaaagtatcattaaaaatatttatcattttatatatgtaattttttttctttaaataataaaaagtttaccagctaagtcaataccacagatggagttgtgtggaaattgtatttggcagcaatgttagttttttttaagagtttctggcttctgtaacaaaataagaaagtaggcctttttctctccaccatgaaaatttgttggaatgctttgtcctccatacctataaaagttgccagtgttacaacaggtataccactatgaagacactagaatgtctcagaatatgctgaatgatagttttcaacattttttggaagctagagttgggtggtatgacttaaggggaaaatgtagctatatctgaccactgactaccagtaagaaaatttcacttctgtatttgttcttaaagggtaaaataagaaattttcttcaatatctataaactttaaactgaaaattttctctccaaccctaattggtcctttccacttttggctctggttcctgtagtaccttaaggaatcaagtttaatttatttcctttaggaaggatggtggtgctgacagacttagtgctgagatgagtggggtcttgatgtttcattaatttacttctttngcttctgatcactctatagtagaggatgtattaaacaatatacctttcataaacaaattttcacttttgacagtnnttatcacagtattttagatttcaaatggtagattnnnnnnnnnnnnnnnnnntgcattttggttaccaaatttatgtatgtacgtatgttcccttctcaatttggaaaaagtattttcctatgattctagtgcctggctccacttatttttctactctaaaacagtatttccaggagcattagaaaaatcaatttcactgcagaagaccgagatatttcttttctttttcttacccataccactcagagtttagaaaagatccttgcttaaagatcaggattactcaggccaccccgtttagtaactgcagagagtgtctgtgaactatgtangggtaaaagcagaaaagatgcattttccagcaaaggcctcctttgtcttgaattaagtgaatgaaacactagatcaagattgtgtcactgagctaggtgcggtggctcacgtctgtaaccccagcactttgggagtctga

SEQ ID NO: 258463 - DNA, 1707 bp, Homo Sapiens
  misc_feature (84)..(84): n is a, c, g, or t
  misc_feature (692)..(705): n is a, c, g, or t
  misc_feature (1206)..(1261): n is a, c, g, or t
  misc_feature (1266)..(1291): n is a, c, g, or t
  misc_feature (1300)..(1551): n is a, c, g, or t
ctcgcggcggcctcacggagatggctcttgactcggacttgtggtcgcgattggaggaaaaagcgcgggccaagtgcgaacgangatgtaggctgggaacccggccaaggaaagcagcgacgctgacggagaggtcggtaggaagaaggggagagcgagaagggggtggggcctaggagtgctgggtggcgcgcgctccggcggctctgggacagggtcctggggcctgcgcggcgctggcggcgtccgctgcctagcaacgtgctctactgtgcggagatcaaggacattggccacctgacccgttgcacgttgtaaccgaggaactcgcaagctacagccgaagaaggtgggagctgcagcctcgcgggggctgatgtcaagactactctctctcagatcccaggattggcatgtgatgagagaaatgagccgaagagcgagggaacgccctgggaggtgttgatgctgagttggggaggctcctagacgaactcgcccccatctactgactgtgccagtcttacattttcaggatggagtggccaagggatgatataaacaaagcctacgttaccgtgggaagaagacagactgttttcttagctgggacgttggcttttgtccagggtggctctggtgtgtgggagcaacaggtcccattttagcaattctttgtcaatggtttgaannnnnnnnnnnnnnaagatggaacgggagaaaagaggctaattttcgcgtcatgttaatctcacttctctggcatgtaagggtgctggtatgcctgctgtctccccactcccagttctgtgttccagaaattgagatggctccctgcctgtgactatgattaggagccttgcttcatttcagaatctcccttcaacctgctagggcaggtatcagaaattccaaagggcatttatgtgaggcacctaattagagcctatcaaagtaggaagggagagccatttgaaaggcatcatatttcaaacttttgctattatctgtgttatctttacagtcacgggaacacactagcgctactgaaaagatacttatacaattttaagtgtctttaaaatttgtgtcccataatgggacatcacctgttgtatatatgccatgtattctattttagaatcctgtatcttatgaccataaagtcatagtcaaggaccagcagtgttggtgtactgtcaacgnnnnnnnnnnnnnnnnnnnnnnnnnnnnnnnnnnnnnnnnnnnnnnnnnnnnnnnncaggnnnnnnnnnnnnnnnnnnnnnnnnnngagccagannnnnnnnnnnnnnnnnnnnnnnnnnnnnnnnnnnnnnnnnnnnnnnnnnnnnnnnnnnnnnnnnnnnnnnnnnnnnnnnnnnnnnnnnnnnnnnnnnnnnnnnnnnnnnnnnnnnnnnnnnnnnnnnnnnnnnnnnnnnnnnnnnnnnnnnnnnnnnnnnnnnnnnnnnnnnnnnnnnnnnnnnnnnnnnnnnnnnnnnnnnnnnnnnnnnnnnnnnnnnnnnnnnnnnnnnnnnnnnnnnnnnnnnnnnnattaggagtgagtcacccggccgggcccgactttggcattttaacaatcccaggggatgggtgggcattgggaaaattaaggaccatgggcctaaaacctacactctttaggattacccatttgtggtggaaattttaaggttaaaagggttgcct

SEQ ID NO: 258464 - DNA, 1847 bp, Homo Sapiens
tgttttactatttctaaggtggttcccatgatggcatttcttgataagcccactttgagccgtttaatgttttgtaggtgtttctgtgagtctgataataccagcactaaaaacagttcagtatatagacatttacaagaggtcttaggcctcttcagaattcagttaatgtctttctctttgaggctgctgaatgttaggtaagaattcagggcaagcattcccgaccatcatcaaattggagacttggagtttctattggctggaagaaagttgacccacaggcaaaaccagatgtaaaccaagtttgtcttgggtacttttcaaattcttttcacagcatccttttctcatccctcatggtggcctctggccctggaaaatcctcatgatagcaacttatcaggcctgtttcctctgatagatctggacttttccccttaagtgctttcctgttgggcttctcagactatggagaactgctcatagttgagatctaagagacaaattaccctatggtgttcaagaatggccgtatttagtatactgcctgtcctggaagtgttcacatttaaaaaggcatgactttccaatgggcaaatatcagacacctacatgcatagataagggaaatatgttttacttaagcaaacttctaggcattgaatctcagtgtttaggtgcagagatggaattcctataagcaatgcagtcattcaccacatcaggaaggccaaaaaatgaacactctcgtaattttgttattatctggaaagttctgatatgataatgaacctaaaatactgaatagatagtgaacatcctaaaattccactgaccagaatccattcccatggtcatcatctgtagagggcatgatacaatgacaggcctgaggtatgattataattctggagtaatttaaagcctatatttgttaaactttaacagatggacacacattctctgattttctacttggctctttcctgtactagaaatgcgcatttaactaaaccttcccagcttttctgttcagtgcctgacttacactactcccttaggcaggaggacagtgggtgtctggggaataaaagccaagagctccaaacagaggattttggatacaaagggcagccaccaggaaatagctttgtgagagggacagactatctgattcccatttgtacaaacatgtccaaagcaaaagcacagcattctaaagtggatgcagaaattagtatacaatggcagttctggccagtgcagcccagcatttttctgttgtgcatggaaagaacacagtgaaaaggcaggcagggcatccggtgcaaagtgcaacagacatagacacacaaatccagttttcctgatgagagagggagctatctcttcataagtgatgcaatgcaatgcaggcatgtacaagtacaaggaaagatttatttttaaaaaatcatagtgtaactggatgaataccagcaacagcacctgctaaagcaaacagcctgttcattaaaaactggacttgagggaatggagaaagaatctgaggagcctgcagtcagcatgcttgcagagaccttatggctacagaagacgatgattaacccatagaggttcaatgtagttttcaagaagagggtgggaaagcataagatggggactaagactttgcctttaaccttcatgacatgaagaattgaatgactctttgttggaaaaaatggcagttatgagataattggatccatgttaattatatatatttctgtatatatagtaagtggttattgatgtgcctttgttaaccatttcactatttaataaatgtgtgtgtagtttaa

SEQ ID NO: 258465 - DNA, 1424 bp, Homo Sapiens
  misc_feature (784)..(784): n is a, c, g, or t
  misc_feature (788)..(788): n is a, c, g, or t
  misc_feature (792)..(792): n is a, c, g, or t
  misc_feature (794)..(794): n is a, c, g, or t
  misc_feature (874)..(874): n is a, c, g, or t
  misc_feature (886)..(886): n is a, c, g, or t
  misc_feature (1003)..(1003): n is a, c, g, or t
  misc_feature (1005)..(1005): n is a, c, g, or t
  misc_feature (1037)..(1037): n is a, c, g, or t
  misc_feature (1043)..(1044): n is a, c, g, or t
  misc_feature (1048)..(1049): n is a, c, g, or t
  misc_feature (1052)..(1052): n is a, c, g, or t
  misc_feature (1055)..(1056): n is a, c, g, or t
  misc_feature (1179)..(1232): n is a, c, g, or t
  misc_feature (1301)..(1362): n is a, c, g, or t
taaagcccctttaggtggggaaagtttgggaaagccgggtggggcaaccaccaaggctctgttttttaggaaatcctgttggcaccccgaatgggggggcctccccgctcggtgggggcctcccctgccctcccggccggccgccttatcaccttctcctcttgtgtccatagcttccgccctgcgctgccagtctcctacctgcaggccgagctggccttcgagggcgagaccgccttccgggccttcctagagcccctgggcctggcctacacgggcccggacaactccagcatcgactgccgcctcagcctggcgcaactgtcagccttctgagcacccagcgaggaggggcgggggcaggggctgcagcccccagcgctgcctttgcggattctgtttttgagccgtggacttgggttgtaaatttatttgtggggagtgcgctccaggaagagccaccatccctgcccccgttttcccaccggggagtctgtacaaaaatttttctacgtttttattttttgcctcaaagggatgggattggggaggaggggatgggcaacggagggttgggggcatggtctgcaggctcatctgtgtccgcctttcactccactaatgctgtctcagtgttttctctctctctctttcgagcttgcactccggtacccgacccggcgccctggcccatcccatgccggggggccagtggaaagaagacaggccgtccagcccgtgcccgcctgcggcgggggcacccagcaagccgccaaccgcccgntgcntaancntgttcgccacagactcttgttcccagccccttggggcctccgtgtttggggtgggggagctgcttagagactgtgcccgncctcggcccccnaccctgaagtgccagcaccaccagcaccagatcctccgccgccacaccgcactgaggacacgccggccgggccgcctcgtctcaagttgtataaagttgtctccgtgtccccaccancntctgcccccagtgtttcttctgattttttttncccctnncccnnccnccnnctccgcattcttcccttggttcagcacaggtaaaacggttcccctccctccctgccttcatggatcaccagctcacgtcatgttgccttctcttttctttgtgtgtgtgtttatttaagttannnnnnnnnnnnnnnnnnnnnnnnnnnnnnnnnnnnnnnnnnnnnnnnnnnnnncatgtaactggaggatgtgctatgagtttgcaaacagctggactgtcaggctgctttttttccagatgnnnnnnnnnnnnnnnnnnnnnnnnnnnnnnnnnnnnnnnnnnnnnnnnnnnnnnnnnnnnnnggagcactgagcaccatttggaagcttgagagaaaccaaaattaaagagagaaagagagagc

SEQ ID NO: 258466 - DNA, 2050 bp, Homo Sapiens
  misc_feature (902)..(925): n is a, c, g, or t
  misc_feature (1427)..(1510): n is a, c, g, or t
gggtaccgctcgtacgttctccgagaagttcccgctggcagaacctcgctggccgtccccttcccattcccatcgctgcccccatcctcctcacccccttcttccatgaagtcgtcatcgctggtgtcgtcggatttggcgcggcccgcttggagtacaggccggttttgagatccggctcctcctggtcgtgatcatccatgaggaactgcgtggtgttatagggcgcgaccggctggcccttggcgaacatctcggctcggatccttgaagctcgaaggctctgtttctcgtcgaactttttcttctcttcccaggtcagcttgtagtacggtttccaatgccgcttcttcttggacgggcgtctcctatgttttttcttccccagctgtctctgctgctgtccccactcctcttcgccccctgcggcaggagccccaaacttactggcctcggagtcatgacaaggctgggcaaacaactcggcctccgggcgtcggttccacttctgccgccggcgggaagtcgccgccagcgaacgagtcgtccccattctggcccttctcgccctctctcaggcagatagattctggacaggccggggtctgcaagggaggtggttgggattccaggctcccttccccctccggccacggacggccacccaactgggggaacgctctcgattgccacctactgtcctcctcgggcacccgctcctccgcgcctggggggcgctcagggttcagctcttcctggacagcagcagcacctgtacagttgctagtttgaggctggtgttgatattctgacaagaatggctcggccatggctagtagagtcctcgaagtttaagaaattttggctagtaagtccttaaggaaaaaaatgggtttttcttnnnnnnnnnnnnnnnnnnnnnnnncagtccaacagagtcctcttcagtttgtaattcctgcagtgacgcctttagctagtccttctatcagcaaactccaactgcaatctggggagctcaagtcagtaaagggttaagcgcccacagtgcggccagctagcgggtccaagggggtgcagcggcgggaacagtacgtaatgggcggaggtgggcctcaaacctccaagcggagcaccccaataaaggagttggtgagcaaggtgatgagggtaagtccagtgcgtgaaacccagccccgaaggggttaaaactaccgatgacgctgcctccgaggggccagatccacaaagggttaaatcccctgccgcagagccaacaaggggttaaagtcccggcgccacctcctcccacttccacgggtgtcgcttccacccaagctcccagttccctaggcccggccgtagcctcagcagaggacagacaaactcatctcccctttggctcgatgctctgctctgctcagttnnnnnnnnnnnnnnnnnnnnnnnnnnnnnnnnnnnnnnnnnnnnnnnnnnnnnnnnnnnnnnnnnnnnnnnnnnnnnnnnnnnncaacctgcctctccacctgccaacttccaactgctgtctcccagtcctctgcgccccttttatatagaagctttttcgccccgcccgtgcgcatgcgtaacggagttccctttgcggggcgccgggagtcgtagttcttatctttcgggcccgccgccctcgcgcgccgtgcgacgtagccaatcccaggacgcgtagggggcgtctccctggccgccaccttccatcgcttagacctcgctaaagaaacgcgagcggccattggtgaaaaatcacacgactcgctgaggaaggacggccaatcgcagagaagatggggcgggttctggaccgtaccattctgtttcaggaatacgagaagattcgatggcctatgagagtcctcacagaatatttttatgaaaaggtgcgttataaaggctattatcgtattttgttctcagcggaggggttccgaaggttatgaacctttattaactaacgcaagaatggtttattcctaaaaagtagtccctaaaatgtaaaagaattaaatcctat

SEQ ID NO: 258467 - DNA, 354 bp, Homo Sapiens
  misc_feature (229)..(229): n is a, c, g, or t
gcatccttgtgttttgctgtggtttttaaaggagcgcccacgaagtgtagtggctgacgatttcaacctcacacagcagtttgtaaccgcaagcattctctttgaattctcacagaattcagcaagaagtagaaacctgttatttcacctacattgtgatttaactttggatgtgaatttagtcacccttaccccttcagataagcctagccagtacatatttcagcancaggcagtttttttggtatttaagtacattgaggtaactgagcacttgagaatattttagggtcaaagtgtaattattcataatgaatttactctgttgatattaaaaagacgttcagtcctatt

SEQ ID NO: 258468 - DNA, 1177 bp, Homo Sapiens
gctgggtggcgaattcggcacgaggctttcacttaacctgcagacagaactcagttagtcggggacaatttccctcaatgttaacagcactgttccaccgcaacgtggaacaacagctttaaaacgtgctcttcgtaggcccggctactccaagaacagtgcctcccgccagacccaggcggcttccttcacccgcaacccgagagacgacccgccgggcccgccccgcggaagccgccggttgccaggccaaggagtggactagggtcgccggggaagcggtttgggagagcccatggtgactgcgtgagtggagcccagctgtgtggatgccccagcatggatgactacatggtcctgagaatgattggggagggctccttcggcagagctcttttggttcagcatgaaagcagtaatcagatgtttgccatgaaagaaataaggcttcccaagtctttctctaatacacagaattctaggaaggaggctgttcttttagccaaaatgaaacaccctaatattgttgccttcaaagaatcatttgaagctgaaggacacttgtatattgtgatggaatactgtgatggaggggatctaatgcaaaagattaaacagcagaaaggaaagttatttcctgaagacatgatacttaattggtttacccaaatgtgccttggagtaaatcacattcacaagaaacgtgtgctacacagagatatcaagtccaagaatatcttcctcactcagaatggaaaagtgaaattgggagactttggatctgcccgtcttctctccaatccgatggcatttgcttgtacctatgtgggaactccttattatgtgcctccagaaatttgggaaaacctgccttataacaataaaagtgacatctggtccttgggttgcatcctgtatgaactctgtacccttaagcatccatttcaggcaaatagttggaaaaatcttatcctcaaagtatgtcaaagggtgcatcagtccactgccgtctcattactcctatgaacttcagttcctagtcaagcagatgtttaaaaggaatccctcacatcgcccctcggctacaacgcttctctctcgaggcatcgtagctcggcttgtccagaagtgcttaccccccgagatcatcatggaatatggtgaggaagtattagaa

SEQ ID NO: 258469 - DNA, 946 bp, Homo Sapiens
  misc_feature (17)..(17): n is a, c, g, or t
  misc_feature (23)..(24): n is a, c, g, or t
  misc_feature (28)..(28): n is a, c, g, or t
  misc_feature (33)..(33): n is a, c, g, or t
  misc_feature (46)..(46): n is a, c, g, or t
  misc_feature (49)..(49): n is a, c, g, or t
  misc_feature (56)..(56): n is a, c, g, or t
  misc_feature (110)..(110): n is a, c, g, or t
  misc_feature (123)..(123): n is a, c, g, or t
  misc_feature (130)..(130): n is a, c, g, or t
  misc_feature (141)..(141): n is a, c, g, or t
  misc_feature (145)..(146): n is a, c, g, or t
  misc_feature (152)..(152): n is a, c, g, or t
  misc_feature (155)..(155): n is a, c, g, or t
  misc_feature (162)..(163): n is a, c, g, or t
  misc_feature (168)..(169): n is a, c, g, or t
  misc_feature (171)..(171): n is a, c, g, or t
  misc_feature (182)..(182): n is a, c, g, or t
  misc_feature (196)..(196): n is a, c, g, or t
  misc_feature (202)..(202): n is a, c, g, or t
  misc_feature (206)..(206): n is a, c, g, or t
  misc_feature (209)..(209): n is a, c, g, or t
  misc_feature (212)..(212): n is a, c, g, or t
  misc_feature (223)..(223): n is a, c, g, or t
  misc_feature (230)..(230): n is a, c, g, or t
  misc_feature (232)..(232): n is a, c, g, or t
  misc_feature (234)..(234): n is a, c, g, or t
  misc_feature (240)..(240): n is a, c, g, or t
  misc_feature (243)..(243): n is a, c, g, or t
  misc_feature (246)..(246): n is a, c, g, or t
  misc_feature (248)..(248): n is a, c, g, or t
  misc_feature (257)..(257): n is a, c, g, or t
  misc_feature (261)..(261): n is a, c, g, or t
  misc_feature (264)..(264): n is a, c, g, or t
  misc_feature (272)..(272): n is a, c, g, or t
  misc_feature (277)..(277): n is a, c, g, or t
  misc_feature (280)..(280): n is a, c, g, or t
  misc_feature (291)..(292): n is a, c, g, or t
  misc_feature (294)..(294): n is a, c, g, or t
  misc_feature (296)..(297): n is a, c, g, or t
  misc_feature (305)..(305): n is a, c, g, or t
  misc_feature (312)..(312): n is a, c, g, or t
  misc_feature (321)..(321): n is a, c, g, or t
  misc_feature (330)..(330): n is a, c, g, or t
  misc_feature (334)..(334): n is a, c, g, or t
  misc_feature (340)..(340): n is a, c, g, or t
  misc_feature (345)..(345): n is a, c, g, or t
  misc_feature (347)..(347): n is a, c, g, or t
  misc_feature (357)..(357): n is a, c, g, or t
  misc_feature (513)..(513): n is a, c, g, or t
tgcgagtgtgaggccantcacanncccnttganaagagagattcancgnatcctgnacgcagatccggacttcagacccaggaaaggttgaggagactgggcctggtctnctttcccggcctnaaaaatnccccgagtttncagnntcaggnaanagaaacnntgggnntnggcaatcactnccttttccccactncctgtnttcncanganccacgggacanaagacgntngncctctnctnccngnccacgttantccncanctcacccnaacanagnacaaccctganntntnncatatggncacctgncactgggantcgggggancacntccagncgtgntncatcctgggncagaacgccatggctcctccccgctctcttggcttctgcctgttggggtctcattcctttctgttccccagtgccccggggcggcattttactgctcagaatttggagggagggagcagtaccttcccggagtccacgcatgtgagttgggtcaantgcattggacctagggaaagagaaagaaagaataaaagctggagagagagtgaagtgaatgcaagatacaaagtgggatggaagaattaaatccagagttccaggcaatcaaaatgagtgcaggttgaaagaaaacaggtgaattttagtggcatatggatgataaagctgtaaataaaattcttttgatgaaactctccggttacgagacaaagactgtaactgaacaggagctggtgtgactgttaccagacagaggcaactgatgaaaaagccctgtgaaagataggatgtgaggtgagcatgagcttgagctgagagacagacacaacagtatctgaaaagaatacatactctttccatgcatatatggaacatggatggaaactgaccacctactttgtccagaaaagaagtcttaagatatttcaag

SEQ ID NO: 258470 - DNA, 1139 bp, Homo Sapiens
  misc_feature (312)..(312): n is a, c, g, or t
gaagactgaataagccgtgaactgggcagctgtgacacgcgcaccttgtcaccttgtcaccaatttcctgcccgggatcccagagctacccttcttggagcccacaggggcagtcccttggcgggtccctgcgagcccgtggagactgccagagatgtcctctttcggttacaggaccctgactgtggccctcttcaccctgatctgctgtccaggatcggatgagaaggtattcgaggtacacgtgaggccaaagaagctggcggttgagcccaaagggttccctcgaggtcaactgcagcaccacctgtnaaccagcctgaagtgggtggtctggagacctctctagataagattctgctggacgaacaggctcagtggaaacattacttggtctcaaacatctcccatgacacggtcctccaatgccacttcacctgctccgggaagcaggagtcaatgaattccaacgtcagcgtgtaccagcctccaaggcaggtcatcctgacactgcaacccactttggtggctgtgggcaagtccttcaccattgagtgcagggtgcccaccgtggagcccctgggacagcctcaccctcttcctgttccgtgggcaatgagactctgcactatgagaccttcgggaaggcagcccctgctccgcaggaggccacagccacattcaacagcacggctgacagagaggatggccaccgcaacttctcctgcctggctgtgctggacttgatgtctcgcggtggcaacatctttcacaaacactcagccccgaagatgttggagatctatgagcctgtgtcggacagccagatggtcatcatagtcacggtggtgtcggtgttgctgtccctgttcgtgacatctgtcctgctctgcttcatcttcggccagcacttgcgccagcagcggatgggcacctacggggtgcgagcggcttggaggaggctgccccacagttccggccatagcaaccatgagggcatggcccacaccacggtggtcactggaactcagtgtgactcctcagggttgaggtccagccctggctgaaggactgtgacaggcagcagagacttgggacattgccttttctagcccgaatacaaacacctggccccaaaa

SEQ ID NO: 258471 - DNA, 300 bp, Homo Sapiens
  misc_feature (176)..(176): n is a, c, g, or t
ggatggaacctcgcgacgcgctctcgggcatcggtttctcccagcaaagcttggagggtttagctgcgcggaagagctcagcgagctcttctgtgtctgtttggggcgtgtgggctccgggagcgtgaggaccgggaagctaggaggctccttcccttctggcggctccctcactnagaccgggcggtttggttgcgggggaagtggagacgagccacccttgacctttgactgcaagaactcaccttgagcaggatagagcaaacattgagtgggccagacactgttctgaaaaatacg

SEQ ID NO: 258472 - DNA, 964 bp, Homo Sapiens
ttttccataggaaagaatatataaatttgtaaatcctaattcaaagatggctcgtgtgtgagggcattgagtttgatttgttttccctttggtctgggttgtgtggcttttgggggatgcgtgtgagggggctatgtgttttttaattttttaaatatatattttggtgctgtgtgtggtaagagacttgttcctagtggatcaatgaaccatctcttctgggcagttttgttgaaaataaaggtttctctttgatttcaagaatgaccaaaatggcctctaaaagatgttaatcatctcaaatgaccttttgtctttggggcgttcttccccctgtgatagcggcagtggctttttctggtacctgcagctggaaaggccacttggcgctgtgctgagtgagcggccttcattagagcgaggcagcccttggccggtggggacgcagagccccagcaggtggtgcacgactgctggcggaaggaacgcgtgttcatcctcagtgatctgccctccaggatctcggcagcgtctcatcctccatcgtcagccggctatgccgatgtcctgcttctgttcactcacagaactgttccctgctccgtggtgggcaggagggaagtggtgcaggtctgcgtgcattgtctgagagtcgtgacagttgatgggcacatggccttgtagctctggacacagatgtgttctgaattcattgcattggaccaccgggcactgttgaccctactgagcagtgcttagtgttggtctagcggttgttcgttggaattgactgatccatccaaggtctgttctttggagccagttgagcctgacggtccatctgtttgggtagaacgctgctagcacttgtaatttgggatcttttccttatttttatgtccttatggtttcttttaccagttttgtgtctagcttctggtgtgccagacttgtccattaacct

SEQ ID NO: 258473 - DNA, 712 bp, Homo Sapiens
  misc_feature (139)..(139): n is a, c, g, or t
aaaaaagcaggctggtaccggtccggaattcccgggatagcggccagggtaacgctgtcttgtggacccgcacttcccacccgagacctctcactgagcccgagccgcgcgcgacatgagccacgggaagggaaccgancatgctcccggagatcgccgccgccgtgggcttcctctccagcctcctgaggacccggggctgcgtgagcgagcagaggcttaaggtcttcagcggggcgctccaggaggcactcacagagcactacaaacaccactggtttcccgaaaagccgtccaagggctccggctaccgctgcattcgcatcaaccacaagatggaccccatcatcagcagggtggccagccagatcggactcagccagccccagctgcaccagctgctgcccagcgagctgtacctctgtgggtggacccctatgaggtgtcctaccgcattggggaggacggctccatctgcgtcttgtacgaggaggccccactggccgcctcctgtgggctcctcacctgcaagaaccaagtgctgctgggccggagcagcccctccaagaactacgtgatggcagtctccagctaggcccttccgcccccgccctgggcgccgccgtggctcatgctgccgtgacaacaggccaccacatacctcaacctggggaaactgtatttttaaatgaagagctatttatatatatta

SEQ ID NO: 258474 - DNA, 371 bp, Homo Sapiens
  misc_feature (341)..(341): n is a, c, g, or t
ggcacgagcgctgtcttgtggacccgcacttcccacccgagacctctcactgagcccgagccgcgcgcgacaatgagccacgggaagggaaccagcatgctcccggagatcgccgccgccgtgggttcctctccagcctcctgaggacccggggctgcgtgaggagcaggaggcttaaggtcttcagcggggcgcttccagggagggcactcacagagcacttacaaacaccactggttttcccgaaaagccgtccaagggctccggcttaccgttgcatttcgcattcaaccacaagatgggaccccattattcaggcagggttggccagccagattcgngatttaggccaggccccagttgcaccagtt

SEQ ID NO: 258475 - DNA, 1768 bp, Homo Sapiens
  misc_feature (1557)..(1577): n is a, c, g, or t
ggcctgggtggcgaattcggcacgagggacaacctcaagatccgtgatgtggagaagggcttcatgtccaacaagcacgtcttcgccatcttcaacacggagcagagaaacgtctacaaggacctgcggcagatcgagctggcctgtgactcccaggaagacgtggacagctggaaggcctcgttcctccgagctggcgtctaccccgagaaggaccaggcagaaaacgaggatggggcccaggagaacaccttctccatggacccccaactggagcggcaggtggagaccattcgcaacctggtggactcatacgtggccatcatcaacaagtccatccgcgacctcatgccaaagaccatcatgcacctcatgatcaacaatacgaaggccttcatccaccacgagctgctggcctacctatactcctcggcagaccagagcagcctcatggaggagtcggctgaccaggcacagcggcgggacgacatgctgcgcatgtaccatgccctcaaggaggcgctcaacatcatcggtgacatcagcaccagcactgtgtccacgcctgtacccccgcctgtcgatgacacctggctccagagcgccagcagccacagccccactccacagcgccgaccggtgtccagcatacacccccctggccggccccagcagtgaggggccccactccaggccccccctgattcctgttcccgtgggggcagcagcctccttctcggcgcccccaatcccatcccggctggaccccagagcgtgtttgccaacagtgacctcttcccagccctcgcctcagatcccatctcggccagttcggatccccccaggattcccccaggagtgcccagcagaagaccccctgctgcgcccagccggcccaccattatccgcccagccgagccatccctgctcgactaggcctcgaggggggcgtgctctcgggggggcctcacgcacccgcggcgcaggagcttcagtggtctggggccctccgccgcccctatgctgggaccaggctcccagtgggcagccctgtgcctcttccttaacgctggccccggtccagggccggcccctgtgcctggctggacaccgcactgcgcaaaggggccctggagctccaggcagggggcgctggggtgttgcactttgggggatggagtctcagggtggcagaggggggaccagaacccttgacaccatcctgaatgaggggtccagcctgggggggactctaccaaggtcttcttgggctgggaaagcccatgtagggcaggccttctataagtgcgggcaccaagggcgcctacatccccaggccttgctggggtgcaggggtatatcaacttcccattagcaggagctccccagcggcaagcctggcccagtgggctcggtagtgcccagctggcaggcctgaggtgtacatagtccttcccggccatattaaccacacagcctgagcctggcccagcctcggctgccagaggtgcctttgctaggcccggagccgttggcccgggccggccttgccctatnnnnnnnnnnnnnnnnnnnnngggtcccccagggtggctgggcttgggctatgtgggtggtggtggcggggggtcttgggggcctctcagctcccgcccatgcctccctgatgggtgggcccagggcggcctctctctgaggagacctcacccactcctcgctcagtttgaccactgtaagtgcctgcactctgtattctattaataaacta

SEQ ID NO: 258476 - DNA, 1471 bp, Homo Sapiens
  misc_feature (1191)..(1191): n is a, c, g, or t
  misc_feature (1248)..(1248): n is a, c, g, or t
  misc_feature (1251)..(1251): n is a, c, g, or t
  misc_feature (1253)..(1253): n is a, c, g, or t
  misc_feature (1259)..(1259): n is a, c, g, or t
ggcctgggtggcgaattcggacgaggctggggcgggcggaaggagagccaggccggaaggaggctgccggagggcgggaggcaggagcgggccaggagctgctgggctggagcggcggcgccgccatgtccgacagcgagaagctcaacctggactcgatcatcgggcgcctgctggaagtgcagggctcgcggcctggcaagaatgtacagctgacagagaacgagatccgcggtctgtgcctgaaatcccgggagatttttctgagccagcccattcttctggagctggaggcacccctcaagatctgcggtgacatacacggccagtactacgaccttctgcgactatttgagtatggcggtttccctcccgagagcaactacctctttctgggggactatgtggacaggggcaagcagtccttggagaccatctgcctgctgctggcctataagatcaagtaccccgagaacttcttcctgctccgtgggaaccacgagtgtgccagcatcaaccgcatctatggtttctacgatgagtgcaagagacgctacaacatcaaactgtggaaaaccttcactgactgcttcaactgcctgcccatcgcggccatagtggacgaaaagatcttctgctgccacggaggcctgtccccggacctgcagtctatggagcagattcggcggatcatgcggcccacagatgtgcctgaccagggcctgctgtgtgacctgctgtggtctgaccctgacaaggacgtgcagggctggggcgagaacgaccgtggcgtctcttttacctttggagccgaggtggtggccaagttcctccacaagcacgacttggacctcatctgccgagcacaccaggtggtagaagacggctacgagttctttgccaagcggcagctggtgacacttttctcagctcccaactactgtggcgagtttgacaatgctggcgccatgatgagtgtggacgagaccctcatgtgctctttccagatcctcaagcccgccgacaagaacaaggggaagtacgggcagttcagtggcctgaaccctggaggccgacccatcaccccaccccgcaattccgccaaagccaagaaatagcccccgcacaccaccctgtgccccagatgatggattgattgtacagaaatcatgctgccatgctggggggggntcaccccgacccctcaggcccacctgtcacggggaacatggagccttggtgtatttntcntntctttntttaatgaatcaatagcagcgtccagtcccccagggctgcttcctgcctgcacctgcggtgactgtgagcaggatcctggggccgaggctgcagctcagggcaacggcaggccaggtcgtgggtctccagccgtgcttggcctcaggctggcagccggatcctggggcaacccatctggtctcttgaataaaggtcaaagctggattcacaa

SEQ ID NO: 258477 - DNA, 904 bp, Homo Sapiens
  misc_feature (841)..(841): n is a, c, g, or t
  misc_feature (885)..(885): n is a, c, g, or t
ccgcgctcgcgcgaggggctgcgagagttaccgcggctgctccagcgctcgccgagccatggcggacgaggagcttgaggcgctgaggagacagaggctggccgagctgcaggccaaacacggggatcctggtgatgcggcccaacaggaagcaaagcacagggaagcagaaatgagaaacagtatcttagcccaagttctggatcagtcggcccgggccaggttaagtaacttagcacttgtaaagcctgaaaaaactaaagcagtagagaattaccttatacagatggcaagatatggacaactaagtgagaaggtaagcttagacagccttgaggaactttactgttacctgctttatcaaaacatggcttcaaaaggtcagctgcatcttcactggattacagaattcttgctgactctcagaagaaattgttggagagaatagtcatacctactttaaaagagaataaattgcctttcctaaattcctctgcttcgctcctttcctggcgttgctctggaaccttgttggtgtctgtgacccaatgactgttagggtcagctagcttcaattgcccctgcactggaagcaaggtttgtcagtaacaccaattaaaatactaccagtgtaagtagaaggtgtgttttgcagatgagaaggtgctaaggatgccttgcttatgttctctgtgttgctgtaataccatgaggggtatgttgtggcaaacctggcctttaagatcaagacgaaccccacctgccctgagaagccgtctgctaccaccacagcctacccgaattgggcctgtcccctaaacccctcacactgagaactgcnttgtgtgggagagagctggttggggttgatcttttccgagtgtnacttacctccttcaagggg

SEQ ID NO: 258478 - DNA, 800 bp, Homo Sapiens; identical to SEQ ID NO: 15515
  misc_feature (579)..(579): n is a, c, g, or t
  misc_feature (582)..(582): n is a, c, g, or t
  misc_feature (586)..(639): n is a, c, g, or t
  misc_feature (647)..(647): n is a, c, g, or t

SEQ ID NO: 258479 - DNA, 390 bp, Homo Sapiens
  misc_feature (42)..(42): n is a, c, g, or t
gttataccccaatagtttcaaaccctccctgccctcacccanctgccttcccttccctgagctccttccccccacaccctcaaaaagagtaccaaagtgattcccatcctgcagagggtaaattcctttgtttaaaaaagtactgtttttccttatcttttcctggttctcctaggtatcagaacaaggtttaatagaaatccttaaaaaagtaagccaacaaacagaaaagacaacaacagtgaaattcaacagaagaaaagtaatggactctgatgaagatgacgattattgaactacaagtgctcacagactagaacttaacggaacaagtctaggacagaagttaagatctgattatttactttgtttattgtctatatgcctttt

SEQ ID NO: 258480 - DNA, 459 bp, Homo Sapiens
agggaagcagaaatgagaaacagtatcttagcccaagttctggatcagtcggcccgggccaggtgtaagcatctttgatttcatttccataaagttagcttgagttagttgaatggggtgattagataccattattgctatcactagatgaaatatttgcttaggctgaaaacacttgagatgtgtaagaagtgtgaagtttataaacctagagaactgtactttaatccctagtaaaagtaccaggtcacttctcttaccaagatgttctccaggtgtgtattaggtaagatttataggaaacaactcatagggccaatcacaaaatgttgctggtagttgacattttgtgtcaactggtgatggggactggggatgggggacttagaggtttttttatgtattgtcagttttagtgtatgttcagagttgttcatcataaaaaccaaaacctgtaga

SEQ ID NO: 258481 - DNA, 646 bp, Homo Sapiens
  misc_feature (174)..(183): n is a, c, g, or t
ggtgctaatgggttaatgcaccagcaagcaaaatattttatgttttgggggtttgaaaaatcaaagataattaaccaaggatcttaactgtgttcgcattttttatccaagcacttagaaaacctacaatcctaattttgatgtccattgttaagaggtggtgatagatactannnnnnnnnncatattgtatagcggttattagaaaagttggggattttcttgatctttattgctgcttaccattgaaacttaacccagctgtgttccccaactctgttctgcgcacgaaacagtatctgtttgaggcataatcttaagtggccacacacaatgttttctcttatgttatctggcagtaactgtaacttgaattacattagcacattctgcttagctaaaattgttaaaataaactttaataaacccatgtagccctctcatttgattgacagtattttagttatttttggcattcttaaagctgggcaatgtaatgatcagatctttgtttgtctgaacaggtatttttatacatgctttttgtaaaccaaaaacttttaaatttcttcaggttttctaacatgcttaccactgggctactgtaaatgagaaaagaataaaattatttaatgttttaaaaaaa

SEQ ID NO: 258482 - DNA, 751 bp, Homo Sapiens
  misc_feature (564)..(564): n is a, c, g, or t
  misc_feature (702)..(702): n is a, c, g, or t
  misc_feature (716)..(716): n is a, c, g, or t
  misc_feature (724)..(724): n is a, c, g, or t
gccccggcagcaggggcggggctgggggaccctccagcagggctgctagggctgcccccggagtcaggtggtgtgatggccacacagtggcaggtggtgggcatgacggtggagcatgtggaatgccaagatgctggtgtccgggaggctcctggtcccttggaaggggcaggcgaggcggggggtgaggaggctgacgagaagcccccccagtttgtgtgccgagagtgcaaggagaccttctccacaatgacgctgctgcgtcggcacgagcgctcacacccggagctccggcccttcccctgcacccagtgcggcaagagcttctctgaccgggctgggctgcgcaaacacagccgaactcacagctcagtgcgcccctacacctgcccccattgtcccaaggccttcttgagtgccagcgacttgcgcaagcatgaacgcacccaccctgtgctccatggggacccccacacccctggagcccctggtggctttgctaggaatgcctgaagaggggccggcctgaagcccatgaccccccagcaccacactccgggagcnccagcccccatcgggggctatctctgtacctccttttgcctggctctgctctttagactccagatccctacccctcagcaactagctcccctgtcggccagctaagagagctgggacagtggaggctggcagaagctngagacgtgactgtntaggagtnacactcattaaagctttcattttggca

SEQ ID NO: 258483 - DNA, 1631 bp, Homo Sapiens
  misc_feature (617)..(617): n is a, c, g, or t
  misc_feature (1166)..(1166): n is a, c, g, or t
  misc_feature (1168)..(1168): n is a, c, g, or t
  misc_feature (1269)..(1269): n is a, c, g, or t
tgaagctgcaggctagatcaaggggaccacagagttgtccagtccccagggtgggggtgccaggagcccttgtcctccgtagcaggtctcagaggctgacgatggggaaatcgcactggtgaagctgccgtggggtcaggaggaacctgcgataagacgcccaacagttagggcaggtgctttgaggtttggagcctgggaccccacaggaagtgacttcgtgctgagctaatgttgcttcatcctggcgccagtctcaggccaagagctgcaggctggcatggctggggggatgtcagcggagtgccctgagcctgggccaggaggtctgcagggccagtccccagggccaggcaggcagtgtccccctcccatcacgcccacctcctggagcctgcccccgtggagggcctacgtggctgccgccgtcctctgctacatcaacctcctgaattacatgaactggttcatcattgcaggagtgctgctggatatacaggaggttttccagatcagtgacaaccatgctggtttgcttcagactgtcttcgttagctgcctgctgctgtctgcacctgtgtttggctacctgggcgaccgacatagccgcaaggtanccatgagcttcggtatcttgctgtggtcaggagctggcctctctagctccttcatctccccccggtattcttggctcttcttcctgtcccggggcatcgagggcactggctcggccagctactccaccatcgcgcccaccgtcctgagcgacctcttcgtgagggaccagcgcacccgcgtgctgggctgtcttctacatctttatccccgttggaagtggtctgggctacgtgctggggtcggctgtgacgatgctgactgggaactggcgctgggccctccgagtcatgccctgcctggaggccgtggccttgatcctgcttatcctgctgtttccagacccaccccggggagctgcctctacctggctctcgtcctggccccgaccaccctgctggcctcctatgtgttcctgggccttggggagctgcttctgtcctgcaactgggcagtggttgccgacatcctgctgatctctagtgtctgcgggccaggcgccctaactcctatctgcagcgcttccgcagcctgcagcagagcttcctgtntncgcctttgtcatcgccctggggggcggctgcttcctgctgactgcgctgtacctggagagagacgagacccgggcctggcagcctgtcacagggaccccanacagcaatgatgtggacagcaacgacctggagagacaaggcctactttcgggcgctggcgcctctacagaggagccctgaggtccctgcctacactcgtcctgcctgcaagcctcccgttggtccccacagcagcagtgcctcggttcctctttggctgtcctcggggactccggctgaggcacatctgccacttttgaattcccggctggagagctggcaggaccctgtggctgggctgggaatggagctgtcagcactctgcgtgggaggcctgggcctgtgcctgcatcccgctcaaggctgccccagcctggggtctccagcctggctgctgctgggccctgaataaagagaggccag

SEQ ID NO: 258484 - DNA, 1619 bp, Homo Sapiens
  misc_feature (11)..(11): n is a, c, g, or t
cgaccgcgggncttcaggcagggctgcagatgcgcggcccagctgtacctcgcgtgtcccgggtcgggagtcggagacgcaggtgcaggagagtgcggggcaagtagcgcattttctctttgcattctcgagatcgcttagccgcgctttaaaaaggtttgcatcagctgtgagtccatctgacaagcgaggaaactaaggctgagaagtgggaggcgttgccatctgcaggcccaggcaacctgctacgggaagaccggggaccaagacctctgggttggctttcctagacccgctcgggtcttcgggtgtcgcgaggaagggccctgctcctttcgttccctgcacccctggccgctgcaggtggctccctggaggaggagctcccacgcggaggaggagccagggcagctgggagcggggacaccatcctcctggataagaggcagaggccgggaggaaccccgtcagccgggcgggcaggaagctctgggagtagcctcatggaagagaagcagatcctgtgcgtggggctagtggtgctggacgtcatcagcctggtggacaagtaccctaaggaggactcggagataaggtgtttgtcccagagatggcagcgcggaggcaacacgtccaactcctgcaccgttctctccctgctcggagccccctgtgccttcatgggctcaatggctcctggccatgttgctgattttgtcctggatgacctccgccgctattctgtggacctacgctacacagtctttcagaccacaggctccgtccccatcgccacggtcatcatcaacgaggccagtggtagccgcaccatcctatactatgacaggagcctgccagatgtgtctgctacagactttgagaaggttgatctgacccagttcaagtggatccacattgagggccggaacgcatcggagcaggtgaagatgctgcagcggatagacgcacacaacaccaggcagcctccagagcagaagatccgggtgtccgtggaggtggagaagccacgagaggagctcttccagctgtttggctacggagacgtggtgtttgtcagcaaagatgtggccaagcacttggggttccagtcagcagaggaagccttgaggggcttgtatggtcgtgtgaggaaaggggctgtgcttgtctgtgcctgggctgaggagggcgccgacgccctgggccctgatggcaaattgctccactcggatgctttcccgccaccccgcgtggtggatacactgggagctggagacaccttcaatgcctccgtcatcttcagcctctcccaggggaggagcgtgcaggaagcactgagattcgggtgccaggtggccggcaagaagtgtggcctgcagggctttgatggcatcgtgtgagagcaggtgccggctcctcacacaccatggagactaccattgcggctgcatcgccttctcccctccatccagcctggcgtccaggttgccctgttcaggggacagatgcaagctgtggggaggactctgcctgtgtcctgtgttccccacagggagaggctctggggggatggctgggggatgcagagcctcagagcaaataaatcttcctcagagcca

SEQ ID NO: 258485 - DNA, 1540 bp, Homo Sapiens
  misc_feature (9)..(9): n is a, c, g, or t
  misc_feature (23)..(23): n is a, c, g, or t
  misc_feature (1451)..(1451): n is a, c, g, or t
  misc_feature (1474)..(1474): n is a, c, g, or t
  misc_feature (1476)..(1476): n is a, c, g, or t
  misc_feature (1478)..(1478): n is a, c, g, or t
  misc_feature (1511)..(1511): n is a, c, g, or t
  misc_feature (1513)..(1513): n is a, c, g, or t
  misc_feature (1540)..(1540): n is a, c, g, or t
tcgcgtgtnccgggtcgggagtnggagacgcaggtgcaggagagtgcggggcaagtagcgcattttctctttgcattctcgagatcgcttagccgcgctttaaaaaggtttgcatcagctgtgagtccatctgacaagcgaggaaactaaggctgagaagtgggaggcgttgccatctgcaggcccaggcaacctgctacgggaagaccggggaccaagacctctgggttggctttcctagacccgctcgggtcttcgggtgtcgcgaggaagggccctgctcctttcgttccctgcacccctggccgctgcaggtggctccctggaggaggagctcccacgcggaggaggagccagggcagctgggagcggggacaccatcctcctggataagaggcagaggccgggaggaaccccgtcagccgggcgggcaggaagctctgggagtagcctcatggaagagaagcagatcctgtgcgtggggctagtggtgctggacgtcatcagcctggtggacaagtaccctaaggaggactcggagataaggtgtttgtcccagagatggcagcgcggaggcaacgcgtccaactcctgcaccgttctctccctgctcggagccccctgtgccttcatgggctcaatggctcctggccatgttgctgacttcctggtggccgacttcaggcggcgggcgtggacgtgtctcaggtggcctggcagagcaagggggacacccccagctcctgctgcatcatcaacaactccaatggcaaccgtaccattgtgctccatgacacgagcctgccagatgtgtctgctacagactttgagaaggttgatctgacccagttcaagtggatccacattgagggccggaacgcatcggagcaggtgaagatgctgcagcggatagacgcacacaacaccaggcagcctccagagcagaagatccgggtgtccgtggaggtggagaagccacgagaggagctcttccagctgtttggctacggagacgtggtgtttgtcagcaaagatgtggccaagcacttggggttccagtcagcagaggaagccttgaggggcttgtatggtcgtgtgaggaaaggggctgtgcttgtctgtgcctgggctgaggagggcgccgacgccctgggccctgatggcaaattgctccactcggatgctttcccgccaccccgcgtggtggatacactgggagctggagacaccttcaatgcctccgtcatcttcagcctctcccaggggaggagcgtgcaggaagcactgagattcgggtgccaggtggccggcaagaagtgtggcctgcagggctttgatggcatcgtgtgagagcaggtgccggctcctcacacaccatggagactaccattgcggctgcatcgccttctcccctccatccagcctggcgtccaggttgccctgttcagggnacagatgcaagctgtgggagagnantntgcctgtgtcctgtgttccccacagggagaggntntgggggaatgctaggggatgcaaaccn

SEQ ID NO: 258486 - DNA, 873 bp, Homo Sapiens
  misc_feature (745)..(745): n is a, c, g, or t
  misc_feature (825)..(825): n is a, c, g, or t
  misc_feature (844)..(844): n is a, c, g, or t
tggaaccctgaggtgtgcacagcgctgggatgccaggttcggcctcgaagcggaggatccctgtgtcccagccgggcatggccgacccccaccagcttttcgatgacacaagttcagcccagagccggggctatggggcccagcgggcacctggtggcctaagttatcctgcagcctctcccacgccccatgcagccttcctggctgacccggtgtccaacatggccatggcctatgggagcagcctggccgcgcagggcaaggagctggtggataagaacatcgaccgcttcatccccatcaccaagctcaagtattactttgctgtggacaccatgtatgtgggcagaaagctgggcctgctgttcttcccctacctacaccaggactgggaagtgcagtaccaacaggacaccccggtggccccccgctttgacgtcaatgccccggacctctacattccagcaatggctttcatcacctacgttttggtggctggtcttgcgctggggacccaggataggttctccccagacctcctggggctgcaagcgagctcagccctggcatggctgaccctggaggtgctggccatcctgctcagcctctatctggtcactgtcaacaccgacctcaccaccatcgacctggtggccttcttgggctacaaatatgtcgggatgaattggcggggtcctcatgggcctgctcttcgggaagattggctactacctgggtgctgggnctggtgctgcgtaggccatctttggtgttcatgatccgggacgctgcgggctgaaagaatcttggcagacgcaaccaaanctggaggggggtccccggngtgccgtggggggccccgggaaaccaaca

SEQ ID NO: 258487 - DNA, 1217 bp, Homo Sapiens
  misc_feature (1002)..(1020): n is a, c, g, or t
gcctgggtggcgaattggcacgaggaggtggcggcggcgaaggatgcacccggcaggcttggcggcggcggctgcggggacgccccggctgccctcgaagcggaggatccctgtgtcccagccgggcatggccgacccccaccagcttttcgatgacacaagttcagcccagagccggggctatggggcccagcgggcacctggtggcctgagttatcctgcagcctctcccacgccccatgcagccttcctggctgacccggtgtccaacatggccatggcctatgggagcagcctggccgcgcagggcaaggagctggtggataagaacatcgaccgcttcatccccatcaccaagctcaagtattactttgctgtggacaccatgtatgtgggcagaaagctgggcctgctgttcttcccctacctacaccaggactgggaagtgcagtaccaacaggacaccccggtggccccccgctttgacgtcaatgccccggacctctacattccagcaatggctttcatcacctacgttttggtggctggtcttgcgctggggacccaggataggttctccccagacctcctggggctgcaagcgagctcagccctggcctggctgaccctggaggtgctggccatcctgctcagcctctatctggtcactgtcaacaccgacctcaccaccatcgacctggtggccttcttgggctacaaatatgtcgggatgattggcggggtcctcatgggcctgctcttcgggaagattggctactacctggtgctgggctggtgctgcgtagccatctttgtgttcatgatccggacgctgcggctgaagatcttggcagacgcagcagctgagggggtcccggtgcgtgggggcccggaaccagctgcgcatgtacctgaaccatggcggtggcggcggcgcagcctatgctcatgtactggctcaccttccaactggtgcggtgagcgcgcccgctgaacctcccnnnnnnnnnnnnnnnnnnnggggccactgtggccgccgaactcatctcctgcctgcaggccccaaggtccaccctgtctggccacaggcaccgcctccatcccatgtcccgcccagccccgcccccaacccaaggtgctgagagatctccagctgcaacacgcaccccccaggcgtggccgctgttacagaaacaataaaccctgatgggcatgga

SEQ ID NO: 258488 - DNA, 1982 bp, Homo Sapiens
  misc_feature (87)..(87): n is a, c, g, or t
  misc_feature (315)..(315): n is a, c, g, or t
  misc_feature (322)..(347): n is a, c, g, or t
ggtatcttgattctctctgaaattttttattatttctgatgtttttttccaggcttgtcatgtgtcaagcgccacttatctgcagcnaccttagaagtagtataattgatctatgttctctcaaaagcaattttttcctagtcacagaactatttcttcttttactactttatttgttctagttattacagaatcaaagaacttcttgaaaagagaatactttcccatgataaccaattactttagaaatactctgcatgacactataattgaaattagatgctaagttttgtccctcagtggctgaacaccccnacctttnnnnnnnnnnnnnnnnnnnnnnnnnnttcaatatttctttttgtaagccatctcttgattttgctatcaccacagaaaaatttgtagagatttgaccccaatacatcaagtactgcagaggcaccaagaccttttctgcttctaaaactgcatttgtggatgtcaccagtctcttaggctgaaactgaaactgcccatgctacaacctttggcgaagtatggagacacctgtgaggacctttttactttttgaaaaatggcaagccaaggacttaacaactgccaactaaaacacaaatccttcacttcacaaaataaaattagatgatcatcttaaaaacattaccaaatgtgcaagctgaatatgaagagaaagcctaactcaggaatatcttccagcccagtttgcatttccatataaactgaacctgcaccccctccctccttcaaatgtttgcctttcaatattttgttaggcaggcaagagtcaagagtcatgccaactctagtaatgtggcctctgttcaaacacctaccacagtgtggcaaagggaaaacagcatgggctaagagtggcctggattcaaatcacagtccttttatttactttctatgtgcccttgagttgtttactttagccccctgggccataatttctttctctgtaaaatgagaatacttgcatgaatatgaaacactgagcagttaataaatacgtgcttaataaatgttaggttctttgttatccctgccagttcatcactttcagttcatccattgccagattctctaacttgctggccaaggtatgttgataatttcctatagctgccactcttctattatcaccctcttcccatagcctctgcaaaatgactgcccatccattaagcctagggcaagccagtctcattccatgatagcatgcctcgccacagaagctttttgcactttaagtaagagttgccaaggcaggcgttgaaattcattctttggcattcttaaggtatagaccagagcaaaggcagagctactcagccactgctccctggcctccaggcagactgctggtccccagctctccaagataggcccttgatctgtgtcccaggcaacacacagcaatctcatgacatttctgggacatattttctactgggatcacagcagctttctagggctctcaataatcttccaatgtttgcatcggtgattgtggtattttcccccaagaaaaccagagtcaaaccatgtttctttaaagggactgtggccctattagccatgctttcatggccaaaatctgcacacctgtctgctttattcaggatagagcagggaggccacagccctgaaacaagggctcaaaaatcacttcctaggtgaggtcagtaaggcctcacagagactactattgggggcaagcagcaggtgaaatgatggtcacttgactcttttactcctggtttcttagcaacctggcctttgagactgggtacagtggagtgagttcaaccgggccacctggatatgcccttgatttagaatggcatcaagtttccactcaattactttcaaaaaggctctcagtgtacttggccttacatgttcctaactcaccaataaaccatgtttggaattcagtcttgaaaatgactact

SEQ ID NO: 258489 - DNA, 750 bp, Homo Sapiens
atggcttgataacttgttttttaaaatcagtgaatcagatttccttgtatggctacaacagtttgtttattctttcgcttggtgaaagacatcttgggcacttccaagttttggcaatgatgaataaaattgctgtaagtatttctgtgcaggattgtgagtaaacttaagttttccaaagtgactgtacccttttgatttccactagcgatggaaagttctggttgctcctcatctttgacagcatttggtgtgttcacctttttgaattttagccattctaaacagcttatctgcccctactgtggaatgatgggacagacatagaataacccactacagtgattctagttcaaaaatgagggaacatggaggggataaagaagtcaataacccaaaatagtttggaaatggagctgggcaaaatccagcaggagtttcttagttaggatccacagcctgggactgaccctctgtcctgtgggtctttgcctctgggctcgtctgctctgcatttcttgaaaccattattatttatcattttttctcgcacttttttgggtatggcttctatcgcactccaaatgtttttgagattcatccatgttgttctgtgtgtcaccagtttgttcctttagccattccatggaatgagtgtatcacagtttatttgatccattcttgtattgacagatactttgaatgtttttcaagttttttgtattatgaaataaaactgttttgaacatt

SEQ ID NO: 258490 - DNA, 971 bp, Homo Sapiens
  misc_feature (101)..(101): n is a, c, g, or t
  misc_feature (446)..(446): n is a, c, g, or t
  misc_feature (832)..(846): n is a, c, g, or t
taagctgctaattacaggctggtcggccggaatcccgggatatcgtcgaccacgcgtccggagaaaggcaatgtctgacattcttggtctctgttagaagntagactctgttgaaaagaaagaagctaagctaggtgtgaagaatggaattggaagcccactgcctttcccataagaaaggtttaccataattaactcacttttttctgtgttagacattttgattatctgcagtttattactacaagcagtggcagagtgaatgtccttgtacattttgagttacatgcttaattatgtccttgagaaagtttctaaaagtggaatgattggtttgactggttcatagggctttaattatacaatttacccctctaattagtactatatgtatgtgacttccctccccctgccagaataccccttggtcaattgtaggtattctntttggtttaatctttgccaatgtaattaaaaaatggtatgtcatttttaaaatttgtatttctttcattacaaataagattgttatgtcagtattgttattggcttttcgtattcctcttaacgtgaaccgtctgttcattgtttttacctgttttcgttttagcaagtagtacttaatttaaagtgtgaacttaatatataagatgccaggaccatcatattgatgacaaaaaatctattatgtgggtgtagttgcatgtcttggagttaaactcttaagtatcaagaagtaaaataatttcattgtttctgttactaacattaaaagtgtgcaaattgtataaaattaggtacttcgattagtaaaagaaaaaaatttgaatgnnnnnnnnnnnnnnnattaagcatgcccagttatgccaagcatagtaaataaaggtcaagtagcatttataatagaggaagtattgttatccctagcatgagtgtaatggtgatatgaaaaactttgtcttgtcattata

SEQ ID NO: 258491 - DNA, 1304 bp, Homo Sapiens
  misc_feature (255)..(255): n is a, c, g, or t
  misc_feature (313)..(313): n is a, c, g, or t
  misc_feature (315)..(315): n is a, c, g, or t
  misc_feature (326)..(326): n is a, c, g, or t
  misc_feature (335)..(335): n is a, c, g, or t
caccactcaatacttactaagccttgcagacagctcagagttgaggcagcatattgggcatagagatcataggatttgtattatcccttgcaagatggaactccaaccaacaccagaattttccaattcaaattcagttttagtcgagaccccagcataatttttagaaaaaagattggattgttgcttttcttttaattttccattcctatttagacaaatgaccagaggcaatgacaaaagtaactgtttaanagggatttctctccagaagttttttctaaaggtttaagtccaggctttccatccttcncnccatccttttncattttaanaagaagggttttggaatatgtcaacctttactcagcttgctatacaaagccactgctttagtcctagacataatgccaggactcatctcccaaacttctggtcttaatcaagttcatgcttggttgctaaagaagctcatgttaatcccaaagtcagcacaatcccaaccttaaaaagcagacagctgattgcatcacttacgacatacaccatcttgaggcaaaagaagccagtcagacaccccttgtctgctacgtgtgagacacatcagcagttgagcctgaccccttccgcagagctcactgtgcaaaatcaccagcacaccactgcaatccactgagctcaccgcctgtccagccataatggaagtcacttgaaggttatcattgtaatagatgattttccataagtaactaataaaaatgttttctttgatgtttagacctactaacgattcagtctctccctctccatcctctcttagggagcctgtacttttaagcaaatagggaagctaaaaatacaaaggagcaacatccatttataaataaatgtgtgcctttatcttccacactaacttcctggaaaagtgcttgtttttgaatattctgttttcttaaggagaaattttttgtaaatgtagcacactgtatataggaagggatttctctttttagtctttatctcattgtactgggtttcactctctaggtattgagagtgggggaggaggggatcaacaaaccgcaaagagcagcataaagcacaccccgtatcagcagcacggcagctcctccaatatcgtcaatgctgactcgaggtaatttctggtggagttgaacacatcattaaatttctatttgtgttctgcctgaggcttttccctaaccactaattgcaagtgaaggtcccagagagcttttgtgaaaggaacagaacacagccacgtcctggtctgtagccaggtg

SEQ ID NO: 258492 - DNA, 1049 bp, Homo Sapiens
  misc_feature (21)..(21): n is a, c, g, or t
  misc_feature (385)..(385): n is a, c, g, or t
  misc_feature (980)..(980): n is a, c, g, or t
  misc_feature (994)..(994): n is a, c, g, or t
  misc_feature (1030)..(1031): n is a, c, g, or t
  misc_feature (1036)..(1036): n is a, c, g, or t
  misc_feature (1041)..(1041): n is a, c, g, or t
  misc_feature (1045)..(1045): n is a, c, g, or t
ttcccgggatgccgaagtgtntccggaaggaggcgaaccctgaggcgggcccggcaagccttccctgcggccggcagagcccaacgactagtgggactccgcgggggcgggggtagctggagcctggctctggcctggcaggagccgagctcgttccggaagaagccgagcggacgggggccagcctcagcgtcccgggagtgaggcgatagctgcggcggcgacagcgcgggccgggatgaaccgcgacggctgaggcagcggaggtgccggctgcgcgggccccagtgagactccctcgaagcgccagcccaccgttcggggctttgcctcgagccgagccctgcccccgcgagcctcccggacccctttgtgcggccggagnggcggcgggaacggccatggcggccaacatgtaccgggtgggagattacgtctattttgagaactcttccagcaatccttacctggttaaacggattaaagaactcaacaagactgcaaatggaaatgtggaggcaaagagttgtctgtcttttccggcgcagggacatttctagtagcctcaacagcctggctgatagtaatgccagggagtttgaagaggaatcaaagcagccaggggtgtctgagcagcagcgccatcaactgaagcaccgggaactttttctttctcggcaatttgaatcattaccagccacccacatacgggggaaatgcagtgtgaccctcttgaatgagacagatatcttgagccagtacctggaaaaggaggactgctttttttactcactggtgtttgaccccgtgcagaagacacttctcgctgatcagggcgagattagagttggttgcaaataccaagctgagatcccagatcgcctagtagagggagaatctgataatcggaaccagcagaagatggagatgaaggtcttgggaccagacaaccctctcacagacgggagatcgaccgtttnttgtggtggccganctgtgggaactttgcaaaaccctagattgtagcagnncattnggcancaanttgc

SEQ ID NO: 258493 - DNA, 1217 bp, Homo Sapiens
  misc_feature (956)..(956): n is a, c, g, or t
  misc_feature (1027)..(1027): n is a, c, g, or t
  misc_feature (1184)..(1184): n is a, c, g, or t
  misc_feature (1190)..(1190): n is a, c, g, or t
  misc_feature (1212)..(1212): n is a, c, g, or t
gctccgggtcccggcgccgcgccatgtgggctgcggcgggcgggctgtggcgctcccgcgcgggtctccgggccctgttccgtagccgcgatgctgcgctatttccaggctgcgagcggggacttcactgctctgctgtctcctgcaagaactggctcaagaaatttgcctcgaaaaccaaaaaaaaggtttggtatgaaagtccttccttgggttctcactcgacttacaaaccatccaagttggaattcctcatgaggagcacctcaaagaaaaccaggaaggaagaccatgcgcgcctgagggccctgaacggcctcctctataaggcactgacagacctgctgtgtacccctgaagtgagtcaggagctgtatgaccttaacgtggagctctccaaggtttccctgactccagacttctcagcctgccgagcgtactggaagacaacgctctctgctgagcagaacgcacacatggaggctgtcctgcagagaagtgccgcgcacatgaggcaccttttgatgtcccagcagaccctgaggaatgtgccaccgatagtgtttgttcaagacaagggaaatgcagctctagctgagcttgatcagttactggcagtcgcagactttggaccccgggatgaaagagacaactttgtacaaaatgatttcagggaccctgatgccccacaaccctgcggcaccacagagccgaccacaagctccagtctgtgtgggatcgatcatgaggcgctcaacaagcagattatggagtacaaaaggaggaaagataaaggggcgccgggggcctggtgtggcaggggcacggtggctgagctgacaacgcagatgaaaaagggaaggaagagggccaagccccgcctggagcagaacagctccctcaagcagttacctatcaggcgaggaggttgaagatgacctggacctggtgtgggngccgcgcggagtacgaagtgctatgccgcgcggagacagaggagttggaggcagagagaggaggtggcagnacagaggatggccacagctgcggagcaagcagggagtagatggagaggctctgcccatcccacatttgcagggaaaagcattggcacgcaacgcagcatgtggcttcatataaggcagttgatggagttaaaccatctgttcttctgctacttcaanattttntagcttttccgtgtatctaaanaaaat

SEQ ID NO: 258494 - DNA, 1996 bp, Homo Sapiens
  misc_feature (12)..(12): n is a, c, g, or t
  misc_feature (16)..(16): n is a, c, g, or t
  misc_feature (41)..(41): n is a, c, g, or t
  misc_feature (49)..(49): n is a, c, g, or t
  misc_feature (57)..(57): n is a, c, g, or t
  misc_feature (70)..(70): n is a, c, g, or t
  misc_feature (82)..(82): n is a, c, g, or t
  misc_feature (84)..(84): n is a, c, g, or t
  misc_feature (93)..(93): n is a, c, g, or t
  misc_feature (103)..(103): n is a, c, g, or t
  misc_feature (115)..(115): n is a, c, g, or t
  misc_feature (134)..(134): n is a, c, g, or t
  misc_feature (143)..(143): n is a, c, g, or t
  misc_feature (159)..(159): n is a, c, g, or t
  misc_feature (231)..(231): n is a, c, g, or t
  misc_feature (273)..(273): n is a, c, g, or t
  misc_feature (276)..(276): n is a, c, g, or t
  misc_feature (301)..(301): n is a, c, g, or t
  misc_feature (325)..(325): n is a, c, g, or t
  misc_feature (343)..(343): n is a, c, g, or t
  misc_feature (360)..(360): n is a, c, g, or t
  misc_feature (378)..(379): n is a, c, g, or t
  misc_feature (430)..(680): n is a, c, g, or t
  misc_feature (726)..(726): n is a, c, g, or t
  misc_feature (751)..(761): n is a, c, g, or t
  misc_feature (866)..(866): n is a, c, g, or t
  misc_feature (931)..(931): n is a, c, g, or t
  misc_feature (956)..(956): n is a, c, g, or t
  misc_feature (974)..(974): n is a, c, g, or t
tcctaagcccangaantccgcccccgcagagcaaaaaacangaccaaanagaaaaanggaaaaaacagangcaaaggagatngngtgtcccangtgagctgtnacagataaaagnaaaaaaaggaaacctaagngctcaaagntaacacagctaactcntaggaaaagagggatgtatgctgagatgtttgtgcaccccagatagcactgtacgataacctgaaaagtatnactgaatactgaatagctgacactgcaattggaaaatctgangangacgaggaaatataacgttcccagncccttgagctctatctgctaattnctttgcctgttttcactntcgccaagtaccaacangctcatgttgtatttctnnttaagaacttcaacatcataagctctcagtaccctattttgttgttgttgnnnnnnnnnnnnnnnnnnnnnnnnnnnnnnnnnnnnnnnnnnnnnnnnnnnnnnnnnnnnnnnnnnnnnnnnnnnnnnnnnnnnnnnnnnnnnnnnnnnnnnnnnnnnnnnnnnnnnnnnnnnnnnnnnnnnnnnnnnnnnnnnnnnnnnnnnnnnnnnnnnnnnnnnnnnnnnnnnnnnnnnnnnnnnnnnnnnnnnnnnnnnnnnnnnnnnnnnnnnnnnnnnnnnnnnnnnnnnnnnnnnnnnnnnnnacgggagccactgcgcccagccacagacctcactgtcttaacccancccaatccccctgttgagtctctgnnnnnnnnnnnaatccgatttgggatttcgctgatgagatgatactaaacattgagaggactgctttttactctgacttttattgtgttgtctttgaaagacaaatagtacaactntttacaaggaaacacgtaagagatggatgtccatgaaaacaatattagtatattctattattgtntcttattaatagttacttagtattnacaaacaatttattattngctgtgttaacttttattctatgcttcatatgctctgacattgacatagtggatttctgctgatttttttcaaatccgcaatctttataaccaactgaagtatataatagagcattacattttatctttatttgtgttctgttggatcaagtatttaacatttgctctgaaaaaaatgtttttgtgatgtgtctttgttgccttgagatagatccgtttatcctgcctcctagggagaagtttctgcctggatcgaaacaaaaaaacacaggcgtcacaagcatgttacctattaagagagagagggtatctctgaagactaattaaaatggtaatttttaaaaagatgtgaccagttgacttttagtatatcatcccaagtattatccccaaaatgataatgcaaaacagaataatttggagaccaggagaaaaactggtatgattactggggaggggaagaagcacaggtggtcaagataataatgcatgtttggcctcagctgtagttgccaaagaaactacctgcctcacagatgagcacgcacgggtgcattgtcaaagtctgagaaggatgtattgtactttgaaggaagactttccatttctaagctaccatggagaagtatatgctcctcgagaccagagactgtgacttctgcatctttgattccagcgacatatgataaaatgttttgcacatagttgaatccagcgttgatacatgaaggacagcattacatctcttttctattatacttagaaatttcctctttgttctgcaccaccaacctgtatatcaagcctccttgccccacaaagcttccaaagcccgtaaatttgttaatctagagcaggggtcagcaaactaccacccatgggccaaatctggcctgctgcctatttttgtatggcctacaaactatggtttttatattcccttttgttaatggctcaaaataatattttgtataatatgaaaattacgaaattttagtttctctaaataaagttttggaaag

SEQ ID NO: 258495 - DNA, 1090 bp, Homo Sapiens
  misc_feature (14)..(14): n is a, c, g, or t
  misc_feature (942)..(942): n is a, c, g, or t
  misc_feature (984)..(984): n is a, c, g, or t
  misc_feature (1042)..(1042): n is a, c, g, or t
  misc_feature (1078)..(1078): n is a, c, g, or t
tgggtggcgaattncggacgagggtctgattcctcaccgcagaaccgacttagtgcctttaaatccagtccctcagccttgtgcttcccatccgaccagccatcggggacctctagcttcacatcctctttccttgcagctctggacatcctgagcccaagtcccccacactcagtgcagtgatgagtgcggaagtgaaggtgacagggcagaaccaggagcaatttctgctcctagccaagtcggccaagggggcagcgctggccaaactcatccatcaggtgctggaggcccctggtgtctacgtgtttggagaactgctggacatgcccaatgttagagagctggctgagagtgactttgcctctaccttccggctgctcacagtgtttgcttatgggacatacgctgactacttagctgaagcccggaatcttcctccactaacagaggctcagaagaataagcttcgacacctctcagttgtcaccctggctgctaaagtaaagtgtatcccatatgcagtgttgctggaggctcttgccctgcgtaatgtgcggcagctggaagaccttgtgattgaggctgtgtatgctgacgtgcttcgtggctccctggaccagcgcaaccagcggctcgaggttgactacagcatcgggcgggacatccagcgccaggacctcagtgccattgcccgaaccctgcaggaatggtgtgtgggctgtgaagtcgtgctgtcaggcattgaggagcaggtgagccgtgccaaacaacacaagaagcagcagctgggcctgaagcagcagattgagagtgaggttgccaaccttaaaaaaaccattaaagttacgacggcagcagcagccgcagccacatctcaggaccctgagcaacacctgactgagctgagggaaccagctcctgggcaccaaccagcgccancccaggcaagaaagcctcaaagggcaaggggctccgagggangccaagatttggtccaagtcgaattgaaagaactgtcgtttcctccctgggggatgtngggtcccagctgcctgcctgccttttaggggtcctnagagagccttct

SEQ ID NO: 258496 - DNA, 1504 bp, Homo Sapiens
  misc_feature (791)..(1094): n is a, c, g, or t
  misc_feature (1152)..(1377): n is a, c, g, or t
tgaaagattcaaacaccgaaatcgatctttttcaagatctaaatccaattcaagatcacggtccaagtcccagcccaagaaagaaatgaaggctaaatcacgttctaggtctgcatctcacaccaaaactagaggcacctctaaaacagattccaaaacacattataagtctggctcaagatatgaaaaggaatcaaggaaaaaagaaccacctagatccaaatctcagtcaagatcacagtctaggtctaggtcaaaatctagatcaaggtcttggactagtcctaagtccagtggccactgatagtataaaccatggtcatttttaggcatgtatcattcatttactcatagtttggtttacttaaattatcaggaatacaatgttgcaatgatgcttaaaaaacacttgttagttttccctgtaccaggcaatggttataattaaaatgatatgctgttgagaagccactcttaagagtccagtttgtttaatgttatgggcagctaccaatttgtggtgtctctgtatatttttgtaaagattctcattttttatgcttgaagtatttggtgaaaagatgttggttgaccataattttgcaacattgtctcattaaaaataaactttcatattcatatttggtagaactgttaacctagaaatgtagcttgctaataagatagaatgatacaaaagtgaagtagtagccacagtacaacactgactgctcagacacatttaggttcagggtggacctttatgtcttgtcaagatgtctaggcccgtnnnnnnnnnnnnnnnnnnnnnnnnnnnnnnnnnnnnnnnnnnnnnnnnnnnnnnnnnnnnnnnnnnnnnnnnnnnnnnnnnnnnnnnnnnnnnnnnnnnnnnnnnnnnnnnnnnnnnnnnnnnnnnnnnnnnnnnnnnnnnnnnnnnnnnnnnnnnnnnnnnnnnnnnnnnnnnnnnnnnnnnnnnnnnnnnnnnnnnnnnnnnnnnnnnnnnnnnnnnnnnnnnnnnnnnnnnnnnnnnnnnnnnnnnnnnnnnnnnnnnnnnnnnnnnnnnnnnnnnnnnnnnnnnnnnnnnnnnnnnnnnnaaatcatgtagggcccccagcggccccccgagacggttactaaaccccttccttttgnnnnnnnnnnnnnnnnnnnnnnnnnnnnnnnnnnnnnnnnnnnnnnnnnnnnnnnnnnnnnnnnnnnnnnnnnnnnnnnnnnnnnnnnnnnnnnnnnnnnnnnnnnnnnnnnnnnnnnnnnnnnnnnnnnnnnnnnnnnnnnnnnnnnnnnnnnnnnnnnnnnnnnnnnnnnnnnnnnnnnnnnnnnnnnnnnnnnnnnnnnnnnnnnnnnnnnnnnnnnnnnnnnaacacactctccacatctacatctttccctccccccaccaccctaatctcttttatctatcacccacactttacctcctaaccttcatttcacttcattcctctcttacctcaaaacacatataaaa

SEQ ID NO: 258497 - DNA, 1766 bp, Homo Sapiens
  misc_feature (1221)..(1221): n is a, c, g, or t
  misc_feature (1281)..(1281): n is a, c, g, or t
  misc_feature (1333)..(1333): n is a, c, g, or t
  misc_feature (1438)..(1438): n is a, c, g, or t
ccgggatcgcagtgaggggggtcggcgcgcgtgtctacgcggacgcaccggctaagctgcttctgccgccgccggccgcctgggaccttgcggtgaggctgcgcggggccgaggccgcctccgagcgccaggtttattcagtcaccatgaagctgctgctgctgcacccggccttccagagctgcctcctgctgaccctgcttggcttatggagaaccacccctgaggctcacgcttcatccctgggtgcaccagctatcagcgctgcctccttcctgcaggatctaatacatcggtatggcgagggtgacagcctcactctgcagcagctgaaggccctactcaaccacctggatgtgggagtgggccggggtaatgtcacccagcacgtgcaaggacacaggaacctctccacgtgctttagttctggagacctcttcactgcccacaatttcagcgagcagtcgcggattgggagcagcgagctccaggagttctgccccaccatcctccagcagctggattcccgggcctgcacctcggagaaccaggaaaacgaggagaatgagcagacggaggaggggcggccaagcgctgttgaagtgtggggatacggtctcctcagtgtcacactcatcaacctcgcctccctcctgggagccagcgtcctgccctgcacaaagaaaaccttttacaacaggctgctgcacttacttcatagccctggccattggaaccctgctactccaacgccctattccagctcatcccagaggcatttggtttcaaccctctggaagattattatgtctccaagtctgcagtggtgtttgggggcttttatcttttctttttcacagagaagatcttgaagattcttcttaagcagaaaaatgagcatcatcatggacacagccattatgcctctgagtcgcttccctccaagaaggaccaggaggagggggtgatggagaagctgcagaacggggacctggaccacatgattcctcagcactgcagcagtgagctggacggcaaggcgcccatggtggacgagaaggtcattgtgggctcgctctctgtgcaggacctgcaggcttcccagagtgcttgctactggctgaaaggtgtccgctactctgatatcggcactctggcctggatgatcactctgagcgacggcctccataatttcatcgatggcctggccatcggtgcttncttcactgtgtcagttttccaaggcatcagcacctcggtggccatcctctgtgaggagtntccacatgagctaggagactttgtcatcctgctcaacgctgggatgagcatncaacaagctctttttttcaaacttcctttctgcctgctgctgctaccctggtcctggcctttggcatcctggccggcaggcactttctctggcaactggattttngcgctagctggaggaaagttcttggatatttcttctgcctgaaatgttcccctgagaggaatgaggtcttgtaagaaggatgaaaggaaggcgagcatctttgattcccattattattccaaaccctggccctctgactgaatttaccatcaggggggcctcaccatgtattcaggaaaaatccaaatgggtggggctttgccaaaaccttgggattggaagtgggccttgggtgcccaaatccacccggggcttccctccaatgcccccggagaggcggcttttgaaaataacacaacggtttctggttaaagtgaccggtggaaaa

SEQ ID NO: 258498 - DNA, 1734 bp, Homo Sapiens
  misc_feature (127)..(127): n is a, c, g, or t
ggagataggttgggatcggggctccacgtcttttttaagcccttgagccaccacaggcaaagacccgtagttgccccttcattccaaagccatttctggcaatttggggtgtgacaaatttgccgtntaacgtggcaactcccccgccaaggttttcccatttagacaatgggcattgaggtggggggcccactccaaaatgtccttgggggtcctgaaatatttccctgcatctagctcaggtggccaggccaagggcctttgcacatcattttgctctacccaaagacagaagtcgaagtctcagcctcaagctcagggatatggtccaaagaggtggcaatttagcttgaagtccctgagcaagagtaaaagccaggaggaccccaggcctgaataagcgcactgccccagggttcccaaggggagaggagctatagttctccaggtgcaaagatcaccctcagagctcacacctgaggtaaagggcatgcaccaggaggagcagggtttttgcccataggggtggcccaggccagatactgccccagccactttcaacctccccagtcccatcctcccactagccagggcaacagcagctattacctgttcagctggagctggatgaacttcccaaagcgactgctgttgttattcctcagtgtacacgcattccctacagatcacacctatgtttatttcactcccctgggtttgcagagtcctcataagccaaggtggctgcaggtctctggaggtcatgttcccgtgctcaagtcacctaaaggcccctttgttggttttcatgtcataggggacaggactagaaaatgggccctcatgctttagcaagtgggattcaggggagttagaagaaattcctggcaagaaattggaatgagcaagcctaggcagtcagggacctttctttgaagggaaaggtcaaaaacaatcagctgtcactactgactttagacaggaaggcacatctgggttccagtgccaacacaaacactaatcaccttgtatcccttaacaagtacccttcattgaaccatcaggaaactggatagaaagacagaatttggacgagctaagccaccaggtcttctccagcacgactgttatgtgtgcctaggctggagcgaggaagaggactgaatgacatgacctctgttagaatgatgctaaggagtaccagggagaggttggggatctgaggcagtgaaggatacactcatcctccacccccacccaagagagggtctcaaagcactgtccctctccctggaaggtggaaaatcccagaggaaatgggactgagatactgtgcaaaggagcccaagctcaccaaaagcttccatgacagggttggagttcaggatcctctgttctatcctctctgcaatcttgtggctctcccaagatgcaggtgaggtggccaccacagcatagaacttcattaggcagcgagacgtccatgtctgtggcagaaacagccctgtgggagctgtatctatgctcccgcccacttctgagcctgcctgagagaacagtgcccaccagagctctcttctccaccagtgtgttgctgacaaaatgggtgaaggcagaattcaaccctggcctcaggcaaggcacttcctctacctctgtttgtaaaatgggagtagacatctgtttctctcagctctgtggcagacactgagctatcgaggctttctgtgtatg

SEQ ID NO: 258499 - DNA, 958 bp, Homo Sapiens
ggcctgggtggcgaattcggcacgaggcttgtctgagattcctccagaactgagccctttgttggaaccataccccagcccatggtcccatgactaggtggatagtactccttgtacctcctgcaacccagaaccctggctgaccactttgaaggaggatgctccagcaggtcaatggccacaatccggggtctgatggccaagccagggagtacctcagagaagacctgcaggagttcctgggtggggaggtcctgctgtacaaactggatgacctcaccagggtgaatcctgtgacactagagacagtcctgaggtgcctgcaggcccggtacatggcagacacattctacaccaatgctggctgcaccctggtagccttgaaccccttcaagcctgttcctcagctctactcgcccgagctaatgagagagtaccatgctgcgcctcagccccagaaactgaagccccatgtgttcactgtgggtgaacagacctacaggaatgtcaagagcctgattgaaccagtcaaccagtctattgttgtcagtggagagagtggtgctggaaagacatggacgtctcgctgcctaatgaagttctatgctgtggtggccacctcacctgcatcttgggagagccacaagattgcagagaggatagaacagaggatcctgaactccaaccctgtcatggaagcttttgggaatgcgtgtacactgaggaataacaacagcagtccctttgggaactccatccagctccagctgaacagggctcagcaaatgactggagccgcagcccacacccacctcccagaaaaaactcgaggggcctgcaagcttccacgggagaggaacttccacttcttctaatcaatttgcaaagcaccccccgaggaccaaaaggtcccctgggccccttcctgagggaactgcttcttccgtggtgcccaacc

SEQ ID NO: 258500 - DNA, 1403 bp, Homo Sapiens
  misc_feature (774)..(774): n is a, c, g, or t
  misc_feature (806)..(806): n is a, c, g, or t
  misc_feature (940)..(940): n is a, c, g, or t
  misc_feature (1070)..(1070): n is a, c, g, or t
  misc_feature (1090)..(1090): n is a, c, g, or t
  misc_feature (1097)..(1097): n is a, c, g, or t
  misc_feature (1307)..(1307): n is a, c, g, or t
  misc_feature (1369)..(1369): n is a, c, g, or t
tggggaccaacactgtctggactgatcttggcaacggggtctaaccctgcgctccggctcgcctttgggatccgcggggtccaggttcgacccttggctcctttcacaccaggactacctggggctccattgttgtcttgataccccatgctacccttggccacgatttctcccgagggccctctgcgtcctggtcggtcagggtccaccttgccgccttggtctcctcgctgccctggactccctgcttcccccgggtaaccgacggggccccggtttccagggtctcccttgcagccaggaggtccgatgcgccccagcttgcccttctgtccatcggtcccgttcttgccagccaggccaggggcccccttgcgaccgtcggctccaaattcacccttctctcctttgaagccaggaacgcccttgggtcctgggaatccaatggggccttcgatgcccgggtctccctgtcttcccttctggccaggctctcccggctcacccatgttgcccttggcacccttctgtccacggtagcccttggggccagagggcccaggaatttccaggcagctcaccttgtagcactctccgtaggcttcgtgtgtcatgaccttgatgatgcggttgatggtgtcctggtcgatctcggtggagtcgggcagcagggtggcgtagtcgggccggtagagctcgtgcggcgtgctggcgatgtcccgcaggccctgctccgtcaggttctggttggggagccacggcgaagagccggangcccgccgcgcgggcccgcgcggccggcagcntgatgcccccgcaggggctgcccggtgacgtggccgtcggtgatgaccacggcgaagtggacggtgcccttgctgcggtcctgccggatctgctccgtcatgttggccagcgcgcagtcggtgaaggtgccgcngcggaaggagctgatgccctgcaggttcttgatgaaggaggcccggtcgctgcccggtgggctgaacacctccacctggtcagagaagtgcaggccgccgtagcgccagctcagcgccacctggtccagntagaactcgttctgcagctngctgatnaactgcggcacgaactgcttcatgtggaagagcaggatgtccgtgggggactgcatggtgacgctctccgaggtgtccagcacgaagtacacgtggatggggcagtcggtcttctctgggcagttgttgtttctctcggtagtgtccggcgagatgacctcctgctgctgggcctggatggcccccaggattccccagagcaggagcacngagcaggtgccctggagcatcttggcagcacctgtggccctgaagtcctggtcccgaggagntccgctcccgacggcccgaggcgcgggcgccgag

SEQ ID NO: 258501 - DNA, 1686 bp, Homo Sapiens
  misc_feature (16)..(16): n is a, c, g, or t
  misc_feature (21)..(21): n is a, c, g, or t
  misc_feature (1043)..(1043): n is a, c, g, or t
  misc_feature (1144)..(1144): n is a, c, g, or t
  misc_feature (1147)..(1148): n is a, c, g, or t
  misc_feature (1150)..(1151): n is a, c, g, or t
  misc_feature (1163)..(1163): n is a, c, g, or t
  misc_feature (1170)..(1171): n is a, c, g, or t
  misc_feature (1174)..(1177): n is a, c, g, or t
  misc_feature (1181)..(1184): n is a, c, g, or t
  misc_feature (1188)..(1198): n is a, c, g, or t
  misc_feature (1201)..(1201): n is a, c, g, or t
  misc_feature (1203)..(1203): n is a, c, g, or t
  misc_feature (1205)..(1207): n is a, c, g, or t
  misc_feature (1214)..(1216): n is a, c, g, or t
  misc_feature (1219)..(1219): n is a, c, g, or t
  misc_feature (1221)..(1222): n is a, c, g, or t
  misc_feature (1224)..(1224): n is a, c, g, or t
  misc_feature (1229)..(1233): n is a, c, g, or t
  misc_feature (1235)..(1235): n is a, c, g, or t
  misc_feature (1237)..(1242): n is a, c, g, or t
  misc_feature (1244)..(1245): n is a, c, g, or t
  misc_feature (1261)..(1261): n is a, c, g, or t
  misc_feature (1264)..(1264): n is a, c, g, or t
  misc_feature (1268)..(1269): n is a, c, g, or t
  misc_feature (1273)..(1273): n is a, c, g, or t
  misc_feature (1276)..(1276): n is a, c, g, or t
  misc_feature (1278)..(1278): n is a, c, g, or t
  misc_feature (1282)..(1282): n is a, c, g, or t
  misc_feature (1340)..(1341): n is a, c, g, or t
  misc_feature (1344)..(1347): n is a, c, g, or t
  misc_feature (1350)..(1368): n is a, c, g, or t
aaggcttattagctantgtantgcatagttccacttggcccctttaaaaacgtgtatgtgccttttgaagatacacaaaacactgaggattttagttttgaaatcaaagactattaaaggagctgtacagaggtaaaaaaataaatgtggaacattattaacttattttgtgtctaggaacaatggattttgtatctgatttaaaatgccaacactgttttgtctctgttcattttttctgtgaggatacttaaggttattattcctgtctgtttcctgtactcccctagtcatgagcacttgaagtacaaggtgtctccccctaggtgcaattaggttgtttctttgtttttagtttcaattctatgtgcatagcaggaatgctccacaggaatggcttctgacaataatctgtcctgttgattttgttttccttgcccatgacttgaacaactgtgttttaaagtactgtagtctagtaggtaactttgtggcaaaaattttcaatataatacattctgaaacaatagttgctgccttgcaaaggtaatctctcattttaaaattggacagtattaatgaaggggaaatatacaatttatttctattgagtggtaaaactatatgtctggtcccttgctgctcttgtttaggccactatcatagatatatttcaaatattgtactactcagtgttaagtattgaatgactgtttccctttccttcaaggcctagagtatattctgaaaatttaggaatgaggaagaaatcttaatacttccttccttaacatacaacatgagtcccgagaataattgatagtagcaagagaaaactatgtcagtaacatgttgctttgtataaaaatcttatttataaatgtgaagctttttgatgccatcaaaacttattaaaaaataggatttacttttttctaattctgacctaagaaaaataatgagaacaagctgttgcaagctcttttgtagtctattgaatattttatagatattcaaaatttcctacaaactataatattttnccatgatttagcagtgagtgattttctagctttggctcttattaggtattgtaaatagtagggttatatcgatatcagcttttgtgatggcattgtggtcnccnncnncatgacattttnccccttnnccnnnncccnnnntaannnnnnnnnnncancncnnnccccctnnnccntnncngcgcnnnnngngnnnnnncnnttgtgaatgacccccnccntaanncccnccncncccncccttatcccccaagtgttaatatactgacttatgcagtattcaaaccctctagcccnnccnnnntgnnnnnnnnnnnnnnnnnnnggtaacacaggtgcagtgtattatagaaaaaataaaaactacaatcattagcagttttaatactgctgtgtcagttttgtaaaaaatgtacattatgtcgttttgacatgttgaattttaaactacgggaaatgacattgtaaatcatagtaccctcttttaatttaatatgaaaaatgccactatattgaaagtacttaatgtattgtatatatttctctactttggttctagctattttatatgattgacatgttatttaaaagataactgccttgaacttttggagacttgtactgtaaataaagaaatcttaac

SEQ ID NO: 258502 - DNA, 2002 bp, Homo Sapiens
acgtagggaagcgcgccgcgcacctcatggttccggggacagttagggcggcggatggaggtcagcggtggtgctcgctgcggtttggaatcacttgctaggagtcttgtctctctgccacccaggacatcatggcagctcacctggtaaagcgatgcacgtgcctcctgagagaagctgctcgtcaggcccctgccatggctccagttggccgactgagacttgcctgggtagcccataagactctgacttcctcagccacctcacccatttcccacctcccaggttccttgatggagccggtggagaaggaacgagcatctactccctacatagagaagcaggtggaccacctcatcaagaaggccacaaggccagaggagctcctggagctacttggtggcagtcacgacttggacagcaatcaagcagcaatggtacttatccggctctctcacttgctgtctgagaagccagaagataaaggcttgctcatacaggatgcccactttcatcaacttctctgtctgctcaacagtcagattgcctcggtctggcatggtaccctctcgaagctgctgggaagcctgtatgctctgggcatccccaaggcctccaaggagctgcagtcggtggagcaggaggtccgctggcgcatgcggaagctcaagtacaagcacctggccttcctggcagagtcctgtgccaccctctcacaggagcagcactcgcaggagctgctggctgagctgctcacacacctggaaaggcgttggacagaaattgaagattcccacacattagtgaccgtcatgatgaaggtgggacacctctcggagccactaatgaaccgcctggaagacaagtgcctggagttggtggagcactttggccccaatgagctgcggaaggtgctggtgatgctggcagctcagagccggcggtccgtgcccttgctgcgggccatctcctaccacctggtgcagaagcccttctctctgacgaaagatgtgctcttggacgtggcctatgcctatggcaaactcagctttcaccagacccaggtgtcccagcgcctggccaccgacctgctatccctcatgcccagcctgacttctggtgaggtggcccactgtgccaagtccttcgccttactcaagtggctcagcctgcccctgtttgaggcctttgcccagcacgtcctgaacagagcgcaggacatcaccctgccccacctgtgcagcgtacttctggcttttgcgcgtctgaacttccatccagaccaagaggatcagttcttcagcctggtacatgagaagctggggtcagagctgccaggcctggagccagccctgcaagtggacctggtgtgggccctgtgtgtgctgcagcaggcacgggaagcagagctgcaagccgtcctccaccctgaatttcacatccaatttctagggggcaagtctcagaaggatcagaacaccttccagaagctgctccacatcaacgccactgccctgctggagtaccccgagtactcgggtccccttctgcctgcctcggctgtggcccctgggccctcagcccttgacaggaaggtgacccccctgcaaaaggagctgcaggagacgctgaaggggctgctggggagcgccgacaagggcagcctcgagatgctgaggtgctgctggacagtgacggcgagtttctgcccgtaagggactttgtggcacctcaccttgcccagccaactgggagccagtcaccacctccagggtctaagaggctagcgttcttgcggtgggagttccccaacttcaacagccgaagcaaggacttgctaggtcgctttgttctggtccggcgacacatagtggctgcaggcttcctgatagtggacgtcccactctgagggacagaacgtcctcttgtgtataataaacctttaattttggtgttggacccctggggccttcccaggcttggtcaccctctgcactgtcaa

SEQ ID NO: 258503 - DNA, 977 bp, Homo Sapiens
ggagcgaggcctgggtggcgaattcggcacgaggcggatggaggtcagcggtggtgctcgctgcggtttggaatcacttgctaggagtcttgtctctctgccacccaggacatcatggcagctcacctggtaaagcgatgcacgtgcctcctgagagaagctgctcgtcaggcccctgccatggctccagttggccgactgagacttgcctgggtagcccataagactctgacttcctcagccacctcacccatttcccacctcccaggttccttgatggagccggtggagaaggaacgagcatctactccctacatagagaagcaggtggaccacctcatcaagaaggccacaaggccagaggagctcctggagctacttggtggcagtcacgacttggacagcaatcaagcagcaatggtacttatccggctctctcacttgctgtctgagaagccagaagataaaggcttgctcatacaggatgcccactttcatcaacttctctgtctgctcaacagtcagattgcctcggtctggcatggtaccctctcgaagctgctgggaagcctgtatgctctgggcatccccaaggcctccaaggagctgcagtcggtggagcaggaggtccgctggcgcatgcggaagctcaagtacaagcacctggccttcctggcagagtcctgtgccaccctctcacaggagcagcactcgcaggagctgctggctgagctgctcacacacctgggaaaggcgttggacagaaattgaagattcccacacattagtgaccgtcatggatgaaaggtggggacacctctcggagccactaatgaaccgcctggaagacaagtgccctggaagttggggggagcacctttggccccatgaaactgccgaaaagggggctgggtgaatgctggcaactccaaaaacccgggcggtccgggggcccttggctgcgggccatcctccta

SEQ ID NO: 258504 - DNA, 336 bp, Homo Sapiens
  misc_feature (27)..(27): n is a, c, g, or t
  misc_feature (305)..(305): n is a, c, g, or t
  misc_feature (323)..(323): n is a, c, g, or t
tgcagagggtgaccaagcctgggaagncccaggggtccaacaccaaaattaaaggtttattatacacaagaggacgttctgtccctcagagtggctggccacctccccactctggccaaggtcctgcacagaggtttgtcctcaagggtgacccttcttggccgcccacagctagacctccggcgaagaggcacgcagtccatgctgctggcacaagtcacttggccagctcctcagccaccgttttggcaatcttgtccttgaggtaggcgcctttctgccattcagacttgagttccagccantcatagaatggggacgtncacttatcaggaa

SEQ ID NO: 258505 - DNA, 971 bp, Homo Sapiens
ggacgacgctaagaaagtgtgttaactaatgacctgaaggagctactcatcttcaacaagcagcaagtgccttctggggagtcggcgatcttggaccgagtagccgatggcatggtgttcggtgccctccttccctgcgaggaatgctcgggtcagctggtcttcaagagcgatgcctattactgcactggggacgtcactgcctggaccaagtgtatggtcaagacacagacacccaaccggaaggagtgggtaaccccaaaggaattccgagaaatctcttacctcaagaaattgaaggttaaaaaacaggaccgtatattccccccagaaaccagcgcctccgtggcggccacgcctccgccctccacagcctcggctcctgctgctgtgaactcctctgcttcagcagataagccattatccaacatgaagatcctgactctcgggaagctgtcccggaacaaggatgaagtgaaggccatgattgagaaactcggggggaagttgacggggacggccaacaaggcttccctgtgcatcagcaccaaaaaggaggtggaaaagatgaataagaagatggaggaagtaaaggaagccaacatccgagttgtgtctgaggacttcctccaggacgtctccgcctccaccaagagccttcaggagttgttcttagcgcacatcttgtccccttggggggcagaggtgaaggcagagcctgttgaagttgtggccccaagagggaagtcaggggctgcgctctccaaaaaagcaagcgcccggccaggagggaaggttcaacaaatctgaaagagaaggaatttactcttaaaggagggcagttgtggtcctgatttggactggaacactctggcatttcctgggaaaagtgggaaggggtttagggccccccttgccctgtgggcaatttttaaggaacaccatccactccaagttggagatttgggagg

SEQ ID NO: 258506 - DNA, 1494 bp, Homo Sapiens
  misc_feature (139)..(139): n is a, c, g, or t
  misc_feature (521)..(521): n is a, c, g, or t
  misc_feature (533)..(533): n is a, c, g, or t
  misc_feature (1254)..(1254): n is a, c, g, or t
attcccgggatccgcggtctacgaagaccaagtgggcaagtttgattggagacagcaatatgttgggaaggtcaagtttgcctccttggaattttcccctggatccaagaagttggttgtagccacagagaagaatgtnattgcagcattaaattcccgaactggggagatcttgtggcgccatgttgacaagggcacggcagaaggggctgtggatgccatgctgctgcacggacaggatgtgatcactgtgtccaatggaggccgaatcatgcgttcctgggagactaacatcgggggcctgaactgggagataaccctggacagtggcagtttccaggcacttgggctggttggcctgcaggagtctgtaaggtacatcgcagtcctgaagaagactacacttgccctccatcacctctccagtgggcacctcaagtgggtggaacatctcccagaaagtgacagcatccactaccagatggtgtattcttacggctctggggtggtgtgggccctcngagttgttcccntcagccatgtgaacattgtcaagtttaatgtggaagatggagagattgttcagcaggttagggtttaaactccgtggctgcagcacctgtctggagcctgtggtgtggtggatgaagctgtcctggtgtgtcctgacccgagctcacgttccctccaaactttggctctggagacggaatgggagttgagacagatcccactgcagtctctcgacttagaatttggaagtggattccaaccccgggtcctgcctacccagcccaacccagtggacgcttcccgggcccagttcttcctgcacttgtccccaagccactatgctctgctgcagtaccattatggaacgctgagtttgcttaaaaacttcccacagactgccctagtgagctttgccaccactggggagaagacggtggctgcagtcatggcctgtcggaatgaagtgcagaaaagtagcaggtctgaagatgggtcaatggggagcttttcggagaagtctagttcaaaggactctctggcttgcttcaatcagacctacaccattaacctatacctcgtggagacaggtcggcggctgctggacaccacgataacatttagcctgggacagagcggcactcggcctgagcggctgtatatccaggtgttcttgaagaaggatgactcagtgggctaccgcgctttgtgcagacaggagatcatctgctacttttcctgcancagtttgcaagggaaggtggtgctgtggagcccgtgaggagtccctggcagaaagtggtgtgcctagagaagggggacctccccctgactggggcaacaggccgagctggaaaggagaaattggcaaaaaggcagatggcttgctggggaatgttcctggacccgcttttggtttaagcttatcctgcttgaagcatgagccttcccacctttggaaaatgtgtttttgagcctccgaag

SEQ ID NO: 258507 - DNA, 2897 bp, Homo Sapiens
  misc_feature (316)..(317): n is a, c, g, or t
  misc_feature (327)..(327): n is a, c, g, or t
  misc_feature (334)..(334): n is a, c, g, or t
  misc_feature (359)..(360): n is a, c, g, or t
  misc_feature (363)..(363): n is a, c, g, or t
  misc_feature (368)..(368): n is a, c, g, or t
  misc_feature (384)..(384): n is a, c, g, or t
  misc_feature (387)..(387): n is a, c, g, or t
  misc_feature (395)..(395): n is a, c, g, or t
  misc_feature (907)..(907): n is a, c, g, or t
  misc_feature (2292)..(2329): n is a, c, g, or t
  misc_feature (2798)..(2806): n is a, c, g, or t
gggaaggtcgccgtggagtcccgaccagaggtcggggttggggtcggtgcagaccgagggctggtttccttgactgtgggagaaacgccgggagccggagtgacccgaggagggactccgcctccgagcggctgaggaccccggtgcagaggagcctggctcgcagaattgcagagtcgtcgcccctttttacaacctggtcccgttttattctgccatacccagtttttggatttttgtcttccccttcttctctttgctaaacgacccctccaagataatttttaaaaaaccttctcctttgctcacctttgcnncccagccaanccaaaancccaccgaaagcaaatcattcaacnnganccgancctccgacggcagganaancccgaccncccaagcggaccgccctccctccccgcgcgcgggttccgggcccggcgagagggcgcgagcacagccgaggccatggaggtgacggcggaccagccgcgctggtgagccaccaccaccccgccgtgctcaacgggcagcacccggacacgcaccacccgggcctcagccactcctacatggacgcggcgcagtacccgctgccggaggaggtggatgtgctttttaacatcgacggtcaaggcaaccacgtcccgccctactacggaaactcggtcagggccacggtgcagaggtaccctccgacccaccacgggagccaggtgtgccgcccgcctctgcttcatggatccctaccctggctggacggcggcaaagccctgggcagccaccacaccgcctccccctggaatctcagccccttctccaagacgtccatccaccacggctccccggggcccctctccgtctaccccccggcctcgtcctcctccttgtcggggggccacgccancccgcacctcttaacccttcccgcccaccccgccgaaggacgtctccccggacccatcgctgtccaccccaggctcggccggctcggcccggcaggacgagaaagagtgcctcaagtaccaggtgcccctgcccgacagcatgaagctggagtcgtcccactcccgtggcagcatgaccgccctgggtggagcctcctcgtcgacccaccaccccatcaccacctacccgccctacgtgcccgagtacagctccggactcttcccccccagcagcctgctgggcggctcccccaccggcttcggatgcaagtccaggcccaaggcccggtccagcacagaaggcagggagtgtgtgaactgtggggcaacctcgaccccactgtggcggcgagatggcacgggacactacctgtgcaacgcctgcgggctctatcacaaaatgaacggacagaaccggcccctcattaagcccaagcgaaggctgtctgcagccaggagagcagggacgtcctgtgcgaactgtcagaccaccacaaccacactctggaggaggaatgccaatggggaccctgtctgcaatgcctgtgggctctactacaagcttcacaatattaacagacccctgactatgaagaaggaaggcatccagaccagaaaccgaaaaatgtctagcaaatccaaaaagtgcaaaaaagtgcatgactcactggaggacttccccaagaaccagctcgtttaacccggccgccctctccagacacatgtcctccctgagccacatctcgccctcctcagccactccagccacatgctgaccacgcccacgccgatgcacccgccatccagcctgtcctttggaccacaccacccctccagcatggtcaccgccatgggttagagccctgctcgatgctcacagggcccccagcgagagtccctgcagtccctttcgacttgcatttttgcaggagcagtatcatgaagcctaaacgcgatggatatatgtttttgaaggcagaaagcaaaattatgtttgccactttgcaaaggagctcactgtggtgtctgtgttccaaccactgaatctggaccccatctgtgaataagccattctgactcatatcccctatttaacagggtctctagtgctgtgaaaaaaaaaaatgctgaacattgcatataacttatattgtaagaaatactgtacaatgactttattgcatctgggtagctgtaaggcatgaaggatgccaagaagtttaaggaatatgggagaaatagtgtggaaattaagaagaaactaggtctgatattcaaatggacaaactgccagttttgtttcctttcactggccacagttgtttgatgcattcaaagcacatcnnnnnnnnnnnnnnnnnnnnnnnnnnnnnnnnnnnnnngttgtaggcgaatcatttgttcaaagctgttggcctctgcaaaggaaataccagttctgggcaatcagtgttaccgttcaccagttgccattgagggtttcagagagcctttttctaggcctacatgctttgtgaacaagtccctgtaattgttgtttgtatgtataattcaaagcaccaaaataagaaaagatgtagatttatttcatcatattatacagaccgaactgttgtataaatttatttactgctagtcttaagaactgctttctttcgtttgtttgtttcaatattttccttctctctcaatttttggttgaataaactagattacattcagttggcctaaggtggttgtgctcggagggtttcttgtttcttttccatttttggtttttggatgatatttatttaaatagctttctaagaggtcaaaagacagctacggaagagaaaagaaaaaactctnnnnnnnnncgccctcggcccccctgcgaagaaaccttttccaaaaaacacatttccttttggggccccccgcggggccccccaatatagggggaaaagg

SEQ ID NO: 258508 - DNA, 1721 bp, Homo Sapiens
  misc_feature (152)..(152): n is a, c, g, or t
  misc_feature (878)..(878): n is a, c, g, or t
  misc_feature (1201)..(1201): n is a, c, g, or t
  misc_feature (1213)..(1213): n is a, c, g, or t
  misc_feature (1234)..(1234): n is a, c, g, or t
agaccgggcccaacacctggtccatggaaaaaaactgtccgccccaaaggccaccccgttggctgaaaagacacccagcagcgggcatgtggcagggcccaaagctggaccgttcggtcctgtaagcctgtgaccagcagcttgtcgttggnggcaaatacccacgctggttgatgtccttatcatgacagcgctgagtggtctgggcctgcaggaggataggaccgttgtctgggactgtgttcttggacagcaaggcttgggaagaggccacagcttcacagtgcagtcctggctgcctgtcaccaggaaggactccttcagcctagagcagcagacggtgcccacactgtgtgtgtgaccggaaccctgagccacgcacatcacctggccagccttgttcattctccagatacggacgctctgatccttggcacagctggcaaagagccaccccttccggaacacatccagggccaggacgatatccgtgtggccgtggaggatctggcaggctgacgtctgcagctcaaacacttttaggcaggggctattggaggccacgacaatgtgggagtcctcgggcccaagaaaccggacatccaaaacctcctcactgtagccagcgaactgtttctgcagccgcagggagcgagcctcgtagagcaacaggttgtggtcggcggtggcggtgaggaccacgccggcggtgtgtgccagggtgccgtgggtcagctcctgcccagggcccggcggctgggcctgcgtgtacacacactgcccagaagctgcctcccacacgcgcagagtgccttggtcgccagctgtcagaaagtacagccctggggacttcacacccagctgggacactgctcctntgcaacagcacagcagcctccacgctctcaaacacaggcacggtcctcgtggcctggcagctctgaaggtcccagatgatacatatcttgtcacggccggagctgagcatggtgtggccgtcggcgctgaaggccagtgaggtgacggcgctgtagtgggcagtcagcacagccaggcatgaccggtcctgcagtgaccacacgcggatggcggcatccgtggccgaggagaagagcagcaggcgtgtagggtccgggtggaaggccactaggtgcacgacaccgggcgagcctcggaagtggtgtgtcccgtagtgccgcangatgtaaaagangcgcacggccccatcacagcnacctgtggctagcagagtggaggtggggtcgaaggccatggtggccacgggggccgtgtgtatcgccttccacaggcgggtaacgctgccctcttgaccaggcaccactgagccagcagcaatgcccgactggctgtcaccagcacctcgttgtcagggatgaggtcaaaggcagtgatgtcctccttggtcctcctgctccagactccgcagcacggcccccgaggccacttccagaatgttgactctggtgccacagacgcagaagaggtgctggccagtatggtccagctgtgcttttccgcccttgtagaaaggctcaattttgcgctccacagcatagttggtcttgaagcggcccactccggccgcggtctctgccatgttgccgccgccgccgctccagctgaaacctgctagggtcccggcagccaccgccgcgtgagggaggttagcaccgaactcttcacagaacgccacatcccgg

SEQ ID NO: 258509 - DNA, 2676 bp, Homo Sapiens
  misc_feature (1164)..(1164): n is a, c, g, or t
  misc_feature (1954)..(1954): n is a, c, g, or t
  misc_feature (2001)..(2001): n is a, c, g, or t
  misc_feature (2003)..(2003): n is a, c, g, or t
  misc_feature (2008)..(2008): n is a, c, g, or t
  misc_feature (2024)..(2024): n is a, c, g, or t
  misc_feature (2062)..(2062): n is a, c, g, or t
  misc_feature (2064)..(2065): n is a, c, g, or t
  misc_feature (2074)..(2074): n is a, c, g, or t
  misc_feature (2084)..(2084): n is a, c, g, or t
  misc_feature (2090)..(2090): n is a, c, g, or t
  misc_feature (2093)..(2093): n is a, c, g, or t
  misc_feature (2105)..(2105): n is a, c, g, or t
  misc_feature (2110)..(2110): n is a, c, g, or t
  misc_feature (2112)..(2113): n is a, c, g, or t
  misc_feature (2115)..(2115): n is a, c, g, or t
  misc_feature (2118)..(2118): n is a, c, g, or t
  misc_feature (2121)..(2123): n is a, c, g, or t
  misc_feature (2125)..(2125): n is a, c, g, or t
  misc_feature (2127)..(2127): n is a, c, g, or t
  misc_feature (2129)..(2129): n is a, c, g, or t
  misc_feature (2131)..(2131): n is a, c, g, or t
  misc_feature (2135)..(2135): n is a, c, g, or t
  misc_feature (2137)..(2138): n is a, c, g, or t
  misc_feature (2145)..(2145): n is a, c, g, or t
  misc_feature (2152)..(2152): n is a, c, g, or t
  misc_feature (2154)..(2154): n is a, c, g, or t
  misc_feature (2163)..(2163): n is a, c, g, or t
  misc_feature (2178)..(2178): n is a, c, g, or t
  misc_feature (2183)..(2183): n is a, c, g, or t
  misc_feature (2205)..(2208): n is a, c, g, or t
  misc_feature (2210)..(2212): n is a, c, g, or t
  misc_feature (2214)..(2214): n is a, c, g, or t
  misc_feature (2221)..(2222): n is a, c, g, or t
  misc_feature (2273)..(2273): n is a, c, g, or t
  misc_feature (2283)..(2283): n is a, c, g, or t
  misc_feature (2291)..(2291): n is a, c, g, or t
  misc_feature (2295)..(2295): n is a, c, g, or t
  misc_feature (2301)..(2301): n is a, c, g, or t
  misc_feature (2310)..(2310): n is a, c, g, or t
  misc_feature (2314)..(2314): n is a, c, g, or t
  misc_feature (2316)..(2316): n is a, c, g, or t
  misc_feature (2318)..(2318): n is a, c, g, or t
  misc_feature (2322)..(2323): n is a, c, g, or t
  misc_feature (2325)..(2326): n is a, c, g, or t
  misc_feature (2328)..(2328): n is a, c, g, or t
  misc_feature (2330)..(2330): n is a, c, g, or t
  misc_feature (2333)..(2334): n is a, c, g, or t
  misc_feature (2340)..(2340): n is a, c, g, or t
  misc_feature (2343)..(2344): n is a, c, g, or t
  misc_feature (2351)..(2351): n is a, c, g, or t
  misc_feature (2353)..(2353): n is a, c, g, or t
  misc_feature (2358)..(2359): n is a, c, g, or t
  misc_feature (2373)..(2373): n is a, c, g, or t
  misc_feature (2380)..(2380): n is a, c, g, or t
  misc_feature (2397)..(2397): n is a, c, g, or t
  misc_feature (2406)..(2406): n is a, c, g, or t
  misc_feature (2421)..(2421): n is a, c, g, or t
  misc_feature (2454)..(2454): n is a, c, g, or t
  misc_feature (2456)..(2456): n is a, c, g, or t
  misc_feature (2463)..(2463): n is a, c, g, or t
  misc_feature (2468)..(2469): n is a, c, g, or t
  misc_feature (2484)..(2484): n is a, c, g, or t
  misc_feature (2556)..(2557): n is a, c, g, or t
  misc_feature (2583)..(2583): n is a, c, g, or t
  misc_feature (2621)..(2621): n is a, c, g, or t
  misc_feature (2632)..(2632): n is a, c, g, or t
  misc_feature (2638)..(2639): n is a, c, g, or t
  misc_feature (2647)..(2647): n is a, c, g, or t
  misc_feature (2651)..(2652): n is a, c, g, or t
cgcggacctggagcaagggccagaggggccggaaacgcccatccaggtggtgctcagggtacgtcccatgagcgcggccgagctgcgtcgagggcagcagagcgtgctgcactgctcagggacccggactctgcagagtgccccgctcctccgccccacccgcgccaggtgagtcctccaggcgggggtccagaagtggcgttccgcttcggtgcggtgctagacgcggcgcgcacgcaggaggacgtgttccgggcgtgcggcgtgcggcgcctgggggagctggcgctgcgcggtttctcctgcactgttttcacctttggccagacgggctctgggaagacctacaccccccagcctggctggcatcatgcagaggaccttcgcctggctgttggaccgcgtgcagcacctgggtgcccctgtcacccttcgcgcctcttatctggagatctacaatgagcaggtaagggaatgagaggaatagaaagacagcccatgaggaaacggagcgcttctttccagggagcctggatcaaaggacagaagaggcggtggggactgttgtcagtaagatctgggggtgggtggactcagaaagatcccttccctcaccctcctccctcccctcccaggttcgggacttgctgagcctggggtctcccggcccctccctgttcgctggaacaagactcggggcttctatgtggagcagctgcgggtggtggaatttgggagtctggaggccctgatggaacttttgcaaacgggtctcagccgtcgaaggaactcagcccacaccctgaaccaggcctccagccgaagccatgccctgctcaccctttacatcagccgtcaaactgcccagcagatgccttctgtggaccctggggagccccctgttggtgggaagctgtgctttgtggacctggcaggcagtgagaaggtagcagccacgggatcccgtggggagctgatgcttgaggctaacagcatcaaccgaagcctgctggccctgggtcactgcatctccctgctgctggacccacagcggaagcagagccacatccctttccgggacagcaagctcaccaagttgctggcagactcactgggagggcgcggggtcaccctcatggtggcctgcgtgtccccctcagcccnagtgccttcctgagactctcagcaccctgcgatatgcaagccgagctcagcgggtcaccacccgaccacaggcccccaagtctcctgtggcaaagcagccccagcgtttggagacagagatgctgcagctccaggaggagaaccgtcgcctgcagttccagctggaccaaatggactgcaaggcctcagggctcagtggagcccgggtggcctgggcccagcggaacctgtacgggatgctacaggagttcatgctagagaatgagaggctcaggaaagaaaagagccagctgcagaatagccgagacctggcccagaatgagcagcgcatcctggcccagcaggtccatgcactagagaggcgtctcctctctgcctgctaccatcaccagcagggtcctggcctgaccccaccgtgtccctgcttgatggccccagctcccccttgccatgcactgccacccctctactcctgcccctgctgccacatctgcccactgtgtcgagtgcccctggcccactgggccggcctggccaggggagcaccaccttgccccagcctctcttctggggctctgaggagtcagaaatagaccagacgtggttcctgctctcaggaggcttctagtctcaggagaggacggtagaagaaccatctgctgcacacagaaggcgaccaagaccccacccctttatgccatcctaacattctgggtaccttgtggggtgttggaccctgaggcctcaggtggcaggcccccatctgcccggcccccacccctgggagccnccatgcagcccctgctctgccaagtgcccaagagacaggagtcacantnactgnactcagacccgagtcntggcagagatgttgacggaggaggaggtggtacctttntnnacctccccnccctataaancccccnaanacatcaccaggnctcananntnaanaannnananangnaggncnncctaatnttctctntnatcttgggntaaaacccaccctcnccaancctcaatcttatctctaaaatnnnntnnntnttgaganntggcatctaagatctttctacttcccaaacttggaattctctttttaggancatctgcgtncccaaatntatnttggancccatggtntatngngntggnntnngnanaannctgganggnncctaccncntgagnnttctccagaggttnttggganccagatggacctgggtnaggaagggncctggagagggcagncctcgagtctcactgatccttaggtggggccgngnttccaancctgnnccagagactggaggncttcagagaccagattggcagctccctgcgacgtggccgcagccagccaccctgcagtgagggcgcacggannccaggccaagtcctccctccccattnaaggccaagtgggaacccaggagactgctgtgtgaccncagactgagcnccacanncttgggcntcannctgcccatctgctgaatggagaca

SEQ ID NO: 258510 - DNA, 496 bp, Homo Sapiens
  misc_feature (450)..(450): n is a, c, g, or t
tttactgaatcatacattcacttactccttcagtaactccccaagctccttgctttataccagcctctcttctgggctctgaggagtcagaaatagaccagacgtggttcctgctctcaggaggcttctagtctcaggagaggacggtagaagaaccatctgctgcacacagaaggcgaccaagaccccacccctttatgccatcctgacattcttggtaccttgtggggtaggcatggtggggtgtcatggctagcaccaggtaggtgggacacagagaggcaggactgaggtcacccagagtgggactctggtctttcctacaggtgttgggaccctgaggcctcaggtgggcaggcccccattttgcccggcccccaccctggggcacccccattgcagcctggggttttgccaagttgcccaagagagagggaattcacagtattnggatttagacccgaatttctgggcaagagatgtttgaacggaggaa

SEQ ID NO: 258511 - DNA, 413 bp, Homo Sapiens
ctgcacctcccctgcctgtgaggcccccgaaaacatcaccagggctcaaaggtggggccggggttccaaacctggcccagagactggaggccctcagagaccagattggcagctccctgcgacgtggccgcagccagccaccctgcagtgagggcgcacggagcccaggccaagtcctccctccccattgaaggccaagtgggaacccaggagactgctgtgtgacctcagactgggctccacactcttgggcttcagtctgcccatctgctgaatggagacagcagctgctactccacctgcagctgggctaggggcggggactgggggtgctatttaggggaacaaggggattcaggagaaaccaggcagcaggggatgaaatacatgaataaagagaggcatcagctcca

SEQ ID NO: 258512 - DNA, 442 bp, Homo Sapiens
  misc_feature (15)..(15): n is a, c, g, or t
  misc_feature (33)..(33): n is a, c, g, or t
  misc_feature (389)..(389): n is a, c, g, or t
gttggtaccttctgnacttcccctgccttttanaccccccgaaaaacatcaccccaggcctcaaaggtggggccggggttccaaaacctggccccagagactggaggcccctcagagacccagattggcagctcccctgcgaccgtggccgcagccagcccaccctgcagtgagggcgcacggagccccaggccaagtcctccctccccattgaaggcccaagtgggaaccccaggagactgctgtgtgacctcagactgggctccacactcttgggcttcagtctgcccatctgctgaatggagacagcagctgctactccacctgcagctgggctaggggcggggactgggggtgctatttaggggaacaaggggattcaggagaanccaggcagcaggggatgaaatacatgaataaagagaggcatcagctccaaaat

SEQ ID NO: 258513 - DNA, 2348 bp, Homo Sapiens
attcggcacagcagttgttgatcttatgcaagacgctgcacgaccccgcgcccgcttgtcgccacggcacttaggcagccggagatactctgagttactcggagaccgacgcctgagggtgagatgaacgcgctggcctccctaaccgtccggacctgtgatcgcttctggcagaccgaaccggcgctcctgcccccggggtgacgcgaacttcccagccgcccagacacatggccccaggcaaagcaccccatcaggctaccccgtggagggatgcccaccctttcttcctcctgtccccagtgatgggcctcctcagccgcgcctgggagccgcctgaggggcctgggacctctagagccctggctggtggaagcagtaaaaggagcagctctggtagaagctggcctggagggagaagctaggactcctctggcaatcccccatacaccttggggcagacaccctgaagaggaggctgaagacagtggaggccctggagaggacagagaaacactggggctgaaaaccagcagttcccttcctgaagcctggggacttttggatgatgatgactggcatgtatggtgagcgagaggcaaccagtgtccctagagggcaagggaagatcaatttgcagatggacagcgtgctcccctgtatcccagaacttctgataaggacactgcaaggttctgataagaacccaggggaggagaaagccgaggaagagggagttgctgaagaggagggagttaaccaagttctcttatccaccatcacaccgggagtgttgtccagccgtggaggaggaggacgatgaagaagctgtaaagaaagaagctcacagaacctctacttctgccttgtctccaggatccaagcccagcacttgggtgtcttgcccaggggaggaagagaatcaagccacggaggataaaagaacagaaagaagtaaaggagccaggaagacctccgtgtccccccgatcttcaggctccgaccccaggtcctgggagtatcgttcaggagaggcgtccgaggagaaggaggaaaaggcacacaaagaaactgggaaaggagaagctgccccagggccgcaatcctcagccccagcccagaggccccagctcaagtcctggtggtgccaacccagtgatgaagaggagggtgaggtcaaggctttgggggcagctgagaaggatggagaagctgagtgtcctccctgcatccccccaccaagtgccttcctgaaggcctgggtgtattggccaggagaggacacagaggaagaggaagatgaggaagaagatgaggacagtgactctggatcagatgaggaagagggagaagctgaggcttcctcttccactcctgctacaggtgtcttcttgaagtcctgggtctatcagccaggagaggacacagaggaggaggaagatgaggacagtgatacaggatcagccgaggatgaaagagaagctgagacttctgcttccacaccccctgcaagtgctttcttgaaggcctgggtgtatcggccaggagaggacacggaggaggaggaagatgaggatgtggatagtgaggataaggaagatgattcagaagcagccttaggagaagctgagtcagacccacatccctcccacccggaccagagtgcccacttcaggggctggggatatcgacctggaaaagagacagaggaagaggaagctgctgaggactggggagaagctgagccctgccccttccgagtggccatctatgtacctggagagaagccaccgcctccctgggctcctcctaggctgcccctccgactgcaaaggcggctcaagcgcccagaaacccctactcatgatccggaccctgagactcccctaaaggccagaaaggtgcgcttctccgagaaggtcactgtccatttcctggctgtctgggcagggccggcccaggccgcccgccagggcccctgggagcagcttgctcgggatcgcagccgcttcgcacgccgcatcacccagggcccaggagggagctgagcccctgcctcacccctgctgcccgggccagagcctgggcacgcctcaggaacccacctttagcccccatccctgccctcacccagaccttgccttcctcctctgtcccttcgtccccagtccagaccacgcccttgagccaagctgtggccacaccttcccgctcgtctgctgctgcagcggctgccctggacctcagtgggaggcgtggctgagaccaactggtttgcctataatttattaactatttattttttctaagtgtgggtttatataaggaataaagccttttgatttgta

SEQ ID NO: 258514 - DNA, 2016 bp, Homo Sapiens
agtcggcgccgcccggagccgggagcgccgctccagcgaggcgcgggctgtggggccgccgcgtgcctggccccgctcgcccgtgccggccgctcgcccgccatgcctggcttcgactacaagttcctggagaagcccaagcgacggctgctgtgcccactgtgcgggaagcccatgcgcgagcctgtgcaggtttccacctgcggccaccgtttctgcgatacctgcctgcaggagttcctcagtgaaggagtcttcaagtgccctgaggaccagcttcctctggactatgccaagatctacccagacccggagctggaagtacaagtattgggcctgcctatccgctgcatccacagtgaggagggctgccgctggagtgggccactacgtcatctacagggccacctgaatacctgcagcttcaatgtcattccctgccctaatcgctgccccatgaagctgagccgccgtgatctacctgcacacttgcagcatgactgccccaagcggcgcctcaagtgcgagttttgtggctgtgacttcagtggggaggcctatgagagccatgagggtatgtgcccccaggagagtgtctactgtgagaataagtgtggtgcccgcatgatgcggcggctgctggcccagcatgccacctctgagtgccccaagcgcactcagccctgcacctactgcactaaggagttcgtctttgacaccatccagagccaccagtaccagtgcccaaggctgcctgttgcctgccccaaccaatgtggtgtgggcactgtggctcgggaggacctgccaggccatctgaaggacagctgtaacaccgccctggtgctctgcccattcaaagactccggctgcaagcacaggtgccctaagctggcaatggcacggcatgtggaggagagtgtgaagccacatctggccatgatgtgtgccctggtgagccggcaacggcaggagctgcaggagcttcggcgagagctggaggagctatcagtgggcagtgatggcgtgctcatctggaagattggcagctatggacggcggctacaggaggccaaggccaagcccaaccttgagtgcttcagcccagccttctacacacataagtatggttacaagctgcaggtgtctgcattcctcaatggcaatggcagtggtgagggcacacacctctcactgtacattcgtgtgctgcctggtgcctttgacaatctccttgagtggccctttgcccgccgtgtcaccttctccctgctggatcagagcgaccctgggctggctaaaccacagcacgtcactgagaccttccaccccgacccaaactggaagaatttccagaagccaggcacgtggcggggctccctggatgagagttctctgggctttggttatcccaagttcatctcccaccaggacattcgaaagcgaaactatgtgcgggatgatgcagtcttcatccgtgctgctgttgaactgccccggaagatcctcagctgagtgcaggtggggttcgaggggaaaggacgatggggcatgacctcagtcaggcactggctgaacttggagagggggccggacccccgtcagctgcttctgctgcctaggttctgttaccccatcctccctcccccagccaccaccctcaggtgcctccaattggtgcttcagccctggcccctgtggggaacaggtcttggggtcatgaagggctggaaacaagtgaccccagggcctgtctcccttcttgggtagggcagacatgccttggtgccggtcacactctacacggactgaggtgcctgctcaggtgctatgtcccaagagccataagggggtgggaattggggagggagaaagggtagttcaaagagtctgtcttgagatctgattttttccccctttacctagctgtgccccctctggttatttatttccttagtgccaggagggcacagcaggggagccctgatttttaataaatccggaattgtatttata

SEQ ID NO: 258515 - DNA, 862 bp, Homo Sapiens
  misc_feature (3)..(3): n is a, c, g, or t
  misc_feature (17)..(17): n is a, c, g, or t
  misc_feature (24)..(24): n is a, c, g, or t
  misc_feature (34)..(34): n is a, c, g, or t
  misc_feature (36)..(36): n is a, c, g, or t
  misc_feature (40)..(40): n is a, c, g, or t
  misc_feature (50)..(50): n is a, c, g, or t
  misc_feature (52)..(52): n is a, c, g, or t
  misc_feature (60)..(60): n is a, c, g, or t
  misc_feature (69)..(69): n is a, c, g, or t
  misc_feature (76)..(79): n is a, c, g, or t
  misc_feature (82)..(83): n is a, c, g, or t
  misc_feature (85)..(85): n is a, c, g, or t
  misc_feature (90)..(90): n is a, c, g, or t
  misc_feature (97)..(97): n is a, c, g, or t
  misc_feature (100)..(100): n is a, c, g, or t
  misc_feature (106)..(106): n is a, c, g, or t
  misc_feature (112)..(112): n is a, c, g, or t
  misc_feature (117)..(117): n is a, c, g, or t
  misc_feature (119)..(119): n is a, c, g, or t
  misc_feature (124)..(124): n is a, c, g, or t
  misc_feature (133)..(134): n is a, c, g, or t
  misc_feature (142)..(142): n is a, c, g, or t
  misc_feature (148)..(148): n is a, c, g, or t
  misc_feature (153)..(153): n is a, c, g, or t
  misc_feature (155)..(156): n is a, c, g, or t
  misc_feature (162)..(162): n is a, c, g, or t
  misc_feature (170)..(170): n is a, c, g, or t
  misc_feature (179)..(179): n is a, c, g, or t
  misc_feature (185)..(185): n is a, c, g, or t
  misc_feature (189)..(190): n is a, c, g, or t
  misc_feature (193)..(193): n is a, c, g, or t
  misc_feature (197)..(197): n is a, c, g, or t
  misc_feature (205)..(205): n is a, c, g, or t
  misc_feature (210)..(210): n is a, c, g, or t
  misc_feature (213)..(213): n is a, c, g, or t
  misc_feature (231)..(232): n is a, c, g, or t
  misc_feature (237)..(237): n is a, c, g, or t
  misc_feature (241)..(241): n is a, c, g, or t
  misc_feature (243)..(243): n is a, c, g, or t
  misc_feature (247)..(247): n is a, c, g, or t
  misc_feature (250)..(250): n is a, c, g, or t
  misc_feature (252)..(252): n is a, c, g, or t
  misc_feature (255)..(255): n is a, c, g, or t
  misc_feature (294)..(294): n is a, c, g, or t
  misc_feature (296)..(296): n is a, c, g, or t
  misc_feature (305)..(305): n is a, c, g, or t
  misc_feature (314)..(314): n is a, c, g, or t
  misc_feature (358)..(358): n is a, c, g, or t
  misc_feature (361)..(361): n is a, c, g, or t
  misc_feature (372)..(372): n is a, c, g, or t
  misc_feature (402)..(402): n is a, c, g, or t
  misc_feature (416)..(416): n is a, c, g, or t
  misc_feature (420)..(421): n is a, c, g, or t
  misc_feature (428)..(428): n is a, c, g, or t
  misc_feature (430)..(430): n is a, c, g, or t
  misc_feature (434)..(434): n is a, c, g, or t
  misc_feature (436)..(436): n is a, c, g, or t
  misc_feature (440)..(440): n is a, c, g, or t
  misc_feature (451)..(451): n is a, c, g, or t
  misc_feature (484)..(484): n is a, c, g, or t
  misc_feature (489)..(489): n is a, c, g, or t
  misc_feature (491)..(491): n is a, c, g, or t
  misc_feature (505)..(505): n is a, c, g, or t
  misc_feature (518)..(539): n is a, c, g, or t
  misc_feature (543)..(543): n is a, c, g, or t
ctnaaccccaaaccctnacgacanaaacaccctnanccangcaaccccangnaaccacancccatgccnccggggnnnnggnngncaaanccatcanctngtcctnaaccangatgnancaacntcttccctnnctcatganctcctnatcananncatttnaccacctnaataacctncaacangctnnctntatnaccccctngccancanccttcccctctcgcattnnccgcncggngnggangangncanccttggcctaatgaggtagctatagttgcagcccaaggncngttcagagntcaggatcngctttgaaggctggattctatctacataagtcctttcaattccnccngggccagagcngctccaccactgtgcacttagccatgatgncttctgaaaccttntatnntcatttncncatntntttngaagcagaggnacaaccagaaggcccttaactatcaccagtgcntctcntnttcacactctcttntccattccctttnnnnnnnnnnnnnnnnnnnnnnacanataaagaaactgaggcccacggtttcagctagacaatgatttggccaggcctagtaaccaaggccctgtctctggctactccctggaccacgaggctgattcctctcatttccagcttctcagtttctgcctgggcaaatggccaggggccaggagtggggagagttgtgatggaggggagaggggtcacacccaccccctgcctggttctaggctgctgcacaccaaggccctgcatctgtctctctgcatatatgtctctttggagttggaatttcattatatgttaagaaaataaaggaaaatgacttgtaaggtc

SEQ ID NO: 258516 - DNA, 886 bp, Homo Sapiens
  misc_feature (327)..(366): n is a, c, g, or t
  misc_feature (368)..(374): n is a, c, g, or t
  misc_feature (378)..(403): n is a, c, g, or t
  misc_feature (763)..(772): n is a, c, g, or t
ggtagacaccaaagaggcatactctgatttttatactctgttttagcaggtgctcttttctttgaatggagatttgatgagcaagtggttaggatgcagggagagctactatgggtgatattttccttgtttaggagctgtgagttaaaattgtatcctttctggtttatctaaggaaagtcaaatcttgacagaaaacatttttccttggaaggtcaactctcagacatctatatttggtttccctcagtcctcataacttccttcttgctgaacatattttattctcttttcagagaaggaaaataaaaaggattctaaaagttnnnnnnnnnnnnnnnnnnnnnnnnnnnnnnnnnnnnnnnncnnnnnnncccnnnnnnnnnnnnnnnnnnnnnnnnnnaaaaaatgtgtcggccgcctccggccctcaaaaaacctttctaaacctttcctttgggccccgcgggccccattaaggaagggggaacgtggcccatacttggttccctaggaaaaccccggcccatgaactaggtgctggaaattccccccaaataaaaaaacccccggaggggaaaccggagccgttccgaaacaattcccaatggggagtttcctgagggcattaaaggggactcttttcaccagggagcccaagggaaaccttcctttttccaatttaccgccccgcccttgcaatttatttggaaaaaagggggtggaaatttctttaagccatttttggcagaaatggggaaannnnnnnnnnaaacgggccttggatgaaccccctgaatccgcccagggggcttttcggccacctttgtggccccttggcggattaaaaatttttggccccatggggggaaaaaacggggggcgc

SEQ ID NO: 258517 - DNA, 1209 bp, Homo Sapiens
cgaacctgagtctgagttgcggccacttcaggagctgagaggagcaggatggaactgcaggatccaaagatgaatggagccctcccttcggatgctgtgggctacaggcaagaacgtgagggcttcctgcccagtcgtggtcctgctcctgggagcaagccggtccagttcatggatttcgaggggaagacatcgtttggaatgtcagtgttcaacctcagcaacgccatcatgggcagcggcatcctggggctggcctatgccatggcccacacgggggtcatcttcttcctggccctgctgctgtgcattgcgcttctgtcgtcctactccatccacctcctgctgacctgtgctggtattgcaggcatccgagcctatgagcagctgggacagagggcattcgggcctgcggggaaggtagtggtggccacagtcatctgtctgcacaatgttggggccatgtccagttacctgttcatcatcaaatctgagctccccctggttatcggcaccttcctgtacatggaccccgagggggactggttcttgaagggaaacctcctcatcatcatcgtcagtgtgttaatcatcctgcccctcgccctcatgaaacacttgggctacctggggtacaccagtggtctctctctgacctgcatgctgtttttccttgtttcggtcatctacaagaagttccaacttggctgtgctataggccacaatgaaacagcaatggagagtgaagctctcgtgggactccccagccaaggactcaacagcagctgtgaggcccagatgttcacagttgactcacagatgtcctacacagtgcccattatggcttttgcttttgtctgccaccctgaggtgctgcccatctatacggagctctgccgggccctccaagcgcaggatgcaggccgtggccaacgtgtccattggggccatgttctgcatgtatgggctcacagcaacctttggatacctcaccttctacagcagtgtgaaggcggagatgctgcacatgtacagccagaaggacccgctcatcctctgtgtgcgcctggccgtgctgctcgcggtgaccctcactgtgccagtcgtgctgttccctatccgccgggccctgcagcagctgcttttcccaggcaaggccttcagctggccacgacatgtggccatagctctgatcctgcttggtttggt

SEQ ID NO: 258518 - DNA, 2049 bp, Homo Sapiens
  misc_feature (110)..(110): n is a, c, g, or t
  misc_feature (930)..(930): n is a, c, g, or t
  misc_feature (1988)..(1988): n is a, c, g, or t
tgccgaccttgctgcctacactgccctcaagttctacctgcagggcccagagcctgagcctgggcagggtaccgaggatcgctttgtgatgtacatgggcagccgccagncactggggactacatgggtgtgtctctgcgtgacaagaaggtgcactgggtgtatcagctgggtgaggcgggccctgcagtcctaagcatcgatgaggacattggggagcagttcgcagctgtcagcctggacaggactctccagtttggccacatgtccgtcacagtggagagacagatgatccaggaaaccaagggtgacacggtggcccctggggcagaggggctgctcaacctgcggccagacgacttcgtcttctacgtcggggggtaccccagtaccttcacgccccctcccctgcttcgcttccccggctaccggggctgcatcgagatggacacgctgaatgaggaggtggtcagcctctacaacttcgagaggaccttccagctggacacggctgtggacaggccttgtgcccgctccaagtcgaccggggacccgtggctcacggacggctcctacctggacggcaccggcttcgcccgcatcagcttcgacagtcagatcagcaccaccaagcgcttcgagcaggagctgcggctcgtgtcctacagcggggtgctcttcttcctgaagcagcagagccagttcctgtgcttggccgtgcaagaaggcagcctcgtgctgttgtatgactttggggctggcctgaaaaaggccgtcccactgcagcccccaccgcccctgacctcggccagcaaggcgatccaggtgttcctgctggggggcagccgcaagcgtgtgctggtgcgtgtggaacgggccacggtgtacagcgtggagcaggacaatgatctggagctggccgacgcctantaccctggggggcgtgccgcccgaccagctgcccccgagcctgcgacggctcttccccaccggaggctcagtccgtggctgcgtcaaaggcatcaaggccctgggcaagtatgtggacctcaagcggctgaacacgacaggcgtgagcgccggctgcaccgccgacctgctggtggggcgcgccatgactttccatggccaacggcttccttcgcctggcgctctcgaacggggcaaccgctcactggcaacgtctactccggcttcggcttccacagcgcccaggacagtgccctgctctactaccgggcgtccccggatgggctatgccaggtgtccctgcagcagggccgtgtgagcctacagctcctgaggactgaagtgaaaactcaagcgggcttcgccgatggtgccccccattacgtcgccttctacagcaatgccacgggagtctggctgtatgtcgatgaccagctccagcagatgaagccccaccggggaccaccccccgagctccagccgcagcctgaggggcccccgaggctcctcctgggaggcctgcctgagtctggcaccatttacaacttcagtggctgcatcagcaacgtcttcgtgcagcggctcctgggcccacagcgcgtatttgatctgcagcagaacctgggcagcgtcaatgtgagcacgggctgtgcacccgccctgcaagcccagaccccgggcctggggcctagaggactgcaggccaccgcccggaaggcctcccgccgcagccgtcagcccgcccggcatcctgcctgcatgctgcccccacacctcaggaccacccgagactcctaccagtttgggggttccctgtccagtcacctggagtttgtgggcatcctggcccgacataggaactgatgggaagcctcgggactcggctccgcgcccagagccgccagcgctcccggcctggccgctggcacaaggtctcccgtgcgctggggagagaaccggatctgcctggtgaacggacgggggcccggccttgggaaccgggaggggccgcacccggnacgccacgaggggggaaaaacaccccgagggccggaacccttttttttgtgggagggggct

SEQ ID NO: 258519 - DNA, 1067 bp, Homo Sapiens
  misc_feature (48)..(49): n is a, c, g, or t
  misc_feature (58)..(59): n is a, c, g, or t
  misc_feature (67)..(67): n is a, c, g, or t
  misc_feature (926)..(926): n is a, c, g, or t
  misc_feature (937)..(937): n is a, c, g, or t
  misc_feature (951)..(951): n is a, c, g, or t
  misc_feature (974)..(974): n is a, c, g, or t
  misc_feature (976)..(976): n is a, c, g, or t
tccctcccgctaattggcgtccggccccccgcccatcgccgcaatacnnccacccacnncccctaanttcctaagtagcgaggcctgggtggcgaattcggcacgaggcctcccgccgcagccgtcagcccgcccggcatcctgcctgcatgctgcccccacacctcaggaccacccgagactcctaccagtttgggggttccctgtccagtcacctggagtttgtgggcatcctggcccgacataggaactggcccagtctctccatgcacgtcctcccgcgaagctcccgaggcctcctcctcttcactgcccgtctgaggcccggcagcccctccctggcgctcttcctgagcaatggccacttcgttgcacagatggaaggcctcgggactcggctccgcgcccagagccgccagcgctcccggcctggccgctggcacaaggtctccgtgcgctgggagaagaaccggatcctgctggtgacggacggggcccgggcctggagccaggaggggccgcaccggcagcaccagggggcagagcacccccagccccacaccctctttgtgggcggcctcccggccagcagccacagctccaaacttccggtgaccgtcgggttcagcggctgtgtgaagagactgaggctgcacgggaggcccctgggggcccccacacggatggcaggggtcacaccctgcatcttgggccccctggaggcgggcctgttcttcccaggcagcgggggagttatcactttagacctcccaggagctacactgcctgatgtgggcctggaactggaggtgcggcccctggcagtcaccggactgatcttccacttgggccaggcccggaacgcccccctacttgcaggtgcagggggaccgaagaagcagtccctgctgcgggcggaaggacgnaaccaggggantttctccacgtcgntgaaccgacccctgcaggtgctngnagatgggcaaaaggggacccgggttagggtgggaatgagaaaggggggaagggtggctcccgttctgggaaggtgggaaagtctacttaaa

SEQ ID NO: 258520 - DNA, 1304 bp, Homo Sapiens
gtcttcgggggcgcctggcgcctggcgggtctagaggactcacaatctcggcccgggtcagtcttcggcgtggtctgaaaagggaccgcctcgcccgcccggcgtgggcagaaatctggccgggcttccagggtgctccaaggtgcatgggtgtgacccccgccatccgggtgggcgccccccaggggcctccccgtgcagcctcagtctcttcacacagccgctgaacccgacggtccccggaagtttggagctgtggctgctggcccgggaggccgcccacaaaggagggtgtggggctgggggtgctctgccccctgggtgctgccggtgcggcccctccctggcttccaggcccgggccccgttccgtcaccagcaggatccggttcttctcccagcgcacggagaccttgtgccagcggccaggccgggagcgctggcggctctgggcgcggagccgagtcccgaggccttccatctgtgcaacgaagtggccattgctcaggaagagcgccagggaggggctgccgggcctcagacgggcagtgaagaggaggaggcctcgggagcttcgcgggaggacgtgcatggagagactgggccagttcctatgtcgggccaggatgcccacaaactccaggtgactggacagggaacccccaaactggtaggagtctcgggtggtcctgaggtgtgggggcagcatgcaggcaggatgccgggcgggctgacggctgcggcgggaggccttccgggcggtggcctgcagtcctctaggccccaggcccggggtctgggcttgcagggcgggtgcacagcccgtgctcacattgacgctgcccaggttctgctgcagatcaaatacgcgctgtgggcccaggagccgctgcacgaagacgttgctgatgcagccactgaagttgtaaatggtgccagactcaggcaggcctcccaggaggagcctcgggggcccctcaggctgcggctggagctcggggggtggtccccggtggggcttcatctgctggagctggtcatcgacatacagccagactcccgtggcattgctgtagaaggcgacgtaatggggggcaccatcggcgaagcccgcttgagttttcacttcagtcctcaggagctgtaggctcacacggccctgctgcagggacacctggcatagcccatccggggacgcccggtagtagagcagggcactgtcctgggcgctgtggaagccgaagccggagtagacgttgccagtgagcggtgccacgttcgagagcgccaggcgaaggaagccgt

SEQ ID NO: 258521 - DNA, 598 bp, Homo Sapiens
ggaattagaagctctcttgggttttacattgagagtaggtgttccaaacactcggcctgtgaaaaagacgatggaaattccgaaagattccttgcagaagtacctcaaagacttactgggtatccagaccacaggcccattggaactacttcagtttgatcacgggccagtcaaatcccaacttactacatcaggctggctaatcgtgatctagttctgaggaagaagcccccagggacactccttccatctgcccatgccatagagagggagttcaggattatgaaagcccttgcaaatgctggagtacctgtccctaacgttcttgatctctgtgaagattcaaggtaaagttcagatgtttttgctattgcactttcaagctacaggagagaaaagcccatatgctaacacaaattcccaatttgttaaagacaaataaaatttgggtaggagggaaaagaaactttatcacaacctctcccagaagttctcagatatttaagttatcctgcaagataagtatatgcctgctttagggataattggtagaaaacatcttttttaacattcaaaaaatacatattaatctagtttc

SEQ ID NO: 258522 - DNA, 951 bp, Homo Sapiens
  misc_feature (779)..(814): n is a, c, g, or t
ggcctgggtggcgaattcggcacgaggcgccttcccagcgcgcagcccttcacctctccgtgccgcgccccgcggccagggtcgcgctggtgctgtctggatgcggagtctacgatgggaccgagatccacgaggcctcggcgatcctggtgcacctgagccgtggaggggctgaagtccagatctttgctcctgacgtccctcagatgcacgtgattgaccacaccaaggggcagccgtccgaaggcgagagcaggaatgttttgaccgagtctgcgaggatcgcccgtggcaaaatcacagacctggccaacctcagtgcagccaaccatgatgctgccatctttccaggaggctttggagcggctaaaaacctgagcacgtttgccgtggacgggaaagattgcaaggtgaataaagaagtggagcgtgtcctgaaggagttccaccaggccgggaagcccatcggtcactcacttaaggacctgcctggtcactgtccagggaggcccctaaagtggagcctcaggaagaggtgcaggctcagagctcctgaaggaggtccctgctgcagccgtgtcacagccgggggtgaaggtttcgcccatggtctccacctcgggatcccgtccctgccagagaagtgctccttggatgagcgcccaggaggggaggaccccatggcccctttccttctgggacctgcaccacaaattctcccatggaacctacgtacacacgaacccgaacctcggggggagtcctctgtgtcgcgttgnnnnnnnnnnnnnnnnnnnnnnnnnnnnnnnnnnnngcgttatattcgccccgcctcagcgaatacggtcgttttgtttttgacacccaccccggtactttttttcccgcctgttcccgccccgcctttggtgtatccatatgggcgcacgggcggccgccccccctgtttcc

SEQ ID NO: 258523 - DNA, 1274 bp, Homo Sapiens
  misc_feature (196)..(196): n is a, c, g, or t
  misc_feature (975)..(991): n is a, c, g, or t
  misc_feature (1035)..(1035): n is a, c, g, or t
  misc_feature (1111)..(1112): n is a, c, g, or t
gtttgtagaggggtgggtgcgcacgtctgtccctgcgtgaccttccgaccccgctgtcctcaccgcaatggcgcctgtgagggccctggtggcctcgaggctcgctgcggcatctgcattcacgtccctgtcccccggcggtcggacgccttcccagcgcgcagccttcaactctccgtagccgcgccccgcaccnagggtcgcgctggtgctgtctggatgcggagtctaagatgggaccgagatacaagaggcctcggcgatcctgggtgcaactgagccgtggaagggctgaagtccagatatttgctcctgacgtccctcagatgcacgtgattgaccacaccaaggggcagccgtccgaagcgagagcaggaatgttttgaccgagtctgcgaggatcgcccgtggcaaaatcacagacctggccaacctcagtgcagccaaccatgatgctgccatctttccaggaggctttggagcggctaaaaacctgagcacgtttgccgtggacgggaaagattgcaaggtgaataaagaagtggagcgtgtcctgaaggagttccaccaggccgggaagcccatcggcttgtgctgcattgcacctgtcctcgcggccaaggtgctcagaggcgtcgaggtgactgtgggccacgagcaggaggaaggtggcaagtggccttatgccgggaccgcagaggccatcaaggccctgggtgccaagcactgcgtgaaggaagtggtcgaagctcacgtggaccagaaaaacaaggtggtcacgaccccagccttcatgtgcgagacggcactccactacatccatgatgggatcggagccatggtgaggaaggtgctggaactcactggaaagtgacgcgcatggacggggcccagctaggcgccaggacttggcctcaccctctggctgaggagctgtcggctgctttccatccagctgggagtctggcaggcccnnnnnnnnnnnnnnnnngcgaaacctgcaggcgttctctctctaaagaggatgtgctgcantgccatgggggaatgttccttcctgggtggtggctggggctgctctcacatacaggagggccgaggggggcaattnncgttctctggccacaggggactttgccttcactggggtccccaaaaaacaaaatcgcagcccggctttttccagaaaatagaaaaattctggccccgtcgggaaggttttttaccttccgggggtaaattaaagtttttttgggaaaggaagaaaaacattt

SEQ ID NO: 258524 - DNA, 1791 bp, Homo Sapiens
  misc_feature (33)..(33): n is a, c, g, or t
  misc_feature (39)..(39): n is a, c, g, or t
  misc_feature (57)..(57): n is a, c, g, or t
  misc_feature (65)..(65): n is a, c, g, or t
  misc_feature (134)..(134): n is a, c, g, or t
  misc_feature (154)..(154): n is a, c, g, or t
  misc_feature (157)..(157): n is a, c, g, or t
  misc_feature (164)..(164): n is a, c, g, or t
  misc_feature (166)..(166): n is a, c, g, or t
  misc_feature (168)..(168): n is a, c, g, or t
  misc_feature (173)..(173): n is a, c, g, or t
  misc_feature (181)..(181): n is a, c, g, or t
  misc_feature (214)..(214): n is a, c, g, or t
  misc_feature (223)..(223): n is a, c, g, or t
  misc_feature (231)..(231): n is a, c, g, or t
  misc_feature (237)..(238): n is a, c, g, or t
  misc_feature (243)..(243): n is a, c, g, or t
  misc_feature (250)..(250): n is a, c, g, or t
  misc_feature (253)..(253): n is a, c, g, or t
  misc_feature (274)..(274): n is a, c, g, or t
  misc_feature (294)..(294): n is a, c, g, or t
  misc_feature (303)..(303): n is a, c, g, or t
  misc_feature (307)..(307): n is a, c, g, or t
  misc_feature (329)..(329): n is a, c, g, or t
  misc_feature (339)..(339): n is a, c, g, or t
  misc_feature (373)..(373): n is a, c, g, or t
  misc_feature (378)..(378): n is a, c, g, or t
  misc_feature (404)..(404): n is a, c, g, or t
  misc_feature (406)..(406): n is a, c, g, or t
  misc_feature (412)..(412): n is a, c, g, or t
  misc_feature (418)..(418): n is a, c, g, or t
  misc_feature (420)..(420): n is a, c, g, or t
  misc_feature (425)..(425): n is a, c, g, or t
  misc_feature (439)..(439): n is a, c, g, or t
  misc_feature (443)..(443): n is a, c, g, or t
  misc_feature (463)..(463): n is a, c, g, or t
  misc_feature (471)..(471): n is a, c, g, or t
  misc_feature (489)..(489): n is a, c, g, or t
  misc_feature (516)..(516): n is a, c, g, or t
  misc_feature (527)..(527): n is a, c, g, or t
  misc_feature (558)..(558): n is a, c, g, or t
  misc_feature (596)..(596): n is a, c, g, or t
  misc_feature (606)..(606): n is a, c, g, or t
  misc_feature (621)..(621): n is a, c, g, or t
  misc_feature (624)..(625): n is a, c, g, or t
  misc_feature (630)..(630): n is a, c, g, or t
  misc_feature (641)..(641): n is a, c, g, or t
  misc_feature (680)..(680): n is a, c, g, or t
ctcatcttatttatattaacaccaatctaaaangttgtncttcctcacacttgtcanaaatgggnaaggtatagcatgacactgaccactccccaccggaatcaggaaaagaagattgaccacccacacaacanaaataattggaactggaaancancccttcngngnaaaancaattggntaagcgaagaagcggggaggccgggcagttgcnttgggaaancccaaggnctttgnnctctnccccctnctnggtctggggggctgtggcccngagctggacagagtagaggntcttggtgnactnacggaggagctggggcagaaangacccgtggnaagtcggctgaaagtcccccgatgttaacaaggncgtgnaaaggggtgaggcttctggtgaaggntngtgtgnccgttntngtggncgtccgtgaggtgngtgnaggggggttgtgggggtccntgaaaccntggagctgcaggggcgtncgcgggcaggaaggcctgcccagcctntgaagtggggnagcccctggggccacacttgaggggcccccntgttggggcctggaagccccaagtgtgccagcctcctncctcccccgnagacggcggggggcnggnnggggncatctgtaagncactgggttcaaagggtggctgctcccagctgggggcgngaacaccaggtggctggcccagacgggcccccctggcccagctgggctgccctgccaggcgccatcttctccatcagactcccctgagccctgggcctcttcctcgtcctcctcttcactcatcatcatcaaactgctggatgcggtccttgtagcatatctcaagtaggttggcgttggggttctcatcgtcagcattgagggagaaggtgatgttggctgtcttgtcaaaaggtgcgttcacactctcctcctgctccccaaactcctcatcattgaagccgaagtggtcaatgaaggcagaggtcatgcgctgcatctggaagtccatgaaggcctgctgcaggacagcctcctcagggaagttgaactccttgagccggtcgtcctcatcgctcacgggaggagtgtaggtggtgggtgttcaccaggtccacccatgttcttcttgttggtctccgccaggggccccgatacgaaggcttcccactgctcctgctgctcgctgggcagctccttcagcagctgccgcagctgctctgcattgggccccttctccgtgttctgcaccagggcaccggccactcttgtcaggtgacccatgtagcctttccgagggcctcccgcacactgtacacggtcgttctcctcccaggacgtcaggatccgctccaccaggcggcactgctgcagcagatgtttcacaacagggttttggatgggcgtctcagggctgctgtcaggaggtggccccaagctcagcatggtgctcacgcatccctctacttgggcatgcaagaagttgttgaagacataatggaagaagaggtccagcatggtgttgggcacgtccagtgccaggagctcgtgcgtcagggctgcatcattggcgctcagggcactggccaggagcttgaccacgtgcagccgcgtgttgcccagaggcggagccagcatgccccatgtcatctgtagcggctccagcttgggaggctccagcaggagctggtggaagcagctgagccgcgggcgtagggcgtgccaggcgcccacactggacacagtgcggacgcgtgggtcgacgatatccaacgaattgcggaccagtacc

SEQ ID NO: 258525 - DNA, 997 bp, Homo Sapiens
  misc_feature (710)..(710): n is a, c, g, or t
  misc_feature (783)..(783): n is a, c, g, or t
  misc_feature (906)..(906): n is a, c, g, or t
  misc_feature (936)..(936): n is a, c, g, or t
  misc_feature (979)..(979): n is a, c, g, or t
gatgctgaatttggtacgctggaccctcggacagacagcaagagagagacaagcccgaggcctgacttctagcactcctgagtttgagtccctatgagcagtggtaacctagggaccaccaagcatccagatataattctttcctcagtaatagaaaaaagaatctgggatctaagaagatacctactcattttctaagtgactggccatgtcattgtcccacttataccgggatggggaaggccgcattgatgatgatgatgacgagcgggagaactttgagatcactgactgggatctccagaatgagttcaaccccaaccgacagcgccactggcagaccaagggaagaagccacctacggggtgtgggcagagcgagaactcggatgatgagaaggcccacctttggaggaaaacgggcccgtgaatactctgcgccagtcaacttcatcagcgcagggctcaagaaaggggcagcggaggaggcagagttggaagattctgatgacgaagagaaacctgttaagcaggacgactttcctaaggattttggaccaaggaagctaaaaacgggtggcaattttaagcccagccagaaaggtttagcaggaggaaccaaatctttcatggacttcggcagctgggaaagacacacaaaaggaattggacagaagcttcttcagaagatgggctacgtccctggacggngcctcgggaagaatgcacaaggtatcattaacccaattgaagccaagcagagaaagggaaaaggtgctgtggnggcttatggatccgagcgcaccactcagtccatgcaagacttccctgtggttgactcagaggaagagctgaagaggagtttcagaaggagctgagccagtgggaggaacgacccagtgaagcnagaagagcccaatactctacagaccgtggnagagttgaagccaaggcatgatagcaagaactactgctagganagaacttctcagtcaggt

SEQ ID NO: 258526 - DNA, 446 bp, Homo Sapiens
ggttttgttaccccaggctggtttccaagcccatagctttaaagagaccctctcacccacagattccccaaagtgctgggattgccaggtgtgattcatggcaccccagactttgctgcctttcttacatgatccaggcccagaacccaaactcaggcactgtatagatgaccactttcgtaaactactgacctagcttgttgccaattgttgattgaacttcccataacatccacttcgtgtctgttcctctgtatacagccaccttctgttcctgtcatgagcctttaggtctccatttgcatattgcaaatactatgttccatgtaggtagctcattcagggccttgctcttcacttcaaaaaaggttcccttgaggactggctgtcaatttgtgttgctgtgttggttgttgatgaaaataataaaatgattgattacataa

SEQ ID NO: 258527 - DNA, 1210 bp, Homo Sapiens
  misc_feature (22)..(23): n is a, c, g, or t
  misc_feature (25)..(25): n is a, c, g, or t
  misc_feature (30)..(30): n is a, c, g, or t
  misc_feature (35)..(35): n is a, c, g, or t
  misc_feature (41)..(41): n is a, c, g, or t
  misc_feature (49)..(49): n is a, c, g, or t
  misc_feature (51)..(51): n is a, c, g, or t
  misc_feature (61)..(61): n is a, c, g, or t
  misc_feature (64)..(66): n is a, c, g, or t
  misc_feature (69)..(69): n is a, c, g, or t
  misc_feature (74)..(74): n is a, c, g, or t
  misc_feature (76)..(76): n is a, c, g, or t
  misc_feature (78)..(78): n is a, c, g, or t
  misc_feature (80)..(80): n is a, c, g, or t
  misc_feature (82)..(82): n is a, c, g, or t
  misc_feature (85)..(85): n is a, c, g, or t
  misc_feature (92)..(92): n is a, c, g, or t
  misc_feature (99)..(99): n is a, c, g, or t
  misc_feature (109)..(109): n is a, c, g, or t
  misc_feature (134)..(134): n is a, c, g, or t
  misc_feature (136)..(136): n is a, c, g, or t
  misc_feature (176)..(176): n is a, c, g, or t
agccagacaaaagcctgccagnngnaaccngggancacttntacgtgtnantaggcgcganaannnaangaggngnantnanggnacccaanagcgggnggctcggccngttttccctgcccggagccacgtgntngcaggttagggccaggcccatctgagccagaagaacacgntcaccatcccctcaggcagcaccctcgcattccgggtgccccagctggttatttactctaacttggacgtccttctcttcccgggataagaagcagaggaccttccagccacccgccacaggccacaagcgttccacgagcgaaggcgcctggccacagctgccctctggcctctccatgatgaggtgcctccacaacttcctgacagatggggtccctgcggagggggcgttcactgaagacttccaggcctacgggcagaggtggagaccatctccaaggaactggagcttttggacagaggagctgtgccagctgctgctggagggcctggagggggtgctgcgggaccagctggccctgcgagccttggaggaggcgctggagcagggccagagccttgggccggtggagcccctggacggtccagcaggtgctgtcctggagtgcctggtgttgtcctccggaatgctggtgccggaactcgctatccctgttgtctacctgctgggggcactgaccatgctgagtgaaacgcagcacaagctgctggcggaggcgctggagtcgcagaccctgttggggccgctcgagctggtgggcagcctcttggagcagagtgccccgtggcaggagcgcagcaccatgtccctgccccccgggctcctggggaacagctggggcgaaggagcaccggcctgggtcttgctggacgagtgtggcctagagctgggggaggacactccccacgtgtgctgggagccgcaggcccagggccgcatgtgtgcactctacgcctccctggcactgctatcaggactgagccaggagccccactagcctgtgcccgggcatggcctggcagctctccagcagggcagagtgtttgcccaccaagctgctagccctaggaaggccaggagcccagtagccatgtggccagtctaccatgggcccaggattggggaacccataacgttggatacgacggaacaacaaagaacagcaacaaagcggggggcccctaagaaccc

SEQ ID NO: 258528 - DNA, 1213 bp, Homo Sapiens
aagcaggctggtacaggtccggaattccccgggatatcgtcgacccacgcgtccgcggacggcgtggggggagcatcttatgtggactttctctgtcatatgcacaaggagattcggcagctactgagctaaagcaagtgggtaaatggcatagggcccaggctagcttccagaaagcaccccaggatgtcagagaaattgggacagtaacatatcttatgtaagctgacctcagtctctctggggggagggggagatataaggagacaccttctttctgggctcaagtatcctgccactctgtcatgtcctgctgatggaaggtgcccctgttccctcattctaccctctttttcctgctaatcctgtcataatgaatgtagcttctcagttcactgtatatgattcggtattgggggtttggaggcacccagaccctggcaatattatgtgtccctttggaccagtctcccaagaggagaggggcaggcaggaaagagtggggatcctaaggttactacagggggctcagtgtcatccacaacttcctatattagggataaaacatataggtgcacaagagctggggtatagcccataggtggtggagagaaaagtggtcagtccttcttgggcctggaggttagcagtcaagtttctctgctttcactgctcgctcgctctctcctgcaatgattgatgatcactccgtggatagagaggcacactgtcagaggtgaccggagaactgagttgcaaaatatattaagatctggtagaggtaccagcttcctttccagctggagaggccccaacactggatggttctgtagggagcctagggagcctggtcatcaacttgcaatacctcacagagccagttcacatcccactctgagctcccacgagaaacactgcttctccaggcccggggttgttggggagagaggcagaggcagctggagcgccgttctctcctgctgggacaccgcttgggctttggtattgactgagtggctgacagttatcttccaaccccaactggcttgggggcaggacaagggctaggcttgatggtggccaggcttgcctgctccccacctgggatgcccctgctctggacctctcatttctcttcattggtttatttttcaatgcatctttaatttgtaaagaaataaaataaattaagatgtaaccattagcctcaaaa

SEQ ID NO: 258529 - DNA, 435 bp, Homo Sapiens
gttcatacaggtgattcgttggaaaaattcattgtctctagagattgtcagcttggtccacatcaccagaaatctaactccctgaaacctctttctatgtcccagctgaagcaatggaaacatttttctggagatcatttaaatcttacagatccttttcttgaaagaataacagaaaatgtgtcattcatttttcagaatataaccactcaagctactggcacatagtgaaagattacttctgacattccattgctcttcttttgaaaattagtatggtaattaaatgtactttttgaaaattaatagaattatttaaattacagtatatgttgcaaaatatatcacttttgatacaatagtcaaaattgagtggtttaatgttttgtaaatattaagtgtttaaaggaaaaataaagatgtgcttatatcatt

SEQ ID NO: 258530 - DNA, 590 bp, Homo Sapiens
  misc_feature (504)..(516): n is a, c, g, or t
  misc_feature (562)..(562): n is a, c, g, or t
  misc_feature (576)..(576): n is a, c, g, or t
ggtctggagtccacttgtttggttgtgccctatggttggacatttaccaaactcgagtctacccatccaagcagtttgacgttctgaaggatgactatgactacgtgttaatcagcagcgtcctctttggcctggtttttgccaccatgatcactaagagactggcacaggtgaagctcctgaatcgggcctggcgataaagaacaaagactgtgcctaaaagtggagagccaggggagtgtgggtcagataagcagctacagctgcagtttggtggattggtggagtatgtgtgtgtgtcagtgctcagctaagaactgtagggaagatggatgaccttcacgcagaactccttttgggatatacatgatgcagaaaggatcctacatggagagagacagaactctctcagctgacactctcagagattcctgatgggctttctcttgaagtccaaaggcgtctgcattgtttcctttctttgcccatccatgaatgttctgnnnnnnnnnnnnnaataagaataccggctgattttgtgaggaccgttaaaataaccacnccggttggcacatnaaaaaaaccaaaaa

SEQ ID NO: 258531 - DNA, 2123 bp, Homo Sapiens
  misc_feature (103)..(103): n is a, c, g, or t
  misc_feature (957)..(970): n is a, c, g, or t
  misc_feature (976)..(977): n is a, c, g, or t
  misc_feature (1297)..(1297): n is a, c, g, or t
  misc_feature (1300)..(1300): n is a, c, g, or t
  misc_feature (1312)..(1312): n is a, c, g, or t
  misc_feature (1374)..(1374): n is a, c, g, or t
  misc_feature (1480)..(1480): n is a, c, g, or t
  misc_feature (1489)..(1489): n is a, c, g, or t
  misc_feature (1664)..(1749): n is a, c, g, or t
  misc_feature (1779)..(1797): n is a, c, g, or t
  misc_feature (1854)..(1942): n is a, c, g, or t
caagcataagctgccaaaccaaggtgaggacagacgagtgccacaaaactgtttcctatcttcaatccagagagaagtgataaaccaaatgcaagtgatcctncagttcctttgaaaatcccctgcaaagaaatgtgataccaagtgtgacccgagtccttcagcagaccatgacaaaacaacaggttttcttgttggagaggtggaaacagcggatgattctggaactgggagaagatggctttaaagaatacacttcaaacgtctttttacaagggaaacggttccacgaagccttggaaagcatactttcaccccaggaaaccttaaaagagagagatgaaaatctcctcaagtctggttacattgaaagtgtccagcatattctgaaagatgtcagtggagtgcgagctcttgaaagtgctgttcaacatgaaaccttaaactatataggtctgctggactgtgtggctgagtatcagttcaatgtggcttaattgtggtggcctacaaagatggatcacctgcccacccacatttcatggatgcagagctctgttcccagtactggaccaagtggcttcttcgactagaagaatatacggaaaagaaaaagaaccagaatattcagaaaccagaatattcagaatagggagcaagttgctatttgggaacattcagcaccttctcacagtttgggaacatatattgctgtttactccagtgtaaaaatgaggtgccactggatctgagtgctacacgaacacaagtagaagtattaatttgttgaaatgtgttgttaccaaaaagactgaaaagccccaaagtctagatataaagacctagacttcggcacgcgaaatcccagctatgctacctcttatttacctgaaaggaggacacgcaggatgggcagtcatgctggtgactcttgtactcccttgaaggacattggtnnnnnnnnnnnnnncgttgnnccaggcaggatgcccagtctttgagctgaaattgaaaggcagtgaggctgagggtgccaaaatttccccagggttcacccaaaggggaaggggctacatgcccccagctgtgtgcagggaggacacatcagcccactaccgctgccaacaccaatgcctaaaacttgtttcatacatgggggttttctatatatttcagtggggaaaagcttacatttaaccttttgaaaaaataaatacgtgattagcctcaactaaacattgctgactataaagacagtatattcaccatgtcgctggcaatatgtcattgcgtaacnccnaataaccccccngaagtagccagaggccagtttgaacatcacaattctaagtgttttagtaactatatctggcntgagtcaacagatcatgtagatagagtcaattattgtttgtggagtttttcagctataggggaggggaactattaaaatccagctgtttctattcaataggtaatnaaaattagntgtccctgggtttgggaaacttaaatgcccattacagccctggggaagggttttctgtcttatggagtgagtcttagcatttaagttatacagttgctgccttaaaatagtagcctgctacaatgacttctttgggtagccattttcataagaaataaaatacaagatatgagtnnnnnnnnnnnnnnnnnnnnnnnnnnnnnnnnnnnnnnnnnnnnnnnnnnnnnnnnnnnnnnnnnnnnnnnnnnnnnnnnnnnnnnccttggcggcccccccggcccccaaaaaannnnnnnnnnnnnnnnnnnggggcgggggccccaaaggaaaaggaaaagggccaaaactgtttccaaagaaaaccnnnnnnnnnnnnnnnnnnnnnnnnnnnnnnnnnnnnnnnnnnnnnnnnnnnnnnnnnnnnnnnnnnnnnnnnnnnnnnnnnnnnnnnnnctttacgggatttttccacgggggtcccaccgagctcaatttcaatttaacccccgccctggccttttttgaaaaaagggtggaattccttaaacattctccccaaaggggaacccctccccaacgggttttattaaaccggaaatcccccggggggattaaaaaccctttggcccccttt

SEQ ID NO: 258532 - DNA, 1054 bp, Homo Sapiens
  misc_feature (508)..(508): n is a, c, g, or t
  misc_feature (523)..(523): n is a, c, g, or t
  misc_feature (531)..(531): n is a, c, g, or t
  misc_feature (541)..(541): n is a, c, g, or t
  misc_feature (553)..(553): n is a, c, g, or t
  misc_feature (577)..(577): n is a, c, g, or t
  misc_feature (659)..(659): n is a, c, g, or t
  misc_feature (781)..(781): n is a, c, g, or t
  misc_feature (906)..(906): n is a, c, g, or t
  misc_feature (915)..(915): n is a, c, g, or t
  misc_feature (918)..(918): n is a, c, g, or t
  misc_feature (920)..(920): n is a, c, g, or t
  misc_feature (939)..(939): n is a, c, g, or t
  misc_feature (941)..(941): n is a, c, g, or t
  misc_feature (950)..(950): n is a, c, g, or t
  misc_feature (952)..(952): n is a, c, g, or t
  misc_feature (954)..(954): n is a, c, g, or t
  misc_feature (972)..(972): n is a, c, g, or t
  misc_feature (984)..(984): n is a, c, g, or t
  misc_feature (994)..(994): n is a, c, g, or t
  misc_feature (997)..(997): n is a, c, g, or t
  misc_feature (1006)..(1006): n is a, c, g, or t
  misc_feature (1020)..(1020): n is a, c, g, or t
  misc_feature (1036)..(1036): n is a, c, g, or t
  misc_feature (1048)..(1048): n is a, c, g, or t
gggagcccagtcgagatggaggaagatgcgaccggcagacggcattcgctgggaatcgacggatagatctgggggctgcggcctagaggtccgggcttggagttcgcctcagacgcggtggagccgccggagtctgagaatggtcttcaggcaccatggaggacaatacgcatacatccagatcatcgagtgggaacacctggacaagaagaagttctacgtgtttggtgtggcaatgacaatgatgatccgtgtcagtgtctacccattcaccctcatccgcacccggttgcaagttcagaaggaggaagagcctctaccatgggaccttcgatgccttcatcaagatcctgcgagcagatggtatcactggcctctaccgagggttcctggtcaataccttcaccctcatctctggccagtgttatgtcaccacttatgagctcaccccggaagtttgtagctgactacagccagagtaacacagtcaaatcactggtggctggtngctcagcctcccttntggcccanagcatcacantgcccattgatntagtctcccagcacctgatgatgnaacgcaagggtgagaaaatgggccgctttcaggtgcgggggaaccagagggacaaggggtagttgcctttggccaaaccaangacatcatcaggcagatcctgcaggctgatggacttcgcggcttctatcgaggctatgtggcttcactgcttacctatatcccaaacagtgctgtctggtggcccttctatcacttctatgnagagcagctctcctacctgtgtcctaaggagtgccctcacattgtctttcaagctgtctcggggccctggctgcagcactgcctccatcctcaccaatccatggatgtcatacgaaccgtgtgcnggtgagggnaanantcatcatctgacttcaganantgatggcananangggcttggggctcatganggctctcggcanaatcactcancanacttcacantgtcatgtgttggnataaagctcaaaaatnactgcgactgantgtgga

SEQ ID NO: 258533 - DNA, 1238 bp, Homo Sapiens
  misc_feature (864)..(864): n is a, c, g, or t
ggatcggaggcgtttcttcaacagcagcggcagcagcgacgccagcatcggcgacccctcgcagtccgacgatcctgacgatcccgacgaccccgacttccccggcagcccggtgaggcggcggcggaggcgtcccggcggccgagtgcccaaggaccggcccagcctgaccgtgaccccaaagcgctggaagctgcgagctcgcccaagcctaaccgtgaccccaagacgcctggggctgcgagctcggcccccgcagaagtgcagcacaccctgcggcccgctccgacttccgcccttccccagccgcgactccggccgcctcagcccggacctcagcgtgtgcggccagcccagggacggcgacgagctgggcatcagtgcctccctgttcagctctctggcctcgccctgccccgggtccccaacgccaagggacagtgtcatctcgatcggcacctccgcctgtctggttgcagcctcagccgtcccgagcggcctccacctcccagaagtctccctggaccgagcatctctcccctgctcccaggagaaagcgacaggaggagccaaggacaccaggatggtccaccaaacccgcgccagcctcaggtcagttctctttggccttatgaactcaggaacccctgaggattctgagtttcgggcagatgggaagaatatgagagagtcctgctgtaaaaggaaactggtggtgggaaatggaccagagggtccaggtctgtcaagcacaggcaagaggagggccacaggcaaggactcttgtcaagagagagggcttcaagaggccgtccggagagagcatcaggaggccagtgttcccaagggccgcattgtgccaanggggaatagacaggctggagagaactagatcaagccggaagagcaaacatcaggaggcaacggaaacctctctcctccattcccaccgctttaaaaagggccaaaagctgggaaaagattcgttccccacccaggacctgactcctttacagaatgtctgcttttggaccaaaaccagggcttccttcagtttccacaagaagaaaattgtgattgatgtgtcagaggtctgcagcatctataccactgccacttctctctctggatccctcctatcagaatgttcaaaccggcctgtcatgaacagaacaagtggtgctccgtcctcttggcactcctcctctatgtatttgctaagccccttccaaaacact

SEQ ID NO: 258534 - DNA, 1912 bp, Homo Sapiens
  misc_feature (311)..(311): n is a, c, g, or t
  misc_feature (1716)..(1716): n is a, c, g, or t
  misc_feature (1758)..(1758): n is a, c, g, or t
gtggggggtttaccgcaccccccggggggaagaggttgtggggattttctataagtagagagaattaggcgtgtcttctcccattgttggggttcaagggctggtttttcaaaacttccctgcaccctcagggtggataccaccctggcctgggcccttcccaagaggtgctggggattgtccttggaaattctgagtgggatacaggaggagttagtaaagacccagtgaaaaaagcaatcccttatgttcctgggcttggaaaaatcactgggattatcttatgcacttacaaatgagactaagacgcntgatgggaaagtgcagattgctggtgaggaagggcaatgaagaagagactaggaaccaaattcatcatcattatcacacaaaggcatttggaaatgtcaccttacacatggtgagcacatatgggtgccagcccgagacagcaggataagtttcacaaaacttgaccaggcaggttagaagcaaggcatggttcaggatggcagagggcagggagacagaagggagtaggatgggagagaagagccagctggaagatgagtcagggggtgcaactggggagagcagctctgaatcctgcttctcagtgagaaagttgctaagatggctttgcagggagctgtcctatcgctgctcgagatcagcctgctgggcctatgatgataagcagggctgaccctcttgggctctgtagctaagcccaaaccctgctgaaaatggggcggggaggttgaggcagtgtgtggcaagtgacacagacggggactcccagctgggggtccctggaattacttgacatcccacagctggtgtcttcagcagtcatctggggcaacaatcccacctgcccattgtggttgttgaggatatcagagcttttgttttaaagcgcttgctacaaactcttaagatgcggatgggtttccctgtgaagcctccacaggcgggatgcaggcccatctgaggaggggcttggaaggaagaggagcacttgagacggggcagaactgggctggcctggggctcagcgacagctccattgcagacaaactgggctggggaaggcagctcccacctggcagaggatgcccttctgccccctgacaggagggaggagaccaccgcatccccgactttcagccctcacgtgccatctggtggctttgctgcagacactgccatgatctgagtggtctttggcaatcacgcattggcgggagtgtgaggttgcggggaaagagggactgaccatgggcctaggtggggaggcctggccactgtgcccacagcttaggaagggacagtcagagctcctctttgttgctatcgacggactgagccagaggccctggagccaggggggaacctagtggctcttggtcgccaagctgctggctgctgtcctccaggcgcctgcctgtgggggcatagtcccgcaggagcctgctctccactctgtgctgccaaaggctctcggtactcacgagtccctgcatcctcaggtacccctgctggcaaaaaggtggcaactttctggcgcgtgagggcgaacaggaagcaggactctgcataggagcttcgcaaatcggtggccaaacaggtctccaggaaacgcctcaaaggtaggatgggcccgatcggggcagtccagtctggtaagaagtcttccacgatgtgatggatggncccgtggcccgagccagggcccattgtgcagggcggaacctnaccttctggtcggggggggaggatccatagtattagatgacaagtatgaaaaaaggtagacttgcaagcctttttttgggggccccaaagaccggttataaaagaagaacctccttgtcgggcccggaaaattttctgcatatatccaggtgga

SEQ ID NO: 258535 - DNA, 1005 bp, Homo Sapiens
  misc_feature (90)..(144): n is a, c, g, or t
tatgtacaagggctcttgggaatgattctctcagaggcttaagctgtgctttgcctttcatgagaactgaaattatttggtaagcgcttnnnnnnnnnnnnnnnnnnnnnnnnnnnnnnnnnnnnnnnnnnnnnnnnnnnnnnntcaaggtcaaaggttccgttacagttactatgatgaatcccagggggaggatttatagatccattgaacatctagataaaatgggtatgagtattatagaacaattagaccctgtatcttttagcaattactggaagaaataccataatactatatgtggaagacatcccattggggtgttattaaatgctatcacagagctccagaagaatggaatgaatatgagtttttcgtttttgaattatgcccagtcgagccagtgtagaaactggcaagacagttcagtgagttatgcagctggagcactcacggtccactgaagctctgaatcctcagggatgccacctgcacattctcatactctgtccggggtcccagcctagcctttaccacgatactggtcctggtttggggggattctgaaacctcaaactaatagaactttcttctctttttttctagtaggtgtagtccttccttaatttcaactcattaaaaaatgctttatagtttagggcagtggaaggaaggctggcatcaaaatattttgatcaaaaaagatgacaatgtaaaggctcagttgtggcagacagttttttgaaagtaacttgtaaagcatttaccatatcctaaatttgcactctttgcagacttgtgcacatatattccgctttcagaatagttttgcaaattgtacacaaacaaacaaaaaggtggaagctttttaataaagaaattgcatttataaatgatctgtattagaatataataaatctccagttatagtcaattactacccatgttgtacaacagataccttctattttagttgctaataaagggctacacaactcaaaaaaa

SEQ ID NO: 258536 - DNA, 1963 bp, Homo Sapiens
  misc_feature (34)..(34): n is a, c, g, or t
  misc_feature (90)..(90): n is a, c, g, or t
  misc_feature (96)..(96): n is a, c, g, or t
  misc_feature (108)..(128): n is a, c, g, or t
  misc_feature (137)..(137): n is a, c, g, or t
  misc_feature (148)..(148): n is a, c, g, or t
  misc_feature (157)..(157): n is a, c, g, or t
  misc_feature (161)..(212): n is a, c, g, or t
  misc_feature (222)..(222): n is a, c, g, or t
  misc_feature (231)..(231): n is a, c, g, or t
  misc_feature (237)..(237): n is a, c, g, or t
  misc_feature (239)..(239): n is a, c, g, or t
  misc_feature (245)..(245): n is a, c, g, or t
  misc_feature (249)..(249): n is a, c, g, or t
  misc_feature (254)..(264): n is a, c, g, or t
  misc_feature (267)..(267): n is a, c, g, or t
  misc_feature (273)..(273): n is a, c, g, or t
  misc_feature (287)..(287): n is a, c, g, or t
  misc_feature (289)..(289): n is a, c, g, or t
  misc_feature (304)..(304): n is a, c, g, or t
  misc_feature (325)..(325): n is a, c, g, or t
  misc_feature (334)..(334): n is a, c, g, or t
  misc_feature (336)..(336): n is a, c, g, or t
  misc_feature (338)..(338): n is a, c, g, or t
  misc_feature (340)..(340): n is a, c, g, or t
  misc_feature (350)..(350): n is a, c, g, or t
  misc_feature (354)..(354): n is a, c, g, or t
  misc_feature (356)..(356): n is a, c, g, or t
  misc_feature (365)..(365): n is a, c, g, or t
  misc_feature (373)..(373): n is a, c, g, or t
  misc_feature (385)..(385): n is a, c, g, or t
  misc_feature (389)..(389): n is a, c, g, or t
  misc_feature (396)..(396): n is a, c, g, or t
  misc_feature (410)..(410): n is a, c, g, or t
  misc_feature (429)..(429): n is a, c, g, or t
  misc_feature (431)..(431): n is a, c, g, or t
  misc_feature (435)..(435): n is a, c, g, or t
  misc_feature (450)..(450): n is a, c, g, or t
  misc_feature (453)..(453): n is a, c, g, or t
  misc_feature (471)..(471): n is a, c, g, or t
  misc_feature (1180)..(1201): n is a, c, g, or t
  misc_feature (1351)..(1396): n is a, c, g, or t
  misc_feature (1509)..(1509): n is a, c, g, or t
  misc_feature (1580)..(1580): n is a, c, g, or t
ccgggatctggtcgcagggctgcgggactacaancttcgcatagaaatggaaaaaaagaggtggtgcggataaacttgaaagaaaagaanactaanaaaagcctgttnnnnnnnnnnnnnnnnnnnnncccgaaaangttttccccanaatgctganaaannnnnnnnnnnnnnnnnnnnnnnnnnnnnnnnnnnnnnnnnnnnnnnnnnnnctctcccaanctgtcaaanaaaaananaaagancaanctgcnnnnnnnnnnncanccaaanctgatccaatgganantggggaaaaaatcancaaaactgaatgtggaaaaanaaagccaananananatctctgcanaaananatctcccanaaaaaaantaaaatgttaanttanaaggcantgttgcaaacccanttcaactggaactaagaanangganaaagaacctctctancancaaaggaaaaaaaagaangtgctcttgtcctggcattgcatccacaagaagggcaagaaattctttgaaggtcccgcatctggggctcgatctcgtgcagaagagcatttccgaagacactggccgctcccacaatggctccgaagaccccagcgaccagcgggttcatgagtttgttggggctgtccgctcggtaccagctgcgcagggatgtcaggacaaagaaacaaattgcctggttccagccctgcttcagcacggggcctgtggggcccggtaagtcccggtgttcccgcacaatctcctaaccctgtggaagaatcccctgtacttggatttggagaggtctggccatggattaacttcaccttgatggtctccatgggacataggaccaccacggcctcggccacgctagctcactggccgcaccgctgcccgccttgctgttcaccagtccctgggcatcccgcatctggttgctgaggaacgcctgacgccgccttgtggatgaagccgcagagcagggagctgaggctgcggcccaggcccaggctgccttggctgcgactgtgtgcctgcaggccccatgcccggtatccggtggatgcgagtgctagtccagctgcagctgcatcttcacgaactcgtagtggatcatgacgcatattttttttaattaccctacttagctactctctggcaactatccttgcttcgttgcccnnnnnnnnnnnnnnnnnnnnnncttcttagccagagttttgccctgtgcgcccgaggtctgggggtcggtgtgggcgcgcgtgggggtggttggcagtgcaaggtttattgtttttgctggttgccagagtcttctaggatgggacgtgctacttgacagttattcttagcnnnnnnnnnnnnnnnnnnnnnnnnnnnnnnnnnnnnnnnnnnnnnnagacacgttatgtgcgcccctatttgtagctatctccatctccctaacagcctcgattttctatgctcgtccccgtacgcgttgtatatctctcttatcttcttcccctatgnagtgcatatgtgtttagcatagtattgtagtttgttgtagtcttgttgattgggctatgtggctcatgtgnggtttattgctgattcgttggaggatatagataaacaccgttcgtttatcacgactggggacgtggtccggcagtctgcatctcttgtgatgggcagactcgtgcatgttgttttccgtactttgtgcctacgtgttgtgatgtagtggagtgtataagagtgaggagagaagatttctttttatcttctcgtggcgccgctacgggtacgatttacatacagttttctgttaggcgtggccggtttcctctcccatgtgtctggtttgtgtgtgtagtcgttgcgaatgattagggtatgggtcgcgtcctcgcgattcgcagtgggtatgttgactttgatacaatgaataatttattctagcgtccacgtgtgtgacctc

SEQ ID NO: 258537 - DNA, 1456 bp, Homo Sapiens
tcggagatccctgtactttgtggacttgcaggatgacttagacgactatggatttgaagactatggtacagattgcgacaacatgagagtaacggccttcttggacattccaggccaggataacctgcctccactcactcgcctggagaagtatgctttcagcgagaacaccttcaaccggcagattattgccagagggctgcttgatatcttccgggacttcggtaacaatgaagaagacttcctcacggtaatggagattgtagtcagattgtcagaagatgcagagcccacagtgcggactgagctgatggaacagattcctcctattgccatttttttacaaggaaaacagatcaaattttccagtggtgctctctgaatatctcatacctattgtagtgaggtacctcacagatccaaacaatcagataatctgcaaaatggcttcaatgctgagtaagagtaccgttgaacgcctgctactcccccgattctgtgaactgtgtggtgacaggaagctctttcaagttcggaaggtttgtgctgcaaattttggtgatatttgtcatgctgttggacaagaagccactgagaaatttttgatcccaaagttctttgagctctgctctgatgctgtttggggcatgcggaaagcctgtgcagaatgcttcacggctgtgtcgcacagctcctcccctggggtccgcagaacccagctcttcccgctcttcatcagacttgtcagcgacccctgccgatgggtgcaccaggctgccttccagtcccttggccccttcactttcacctttgcaacccctccagggctggcctttatcttcgagaggatggcgccctgagcatctggccactcacccaggatttggactctggttttgcctctggctcccctgctcccagcagtggtggtaacacttcccctgccagtttaactcgttcagcaaagcctgtgcggagcgagccagagctacctgtggaaggaacctcagcaaaaaccagtgattgcccacacagcagtagctcctctgacggcccagcggaaagccctgtggaaagctgtgtgtcggctggagctgagtggaccagggtttccccagagaccagcgcccgctcaaagctttctgacatgaatgacctccccatcagcagctaccctggatcagattcctgggcctgcccagggaacactgaggatgtgttcagtcattttctttattggtgaactcctctccctgacataagcaaggacttagagctgcttctgagtgaggctgggcctcaggaggacgactgcagcagacctggggttgtgcacaacagctgtgtggcccggagtgagattcagaaagtccttgatagcttgcaggagcatctgatgaatgatccagatgttcaaggggaaatgttgttcattgtcattaaagagaagatggga

SEQ ID NO: 258538 - DNA, 990 bp, Homo Sapiens
  misc_feature (815)..(815): n is a, c, g, or t
  misc_feature (888)..(888): n is a, c, g, or t
  misc_feature (906)..(906): n is a, c, g, or t
  misc_feature (918)..(918): n is a, c, g, or t
  misc_feature (920)..(920): n is a, c, g, or t
  misc_feature (926)..(926): n is a, c, g, or t
  misc_feature (935)..(935): n is a, c, g, or t
  misc_feature (952)..(952): n is a, c, g, or t
  misc_feature (956)..(956): n is a, c, g, or t
  misc_feature (968)..(968): n is a, c, g, or t
  misc_feature (974)..(974): n is a, c, g, or t
  misc_feature (981)..(983): n is a, c, g, or t
agcggctgtcgcagtgcggctccggcagtggcagcggaggcctgtgtttgcggccttcggcaagcgactgagatggcgagcgcaactgcacctgcagccgcagtccccaccctggcttcgcctttggagcagctccggcacttggcggaggagctgcggttgctcctgcctcgagtgcgggtcggcgaagcccaggagaccaccgaggagtttaatcgagagatgttctggagaagactcaatgaggcagctgtgactgtgtcaagggaagccacgactctgaccatagtcttctctcagcttccactgccgtctccacaggaaacccagaagttctgtgaacaagtccatgctgccatcaaggcatttattgcagtgtactatttgcttccaaaggatcaggggatcaccctgagaaagctggtacggggcgccaccctggacatcgtggatggcatggctcagctcatggaagtactttccgtcactccaactcagagccctgagaacaatgaccttatttcctacaacagtgtctgggttgcgtgccagcagatgcctcagataccaagagataacaaagctgcagctcttttgatgctgaccaagaatgtggattttgtgaaggatgcacatgaagaaatggagcaggctgtggaagaatgtgacccttactctggcctcttgaatgatactgaggagaacaactctgacaaccacaatcatgaggatgatgtgttggggtttcccagcaatcaggacttgtattggtcagaggacgatcaagagctcataatcccatgccttgcgctggntgagagcatccaaagcctgcctgaagaaaattcggatgttagtggcagagaatgggaagaaggatcaggtggnacagctgggatgacattntggatatttctnangaaatngccctagtntggatgatttggctctnagcnatatcacctatntttacntgacgtnnnaattaat

SEQ ID NO: 258539 - DNA, 1302 bp, Homo Sapiens
ggggctgtggcccggaagtggagcggctgtcgcagtgcggctccggcagtggcagcggaggcctgtgtttgcggccttcggcaagcgactgagatggcgagcgcaactgcacctgcagccgcagtccccaccctggcttcgcctttggagcagctccggcacttggcggaggagctgcggttgctcctgcctcgagtgcggggaaacccagaagttctgtgaacaagtccatgctgccatcaaggcatttattgcagtgtactatttgcttccaaaggatcaggccctgagaacaatgaccttatttcctacaacagtgtctgggttgcgtgccagcagatgcctcagataccaagagataacaaagctgcagctcttttgatgctgaccaagaatgtggattttgtgaaggatgcacatgaagaaatggagcaggctgtggaagaatgtgacccttactctggcctcttgaatgatactgaggagaacaactctgacaaccacaatcatgaggatgatgtgttggggtttcccagcaatcaggacttgtattggtcagaggacgatcaagagctcataatcccatgccttgcgctggtgagagcatccaaagcctgcctgaagaaaattcggatgttagtggcagagaatgggaagaaggatcaggtggcacagctggatgacattgtggatatttctgatgaaatcagccctagtgtggatgatttggctctgagcatatatccacctatgtgtcacctgaccgtgcgaatcaattctgcgaaacttgtatctgttttaaagaaggcacttgaaattacaaaagcaagtcatgtgacccctcagccagaagatagttggatccctttacttattaatgccattgatcattgcatgaatagaatcaaggagctcactcagagtgaacttgaattatgacttttcaggctcatttgtactctcttcccctctcatcgtcatggtcaggctctgatacctgcttttaaaatggagctagaatgcttgctggattgaaagggagtgcctatctatatttagcaagagacactattaccaaagattgttggttaggccagattgacacctatttataaaccatatgcgtatatttttctgtgctatatatgaaaaataattgcatgatttctcattcctgagtcatttctcagagattcctaggaaagctgccttattctctttttgcagtaaagtatgttgttttcattgtaaagatgttgatggtctcaataaaatgctaacttgccagtgatatcaaattaa

SEQ ID NO: 258540 - DNA, 386 bp, Homo Sapiens
gtgtgagctaccgcggcccagccttaaagcatcattttctaaggcctttgggcttttctgaatgattacccaggtgattatggaagagagaactaccaaagctcatggctattataattcaacttcagtgaatatttatcaaccccaaacgcatgcaagaactgtgacattactgttgtacttccatccaaatgtgactaataaatatgtaccctatagcttacaggaaatactagtgattagtgaaattctgcccatttgttctgtagctattccctcaaagccagtacttacattgattcgcacggtcaggtgacacataggtggatatatgctcagagccaaatcatccacactaagagcagaaaacaaaagtaatcattaac

SEQ ID NO: 258541 - DNA, 706 bp, Homo Sapiens
  misc_feature (639)..(639): n is a, c, g, or t
  misc_feature (668)..(668): n is a, c, g, or t
ttgagccaccatgcctggcctgtttgctgagtttttatcatgaataggtattagattttgttaaatgcttttttgcatccgttgaaatgatcgtaagttgattacattgattcatttttttaaaatgacggatcagcctggcatatttggaataaatccacttggtatataattctttgtatacattcttggatttgatttgataatgttttgttgaggatttttgtattcatgttcatgagacatattagtctgtaattttcctttcttatgatgtctttatttaattttggtattggggaagtgctggcctcaaagattgagttaagaagtatccccactgtttgttttctggaagagatggtagaatactagtatcgttttgtccgtaaatgtttgccagaattcaccagtgtggaaaccctcatcctgatgttttctattctgggaaggtattaatggattcaatttatttaaaacatggtaagcctgttcacatcagtcatttctccatgactgagttttggtggtttgtgtctttcaagaaattgttcattttatcatctgaatgatcaaatgtgtgagcatagagttggtttgtagtattcctttattatccttttaatatccatgagatcnagtgatgattctctttcatgatattagtnattttgtctcttctccttttttcttgtttggctagaga

SEQ ID NO: 258542 - DNA, 1585 bp, Homo Sapiens
  misc_feature (1400)..(1536): n is a, c, g, or t
ggtccccgggcggcggttccggcgcagaggaggaggcaggcggcggccccggtggctcccccccggacggtgcgcggcccggcccgtctcgcgaactcgcggtggtcgcgcggccccgcgctgctccgaccccgggcccctccgccgccgccatggctcggccgctagtgcccagctcgcagaaggcgctgctgctggagctcaaggggctgcaggaagagccggtcgagggattccgcgtgacactggtggacgagggcgatctatacaactgggaggtggccatcttcgggccccccaacacctactacgagggcggctacttcaaggcgcgcctcaagttccccatcgactacccatactctccaccagcctttcggttcctgaccaagatgtggcaccctaacatctacgagacgggggacgtgtgtatctccatcctccacccgccggtggacgacccccagagcggggagctgccctcagagaggtggaaccccacgcagaacgtcaggaccattctcctgagtgtgatctccctcctgaacgagcccaacaccttctcgcccgcaaacgtggacgcctccgtgatgtacaggaagtggaaagagagcaaggggaaggatcgggagtacacagacatcatccggaagcaggtcctggggaccaaggtggacgcggagcgtgacggcgtgaaggtgcccaccacgctggccgagtactgcgtgaagaccaaggcgccggcgcccgacgagggctcagacctcttctacgacgactactacgaggacggcgaggtggaggaggaggccgacagctgcttcggggacgatgaggatgactctggcacggaggagtcctgacaccaccagaataaacttgccgagtttacctcactagggccggacccgtggctccttagacgacagactacctcacggaggttttgtgctggtccccgtctcctctggttgtttcgttttggctttttctccctccccatgtctgttctgggttttcacgtgcttcagagaagaggggctgccccaccgccactcacgtcactcggggctcggtggacgggcccagggtgggagcggccggcccacctgtcccctcgggaggggagctgagcccgacttctaccggggtcccccagcttccggactggccgcaccccggaggagccacgggggcgctgctgggaacgtgggcggggggccgtttcctgacactaccagcctgggaggcccaggtgtagcggtccgaggggcccggtcctgcctgtcagctccaggtcctggagccacgtccagcacagagtggacggattcaccgtggccgactcttttccctgctttggtttgtttgaaatctaaataaaactactttatgagagnnnnnnnnnnnnnnnnnnnnnnnnnnnnnnnnnnnnnnnnnnnnnnnnnnnnnnnnnnnnnnnnnnnnnnnnnnnnnnnnnnnnnnnnnnnnnnnnnnnnnnnnnnnnnnnnnnnnnnnnnnnnnnnnnnnnnnnnngaactgtggggcccccccgccccccaaaaattttttaaaaccttttttt

SEQ ID NO: 258543 - DNA, 1018 bp, Homo Sapiens
  misc_feature (32)..(32): n is a, c, g, or t
  misc_feature (54)..(54): n is a, c, g, or t
  misc_feature (79)..(79): n is a, c, g, or t
  misc_feature (117)..(117): n is a, c, g, or t
ggaaacagcctcccgtacccccagaacttcgnggagtttcagaactcactcctnaccagtacctgaagataaatggctnccccaatgaaaactggggctggggtggtgaggataacnacattgctaccagggtgcgcctggctgggatgaagatctctcggccccccacatctgtaggacactataagatggtgaagcaccgaggagataagggcaatgaggaaaatccccacagatttgacctcctggtccgtacccagaattcctggacgcaagatgggatgaactcactgacataccagttgctggctcgagagctggggcctctttataccaacatcacagcagacattgggactgaccctcggggtcctcgggctccttctgggccacgttacccacctggttcctcccaagccttccgtcaagagatgctgcaacgccggcccccagcccaggcctgggcctctatctactgccaaccacacagcccctccgaggttcacactgactcctccttcctgtctaccttaatcatgaaaccgaattcatggggttgtattctccccaccctcagctcctcactgttctcagagggatgtgagggaactgaactctggtgccgtgctagggggtaggggcctctccctcactgctggactggagctgggctcctgtagacctgaggggtccctctctctagggtctcctgtagggcttatgactgtgaatccttgatgtcatgattttatgtgacgattcctaggagtccctgcccctagagtaggagcagggctggaccccaagcccctccctcttccatggagagaagagtgatctggcttctcctcggacctctgtgaatatttattctatttatggttcccgggaagttgtttggtgaaggaagcccctccctgggcattttctgcctatgctggaatagctccctcttctggtcctggctcagggggctgggattttgatatattttctaataaaggactttgtctcgcaa

SEQ ID NO: 258544 - DNA, 1066 bp, Homo Sapiens
  misc_feature (8)..(8): n is a, c, g, or t
  misc_feature (10)..(10): n is a, c, g, or t
  misc_feature (40)..(40): n is a, c, g, or t
  misc_feature (89)..(89): n is a, c, g, or t
tggcgcananttatagatactgagcccagagagggaagtntctgtctgtgtcgcatggggctcagtggaaagccgggactaaaagctgnccccaggctagctttgtgccaggccatcctgctcttacacaggggctgagaaccaggggcagcccaggagtcctggatggggcagcagtcatgttggatggggctgggtgttgctctccctttctgggctctcaggagtggtcaggctagccccagatctcccagaccaagaagaggagcagcctgtggggagacactcatgccctgacatgagtcagtgcatcaagagaggccatcagccagtgggattcagcaagcatgcctggcgctgcctggtagggtgctgcccatgggaggaagagaagaggagctgccacccatttggggccctccttctctgggtcctcagatttgcccttcagcccagagtgtaagttccacagggccccattcatggaggccttgcccatgccctccatgcatttcagatacccctttctcaggctgtcacctcccactgctttgcctttcagctatgaagaccccgcggccctggatggtggggaggagggcatggacatcattacccacattctggccttggcaccccggctcctgaaagactctggtagtatcttcttagaagtggacccaaggcacccggagcttgtcagcagctggcttcagagccggcctgacctgtaccttaatcttgtggctgtgcgcagggacttctgtgggaggccccggttcctgcatatccggaggtctgggccatagcatggctgccctgtggatgccttgtcagtgccgccagcctgaccagaggggaggtggatggcactttccagagcccaggttcttatggcatttcccagggttctgtgatttccccatgctctgcatttctaggatatttctaggacacctggattggctccatcacatcagagtggctgagggcagttgctctgtgttggtgaaattgctgtgggggtatcgggggatatggccagtaaagtattgagagactaaca

SEQ ID NO: 258545 - DNA, 515 bp, Homo Sapiens
  misc_feature (440)..(473): n is a, c, g, or t
cccaccaccagctccagggaagcacagagtgatggaagacatgtaggaaggtcacctgcccgtctttctttcggagaataaagatcactgtgtccatcagctcaatgaacttggagaagaggaagagccaggccacccgaaccatcctaagtgcctcagggctgttggaatagtccacagggtcacagcgccaggtataggtgctcagccagcccgacatcaggaactgcgtgcttcatcacctcttggtacaagttcacaacagcactccatcctggctaaggactccggcaggccaggagggaccaaggctcctgggaggacctctccccaagctgcaggaaaatctgggtgtgtctctcgtcggggaactcagcccgtcccttccttcctttaagatggatggaagggaaaaggtgcctggcaaagttagggtagcnnnnnnnnnnnnnnnnnnnnnnnnnnnnnnnnnntaaatgcaggggtggtggaggaaggccccgggagtaggcaaa

SEQ ID NO: 258546 - DNA, 930 bp, Homo Sapiens
aaaagtcggcccagcagatgaggaagtggcaggcaggcaggctggccccggggacttctctctggccctgctccctccgagcgctccgccgttgcccgcctggcccctacggagtccttagccaggatggaggctgttgtgaacttgtaccaagaggtgatgaagcacgcagatccccggatccagggctaccctctgatggggtcccccttgctaatgacctccattctcctgacctacgtgtacttcgttctctcacttgggcctcgcatcatggctaatcggaagcccttccagctccgtggcttcatgattgtctacaacttctcactggtggcactctccctctacattgtctatgagttcctgatgtcgggctggctgagcacctatacctggcgctgtgaccctgtggactattccaacagccctgaggcacttaggatggttcgggtggcctggctcttcctcttctccaagttcattgagctgatggacacagtgatctttattctccgaaagaaagacgggcaggtgaccttcctacatgtcttccatcactctgtgcttccctggagctggtggtggggggtaaagattgcccccgggaggaatgggctctttccatgccatgataaactcttccgtgcatgtcataatgtacctgtactacggattatctgcctttggccctgtggcacaaccctacctttggtggaaaaagcacatgacagccattcagctgatccagtttgtcctggtctcactgcacatctcccagtactactttatgtccagctgtaactaccagtacccagtcattattcacctcatctggatgtatggcaccatctttcttcatgctggttctccaacttctggtatcacttcttataccaaagggcaagcgggctgcccccgtgcactttc

SEQ ID NO: 258547 - DNA, 1275 bp, Homo Sapiens
agatgaggaagtggcaggcaggcaggctggccccggggacttctctctggccctgctccctccgagcgctccgccgttgcccgcctggcccctacggagtccttagccaggatggaggctgttgtgaacttgtaccaagaggtgatgaagcacgcagttcctgatgtcgggctggctgagcacctatacctggcgctgtgaccctgtggactattccaacagccctgaggcacttaggatggttcgggtggcctggctcttcctcttctccaagttcattgagctgatggacacagtgatctttattctccgaaagaaagacgggcaggtgaccttcctacatgtcttccatcactctgtgcttccctggagctggtggtggggggtaaagattgccccgggaggaatgggctctttccatgccatgataaactcttccgtgcatgtcataatgtacctgtactacggattatctgcctttggccctgtggcacaaccctacctttggtggaaaaagcacatgacagccattcagctgatccagtttgtcctggtctcactgcacatctcccagtactactttatgtccagctgtaactaccagtacccagtcattattcacctcatctggatgtatggcaccatcttcttcatgctgttctccaacttctggtatcactcttataccaagggcaagcggctgccccgtgcacttcagcaaaatggagctccaggtattgccaaggtcaaggccaactgagaagcatggcctagataggcgcccacctaagtgcctcaggactgcaccttagggcagtgtccgtcagtgccctctccacctacacctgtgaccaaggcttatgtggtcaggactgagcaggggactggccctcccctccccacagctgctctacagggaccacggctttggttcctcacccacttcccccgggcagctcccagggatgtggcctcattgctgtctgccactccagagctgggggctaaaagggctgtacagttatttccccctccctgccttaaaacttgggagaggagcactcagggctggccccacaaagggtctcgtggcctttttcctcacacagaagaggtcagcaataatgtcactgtggacccagtctcactcctccaccccacacactgaagcagtagcttctgggccaaaggtcagggtgggcgggggcctgggaatacagcctgtggaggctgcttactcaacttgtgtcttaattaaaagtgacagaggaaacc

SEQ ID NO: 258548 - DNA, 1562 bp, Homo Sapiens
  misc_feature (486)..(486): n is a, c, g, or t
  misc_feature (1213)..(1213): n is a, c, g, or t
  misc_feature (1274)..(1302): n is a, c, g, or t
  misc_feature (1540)..(1540): n is a, c, g, or t
ggcgagcatggaggagaagtacctgcccgagctgatggcggagaaggactccctggacccctccttcacgcacgccctgcgcctggtgaaccaagaaatagaaaagtttcaaaaaggagaaggcaaggatgaagaaaagtacatcgatgtggtgattaataagaacatgaagctgggacagaaagtgttaattcccgtaaaacagttccctaagttcaactttgtggggaaacttttgggtccacgtggcaattctctgaagcgtttacaagaagaaaccttgacaaaaatgtccatccttgggaaaggttccatgagagacaaggccaaggaagaagagttgaggaaaagtggagaagcgaagtacttccatctcaatgatgatctcccatgttctcattgaagtgtttgccccacctgcagaagcttatgccaggatgggacatgctttggaagaaatcaaaaagttcctcatccctgattatnatgatgagatcaggcaagcacagctccaggagttaacatatttgaatggtggttcagaaaatgcagatgttccagtggttcgagggaaacccaccttgcgtacaagaggtgtaccagccccagcaataaccaggggaaggggaggagttacagcccggccagttggagttgtagtaccacgagggacgccaactcccagaggagtcctgtccacccgagggccagtgagtcggggaagaggacttctcactcccagagcaagaggagtccccccaactgggtacagacctccaccgccacccccgacacaagagacttatggagaatatgactatgatgatggatatggcactgcttatgatgaacagagttatgattcctatgataacagctatagcaccccagcccaaagtggtgctgattactatgattacggacatggactcagtgaggagacttatgattcctacgggcaagaagagtggactaactcaagacacaaggcaccttcagcgaggacagcaaagggcgtctacagagaccagccatatggcagatactgattgtactgtctgatgttgtgaaatagccaatctgcgcaccagtcctgtatactgttcaaagtaatttttttctatgaacaatccctttttaaataaatcaaaatgcttaaaatctgaatggatggaacttaaaactacgtttgttgaaacatcaacctgggctngaagaaaaagaagaataataaaaagacatgtaaaattttgttatttccagtctgtatatgnnnnnnnnnnnnnnnnnnnnnnnnnnnnntaacttgtgagttaactagtgttaaacaaagaaataggtttactaaattatgttaatctattcttttaacataagcctcacctttcattttaaaggtttccatagaatttagttattttatctttcagccatatgctagtttttttatttctcttgcctacatgcgtaaaaagggaagccaattactaagtgcaaataatgtggtattcttttgtaactcaagtcttgaaatgttctntagtgttaagcaaatttccttt

SEQ ID NO: 258549 - DNA, 348 bp, Homo Sapiens
  misc_feature (307)..(307): n is a, c, g, or t
  misc_feature (334)..(334): n is a, c, g, or t
tctgcccaggttgatgtttcaacaaagtagttttaagttccatccattcagattttaagcattttgatttatttaaaaagggattgttcatagaaaaaaattactttgaacagtatacaggactggtggagattggctatttcacaacatcagacagtacaatcagtatctgccatatggctggtctctgtagacgccctttgctgtcctcgctgaaggtgccttgtgtcttgagttagtccactcttcttgccctacaatcagtaaggatgtaatcacaattaggatcactgccatggaatcccanagggcttcatttttcagactctaactnaggccctggaacca

SEQ ID NO: 258550 - DNA, 2997 bp, Homo Sapiens
  misc_feature (2385)..(2405): n is a, c, g, or t
  misc_feature (2431)..(2438): n is a, c, g, or t
  misc_feature (2441)..(2541): n is a, c, g, or t
  misc_feature (2543)..(2544): n is a, c, g, or t
  misc_feature (2556)..(2568): n is a, c, g, or t
  misc_feature (2687)..(2710): n is a, c, g, or t
  misc_feature (2837)..(2846): n is a, c, g, or t
ggggggagtgagggtagcacgctgagctgaaggctgtgcggagcggcgcggcacagagcctgttgttgagctcagtatgtcgtgggaatccggggccgggccaggtctaggttcccaggggatggatctcgtgtggagtgcgtggtacggaaagtgcgttaaagggaaagggtcgttgccactctcggcccacggcatcgtggtcgcctggctcagcagggccgagtgggaccaggtgacggtttatctgttctgtgacgaccataagttgcagcggtacgcgcttaaccgcatcacggtgtggaggagcaggtcaggcaacgaactccctctggcagtggcttctactgctgacctgatacgctgtaagctcttggatgtaactggtggcttgggcactgatgaacttagactgctctatggcatggcattggtcaggtttgtgaatcttatctcagagaggaagacaaagtttgccaaggtccccctcaagtgtctggctcaagaggtaaatattccgcactcggattggtgaccttccccatgagctgacccacaagaaaatgccccatataaatgactgccgcagaggctgctactttgtcctggattggctccagaagacctattggtgccgccaactggagaacagcctgagagagacctgggagttggaggagttcagggaagggatagaggaagaggatcaagaggaagataagaacattgttgttgatgacatcacagaacagaaaccagagcctcaggatgatgggaaaagtacggagtcagatgtaaaggccgatggagacagcaaaggcagcgaagaggtggattctcattgcaaaacagtgccctgagtcataaagagctatatgaaagagcccgagaactgctggtatcatacgaagaggagcagtttacggtgctggagaaatttaggtatttaccgtaaggccattaaggcgtggaataacccgtccccacgtgtagaatgtgtcctggcagagctcaagggcgttacatgcgagaacagggaggctgtgctggatgcttttctggatgatggcttccttgtccccacatttgaacagttggcagctttgcagatagaatatgacagaaaacgtggacttgaatgacgtcctggtgccaaagccgttctctcagttctggcagcccctgctcaggggcctgcactcccagaacttcacgcaggccctattggagaggatgctctctgaactgccagccttggggatcagcgggatccggcctacctacatcctcagatggaccgttgaactgatcgtggccaacaccaagactggacggaatgctcgccgattttctgcaggccagtgggaagcaagaaggggctggaggctgttcaactgctccgcctcccttgactggccccggatggttgagtcctgcttgggctcaccttgctgggccagcccccaactccttcggatcatcttcaaagccatggggcagggcctgccagacgaggagcaggagaagctgctgcgcatctgttccatttatacccagagtggagaaaacagcctggtgcaggagggctctgaggcctcccccattgggaagtctccatatacactagacagcctgtattggagcgtcaagccagccagctccagcttcgggtctgaagcaaaggcccagcaacaggaggagcagggcagtgttaatgatgtcaaggaagaggagaaggaggagaaagacgtcttgccagaccaggtagaggagggaggaagaaaatgatgaccaacaggaggaagaggaggatgaagatgatgaagatgatgaagaggaagacagaatggaggtggggcctttctctacagggcaagagtcccccactgccgagaatgctaggcttctggcccagaaaagaggagctttgcagggctctgcatggcaggttagctcagaagacgtgcgatgggacacatttcccctaggccgaatgccaggtcagaccgaggacccagcagagctcatgctggagaattatgacaccatgtatcttttggaccagcctgtgctagagcagcggctggaaccctcaacatgcaagactgacaccttgggcctgagctgtggtgtcggcagtggcaactgcagcaacagcagcagcagcaacttcgagggccttctctggagccaggggcagctgcatgggctcaaaactggcctgcagctcttctgatggccatccctggtgcaagtgttcatccagccgtgccagggcaacagcccaccccctagtacaactgatgctccctgagacaacctgggagacagcctggatcagccacatcaactcagttgtccaccacaggggaattttgaatgtcnnnnnnnnnnnnnnnnnnnnnaaaaataataaacaggcaactgtaannnnnnnnaannnnnnnnnnnnnnnnnnnnnnnnnnnnnnnnnnnnnnnnnnnnnnnnnnnnnnnnnnnnnnnnnnnnnnnnnnnnnnnnnnnnnnnnnnnnnnnnnnnnnanncccttgcggcgnnnnnnnnnnnnntcaaaaaacttttcaaaaacctttcttttgggggcgcgggcccccaaaaggaaaaggaaacttggcccaaacctttttcccaaagaaaaaccggggacaaaaacaaggggttgggaatnnnnnnnnnnnnnnnnnnnnnnnngggggggaaacccagagggtttctaaaaacaaatcccaaaaggggggtttttggagggcccattatcgggggattttactcaccggggggcccccaggcgaggcctcccaataacaaaaattaacgnnnnnnnnnntgtggcactttaattgggaagaaagggggtggaaaatccaatataaaaccttccccggcccgaaaaggggaaacccctcccccaaacgggggtgtagaggaaccctgaaatcccgccagggggaattcccacccccttggccccctcgggg

SEQ ID NO: 258551 - DNA, 1436 bp, Homo Sapiens
  misc_feature (929)..(929): n is a, c, g, or t
  misc_feature (1001)..(1001): n is a, c, g, or t
  misc_feature (1432)..(1432): n is a, c, g, or t
ggcgccgggtggcgggaaggaggaagtttcaaagccagcttgacgtggttgtggccgttgggcgagatgaagctacactgtgaggtggaggtgatcagccggcacttgcccgccttggggcttaggaaccggggcaagggcgtccgagccgtgttgagcctctgtcagcagacttccaggagtcagccgccggtccgagccttcctgctcatctccaccctgaaggacaagcgcgggacccgctatgagctaagggagaacattgagcaattcttcaccaaatttgtagatgaggggaaagccactgttcggttaaaggagcctcctgtggatatctgtctaagtaaggccatttccagcagtttaaaaggtttcctttcagctatgagactggctcatagaggctgtaatgttgatacaccagtttcaacgctcacaccagtgaagacttcagaatttgaaaactttaaaactaaaatggttatcacatccaaaaaagactatcctctaagtaagaattttccatattccttggaacatcttcagacttcttactgtgggcttgtccgagttgatatgcgtatgctttgcttaaaaagccttaaggaaattagacttgagtcacaaccatataaaaaagcttccagctacaattgggagacctcatacaccttcaagaacttaacctgaatgacaatcacttggagtcatttagtgtagccttgtgtcattctacactccagaagtcacttcggagtttggacctcagcaagaacaaaatcaaggcactccctgtgcagttttgccagctccaggaacttaagaatttaaaacttgacgataatgaattgattcaatctccttgcaagataggacaactaataaaccttcgctttttgtcagcagctcgaaataagcttccatttttngcctagtgaatttagaaatttatcccttgaatacttggatcttttgggaaatacttttgaacaaccaaaagnccttccagtaataaagctgcaagcaccattaactttattggaatcttctgcacgaaccatattacataataggattccatatggctctcatatcattccattccatctctgccaagatttggataccgcaaaaatttgtgtttgtggaagattctgtctgaactctttcattcaaggaactactaccatgaatctgcattctgttgcccacactgtggtcttagtagataatttgggtggtactgaagcacctattatctcttatttctgttctctaggctgttatgttaattcctctgatatgttaaagtaatgggtgagaccagaaaaagaaatttcaataacagatcagtttggggtgcatgtatgattttgcagcgtcaaattggagtaagggaagatttctgtatacttgctggagaggaggaatnttat

SEQ ID NO: 258552 - DNA, 1031 bp, Homo Sapiens
  misc_feature (68)..(68): n is a, c, g, or t
  misc_feature (181)..(181): n is a, c, g, or t
aaaaaagaacgttgcgcccccgccgacttgccggtttttcccggcgcgaagccccggaatcccaggtngttcagtcccggttacgcaaaccacggcgagaaacccggccctgcttaaggggagaagggaagccgtttcccgcgggcttcatacagacacgggtgctaagacagcccgagtngcggaccagtccaacaggcaggcagatcagtgggcaagccccgtgcgcgaggaccccgatggcggcgccgggtggcgggaaggaggaagtttcaaagccagcttgacgtggttgtggccgttgggcgagatgaagctacactgtgaggtggaggtgatcagccggcacttgcccgccttggggcttaggaaccggggcaagggcgtccgagccgtgttgagcctctgtcagcagacttccaggagtcagccgccggtccgagccttcctgctcatctccaccctgaaggacaagcgcgggacccgctatgagctaagggagaacattgagcaattcttcaccaaatttgtagatgaggggaaagccactgttcggttaaaggagcctcctgtggatatctgtctaagtaaggattccatatggctctcatatcattccattccatctctgccaagatttggataccgcaaaaatttgtgtttgtggaagattctgtctgaactctttcattcaaggtactactaccatgaatctgcattctgttgcccacactgtggtcttagtagataatttggggtggtactgaagcacctattatctcttatttctgttctctaagctgttatgttaattcctctgatatgttaaaggaatgggtgagaccagaaaaagaatttcaataacagaccagtttggggggcctgtataattttgccccgtcaaattgaacaaaggaaaattctgtatactggccggaaaagagggatcggattacttactcatttaaaatgacccccaaaacttttattaaaacccattttaatttttaacacaccaaaaataaaaatat

SEQ ID NO: 258553 - DNA, 943 bp, Homo Sapiens
  misc_feature (25)..(25): n is a, c, g, or t
  misc_feature (27)..(27): n is a, c, g, or t
  misc_feature (34)..(34): n is a, c, g, or t
  misc_feature (42)..(42): n is a, c, g, or t
  misc_feature (129)..(129): n is a, c, g, or t
ccctcccatcttgcagtccccagtncnaccttcnaggctctnacatacttgggattggcccacagggacactggattaaaggttccacttgaaaaataaggtcccactgggctcaagagtacaaagagnagggctttggtaggcttcttgactccaagagaaggctcagttcccaatgaatgtagaacgaatatacagactagccagatgttgaatatgggacccattcttgatccaaatttcacaaagctgttgaatacactctaagagctcttctttgtccaaataccggcagagttgccctcacagcagagcgatacattctatccatgttgagggtttggctgaaacaagtcgaattttattatctactcctcgaaatgccttcaatccttcaaataattccactgcatagtgcaaagctgatgagccagggtgcaatgacaggttctgaagaggcttgatatgaggtttctcccatccaaactctgaggaccactccaccgtcagcatatgatccgtgaacacagttccaaaaaccagattattggggtctggtttttcctttaaaatggtagctggtgtgactattaggtctttagccttaaaagtccccaccacctcttttgatcctccttctccggtacactctgcggagcatccgttactgcaatccttcattgttccgtcggccacgagggaagctcgagctgagcggagggcaaatcccaagggtcgtagcccctggccgtgtggaccgggtctgcggctgcagagcgcggtcccggctgcagcaagacctggggcagtgcccgaggcggcggcgagtacacgtggcgggctggattgcagaccggccctctcgcggcggagactcgcgacctagcggattgcatcagcaggaagacactaaggctgctcccccaggccgcccccagatccc

SEQ ID NO: 258554 - DNA, 929 bp, Homo Sapiens
  misc_feature (4)..(4): n is a, c, g, or t
  misc_feature (21)..(22): n is a, c, g, or t
  misc_feature (30)..(31): n is a, c, g, or t
  misc_feature (95)..(149): n is a, c, g, or t
  misc_feature (304)..(304): n is a, c, g, or t
tggnccccctcaggtcctgtnntctgcgcnnccctggcctccgcctcctggccccactgatcccctccgtggctgaagagctctggcagagctgnnnnnnnnnnnnnnnnnnnnnnnnnnnnnnnnnnnnnnnnnnnnnnnnnnnnnnngcgcctgcagcttggagcactgcgccagccagagctggagcggcgcttctcccgggtccaagaggtcgtgcaggtgctaaaggctctccgagccacgtaccagctcaccaaagcccggccccgagtgctgctgcagagctcagagcctggggacncagggcctcttcgaggccttcttggagcccctgggcaccctgggctactgtggggctgtgggcctgttacccccaggcgcagcagctccctccggctgggcccaggctccactcagtgacacggctcaagtctacatggagctgcagggcctggtggacccgcagatccagctacctctgttagccgcccgaaggtacaagttgcagaagcagcttgacagcctcacagccaggaccccatcagaaggggaggcagggactcagaggcaacaaaagctttcttccctccagctggaattgtcaaaactggacaaggcagcctctcacctccggcagctgatggatgagcctccagccccagggagcccggagctctaactcatcatccccatcagttttcctccctctcagacctgtctttgaggacaaacagatttgtcagctgtcagggtgcagtgggacgtcagagactatgtggtccatcgccttcattgtgtaaatgaggacacagactggcttggtcgcagtgactgtggtgtccttgagatgctcacattactgcccggcctgcctcccacctggaagtctgggaatgaggagattgagataaacttttgaaatccca

SEQ ID NO: 258555 - DNA, 936 bp, Homo Sapiens
  misc_feature (20)..(20): n is a, c, g, or t
  misc_feature (567)..(567): n is a, c, g, or t
tctggtggagacagctgggnttgctccagtgtgtgtagactggcagagcatgtgagggagagggctgggaagagacggccctgggcccgtgaggtgcagaactctccctgcaggtagtctgtctgctctgtgatgtgctgataggaaagagcccccactggccctctggttcacttctattatgaataaatttgcaccaatagccccattagtttttaaagaaatgagctgggtgggaaaagtggaaatgctaatctctggtaagcttgagctactttaatccttattctatgaaactgatatcccttgatgtgggaaacaggcaggaaaggctgtggggtgggggtgggggactggtgtggcaccgcgcaaacaaaatgacaaatttcaactcacaatctttgtaagaaaattgttccagtttgaatcttgatattaaagtttatgtttacaaaactgccagttagatgaactaagtgtgtaaaacaaatagaaaagacattcgcagacatttcttctatgttattgaatgtgttgtttctggtgtacgtgtcaaaagtttcagtnttttagatcagaaataaacgacaaatagtgtgagatgtgttgtgaacaggcatggtgaccgtggtcagcgccactcttgtttcctgaaatgtgcttctaagacagaaaatgtattttctcatcaagggtgtctggagacacagaccgtgaccttggcgcagcggtgtgcatcagaggcgtgtgctgagaagggtggtgttaagctgtggaaaatgactcaagagcaataaatcagtgccaaagcttccctgcgcatctgaatagacacaagaagcccgtgtgcgcacagtgcagaggccgagcctgtatttccaggtagacgtggactttattgactgtgaattcatttacatgtaacttctgacattt

SEQ ID NO: 258556 - DNA, 1194 bp, Homo Sapiens
  misc_feature (540)..(540): n is a, c, g, or t
  misc_feature (545)..(545): n is a, c, g, or t
  misc_feature (553)..(553): n is a, c, g, or t
  misc_feature (561)..(561): n is a, c, g, or t
  misc_feature (594)..(595): n is a, c, g, or t
  misc_feature (597)..(598): n is a, c, g, or t
  misc_feature (600)..(600): n is a, c, g, or t
  misc_feature (607)..(607): n is a, c, g, or t
  misc_feature (609)..(609): n is a, c, g, or t
  misc_feature (614)..(615): n is a, c, g, or t
  misc_feature (648)..(650): n is a, c, g, or t
  misc_feature (654)..(656): n is a, c, g, or t
  misc_feature (660)..(660): n is a, c, g, or t
  misc_feature (667)..(668): n is a, c, g, or t
  misc_feature (887)..(1026): n is a, c, g, or t
  misc_feature (1158)..(1158): n is a, c, g, or t
cctcctattgatctggcagacattgaagatttaagtgaagacaccctgacagaagcaacacttcagggcaggaatgaaggggctgaggttgacatggagtcctgatgtaaggagccgaagcagtgggattggctgatttgaggagatgtctctaagtgaattctcgtattcttaagggaaaagttattttccatacttgaagttatatttccaaacctgagaaatgaagaaagattgttctgacattaaatacctacagttactactgaacctcttaataaggatttgttcaaggatagagtacagttgtaggggaagtattttatgtatgcattcttagagcaaaaagttttgtttaaattctagaattgaaggtactgatcttataaaaagaaattctagcagttttagaaataggtgggaaaaactcaaatattcctcctatctgcaccaaaaagtttatttgtggtatataaaatgaatattgttttataataacttgttaataaagtactttctaatacattctattgactctgnaagtngaacaaanagctgacntgaacatctatgcaaacttaagatgggcggganngnngnaaaagcnantgtcnnaaaagagctttcaaaatgtaaagtagtgataannncaannngggnagcgggnnggcaaagcttccaatatttgatgttggttaagctctactatgggcaactgaagatggataaagaaaaatgaaaactgaatcggtgcctgcttccccctgttttcccaggattagaggaaaaaatttattgtataatcagcttcttggttttgaattgcttcgaggcatggttttattccttattactttagacctgtagttttcaacactaacagcacnnnnnnnnnnnnnnnnnnnnnnnnnnnnnnnnnnnnnnnnnnnnnnnnnnnnnnnnnnnnnnnnnnnnnnnnnnnnnnnnnnnnnnnnnnnnnnnnnnnnnnnnnnnnnnnnnnnnnnnnnnnnnnnnnnnnnnnnnnnngtagactaatggtcgtttttcctgtttaaaggagataactaatttgagctgaagcaatgcttcttaattagctttgtttttgttttgctctgttggtggctttgttacaacctgaattattgtgttattacntatttcattgttaaagaaataaagtaagcaatttct

SEQ ID NO: 258557 - DNA, 1037 bp, Homo Sapiens
  misc_feature (4)..(4): n is a, c, g, or t
  misc_feature (16)..(17): n is a, c, g, or t
  misc_feature (24)..(24): n is a, c, g, or t
  misc_feature (26)..(27): n is a, c, g, or t
  misc_feature (62)..(62): n is a, c, g, or t
  misc_feature (64)..(65): n is a, c, g, or t
  misc_feature (99)..(99): n is a, c, g, or t
  misc_feature (101)..(102): n is a, c, g, or t
  misc_feature (121)..(121): n is a, c, g, or t
  misc_feature (130)..(130): n is a, c, g, or t
  misc_feature (161)..(161): n is a, c, g, or t
  misc_feature (171)..(171): n is a, c, g, or t
  misc_feature (181)..(181): n is a, c, g, or t
  misc_feature (196)..(196): n is a, c, g, or t
  misc_feature (198)..(198): n is a, c, g, or t
  misc_feature (200)..(200): n is a, c, g, or t
  misc_feature (204)..(204): n is a, c, g, or t
  misc_feature (228)..(228): n is a, c, g, or t
  misc_feature (233)..(233): n is a, c, g, or t
  misc_feature (269)..(269): n is a, c, g, or t
cctntgcctgcgtggnngataaancnncccacgacccggaggtggcctgccctcgccctcantnntgtctcatgtgtcctccggaaaagggggagtganannggaaaaagggagagttcangacacctgncccccagctccccattgcgtgggcagcagcnctcaaattcnccttgtcctncccctcttccaggtncnanatanccataacctcgtcttggactgttntgtgncctctctggggtccaggtttcctggtcaagcctggnaatgccagggaggaaagggggtctggctacagcgaccctgatcttaggcaaaggggaacatttctccctggagagtcaggtcctatcctgtgctgccctgtctgcccaagcccagggcgatgccatggaagcctaactgacattgcagggagtcagcctcgcccccaccccctactggttttccaatgttttaactggagggcaaaattttactactactcatctttttggagaccagggctgccctgctggcagcctgtccttctaagtgaaatcgactctgtttccccactttaaccccaaattggggcttggaccaagggaggtgagaccacctcccccaggtcccctcccctttcaaaatccatctcattttgccacttcatgcccctgccctaactgggtttttgttcattttttaaaaacagaccacccatcccatccgttttggcttcttgtcccctgtaaatagaccatgacttcgatcagtatttcttgtccccacgcccttcctatccccagatgtgcccccatcccctgaaggagctggctgtctaagtcctgggtcgcgcacttcaccccggcagatggagggggcggaaccgggtgggcggggccgcttcgggctgcttgggccagcggccacccctgcccagccgtcgggagggccgcatctctgtatataatatatatatgtatgtattgttcccggttttgtacggaccatgccctctgtcaggtcgtccccataaaagcagcccccagaaa

SEQ ID NO: 258558 - DNA, 824 bp, Homo Sapiens
  misc_feature (414)..(451): n is a, c, g, or t
  misc_feature (501)..(501): n is a, c, g, or t
gatcaaggagcgcatggagaaactggaaggctactggggtgaggcccagagcctgtgccaggctgtggacgagcacctgcgggagactcaggcgcagtaccaggccctggagcgcaagtacagcaaggccaagcgcctcatcaaggactaccagcagaaggagatcgagttcctgaaaaaggagactgcacagcgtcgggttctggaggagtcggagctggccagaaaggaggagatggacaagctcctggacaagatctcagaactggaaggaaacttgcaaacactgaggaattccaattctacttaacaggaatcattccatgactggacaataattaacccccctcccattgtcctccctcccctgtcctcaacaccccacccctcccccttccagcctggggacaggtnnnnnnnnnnnnnnnnnnnnnnnnnnnnnnnnnnnnnngcttcagggaccagagggctcatatcacaggcccccttaagatggcctgngcagacagaggtggctagaagggcagcctctttcttgccccatggggctgaggcacagaggccgagggctgccgagggctggcctggtggtcgacggacacaagcacctgcagatcaaactgccagactttacacactccagcttttgtctctggactggaacggggctggggctctcccagcatctgccaactgggggctgctccctgcccatggggcacctgggtggcccctgggcctcttgacttgagattctaccttctcgggccttccctctccccccatcattgtgccgcctctgttgcattctgacctccgcccct

SEQ ID NO: 258559 - DNA, 621 bp, Homo Sapiens
  misc_feature (7)..(8): n is a, c, g, or t
  misc_feature (34)..(34): n is a, c, g, or t
  misc_feature (48)..(109): n is a, c, g, or t
  misc_feature (129)..(129): n is a, c, g, or t
  misc_feature (147)..(147): n is a, c, g, or t
  misc_feature (158)..(159): n is a, c, g, or t
  misc_feature (165)..(165): n is a, c, g, or t
  misc_feature (192)..(192): n is a, c, g, or t
tcacacnntgttgctccaggctgatccttgtacntgtggctatcaaannnnnnnnnnnnnnnnnnnnnnnnnnnnnnnnnnnnnnnnnnnnnnnnnnnnnnnnnnnnnnaaaaaacattttcaatcccntgtctgggggtcagtccnctaaacatccnncagatntcagatagtactttcaaccctgtcctnacatcgcaggtttgcagtaatcttttagaatatcgcttgtcaaattagagaatggttttacccaacatgttctcatcggagatcattattatttagaaccctaaggtaaacatgtttaaaatcaaagtcactaagaaaacagaactttggaaaaatggaggaaatgtttttaaagtctgtaagtttgcacaatactgtatagtaactaaaggcatgctaactccgttgtatcctagttattgtagaaacagaggtggcctaatttggtggccaaagtaactggtttactttgagtgtaccagcttatggtgccattgatgaggaattaaagtaggtcaaaatttaattggagttggtattacttcgtaaagctagttttcaagaggaagaaaaccacacttactaatgttttctgtatctaatcaaata

SEQ ID NO: 258560 - DNA, 1506 bp, Homo Sapiens
  misc_feature (1302)..(1359): n is a, c, g, or t
  misc_feature (1416)..(1416): n is a, c, g, or t
ggcctgggtggcgaattcggcacgaggggcatctgacttgacgtggcccacaactgaaaggtctggggagaaggcgccgtgtccgggtgtggagaggggcgtcgtggaagcgagaagagtggcccgtccctctcctccccctttccctctttcggaaagtggtttctgcggggcccgggagcctcggagtaccgaacctcgatctccggggcggggtccttggtgaggactgagcgccccctcccggggacgggcggtctggccgcggagtcccctgcgggagcgtgattggctggaaacggtcccgaacccccaggggagcccgatccctgggggaccctggcttcggactccagtatctgtcgtcgcagggtccctgccctagtggcctatgtcccttgctcggggccatggagacactgcggccagtacggcggcgcctctgtctgaagaaggggaagtgacctccggcctccaggctctggccgtggaggataccggaggcccctctgcctcggccggtaaggccgaggacgagggggaaggaggccgagaggagaccgagcgtgaggggtccgggggcgaggaggcgcagggagaagtccccagcgctgggggagaagagcctgccgaggaggactccgaggactggtgcgtgccctgcagcgacgaggaggtggagctgcctgcggatgggcagccctggatgcccccgccctccgaaatccagcggctctatgaactgctggctgcccacggtactctggagctgcaagccgagatcctgccccgccggcctcccacgccggaggcccagagcgaagaggagaaatccgatgaggagccggaggcaaaagaagaggaagaggaaaaaccacacatgcccacggaatttgattttgatgatgagccagtgacaccaaaggactccctgattgaccggagacgcaccccaggaagctcagcccggagccagaaacgggaggcccgcctggacaaggtgctgtcggacatgaagagacacaagaagctggaggagcagatccttcgtaccgggagggacctcttcagcctggactcggaggaccccagccccgccagccccccactccgatcctccgggagtagtctcttccctcggcagcggaaatactgattcccactgctcctgcctctagggtgcagtgtccgtacctgctggagcctgggccctccttccccagcccagacattgagaaacttgggaagaagagagaaacctcaagctcccaaacagcacgttgcgggaaagaggaagagagnnnnnnnnnnnnnnnnnnnnnnnnnnnnnnnnnnnnnnnnnnnnnnnnnnnnnnnnnntttctattgaacacctatagagagagtgtgtgtgttttctattggacatctatatanagagagtgtgtgagtgtgtgttttctattgaacacctatccgagacctggactgaattttctgagtctggaataaaaaatgcggagctat

SEQ ID NO: 258561 - DNA, 2343 bp, Homo Sapiens
  misc_feature (2144)..(2294): n is a, c, g, or t
atcgccaaacgccgaacccccaagattcaagagcagtaccgcagattggaggcggatcccccatcaagatatggacttccaagcagggagagggcatggtgaagctgctggatgaattgtcccccaacacagcccctcacaaatactatattggatttcggtacgtccatcctttaacagaagaagcaattgaagagatggagagagatggcctagaaagggctattgctttcacacagtatccacagtacagctgctccaccacaggcagcagcttaaatgccatttacagatactataatcaagtgggacggaagcccacgatgaagtggagcactattgacaggtggcccacacatcacctcctcatccagtgctttgcagatcatattctaaaggaactggaccattttccacttgagaagagaagcgaggtggtcattctgttttctgctcactcactgccgatgtctgtggtcaacagaggcgacccatatcctcaggaggtaagcgccactgtccaaaaagtcatggaaaggctggagtactgcaacccctaccgactggtgtggcaatccaaggttggtccgatgccctggttgggtcctcaaacagacgaatctatcaaagggctttgtgagagggggaggaagaatatcctcttggttccgatagcatttaccagtgaccatattgaaacgctgtatgagctggacatcgagtactctcaagttttagccaaggagtgtggagttgaaaacatcagaagagctgagtctcttaatggaaatccattgttctctaaggccctggccgacttggtgcattcacacatccagtcaaacgagctgtgttccaagcagctgaccctgagctgtccgctctgtgtcaatcctgtctgcagggagactaaatccttcttcaccagccagcagctgtgacccccgccggtggaccccgtggcgttaggcaaatgcccaacctccagatacctccgatgtggagagggtgttatttagagatcaaggaaggaagtcatccttccttgatatatatacagcctttgggtacaaattgtgtggtttcttgaggattggactcttgatggatttctatttttatataactatacagtaagcatttgtattttctctctctaggtataagttactagtttggaatgtccattaggacctttaataaatgagttaaaaatttgtcttatgagacacacctatttaagtacagattttggctttattgcccaaaaccctcctgaaagggtacggagagtcccctctgtgggctggcagtgtgaatgagatctgtttagtctcgtgcatatagttgctgttttttaaatgaacacagttgagtatttgaagtgaatttgaaaaagaaatgttacttaatctttccctaagcccatgggttacagaatgctagggaggcaatttggttacctgcaatggctgcttttgccagcgaggccaccattcattggtcatcttggtatttgtgtgtgaatctcactttcctcaatgtaaaaaggaatcaagtatggatttcagaggtgctcttagattccccatacacccaagggtaataaacgtgtacaagtacagtgttcatgatacgtgccttggtgggagtccgtggtgccacagggaaggggctcccactgcttctggtctccagggacagtgctgctggaaaggctagtgatgagcttcaccctggagctcctcccgggaccttgcaagcctctccatccagcatcttctctatcttagttgaatgccttctttctgaacatttgttttaagaattattttataaagtcaacaatactttgcttgaattctttcttaatttacgattttttattataaaaatgtatagtgatacaatgggacatgtgaagaatacagaaaagtaaccactttaatgcaataactgttatcataatattgtatttcgtggtagtcctttcctgtagatatttttaatgccatttaatgccattgtcaccttggatttatgagtgaaaagtgtttctaaaaatatagaaataatgtcagatcagagtctgatcttctatgtttgtatttaaatggattaaaagatccccggtggttccatgnnnnnnnnnnnnnnnnnnnnnnnnnnnnnnnnnnnnnnnnnnnnnnnnnnnnnnnnnnnnnnnnnnnnnnnnnnnnnnnnnnnnnnnnnnnnnnnnnnnnnnnnnnnnnnnnnnnnnnnnnnnnnnnnnnnnnnnnnnnnnnnnnnnnnnntttgggggccccccctccccccccaaaaaaattttttaaaacctttttt

SEQ ID NO: 258562 - DNA, 1049 bp, Homo Sapiens
  misc_feature (925)..(925): n is a, c, g, or t
  misc_feature (933)..(933): n is a, c, g, or t
  misc_feature (952)..(952): n is a, c, g, or t
  misc_feature (1002)..(1002): n is a, c, g, or t
  misc_feature (1007)..(1007): n is a, c, g, or t
  misc_feature (1012)..(1012): n is a, c, g, or t
  misc_feature (1023)..(1023): n is a, c, g, or t
  misc_feature (1032)..(1032): n is a, c, g, or t
ggcctgggtggcgaattcggcacgagggggaggagcccggactcgggccgaggctgcccaggcaatgcgttcactcggcgcaaacatggctgcggccctgcgcgccgcgggcgtcctgctccgcgatccgctggcatccagcagctggagggtctgtcagccatggaggtggaagtcaggtgcagctgcagcggccgtcaccacagaaacagcccagcatgcccagggtgcaaaacctcaagttcaaccgcagaagaggaagccgaaaactggaatattaatgctaaacatgggaggccctgaaactcttggagatgttcacgacttccttctgagactcttcttggaccgagacctcatgacacttcctattcagaataagctggcaccattcatcgccaaacgccgaacccccaagattcaagagcagtaccgcaggattggaggcggatcccccatcaagatatggacttccaagcagggagagggcatggtgaagctgctggatgaattgtcccccaacacagcccctcacaaatactatattggatttcggtacgtccatcctttaacagaagaagcaattgaagagatggagagagatggcctagaaagggctattgctttcacacagtatccacagtacagctgctccaccacaggcagcagcttaaatgccatttacagatactataatcaagtgggacggaagcccacgatgaagtggagcactattgacaggtggcccacacatcacctcctcatccagtgctttgcagatcatattctaaaggaactggaaccattttccacttgagaagagaagcgaggtggtcattctgttttctgctcactcactgccgatgtctgtggtcaacagaggcgacccatatcctcaggaggtaagcgcactgtccaaaaagtnatggaaangctggagtactgcaacccnaccgactggtgtggcatccaaggttggtcgatgcctggttgggtctcaanaaacnatctntaaagggcttntgaatgggnggaaatatctcttgttc

SEQ ID NO: 258563 - DNA, 525 bp, Homo Sapiens
  misc_feature (22)..(22): n is a, c, g, or t
  misc_feature (32)..(32): n is a, c, g, or t
  misc_feature (39)..(39): n is a, c, g, or t
  misc_feature (65)..(65): n is a, c, g, or t
  misc_feature (167)..(167): n is a, c, g, or t
gggtgcccaaagggaaaggggnccccccaatngccttcngggcccccccggggacagtgctgccnggaaaaggcctagtgatgagccttcacccccgggagctcctccccggggacccttgcaagccctcctcccatcccagcatccttcctcctatccttagttgnaatgcccttcctttcctgaacatttgttttaagaattatccttataaagtcaacaatactttgccttgaaatcctttccttaatttacgattttttattataaaaatgtatagtgatacaatgggacatgtgaagaatacagaaaagtaaccactttaatgcaataactgttatcataatattgtatttcgtggtagtcctttcctgtagatatttttaatgccatttaatgccattgtcaccttggatttatgagtgaaaagtgtttctaaaaatatagaaataatgtcagatcagagtctgatcttctatgtttgtatttaaatggattaaaagatccccggtggttccatgaaaa

SEQ ID NO: 258564 - DNA, 665 bp, Homo Sapiens
  misc_feature (48)..(48): n is a, c, g, or t
  misc_feature (88)..(88): n is a, c, g, or t
  misc_feature (570)..(570): n is a, c, g, or t
  misc_feature (578)..(578): n is a, c, g, or t
  misc_feature (637)..(637): n is a, c, g, or t
tggcccatttcccacttgagaagagaagcgaggtggtcattctgtttnctgctcactcactgccgatgtctgtggtcaacagaggcgncccatatcctcaggaggtaagcgccactgtccaaaaagtcatggaaaggctggagtactgcaaccccctaccgactggtgtggcaatccaaggttggtccgatgccctggttgggccctcaaacagacgaatctatcaaagggctttgtgagagggggaggaagaatatcctcttggttccgatagcatttaccagtgaccatattgaaacgctgtatgagctggacatcgagtactctcaagttttagccaaggagtgtggagttgaaaacatcagaagagctgagtctcttaatggaaatccattgttctctaaggtatctacagtgttacaatcgatttagtagaacataccagagagtaatcctctgagaaactcttgcagaatattggtttttctcacatattagaacatttggagttccaattaattacaaaaataaaatcgaattccttatctgctcagtcttttctccttcagntagccccnattttctgatttctacctacctatagctatgtctgatttaaaacctgctttccagaggnaaaaggcctagtgggtaggggtaagagg

SEQ ID NO: 258565 - DNA, 511 bp, Homo Sapiens
  misc_feature (52)..(52): n is a, c, g, or t
  misc_feature (79)..(79): n is a, c, g, or t
  misc_feature (117)..(117): n is a, c, g, or t
aaagaatttaatctccctgcaaaacaggaatgaacacaaacggaacagctcnagggtcaagctgcttgggaaacaacanctcgtttgaacgggaatgtgtgaaaggccacccaaagntggcccagggcccttaagagaaacaaatggaatttcccattaaagaaaactcaagctccttcctgaatgttttcaactcccacactccttggctaaaacttgagagtactcgatgtccagctcatacagcgtttcaatatggtcactggtaaatgctatcggaaccaagaggatattcttcctccccctctcacaaagccctttgatagattcgtctgtttgaggacccaaccagggcatcggaccaaccttggattgccacaccagtcggtaggggttgcagtactccagcctttccatgactttttggacagtggcgcttacctcctgaggatatgggtcgcctctgttgaccacagacatcggcagtgagtgagcagaaaacagaatgact

SEQ ID NO: 258566 - DNA, 1780 bp, Homo Sapiens
  misc_feature (710)..(710): n is a, c, g, or t
  misc_feature (1082)..(1082): n is a, c, g, or t
  misc_feature (1084)..(1084): n is a, c, g, or t
  misc_feature (1726)..(1726): n is a, c, g, or t
  misc_feature (1729)..(1729): n is a, c, g, or t
caggttccctcgacccaggaccccctgttcccaggctatggcccccagtgccctgtagacctggcaggccccccgtgcttgcgacccctatttgggggtctgggtggctactggagggccttgcagaggggcagagaaggcaggaccatgacatctagggcctctgaactttctccggggcgcacgtgacggctggcatcatcattgttggagatgagatccttaagggacacactcaggacaccaacaccttctttctgtgccggacactgcgctccctaggggtccaggtttgccgagtctcagttgtacctgatgaggtagccaccattgcagctgaggtcacttctttctccaaccgcttcacccatgtcctcacagcagggggcatcggccccactcatgatgatgtgacctttgaggcagtggcacaggcctttggagatgagctgaagccacaccccaagttggaagcagccaccaaagccctaggaggggaaggctgggagaagctatcattggtgccctcctctgcccgcctgcattatggcacagatccttgcactggtcaacctttcagattccctctggtctccgtccgaaacgtctacctcttcccaggcattccagagctgctgcggcgggtgctggaggggatgaaggaactattccaaaacccagctgttcagttccactcaaaggagctatantgtggctgctgatgaagcctccatcgcccccattctggctgaggcccaggcccacttttggacgtaggcttggcctggggttcctaccctgactggggcagcaactactatcaggtgaagctgactctagactcagaggaagaaggacccctggaggaatgcttgcctacctgactgcccgtttgccccagggatcgctggtcccctacatgcccaacgctgtggagcaggccagtgaggctgtatacaaactcgctgaatcagggtcttctttgggaaaaaggtggcagtgccctacagaccattgagacctccctggctcagtacagcctcacccagctctgtgtgggcttcaacgggggcaaagattgnantgccctcctgcaccttttccatgcagctgtgcagaggaaattaccctgatgttccaaaccccctccagatcctgtatatccgcagcatctcccctttccctgagctggaacagtttctacaggacactatcaagaggtactaggggcctggaggtttgggctccaagagaagcttgacagagcccacgcccgacccctacttctgtttcttcctaaggtataatctgcagatgttggaagctgagggcagcatgaagcaggccctgggtgaactgcaggcacggcacccccagctggaggctgtccttatgggcacccgccggactgacccctactcctgtagcctctgccctttcagccccactgacccaggctggcccgcattcatgcgcatcaacccactgctggactggacctacagagacatctgggattttctgcgtcagctgtttgtcccatactgtatcctgtatgaccgaggatacacatcactggggagtcgggagaataccgtgcggaacccggccctgaagtgcctgagcccaggaggacaccccacataccgtccagcctatctactggagaacgaagaagaggagcggaactcccgcacatgacctcccaccctaggagggagggaanganaccgtcctagggtataacctggcaataaaccgtgcctctcactgtgaaaaa

SEQ ID NO: 258567 - DNA, 996 bp, Homo Sapiens
tggtacggtccggaattacgggatatcgtcgaccacgcgtcggaggaaaggaacaagggaaagagccggtgaaggggcagaacaggcaggttccctcgacccaggaccccctgttcccaggctatggcccccagtgccctgtagacctggcaggccccccgtgcttgcgacccctatttgggggtctgggtggctactggagggccttgcagaggggcagagaaggcaggaccatgacatctagggcctctgaactttctccggggcgcagcgtgacggctggcatcatcattgttggagatgagatccttaagggacacactcaggacaccaacaccttctttctgtgccggacactgcgctccctaggggtccaggtttgccgagtctcagttgtacctgatgaggtagccaccattgcagctgaggtcacttctttctccaaccgcttcacccatgtcctcacagcagggggcatcggccccactcatgatgatgtgacctttgaggcagtggcacaggcctttggagatgagctgaagccacaccccaagttggaagcagccaccaaagccctaggaggggaaggctgggagaagctatcattggtgccctcctctgcccgcctgcattatggcacagatccttgcactggtcaacctttcagattccctctggtctccggtccgaaacgtctacctcttcccaggcattccagagctgctgccgcggggtgctggaggggatgaagggactattccaaaaacccagctgttcagttccaactcaaaggaactatatgtgggctgccgatgaaaccctccatcgccccccattctgggctgaaggccccagccccacttttggaacgaaagcctggggccttgggttccccaaccctggactgggggccggcacactaactatacacggcggaaagcttggactcctagaaccccccgacaggaaggaaaagggaccccctttgggacggcc

SEQ ID NO: 258568 - DNA, 1367 bp, Homo Sapiens
  misc_feature (333)..(333): n is a, c, g, or t
  misc_feature (1357)..(1357): n is a, c, g, or t
cagagagctcggtgactgcagcgccacgggccaggaagtacaagtgtggcctgccccagccgtgtcctgaggagcacctggccttccgcgtggtcagcggggccgccaacgtcattgggcccaagatctgcctcgaggacaagatgctgatgagcagcgtcaaggacaacgtgggccgcgggctgaacatcgccctggtgaacgggcccctccctcctgacacaggggtcagcggcgagctcatcgaggcccgggcctttgacatgtgggccggagatgtcaacgacctgttgaagtttattcggccactgcacgaaggcaccctggtgttcngtggcatcctacgacgacccagccaccaatgatgaatgaagagaccagaaagctcttcagtgagctgggcagcaggaacgccaaggagctggccttccgggacagctgggtgtttgtcggggccaagggtgtgcagaacaagagcccctttgagcagcacgtgaagaacagtaagcacagcaacaagtacgaaggctggcccgaggcgctggagatggaaggctgtatcccgcggagaagcacggccagctagcacggccagtgccaggaccgggccgagggaggccagaccaagggaggcacgcgcgctgccgggcggacagaggctgaggctcacaccccacacccgggcaggagcgctccctggccccaacacatcggggctccgaggcagtgaccagaacgtggtctcaaggtggtgggggctatgggggctgcagggggtagccctgccgcactttgtcacgggagcccagggtacccgcctccttttcgtaacactgttccccccggtcagcccatctagccctgtcctccattcctcacgccatctccatccccatcttgagtcctgggaacggccctgggtgcctgcccctcactgtgcaactctgggagcagcccggcaggttggggcgtcttccagaacctctcccttctggagccactctgcactgcgggctaaacatgtttccagtgtgattccttccagtgagccaaacccggtggctgcttcatgagcctgactgcctctcgcctgctctcagcaggaagggacccctggagcaggctggcccggggtggtgaagtagctggagcccgatcacagtcccgcggtttgtcagggggcccaccttctagatgaccccttaataaagtgatggccccacagaagaaatgccttcagatgctgttgtcagtgcggagtcagaggttgcggtgtcctctggggtgcgggagggacagatttcagagtcttaaccaaccttgcttcccacagcccgagcagacagcctttttgttntccagggggt

SEQ ID NO: 258569 - DNA, 905 bp, Homo Sapiens
gtctccccacggccagagaaatctccggcccggcccgcatcgccagcccccaggcccggaggaacggcccgagcccaggagaaccacatcttcgtcccagccccggaggctcctgtgggcaagatcgtgagccaacgggttcctgaggcccctcctggccaggcagggtttccccgcgcgtttccgaggagccctgcctggccgggcggctggacaaacaggtcgtagcaccgatcgcgcccgcccccagcaggggtcccgcacaggcttgcccctgacccccacccaaacctgtccttccgctttgcccccaaacagtgcacttgccggcggtcccaacccagcaggagaagtggacatgaggttggcaggccctctccgcattgtggtcctagtcgtcagtgtgggtgtcacatggatcgtggtcagcatcctcctgggtgggcctggcagtggctttcctcgcatccagcaactcttcaccagtccagagagctcggtgactgcagcgccacgggccaggaagtacaagtgtggcctgccccagccgtgtcctgaggagcacctggccttccgcgtggtcagcggggccgccaacgtcattgggcccaagatctgcctcgaggacaagatgctgatgagcagcgtcaaggacaacgtgggccgcgggctgaacatcgccctggtgaacggggtcagcggcgagctcatcgaggcccgggccctttgaccttgtgggccgggagattgtcaacgaacctggttgaaattttattcgggccccggcccgaaaggcaccccgggggggttcggggcatccctacgaacggaccccagccacccagaatgaatggaaaagacccaaaaagcctcttttagtgaagctggggccgcaaggaacccgg

SEQ ID NO: 258570 - DNA, 1324 bp, Homo Sapiens
  misc_feature (702)..(702): n is a, c, g, or t
  misc_feature (1311)..(1311): n is a, c, g, or t
gtgtcctacgtctccggcctcttagcatgtcgtttgggaccacctgctcagcagactgtgactgtgccaggattgcatcacctccgccttctctcttgccattaacacgggctgctgtggccatgctgaggaagccacagcagagccattcttgaccagttggatgctgccacccacccaccccacggggcccatcagctccactggcccatgtgtttccaggtctctgacaacagctgcatgtcctgccagcctgatcgttcttattcctgagttcccttccctccttttaagcactgaacgaatcccagagctgagcccctgcccagaacccaggggtctgtcctttgcagctctgagggccagaggggactgcacacagggaaacaaatccaagaccttctacatttctcaggtccttgagtgcttctctctgctcccagcctccctgccctccagaggccagccccgggttaaacaggggttgcacaggccagagaccgcatcccggattccagacccacacggctggaacaggctccgcaaattctgccaaactatgcgaagcattcttaggtccagcttcttctcacaaatcccaaaatgcagaggacaaaggcaaacacagtgagtttcccaaaaagccccaaaggccctggcttccgcccaaactcgtttgcggccctggcagtccgtggtggngatcgcagaacgacgtggcactccctctaacggcaaacgtctcgcacagagcccggcatctctgcggccggaggctcgcctaccgcatgctctcctaccaggcccacacagcctgccctcctctcctggggaggggagatctgctcagccactcccctgtggccatgaaagagggcctgtcgggtgtcggggaaggagacccccctccggcctcaaagcaattcccagccaggccttcacaactgcatcctggcgcctgggagggaggtcaccacgctgccttctgccttgattaggccggtaacagtcaggaaagccctggggctcacccgaaccgagctgtctacagacaaatcacaggctcggagctgcttcaccaagccgagcacagtctcctgtttccagcactgacttcccaggaagcctggccggttgccctgcgcggtcccctctggaccttcttcagcctctgacacccctgctaggattccatggttggctcctgtgccctccaccccattctttggggacacatgttcttacgcatctctgtaccccagcaacccgcacagtaattgtctattaaattcatttaagaataagaaatanaagcagtatttgc

SEQ ID NO: 258571 - DNA, 877 bp, Homo Sapiens
  misc_feature (730)..(730): n is a, c, g, or t
  misc_feature (799)..(799): n is a, c, g, or t
  misc_feature (829)..(829): n is a, c, g, or t
  misc_feature (856)..(856): n is a, c, g, or t
  misc_feature (866)..(866): n is a, c, g, or t
ccttcaagagagagagttatagctttcaattccataaaagatttttaaagagcatataaataatttggatcaatacaacagtatagataaaagaattatttagcacatgttaaaatagctttattaggttactatgggtttgccattaatttctgagtgggacagaaattataattgtgctttttcgtgtatatgaaaaaactagtcgtaaacaatttgtactctttctttaaggagctgtaatacaaataactttgtgcagtgttcatcaaagagagagacagtgaacctaaaactgaacctggaataaaactcaacatgcagatttgcctactcatagggactttgcctattaagtctaccaaattaaaagtcttatcattcagcgtgttttgagagttaataatcttttgcttggttatactaggctaggaagcaatatcaaagcccttaaattctcaagactaaagacttgagattatataaaattatccagaatcattcagctaatactattggaatatagtatgtagggtgaaagttgacagaaatctgtacttcttcaggaaatcctcactggtaattgttttgaacattaatgaaagcccctataaaatagaaagattggaaatcaccattgtttcctattatccacagtgtgatgggatacttatttggtgacctagttatggggagaattgagtaacgttagttattttatatcataccnttaaaaatattttcttaaggaaattgtcatgggccatccattttctttaataatggaaggacaggtccntaggtacctgggtgagtgggtgtttccccngtttttttaagtcaggattgccagggnaaaacccggntggtgggtggt

SEQ ID NO: 258572 - DNA, 1750 bp, Homo Sapiens
  misc_feature (13)..(13): n is a, c, g, or t
  misc_feature (928)..(938): n is a, c, g, or t
catctcagccggnaatcaaagatggttatgtattaagtaagataagacatagtctctcttccaggtatcacctgtcagaaacctgggcaaatttaattttaagaactagaactgcatctcctggtggcagtcgtcaccctgagaacaggaacaaggcaaagaaagcatacaggattttgattctcctacacaggtgcacataatagttagtttattaatgactatattttgaagccagccattttgtccaatatttaaataacaagctgtttaatattaaagcagaaagtactgccacattgtgacagaagtacagctttatccataaacccttcacacaattatacattaaatgctatttttatttaagcaaggcacccctacttgttctaaaatatgggatgtactactccatttaaaaagcaaatgaggagactgatttttttcctatctagagctggtttaaattcaagtgaagccattaattttcttaccagtctggactgttctgacatgtcacttcacagttttgagactaacaaacacccttaggtctaccccaaacccaaaaaaaagccagggaggggacagtttagacaacttttaagttaaggactagaatgcccccttaagtagataggcaccaccgttatacgcctttagcacaaggcttagaaagggcaaaacatttctaaagacataaaaccgccaaattgtcatttacactaagctggtggtattttttgttttgatttttaaaaattcctatctctaagtaatcaaatacagcaaaatttaaaactattctgccaaacattaccagttcaaaggtctgaaaccgttctttgctttggtgaatgtttggttaaaataaatcactgtttcactccatgagaagttttacatcagagcactcaattcacaggcnnnnnnnnnnngttactttttaaatgaaagcgtttaaagaacactgctgaataaaaatatgtggtctttacaatgagtaacatatcatctatgaaaacaaaccatttaatcatataaaacaaagaccatatttttaaatcagatcctggacagtttaaacaaaaattttaatttgtggtttatttcataatcccaaactggatctttcatttcttcttctaaacagtccactatgaaacttttcttagaagcaattaacccaaaacaccaaaatcatttccctagcagttgctgctaataaactggaactgtatatcccaagtccaagaaagatgtgcaaatgaaatgcttcttgcttcacccttattatctggagcccctagagtcttattttccttttggacatgaattcaggaacagttcaatatacctatgatgaacgtgggaccgatccttgagcatcgctgcaacagcatcctcatgggtctcaaagtgcacatcagcttctccagtggccttcccactggagctgtattccatggtgattctaacaggcttgagtggagcaaaaaactaaacgacaaaccaaaggcagtccaagaggaacatgatggatgtaaacctacctagaagtctggtggctcttcatctttctttcagactttgattcatacactggatacatttctttttaggaaatctttttaagcagtaatatatttatatatctagtatgtcttctggctttttactttttctcagaactcaaagtgacatttcaaatatgctgctctcagcgagcatggtggctcacacctgtaat

SEQ ID NO: 258573 - DNA, 1084 bp, Homo Sapiens
  misc_feature (947)..(947): n is a, c, g, or t
  misc_feature (954)..(954): n is a, c, g, or t
  misc_feature (956)..(956): n is a, c, g, or t
  misc_feature (965)..(965): n is a, c, g, or t
  misc_feature (984)..(984): n is a, c, g, or t
  misc_feature (986)..(986): n is a, c, g, or t
  misc_feature (996)..(996): n is a, c, g, or t
  misc_feature (1003)..(1003): n is a, c, g, or t
  misc_feature (1006)..(1006): n is a, c, g, or t
  misc_feature (1010)..(1010): n is a, c, g, or t
  misc_feature (1033)..(1033): n is a, c, g, or t
  misc_feature (1041)..(1041): n is a, c, g, or t
  misc_feature (1045)..(1047): n is a, c, g, or t
  misc_feature (1049)..(1050): n is a, c, g, or t
  misc_feature (1055)..(1055): n is a, c, g, or t
  misc_feature (1072)..(1073): n is a, c, g, or t
  misc_feature (1078)..(1078): n is a, c, g, or t
gggaggggcggggcgagcgcgggacaaagggaagcgaagccggagctgcgggcgctttttctgcccgcggtgtctcagattcattcttaaggaactgagaacttaatcttccaaaatgtcaaaaagaccatcttatgccccacctcccaccccagctcctgcaacacaaatgcccagcacaccagggtttgtgggatacaatccatacagtcatctcgcctacaacaactacaggctgggagggaacccgggcaccaacagccgggtcacggcatcctctggtatcacgattccaaaacccccaaagccaccagataagccgctgatgccctacatgaggtacagcagaaaggtctgggaccaagtaaaggcttccaaccctgacctaaagttgtgggagattggcaagattattggtggcatgtggcgagatctcactgatgaagaaaaacaagaatatttaaacgaatacgaagcagaaaagatagagtacaatgaatctatgaaggcctatcataattcccccgcgtaccttgcttacataaatgcaaaaagtcgtgcagaagctgctttagaggaagaaagtcgacagagacaatctcgcatggagaaaggagaaccgtacatgagcattcagcctgctgaagatccagatgattatgatgatggcttttcaatgaagcatacagccaccgcccgtttccagagaaaccaccgcctcatcagtgaaattcttaatgagagtgtggtgccagacgttccggtcagttgtcacaacagctagaatgcaggtcctcaaacggcaggtccaatccttaatggttcatcagcgaaaactagaagctgaacttcttcaaatagaggaacgacaccaggagaagaagaggaaattcctggaaagcacagattcatttaacaatgaacttaaaaggttgtgcggtctgagngtagaantngatataganagagttgcagctgtgaatncnaaagccgaangacaggnccnaaanaggcggggggaagggggaaggangccgcaancaannnannccgtnaaagcgcctcattcctnngaagnccagca

SEQ ID NO: 258574 - DNA, 997 bp, Homo Sapiens
  misc_feature (711)..(711): n is a, c, g, or t
  misc_feature (737)..(737): n is a, c, g, or t
  misc_feature (763)..(763): n is a, c, g, or t
  misc_feature (780)..(781): n is a, c, g, or t
  misc_feature (783)..(785): n is a, c, g, or t
  misc_feature (823)..(823): n is a, c, g, or t
  misc_feature (826)..(826): n is a, c, g, or t
  misc_feature (838)..(839): n is a, c, g, or t
  misc_feature (841)..(841): n is a, c, g, or t
  misc_feature (845)..(845): n is a, c, g, or t
  misc_feature (853)..(854): n is a, c, g, or t
  misc_feature (872)..(872): n is a, c, g, or t
  misc_feature (879)..(879): n is a, c, g, or t
  misc_feature (886)..(886): n is a, c, g, or t
  misc_feature (910)..(910): n is a, c, g, or t
  misc_feature (916)..(916): n is a, c, g, or t
  misc_feature (918)..(918): n is a, c, g, or t
  misc_feature (923)..(923): n is a, c, g, or t
  misc_feature (925)..(925): n is a, c, g, or t
  misc_feature (932)..(932): n is a, c, g, or t
  misc_feature (938)..(938): n is a, c, g, or t
  misc_feature (940)..(940): n is a, c, g, or t
  misc_feature (943)..(943): n is a, c, g, or t
  misc_feature (955)..(955): n is a, c, g, or t
  misc_feature (967)..(967): n is a, c, g, or t
  misc_feature (972)..(973): n is a, c, g, or t
  misc_feature (982)..(982): n is a, c, g, or t
  misc_feature (988)..(988): n is a, c, g, or t
  misc_feature (991)..(991): n is a, c, g, or t
  misc_feature (993)..(993): n is a, c, g, or t
ttcccgggatggccactcggggcatcgcggcggcctttctagccgctgtcccaagggttggtctcgcgctttcggctgcgagctctctgtggtgctggcagcgacatgtggcgcctcccgggactcctgggccgagctcttccccgtacactgggacctagcctctggagggtgactcctaagtccaccagcccagatgggcctcagactacctcctccactttgctggttcctgtgcctaacctcgacaggtcaggtccccatggcccaggcacgagcgggggtccaaggtcccatggatggaaggatgccttccaatggatgtctatcccgtgtctccccgaacaccctatgggatgccatatcttggggcactctggccgtgctggccctgcagctggcaaggcagatcacacattccaggcatccctgccagcaggacctcagcgggtagaacactgctcctggcacagtcccctggaccgtttcttctcatctcccttgtggcacccatgctcctcactgcgacaacaaatcctccccagccccgatggcccagctcccaggcacactggcctcagggaacccaggcttggccaggaaaaagcctcagctccagccccggaacttctcacacaactctttgagaggagctcgtcctcaggacccctctgaggaaggtcccggtgattttggcttcctgcatgccantagtagcatcgagtccgaggcaaaancagcccagcctcagcccactggtganaagggacaagataaatnngnnntctttcccttgaggaggctgtgacttccattcagcagntcntccagctcagtnntncaancgctttcnncttcctgggggacagagnacatgangagtggngaacacacggcagccttttgttanttcagngngctgnanccgcggntaaaananagngcaatacaatgngggcttgtgtangaagnnggcagaggnccccanggnantagc

SEQ ID NO: 258575 - DNA, 1755 bp, Homo Sapiens
  misc_feature (640)..(640): n is a, c, g, or t
  misc_feature (871)..(871): n is a, c, g, or t
gcagacgcctgagagcgaggccgaggcccctcagggtttggagaccctgacacacccaccttctcacctgggctctgcgtatcccccagccttgagggaagatgaagcctaaactgatgtaccaggagctgaaggtgcctgcagaggagcccgccaatgagctgcccatgaatgagattgaggcgtggaaggctgcggaaaagaaagcccgctgggtcctgctggtcctcattctggcggttgtgggcttcggagccctgatgactcagctgtttctatgggaatacggcgacttgcatctctttgggcccaaccagcgcccagccccctgctatgacccttgcgaacagtgcctggtggaaagcattcctgagggcctggacttccccaatgcctccacggggaacccttccaccagccaggcctggctgggcctgctcgccggtgcgcacagcagcctggacatcgcctccttctactggaccctcaccaacaatgacacccacacgcaggagccctctgcccagcagggtgaggaggtcctccggcagctgcagaccctggcaccaaagggcgtgaacgtccgcatcgctgtgagcaagcccagcgggccccagccacaggcggacctgcaggctcntgctgcagagcggtgcccaggccccgcatggtggacatgcagaagctgacccatggcgtcctgcataccaaagttctggggtggtggaccagacccacttctacctgggcagtgccaacatgggactggcgttcactgaccccaggtcaagggagctggggcgtggtcatgtacaactgcagctgcctggctcgagacctgaccaagatctttgaggcctactggttactngggccaggcaggcagctccatcccatcaacttggccccggttctatgacacccgctacaaccaagagacaccaatggagatctgcctcaatggaacccctgctctggcctacctggcgagtgcgcccccacccctgtgtccaagtggccgcactccagacctgaaggctctactcaacgtggtggacaatgcccggagtttcatctacgtcgctgtcatgaactacctgcccactctggagttctcccaccctcacaggttctggcctgccattgacgatgggctgcggcgggccacctacgagcgtggcgtcaaggtgcgcctgctcatcagctgctggggacactcggagccatccatgcgggccttcctgctctctctggctgccctgcgtgacaaccatacccactctgacatccaggtgaaactctttgtggtccccgcggatgaggcccaggctcgaatcccatatgccccgtgtcaaccacaacaagtacatgggtgactgaacgcgccacctacatcgggaacctccaaatgggtctgggcaactactttcacgggaggacgggcggggcaccctcgcctgctgggtgacgccaaaaatgggaaggggccggcccttgcggaagcccagctggagggcccatttttcccggaggggcctggggccttcccctttacaagccactacactttggacacccttaaactggaaaggggttgggcaaacggtctggccggcctggtttgtggggccccctaccacagggggccggcccagggccctgtttgggcccccccggggcccccaggtggctctgggttaacgggccccttgtcccgggccaccccggtttttgtttgtccccaattgtgggctc

SEQ ID NO: 258576 - DNA, 741 bp, Homo Sapiens
  misc_feature (566)..(566): n is a, c, g, or t
gacacccgctacaaccaagagacaccaatggagatctgcctcaatggaacccctgctctggcctacctggcgagtgcgcccccacccttgtgtccaagtggccgcactccagacctgaaggctctactcaacgtggtggacaatgcccggagtttcatctacgtcgctgtcatgaactacctgcccactctggagttctcccaccctcacaggttctggcctgccattgacgatgggctgcggcgggccacctacgagcgtggcgtcaaggtgcgcctgctcatcagctgctggggacactcggagccatccatgcgggccttcctgctctctctggctgccctgcgtgacaaccatacccactctgacatccaggtgaaactctttgtggtccccgcggatgaggcccaggctcgaatcccatatgcccgtgtcaaccacaacaagtacatggtgactgaacgcgccacctacatcggaacctccaactggtctggcaactacttcacggagacggcgggcacctcgctgctggtgacgcagaatgggaggggcggcctgcggancagctgggaggccattttcctgagggactgggactccccttacagccatgaccttgacacctcagctgacagcttgggcaacgctggccgccttgcttttgaggcccgattccagtgggcaggccaaggcttttggggcccccgcggacccagggtgctttgggtcacggtccct

SEQ ID NO: 258577 - DNA, 431 bp, Homo Sapiens
  misc_feature (49)..(49): n is a, c, g, or t
gggcggcctgcggagccagctggaggccattttcctgagggactgggantccccttacagccatgaccttgaaacctcagctgacagcgtgggcaacgcctgccgcctgctctgaggcccggatccaagttgggagccaaagcctgctgggcccccgcgggacccaggtgctctgggtcacggtccctgtccccgcacccccgcttctgtctgccccattgtggctcctcaggctctctcccctgctctcccacctctacctccacccccaccggcctgacgctgtggccccggggaccagcagagctgggggagggatcagcccccaaagaaatgggggtgcatgctggccttgccccctggcccacccccactttccagggcaaaaagggcccagggttataataagtaaataacttgtctgtacagcc

SEQ ID NO: 258578 - DNA, 1611 bp, Homo Sapiens
  misc_feature (5)..(5): n is a, c, g, or t
  misc_feature (9)..(9): n is a, c, g, or t
  misc_feature (163)..(241): n is a, c, g, or t
tgggntgtngggggcaggacgaagattctggctgaactttccaagggacgggacgcttgggatcctggctggtacgaggcctcccacactgtcaaatgtcaactccaccagcactgagacaatgagtagatgagaatgtagaaagagggaaggtggtaggtannnnnnnnnnnnnnnnnnnnnnnnnnnnnnnnnnnnnnnnnnnnnnnnnnnnnnnnnnnnnnnnnnnnnnnnnnnnnnncatggcccggctagagacaaagccagaggtgatcaggtcagcagcaggagaggctcagaagggagcctctcgggaagtgcaggcagccatgagggctcgtttcaagctgctcaataggtgacgaacatcaccacgttcccaggaacccaagcggagaaaggagggcatgaaccctttgtagaaggctcggggcccctccttctggagcatggtaagggcacagtggccagcgctactgtactggcccagggcagagttcatgtatctcgtcttgaccacgtctacaggggaggcgatgacagtggtgcagaagcctgccccaaaggcagaagtgaagtggcaagggaggtcatctgtcatgaggttggctttcaggagggcatccttgatgaggtcataggtcaccagctcagcacagttgacaatggcattacgagcaacattggggagaggtccctttccagaggccccggaacccttcctctcgggcaatggtcttgtaggcattgacggtgctttggtatctccgaccacctccagcccgggcctgagcttggaatcggacctttaccacatccgtgggctgggccacagccacagccagggcacctgtggtgctgcctgctaggaggcggctcccaatgctggcatgctcagagcccttggtgtagaactgttggacagaatcatacaggccgatgcggacagaggcaaagctcatttggcgctgcaggccggcaaccagcccattgtagaggcttcgggggccctcagtacgcaccatggtcagaatggtgcccatcacaccgcggtactgggcgctgactgtagcgcgcactggcccctgactttctccttggatctgtaaccggactttagcagtatccagaggaaaggtgatgagatctgcgatgcaggcagctgtgccagccccaagaaacttcacagtggcagtagggggcacatctgtggccttgaacccaaccatgatgctgatttcctgctacgtcccaggagatggagaaaaactggagacaggggcacctttaatcagcaacaagacgagatagaggaactctgccggaatccggctttgtaaggtctcacggtgaggcctccaagatcaagcttctctaaaggtgtcccgttcttcaaagctgccagtggctatcatggcccgatccccttggttttccatagaaaatgggtgggagacgaaacacctaatggtcatactatgtgtccgagccgcagggagaacacggcagtgcgtgcggctgtgtctgtcggctggcggagggcgcgtcggacgagccgggcgagcgtggacagtcaatcccaaggcgcgcgcagctgggcttcgcagtccc

SEQ ID NO: 258579 - DNA, 336 bp, Homo Sapiens
  misc_feature (97)..(97): n is a, c, g, or t
  misc_feature (305)..(305): n is a, c, g, or t
aaatgagtgcaagcccgctggccactgaccccatggctcgcccacagatgccagcattgggagccgcctcctagcaggcagcaccacaggcccatgngctgtggctgatggcccagcccacggatgggtaaaaggtccgattccaagctcaggcccgggctggaggtggtcggagataccaaagcaccgtcaatgcctacaagaccattgcccgagaggaagggttccggggcctctggaaagggacctcttcccaatgttgctcgtaatgccattgtcaactgtgctgagctgggtgaactatncacctcatcaagggatgccctccttgaaagg

SEQ ID NO: 258580 - DNA, 1110 bp, Homo Sapiens
gggtccggaatttccgggatatcgtcgacccacgcgtccgccgcgagctgcgctctccccggccggagcgctcctcctccagcccccagcccgcagggtactttgccctcggagcgaaggaggctccagaactggtagagccgggccatcgggctgggcacctccccgcggcgcccgcagcgcggagtccactgaccggctcaaaggtatggcgttgacggtggatgtggccgggccagcgccctggggcttccgtatcacagggggcagggatttccacacgcccatcatggtgactaaggtggccgagcggggcaaagccaaggacgctgacctccggcctggagacataatcgtggccatcaacggggaaagcgcggagggcatgctgcatgccgaggcccagagcaagatccgccagagcccctcgcccctgcggctgcagctggaccggtctcaggctacgtctccagggcagaccaatggggacagctccttggaagtgctggcgactcgcttccagggctccgtgaggacatacactgagagtcagtcctccttaaggtcctcctactccagcccaacctccctcagcccgagggccggcagcccttctcaccaccaccctctagcagctacctcactggagaggcagccatcagacgaagcttccaggagtctggcatgttccccgggctccccgtagtgaccgactgtctactcagggcgcctggaagcgaaggccgactcggcggcctggcgatcggcggggctgtgctgcgcttcccgggctcgttctccaggccagctggctcggcaggggaacccactggaaagactggaaatttaagaggtgggaaatcgaggaggggtcccgcaaagaaaaagcccatgggactgaggaacccgtaggctaacaaaaaaagttatccgacgttattcgaaatagacacccatctggagaagagcgagacaccacacaacgtggagaaagacacatacatagtgaataatagggacaccacactcatgtaagaacaaacaaaagtattactaaaacaactaatctcgcagtattgtcgggtgggggtcctcatgtgtagtatgaga

SEQ ID NO: 258581 - DNA, 1320 bp, Homo Sapiens
  misc_feature (1192)..(1192): n is a, c, g, or t
  misc_feature (1265)..(1265): n is a, c, g, or t
acttcacgtgacgccggtgccgggcgaacatggcggcggccaccggaccctcgttttggctggggaatgaaaccctgaaggtgccgctggcgctctttgccttgaaccggcagcgcctgtgtgagcggctgcggaagaaccctgctgtgcaggccggctccatcgtggtcctgcagggcggggaggagactcagcgctactgcaccgacaccggggtcctcttccgccaggagtccttctttcactgggcgttcggtgtcactgagccaggctgctatggtgtcatcgatgttgacactgggaagtcgaccctgtttgtgcccaggcttcctgccagccatgccacctggatgggaaagatccattccaaggagcacttcaaggagaagtatgccgtggacgacgtccagtacgtagatgagattgccagcgtcctgacgtcacagaagccctctgtcctcctcactttgcgtggcgtcaacacggacagcggcagtgtctgcagggaggcctcctttgacggcatcagcaagttcgaagtcaacaataccattcttcacccagagatcgttgagtgccgagtgtttaagacggatatggagctggaggttctgcgctataccaataaaatctccagcgaggcccaccgtgaggtaatgaaaggctgtaaaagtgggaatgaaagaatatgagttggaaagcctcttcgagcactactgctactcccggggcggcatgcgccacagctcctacacctgcatctgcggcagtggtgagaactcagccgtgctacactacggacacgccggagctcccaacgaccgaacgatccagaatggggatatgtgcctgttcgacatgggcggtgagtattactgcttcgcttccgacatcacctgctcctttcccgccaacggcaagttcactgcagaccagaaggccgtctatgaggcagtgctgcggactcccgtgccgtcatgggtgccatgaagccaggtgtctggtggcctgacatgcaccgcctggctgaccgcatccacctggaggagctggcccacatggacatcctgagcggcagcgcggacgccatggtccaggctcacctgggggccgtgtttatgcctcacgggcttggccacttcctgggcattgacgtgcacgacgtgggaggctacccagaggccgtggagcnaatcgacgaagcccggcctgcggacctggcgcactgcacggcacctgcagccaggcatggtgtcaccgtgganccgggatctacttcatcgaccaactcctggatgaaggcctggtggacccggcccg

SEQ ID NO: 258582 - DNA, 1865 bp, Homo Sapiens
  misc_feature (705)..(705): n is a, c, g, or t
  misc_feature (745)..(745): n is a, c, g, or t
  misc_feature (892)..(892): n is a, c, g, or t
  misc_feature (1439)..(1449): n is a, c, g, or t
  misc_feature (1482)..(1709): n is a, c, g, or t
cccgggatcgggaggtggtggagtgacctggccccagtgctgcgtccttatcagccgagccggtaagagggtcccagctcttgctcctgcctgtttgcctggaaatggccacgcttctccttctccttggggtgctggtggtaagcccagacgctctggggagcacaacagcagtgcagacacccacctccggagagcctttggtctctactagcgagcccctgagctcaaagatgtacaccacttcaataacaagtgaccctaaggccgacagcactggggaccagacctcagccctacctccctcaacttccatcaatgagggatcccctctttgggacttccattgggtgccagcactggttcccctttacctgagccaacaacctaccaggaagtttccatcaagatgtcatcagtgccccaggaaacccctcatgcaaccagtcatcctgctgttcccataacagcaaactctctaggatcccacaccgtgacaggtggaaccataacaacgaactctccagaaacctccagtaggaccagtggagcccctgttaccacggcagctagctctctggagacctccagaggcgacctctggaccccctcttaccatggcaactgtctctctggagacttccaaagggacctctggaccccctgttaccatggcaactgactctctggagacctccactgggnccactggaccccctgttaccatgacaactggctctctggngccctccagcgggggcagtggaccccaggtctctagcgtaaaactatctacaatgatgtctccaacgacctccaccaacgcaagcactgtgcccttccggaacccagatgagaactcacgaggcatgctgccagtggctgtgcttgntggccctgctggcgggtcatagtcctcgtggctctgctcctgctgtggcgccggcggcagaaacggcggactggggccctcgtgctgagcagaggcggcaagcgtaacggggtggtggacgcctgggctgggccagcccaggtccctgaggagggggccgtgacagtgaccgtgggagggtccgggggcgacaagggctctgggttccccgatggggaggggtctagccgtcggcccacgctcaccactttctttggcagacggaagtctcgccagggctccctggcgatggaggagctgaagtctgggtcaggccccagcctcaaaagggaggaggagccactggtggccagtgaggatggggctgtggacgccccagctcctgatgagcccgaagggggagacggggctgccccttaagtgtcggtgaatagtgaggctggaggccggaatctcagccagcctccagcaccttccctctcaccatcccactgccccctcgctcccatgtttccacccggcaccctgatcctcacccgaatctccnnnnnnnnnnncttttgagacagagtttcgctttgtcgcccagnnnnnnnnnnnnnnnnnnnnnnnnnnnnnnnnnnnnnnnnnnnnnnnnnnnnnnnnnnnnnnnnnnnnnnnnnnnnnnnnnnnnnnnnnnnnnnnnnnnnnnnnnnnnnnnnnnnnnnnnnnnnnnnnnnnnnnnnnnnnnnnnnnnnnnnnnnnnnnnnnnnnnnnnnnnnnnnnnnnnnnnnnnnnnnnnnnnnnnnnnnnnnnnnnnnnnnnnnnnnnnnnnnnnattaaagaaatgaaccctccgggccttggcctcctcaacccaacttttttaattcggaaatccccctggagggtttctcccccccgggaatttcctggggggcattcctccccccaggccacccacaaactatacgccctgggggcaagggacagg

SEQ ID NO: 258583 - DNA, 1500 bp, Homo Sapiens
tgccgcgcggggggcgggcggcgcggagtaggtggcggcggccatggccgaggcgtcgccgcatcccggacggtacttctgccactgctgctccgtggagatcgtcccgcgcctgccggattatatctgtccaagatgcgagtctggttttatcgaggagcttccggaagagaccaggagcacagaaaatggttctgccccctccacagctcccacagaccagagccggccaccgttggagcacatggaccagcacctgttcacgctgccgcagggctacggacagtttgctttcggcatcttcgatgacagcttcgagatccccacgttccctcctggggcgcaggctgacgacggcagggaccctgagagccggcgggagagagaccatccgtcccggcaccggatcatccagcagctcgtcaacggcatcatcacgcccgccaccatccccagcctgggcccctggggagtcctgcactcaaaccctatggactacgcctggggggccaacggcctggatgccatcatcacacagctcctcaatcagtttgaaaacacaggccccccaccggcagataaagagaaaatccaggccctccccaccgtccccgtcactgaggagcacgtaggctccgggctcgagtgccctgtgtgcaaggacgactacgcgctgggtgagcgtgtgcggcagctgccctgcaaccacctgttccacgacggctgcatcgtgccctggctggagcagcacgacagctgccccgtctgccgaaaaagcctcacgggacagaacacggccacgaacccccctggcctcactggggtgagcttctcctcctcgtcgtcatcgtcctcctccagcttcgccagcaacgagaacgccacaagcaactcgtgagcccacgtcggcccgtcgggaaagcacggggcctttcccacccaccctcagccagcgccacacggcacccacagactgggtgccccggcggcgccacgcttggctggtcagcgctgcaggtcccgcctgttccaggccaggacccgggcccggcccaccggccccctggcttgggaaggcgtgggccacatggtcccctctggggcgtccccagcctccccgtcctctgtctaacctcaccctctaaacgttcagcggtggaaagatttttataattttaaattataactgctttgaaataaacggacgtttgagctcacgtggcggccatgcatggtttgtggcggaagacggggcccagcggctcccccagcgctgaagcacggggttcagcggctcccccagtgctgcaggtgccgccaggacgggccacgtgggcccccagcctccccctcggccgcctccacgacccggagtaggggggctcgggaccatgaggatgaccagcaaaattcaagaacaaaactgctccaacagacttttttaaaggaaacaatatgtgtatcttgaacagctatttaaaatacactacttacaaagag

SEQ ID NO: 258584 - DNA, 1788 bp, Homo Sapiens
  misc_feature (4)..(4): n is a, c, g, or t
  misc_feature (14)..(14): n is a, c, g, or t
  misc_feature (27)..(27): n is a, c, g, or t
  misc_feature (30)..(31): n is a, c, g, or t
  misc_feature (34)..(34): n is a, c, g, or t
  misc_feature (43)..(43): n is a, c, g, or t
  misc_feature (60)..(60): n is a, c, g, or t
  misc_feature (66)..(67): n is a, c, g, or t
  misc_feature (76)..(76): n is a, c, g, or t
  misc_feature (79)..(79): n is a, c, g, or t
  misc_feature (84)..(84): n is a, c, g, or t
  misc_feature (1024)..(1045): n is a, c, g, or t
  misc_feature (1273)..(1273): n is a, c, g, or t
  misc_feature (1461)..(1461): n is a, c, g, or t
  misc_feature (1579)..(1579): n is a, c, g, or t
ttgngaggaactgngaatacttaaggngtnnaanctaactctnccacttgtgtggaaggnatttanncagtgtaancgntgaanacgcatgtaagaactcatacaggtgagaagccatacaaatgtgaattgtgtgataaaggatttgctcagaaatgtcagctagtcttccatagtcgcatgcatcatggtgaagaaaaaccctataaatgtgatgtatgcaacttacagtttgcaacttctagcaatctcaagattcatgcaaggaagcatagtggagagaagccatatgtctgtgataggtgtgaacagagattcgctcaagccagcacactgacctatcatgtccgtaggcatactggagaaaaaccttatgtatgtgatacctgtgggaaggcattggctgtctctagttctcttataactcattctcgaaaacatacaggtgaaaaaccacacatatgtggtatttgtgggaaaagttttatttcctcaggagagctcaacaaacactttcggtcccatacaggagaaagaccatttatctgcgaattatgtggaaattcttacacagatattaaaaatttaaagaagcacaaaacaaaagtccattctggtgcagataaaactctaaactccagtgcagaggatcatactttgagtgaacaggattccatacaaaaaagtcctttatcagaaactatggatgtgaagccttctgatatgactttaccattagctcttccacttgggactgaggaccatcacatgcttctgcctgtcacggatactcagtctcctacatcagatacattgttgaggtcaactgtgaatgggtattcagaaccacagttgatttttttacaacaattatactgactttgtaaggaatatggaattgctaagatatcattggtagcaaacatctctggtaaggtgcatatattcatattaaattcccattcatttgagttgtgaccattatttttcatttcactgaagtaaaaagcacctgatgctgagnnnnnnnnnnnnnnnnnnnnnncagaaacttgtcgggccgcctcggcccatcgaaaaaaacttttctaagacacttccgttttggggccgcccggggcccccagtagggttaattgggaacccctgggggccataagcttggttttccctaaagggaaaaataccttgggatgccattggcaccctaatgggggctcttgtggaatatttccctcccacaccccccattttaatagagagaaaacccccncccaccccggcgttacgaggtctcaaaaaccaccccaaaaaaaagaccggggttatgtctttgtgatagccccaccagacgtctcccccgggacaaaaaagtgggggaaagggctttacccccgtgggaggggggtgcaataacattcctcccctgtgggcggcacacaccccatcctccccacccangacggcgcggtgagtgttcccccccacacaagccttcaaaaaccctttcaccgatactatattcctatgctctctattttatctggttcttctcgcacggttctccttcttggctggncaactctattgttctcccgccccccgcgcaacagtcggtgatggtggcgtccaaatttttcccctttattaagtaaaggaaatttttctcttggcacctggatacagggtaaagggacaaagggtccctaaattatacataagacacgggggtccatgtctcacgccgaaaaacccttccatgatacatcacggccgcagcgaggcgcg

SEQ ID NO: 258585 - DNA, 1050 bp, Homo Sapiens
  misc_feature (610)..(610): n is a, c, g, or t
  misc_feature (858)..(858): n is a, c, g, or t
  misc_feature (911)..(911): n is a, c, g, or t
  misc_feature (927)..(927): n is a, c, g, or t
  misc_feature (931)..(931): n is a, c, g, or t
  misc_feature (940)..(940): n is a, c, g, or t
  misc_feature (953)..(953): n is a, c, g, or t
  misc_feature (963)..(963): n is a, c, g, or t
  misc_feature (972)..(973): n is a, c, g, or t
  misc_feature (975)..(975): n is a, c, g, or t
  misc_feature (988)..(988): n is a, c, g, or t
  misc_feature (992)..(992): n is a, c, g, or t
  misc_feature (1013)..(1013): n is a, c, g, or t
  misc_feature (1017)..(1017): n is a, c, g, or t
  misc_feature (1020)..(1020): n is a, c, g, or t
  misc_feature (1022)..(1022): n is a, c, g, or t
  misc_feature (1026)..(1026): n is a, c, g, or t
  misc_feature (1030)..(1030): n is a, c, g, or t
  misc_feature (1032)..(1032): n is a, c, g, or t
tcccgggatggcggagacagagtgaagaaactgtgttccccccttgggttgctatcgatcaagggtaaaattccattctgatatcaaaatgcagtattcgcaccattgtgagcaccttttagagagactgaacaaacagcgggaagcaggttttctctgtgactgtaccatagtgattggggaattccagtttaaagctcataggaatgtgctggcctcctttagtgagtattttggtgcgatctacagaagcacttctgagaacaatgtctttcttgatcagagtcaggtgaaggctgatggatttcagaaactgttggagtttatatacacaggaactttaaatcttgacagttggaatgttaaagaaattcatcaggctgctgactatctcaaagtggaagaggtggtcactaaatgcaaaataaagatggaagattttgcttttattgctaatccttcttctacagagatatctagtattactggaaacattgaattgaatcaacagacttgtcttcttactctgcgagattataataatcgagagacatcagaagtatctacagatttgattcaggcaaatcctaaacaaggcgcgttagaaaanagtcatctcaaacgaaaaagaagaagaaggctttcaactccccgaaaacagggcagaataaaacagtgcaatatcccagtgacatcttagagaatgcatctgttgaattattcctagatgcaaatgaactgcccacacctgtagtagaacaagttgcacaaataaatgataattcagaactcgagttgacatcagttgtggaaaatacttttccagcacaagatattgtgcacactgttacagtgaangaaaaacgtggaaaatcacagcaaaactgtgctctgaaagaacactctatgtntaatatagccagcatncagngtcatatgnggagggaactccngggagagctngatcagagnntncaagacaaacaangtgnaaacatgtgggaagtatttcngaancancngttnagangncctgagaacataaggagt

SEQ ID NO: 258586 - DNA, 1193 bp, Homo Sapiens
  misc_feature (943)..(943): n is a, c, g, or t
cccatgacgcgagaccccgcccccgcagcgcccgcttccaaaatggcggcagcgatgcctgcccggctgttggggtggcggtgacgacaggcagcaaaagaccagctggtcccagattcgctgctggagtgctggatggagcctttctctgccctctgtgacatttccaattttagataatgcctcacatctctgtccccccgggaccccctggagcccccatgatccctaagaagacagcttgaacctagatctcacccccaggatgttgcggaggctgctggagcggccttgcacgctggccctgcttgtgggctcccagctggctgtcatgatgtacctgtcactggggggcttccgaagtctcagtgccctatttggccgagatcagggaccgacatttgactattctcaccctcgtgatgtctacagtaacctcagtcacctgcctggggccccagggggtcctccagctcctcaaggtctgccctactgtccagaacgatctcctctcttagtgggtcctgtgtcggtgtcctttagcccagtgccatcactggcagagattgtggagcggaatccccgggtagaaccagggggccggtaccgccctgcaggttgtgagccccgctcccgaacagccatcattgtgcctcatcgtgcccgggagcaccacctgcgcctgctgctctaccacctgcaccccttcttgcagcgccagcagcttgcttatggcatctatgtcatccaccaggctggaaatggaacatttaacagggcaaaactgttgaacgttggggtgcgagaaggccctgcgtgatgaagagtgggactgcctgttcttgcacgatgtggacctcttgccagaaaatgaccacaatctgtatgtgtgtgaccccccggggaccccgcccatgttgccgttgcgatgaacaagtttggnatacagccctcccgtacccccccagtactttcggaaggagtctcaaccaccttactccctggaaccagtaccttggaagaatgaaatgggccttccccccaatggaaattacctgggggcctggggggtggtttaaaggaattaaccaacccttttgcctacccaaaggggggccccccttgggcctgtgggaattgaaaaaaatcttcttcggggccccccccaaaattcttggtaagggaccccttat

SEQ ID NO: 258587 - DNA, 953 bp, Homo Sapiens
attgctgcgagcaggagcaggagacgcggagctcggagcgctgagctgacctgccggagccgggcgtgggctgcagcctcggagctcccggaacgatggtgaagttggggaacaatttcgcagagaagggcaccaagcagccgctgctggaggatggcttcgacaccattcccctgatgacgcccctcgatgtcaatcagctgcagttcccgcccccggataaggtggtcgtgaaaactaagaccgagtatgaacctgaccgcaagaaagggaaagcacgtcctccccaaattgctgagttcaccgtcagcatcacggagggtgtcaccgagaggtttaaggtctccgtgttggtcctcttcgccctggccttcctcacctgcgtcgtcttcctggttgtctacaaggtgtacaagtatgaccgcgcctgccccgatgggttcgtcctcaagaacacccagtgcatcccagaaggcttggagagctactacgcggagaagactccagtgcccgggagaaattttacacagtcataaaccactacaacctggccaagcagagcatcacgcgctccgtatcgccctggatgtcagttctgtcagaagagaagctgtccgagcaggagactgaagcggctgagaagtcagcttagcgggatgggcaagttccttacaatgtgtcacttgcaaataacaaagggactttgagggacatttcattaaatataattactgatactttagaggttactcatttacggtgcaattgcttctgtttgctaatgctgctttgcaaataaaacttgctgccgaccacccacgggcataaaatcaagtgcatttcagcattgcctaaagagctctgacaccacttttcatgttaagatcttcatttagctcctttactgggatttattggatgctgtaaaaaaataaatttacactggatatgtg

SEQ ID NO: 258588 - DNA, 1230 bp, Homo Sapiens
  misc_feature (653)..(653): n is a, c, g, or t
taaagtaaaatacaacaaaatgtttaatgagcaaattcgtcttagcaaatatgaaactgccacagagagtagaagaggagcagtcaaacacagaggtgaactccacaaagatctttccgcagccgggcacctcgacgccgtccacaggccgggggatctcgatggacttgacaagcccgtacttgctgcactcgtcccgaacatcctccacgatctcctcatactcctcgtcgtccagcagcccctcaggcagcaccatgttcatgaggcacaggacctcagtcgggtggccgcccatctgcacctgggagcgcatcaagcccggcactggcagggtaacaggcgtctgagtgatggtgcgcagcgtggcattcttggctcccaaactcgccctctggaccagcagcgtcttatcccccagctgcatgccgtgcagccccgcaatggcctgagccgtgacgttgatgtccacgtactcacagaaggcgtagcccttggagagccccgtggcactgtccttgaccaggttgaaggccttgaggggcccaaaggatgtcagcagctctttgacctggtcatcgttcaggtagttgggtaagcccccgatgaacagcttgtgggcagagtcggggaccacagtggacacaaccccnaggcacatagacggaggggttctctgacatgccaggaagcggctggtagtcgtgaggcctgcggatctttagtgactggccctggaagatgatgccatcaaaggccatagcctgggtagtctcgtccactgagcggaactccaaaaaggcaaaattcttgtcctggttaatctgcacagccaacactgggttgccaggggcctgggtcagcccccccaggcgcatctgggcgttgaagaaatccatcatggcctccttcgacgatggtagcaaactttttgttgctacgagggatctcagccccacaatatttcactcagtgatgccaaaggggatgttgcccacgtagaggcgccgggcttgtctggtcatctggctcccgaccacgggcaccggcgttggggtcacagccagaccgtcaggggtcatggtggggagaagagcagtggctggaatctgacccgcagcttgcatggccttgtactgcattggggtgatgtgctcaaagcctgggggtggcacgtcccagtatttacggaccttcttcttcttctcgtggcggggggaacgaatcagt

SEQ ID NO: 258589 - DNA, 1307 bp, Homo Sapiens
attctaaccgcaaggagtaccggaggggaggtcgtgatggcggcgccggaggcggaggttctgtcctcagccgcagtccctgatttggagtggtatgagaagtccgaagaaactcacgcctcccagatagaactacttgagacaagctctacgcaggaacctctcaacgcttcggaggccttttgcccaagagactgcatggtaccagtggtgtttcctgggcctgtgagccaggaaggctgctgtcagtttacttgtgaacttctaaagcatatcatgtatcaacgccagcagctccctctgccctatgaacagcttaagcacttttaccgaaaaccttctccccaggcagaggagatgctgaagaagaaacctcgggccaccactgaggtgagcagcaggaaatgccaacaagccctggcagaactggagagtgtcctcagccacctggaggacttctttgcacggacactagtaccgcgagtgctgattctccttgggggcaatgccctaagccccaaggagttctatgaactcgacttgtctctgctggccccctacagcgtggaccagagcctgagcacagcagcttgtttgcgccgtctcttccgagccatattcatggctgatgcctttagcgagcttcaggctcctccactcatgggcaccgtcgtcatggcacagggacaccgcaactgtggagaagattggtttcgacccaagctcaactatcgagtgcccagccggggccataaactgactgtgaccctgtcatgtggcagaccttccatccgaaccacggcttgggaagactacatttggttccaggcaccagtgacatttaaaggcttccgcgagtgaatgagtgcttcttaatcctaaaaacacaatggaagaattatctttctccatgtggcgctgaatcacccatctggtttggagctagagttgcttcctggtgagagaggaagcaactttccttctggttgtctgcctcccctcagatttcctgataggctgatggcatgtggctgtgactgtgactgtaatcattgctgaacaacatctctttgaatcaaaggttgattttcccagagggtgctgggtcaggcatttctattaggagttggaaagcaaaaatgggtccatagacactctatggaggtgtccctttctgctctttgctgtgtcctttcagaatttttaccaggaacataatgtggatgtgacttatgaacttaaatataaaataaatagattcttattatgaacggcacacaatccaaccccaataaaaaaaccctgtc

SEQ ID NO: 258590 - DNA, 1030 bp, Homo Sapiens
  misc_feature (42)..(43): n is a, c, g, or t
  misc_feature (49)..(49): n is a, c, g, or t
  misc_feature (53)..(53): n is a, c, g, or t
  misc_feature (58)..(58): n is a, c, g, or t
  misc_feature (335)..(335): n is a, c, g, or t
  misc_feature (406)..(416): n is a, c, g, or t
  misc_feature (422)..(422): n is a, c, g, or t
  misc_feature (451)..(451): n is a, c, g, or t
  misc_feature (458)..(458): n is a, c, g, or t
  misc_feature (471)..(471): n is a, c, g, or t
  misc_feature (478)..(478): n is a, c, g, or t
  misc_feature (509)..(510): n is a, c, g, or t
  misc_feature (512)..(512): n is a, c, g, or t
  misc_feature (521)..(521): n is a, c, g, or t
  misc_feature (532)..(532): n is a, c, g, or t
  misc_feature (570)..(571): n is a, c, g, or t
  misc_feature (599)..(599): n is a, c, g, or t
  misc_feature (604)..(604): n is a, c, g, or t
  misc_feature (609)..(609): n is a, c, g, or t
  misc_feature (686)..(686): n is a, c, g, or t
  misc_feature (704)..(704): n is a, c, g, or t
  misc_feature (751)..(751): n is a, c, g, or t
  misc_feature (771)..(771): n is a, c, g, or t
  misc_feature (774)..(774): n is a, c, g, or t
  misc_feature (809)..(809): n is a, c, g, or t
  misc_feature (811)..(811): n is a, c, g, or t
  misc_feature (823)..(823): n is a, c, g, or t
  misc_feature (870)..(870): n is a, c, g, or t
  misc_feature (885)..(885): n is a, c, g, or t
  misc_feature (904)..(904): n is a, c, g, or t
  misc_feature (918)..(918): n is a, c, g, or t
  misc_feature (932)..(932): n is a, c, g, or t
  misc_feature (936)..(936): n is a, c, g, or t
  misc_feature (939)..(940): n is a, c, g, or t
  misc_feature (942)..(986): n is a, c, g, or t
aatctcccacaatgaaaacaaatagtgcaatgtaagaaatannatgtancctnactgntgatgtgtgatcagggagcagagctatcctgcatttgtatttagtgtgagagtcctaaatgttcttcaccaactttttcttcctcatagaagcaacatggcatagttaagggtgtggactctgggctcctgctgcctggcccccgatgccagcatggcgcatgctacttaatatctctatccctcagttcccatcccataaaagagtagtaatagtgacaacatcttagaatggctttgaggtctaaatgagttaacattttcaaaccacttagaantagtgtctgaaacacaaaagctatatgttagaggttatcatcattatttgtattttatcaattactctacnnnnnnnnnnntattanctacccaacattcattccccaccttcttnctaccantaccttcatttanttatttnttatttctttcttttcctacaactcatttanncncacatcctnactacactaantcaccctttcacaaatcacactccatcacacaaatctnncccactacccatttttttatcctccaanctaanaatanttttatatttctaaattttttaaaaaatcaaataatattataacacataaaaattatataatattcaaatttcaatntccataaataaatttttnaaaacatcaatacaaacaaaaaacacctatttatttttaacctttanctttcttttcactaccccancanatttcattatttttaccaaacaccacatccccttnancctaaaatctancactttacaaaataattttttcttttacttaaaacttaaaataaaancaatttatatttacncttttataaatatttcatntttcaaaaataatncatacaccaatttntaantcnntnnnnnnnnnnnnnnnnnnnnnnnnnnnnnnnnnnnnnnnnnnnnnacaccctcaccttacaattatttttttcaaaaaaatctattttt

SEQ ID NO: 258591 - DNA, 1090 bp, Homo Sapiens
  misc_feature (56)..(56): n is a, c, g, or t
  misc_feature (58)..(58): n is a, c, g, or t
  misc_feature (818)..(818): n is a, c, g, or t
  misc_feature (886)..(886): n is a, c, g, or t
  misc_feature (956)..(956): n is a, c, g, or t
  misc_feature (966)..(966): n is a, c, g, or t
  misc_feature (992)..(992): n is a, c, g, or t
  misc_feature (994)..(994): n is a, c, g, or t
  misc_feature (997)..(997): n is a, c, g, or t
  misc_feature (1005)..(1005): n is a, c, g, or t
  misc_feature (1013)..(1013): n is a, c, g, or t
  misc_feature (1017)..(1017): n is a, c, g, or t
  misc_feature (1020)..(1020): n is a, c, g, or t
  misc_feature (1023)..(1023): n is a, c, g, or t
  misc_feature (1029)..(1029): n is a, c, g, or t
  misc_feature (1044)..(1044): n is a, c, g, or t
  misc_feature (1046)..(1046): n is a, c, g, or t
  misc_feature (1052)..(1052): n is a, c, g, or t
  misc_feature (1056)..(1056): n is a, c, g, or t
  misc_feature (1058)..(1058): n is a, c, g, or t
  misc_feature (1063)..(1063): n is a, c, g, or t
  misc_feature (1066)..(1066): n is a, c, g, or t
  misc_feature (1080)..(1080): n is a, c, g, or t
ctcggagcgagcgagggggcgggggtggggcggaatcccggccgccggcgaggcgngnggaggcggcggcgcagggtcgccccggccgggcgggcggggtcgcgcctggtggcggtccccgcgccgaggcgccgctagggcgggcgggggtcgggacgccgggctaggggcgcgtcatgtggccgctcacggtcccgccgccgctgctgctgctgctgtgctcaggcctggccggacagactctcttccagaacccagaagagggctggcagctgtacacctcagcccaggcccctgacgggaaatgcatctgcacggccgttatcccagcgcagagtacctgctctcgagatggcaggagtcgggagctgcggcaactgatggagaaggtccagaacgtctcccagtccatggaggtccttgagttgcggacgtatcgcgacctccagtatgtacgcggcatggagaccctcatgcggacctggatgcgcactccgggcagctgatgggtccctctcggccaagagcttccaggagctgaaggacaggatgacggaactgttgcccctgagctcggtcctggagcagtacaaggcagacacgcggaccattgtacgcttgcgggaggaggtgaggaatctctccggcagtctggcggccattcaggaggagatgggtgcctacgggtatgaggacctgcagcaacgggtgatggccctggaggcccggctccacgcctgcgcccagaagctgggctgtgggaagctgaccggggtcagtaaaccccatcaccgttcgggccatggggtcccgcttcnggctcctggatgactgacacgatggccccagtgcggatagccgggtctggtacatggatggctattanaaaggcgccgggtcctggagttccgtaccctcggaaacttcatcaaaggcagaactttatccagcacctnctgccccacncgtgggcggcgacgggcacgtggtgnanaangctcctgntctatganaagnccnaangagcgngtgagcaatacactncngtgcgntctntntggtntanagactccgggggcngttaaaaaaa

SEQ ID NO: 258592 - DNA, 1233 bp, Homo Sapiens
  misc_feature (114)..(114): n is a, c, g, or t
  misc_feature (162)..(162): n is a, c, g, or t
  misc_feature (166)..(166): n is a, c, g, or t
  misc_feature (189)..(189): n is a, c, g, or t
  misc_feature (193)..(193): n is a, c, g, or t
  misc_feature (202)..(203): n is a, c, g, or t
  misc_feature (205)..(205): n is a, c, g, or t
  misc_feature (216)..(216): n is a, c, g, or t
  misc_feature (218)..(218): n is a, c, g, or t
  misc_feature (221)..(221): n is a, c, g, or t
  misc_feature (223)..(224): n is a, c, g, or t
  misc_feature (227)..(227): n is a, c, g, or t
  misc_feature (229)..(230): n is a, c, g, or t
  misc_feature (272)..(272): n is a, c, g, or t
  misc_feature (275)..(275): n is a, c, g, or t
  misc_feature (413)..(413): n is a, c, g, or t
  misc_feature (417)..(417): n is a, c, g, or t
  misc_feature (455)..(455): n is a, c, g, or t
  misc_feature (457)..(457): n is a, c, g, or t
  misc_feature (1130)..(1130): n is a, c, g, or t
catcgctgctggagcactgccttcaggccctgcgccgcctccggagtccatggccggcacgcgctgggtactcggggcgctgctccggggctgcggctgtaactgcagcagctnccggcgcaccggcgccgcctgcctgcccttctactccgccgctggctntatnccgtcggccgccgtcccgtacgngcantacagccannantccaaaaaaananacntnnaanannttccaccaccccctgagtatgaattggccccgtccaagtaanaanaggaagtggatgatgtctttctcattcgtagcttctaggactgccctggttatgcactatggaagatgtgcttaactttttttctagatctgtcagaatccgcaacggtgagaatgtgatatacattttctcctaaanaganatgggaaacgaaggggtgatgtcttaattgaaatggantnagagcaggatgtgcagaaagccttagagaagcaccgcatgtacatgggccagcggtatgtggaagtatatgagataaacaatgaagatgtggatgccttaatgaagagcttgcaggtcaaatcttcgcctgtggtaaatgatggtgtggttcgtttgagaggacttccttatagttgcaatgagaaagacattgtagacttctttgcaggactgaatatagttgacattacttttgtgatggactatagagggaggcgaaaaacaggggaagcctatgtgcaatttgaagaaccagaaatggccaaccaagccctgttgaaacacagggaagaaattggtaatcgatacatcgagatatttccaagcagaaggaatgaagttcgaacacatgtcggttcttataagggaaagaaaatcgcatcttttcctactgctaagtatataactgagccagaaatggtctttgaagaacatgaagtaaatgaggatattcaacccatgacagcttttgaaagtgagaaggaaatagaattgcctaaggaggtgccagaaaagcttccagaggctgctgattttggaactacgtcttctctgcattttgtccacatgagaggattaccttttcaagccaatgccccagaacattataaaactttttttgctcccactcanagcctgtttagaaatccaccatggaaataccagctccaggtggggaaggcccactgggaaaaagcttgatgttgcccttttggagaccccctgaagggatgct

SEQ ID NO: 258593 - DNA, 875 bp, Homo Sapiens
  misc_feature (764)..(764): n is a, c, g, or t
tccttaattcccgggatgaagaggtagccccacagccacctcagccagaggagatggagcctgaggggcagcccagtccagacggctgtctatgcccctgttctcttggcctgggtggcgtgggcatgcgtctagcttccactctggttcaggtccaacaggtccgctctgtgcctgtggtgccccccaagccacagtttgccaagatgcccagtgcaatgtgtagcaagattcatgtggcacctgcaaatccatgcccgaggcctggccggcttgatgggactcctggagaaagggcttgggggtcccgagcttctcgatcctcttggaggaatgggggtagtctttcctttgatgctgctgtggccctagcccgggaccgccaaaggactgaggctcaaggagttcggcgaacccagacctgtactgagggtggggattactgcctcatccccagaacctccccttgtagcatgatctctgcccattctcctcggccccttagctgcctggagctcccatctgaaggtgcagaagggtctggatcccggagtcgtcttagtctgccccccagagaaccccaggttcctgaccccctgttgtcctctcagcgcagatcatatgcatttgaaacacaggctaaccctgggaaaggtgaaggactgtgattaggaccacagccctgggcaaaggggaccagcaagttgtcttgaatctccagggttcctgactagctgtctcctcttgcagcatgagcagctgtnagtgcccaactctattaggctttggccctccagcttctctctttgactgtgggaggcactgccttggttggtttacctgaacttgtctccgacacaaagcacttatctctt

SEQ ID NO: 258594 - DNA, 1362 bp, Homo Sapiens
  misc_feature (1265)..(1265): n is a, c, g, or t
aatctcactggggaacgtgacccttgagatgctggctggagaccctctactctcagaagacccagaacctgacaagacccctacagccactgtcaccaacgaagccagctgttggagcggcccctccccagagggtcctgtacccctcacaggggaggaactggacttgcggctcattcggacaaaggggggtgtggacgcagccctggaatatgccaagacctggagccgctatgccaaggaactgcttgcctggactgaaaagagagccagctatgagctggagtttgctaagagcaccatgaagatcgctgaagctggcaaggtgtccattcaacagcagagccacatgcctctgcagtacatctacaccctgtttctggagcacgatctcagcctgggaaccctggccatggagacagtggcccagcagaaaagagactactaccagcccctcgccgccaaacggactgagattgagaagtggcggaaggagttcaaggagcagtggatgaaggagcagaagcggatgaatgaggcggtgcaggcactgcggcgcgcccagctgcagtatgtgcaacgcagcgaggacctgcgggcacgctcccaggggtcccctgaggactcggccccccaggcctcgccgggacctagcaagcagcaggagcggcggcggcgctcgcgagaggaggcccaggccaaggcgcaggaggccgaggcgctgtaccaggcctgtgtccgcgaggccaacgcgcggcagcaggacctgcagatcgccaagcagcgaaatcgtgtcccaaggtgcgccaagcctgggtggttttcagggggggattaaaactgggcttaacgggcggggtggaacaaccttaaacctttcctttcccgggcccttgtcggtggggatatatttttagcactcccctatcctccatccctgtacccctacccaccgcgcacgctatccccctctccgccactagcctaacacgctcctgtccccacacccccctgctcgaccacacatctgcgcctcccgcattattattgatcttcccaccacactgtctgggtccccgcaccagcctgcgagcgcaccctactctactgtgcgccgcccaccagatcagtcccccccacgacacacgtcagactgccccagcccttgcactataaccccttcatctctccgcaccccgtcacccgcccaatgttcacttatataacccacacgcctatctataccaaagcgccagtttccgctnccttagtcaccgcgtatcatccctgcaccccccatttactcacctacataacgcggctccctacgattgctcgcatcgcctccccgagctacatatc

SEQ ID NO: 258595 - DNA, 1151 bp, Homo Sapiens
  misc_feature (1122)..(1122): n is a, c, g, or t
atcttggttgagggcggaagtgaggactgtgtcgcgctggaggagcccacagattctcccggacccacgtggaagcggcactcaagatgctgcgccgcgaggcccgcctgcgccgcgagtacctgtaccgcaaggcccgggaggaggcgcagcgctcagcccaggagaggaaggagcggctgcggcgcgcgctggaagaaaaccgcctgattcccactgagttacgccgagaggctctggccttacaggggtccctggagtttgatgatgctggaggtgaaggtgtgaccagccacgtggatgatgaataccgatgggcaggagtcgaggatcccaaggttatgatcactacctcccgagaccccagttcccgcctcaagatgtttgcaaaggagctgaagctggtgttcccgggcgcccagcgaatgaaccgaggtcgacatgaagtgggggcactggtgcgagcctgcaaagccaacggcgtcaccgatctgctggtcgttcacgagcatcggggcacacctgtggggctcatcgtcagccacctgccctttggtcctactgcctacttcacgctgtgcaatgtggtcatgcggcatgacatcccagacctgggcaccatgtcggaggccaagccccacctcatcacacacggcttctcctcccgcctgggcaagcgggtctctgacatcctccgatacctatttcccgtgcccaaagatgacagccaccgggtcatcaccttcgcaaaccaggacgactacatatcattccggcaccatgtgtataagaagacagaccaccgcaacgtggagctcactgaggtcgggccccgctttgagctgaagctgtacatgatccgtctgggcacgctggagcaggaggccacagcagacgtggagtggcgctggcacccttacaccaataccgcacgcaagagagtcttcctgagcaccgagtgagcacactcaccactcagtcaggacatggacttggaactcaggatggggctgtcatagacagacccaccagtaggaactgtcacagaatggcctgctgaactgggatgtggaactgtggcgggtggagaggtctgaataaaccgtctgtgtcatgccaaangtttcttgaattcctctgaactttcttgt

SEQ ID NO: 258596 - DNA, 1224 bp, Homo Sapiens
agcaggctggtacggtcggaattctcgggatatgtcgacccacgcgtcggcagacgctgctcctcactcactgtggatgtgacgccccccactgccaaggcccccaccaccgttgaggacagagtcggcgactccaccccagtcagcgagaagcctgtttctgcggctgtggatgccaatgcttctgagtcaccttaactttgaaccattctttggaattggcgtggtatatttaaccacgggagcgtgtctggaaacgcaaactatcattaatttcatactagtttgtaccgtatctgtaggcatcctgtaaataattccaaggggaaaactaaacgaggacgtgggttgtatcctgccaggttgagtggggctcacacgctagggtgagatgtcagaaagcgcttgtattttaaacaaccaaaaagaattgtaagggtggcttgctgccaggctttgcactgccgttcctgggggtgtgcatcttcgggaaaggtggtggcggggcgtccactaggtttcctgtcccctgctgctccttccgtaagaaaatgaaatattctatgcctaatactcacacgcaacatttcttgtactttgtaagtcgtttgcgagaatgcagaccacctcactaaactgtaaacggtaaagagatttttacttttggtctccgtgagtcgcatctctactaaggtttacacaggaattccacctgaagacttgtgttaaagttctacagcgcgcactgttaactgaacgtctttttcttcagcctatacgcggatccttgttttgagctctcagaatcactcagacaacattttgtaactgctgctgttgctttctacatacaccttataaagtgacatttcaaaagaaataaggtgccacagttttaaaccagaaggtggcactttttcttcttttgggggtgggggcctcccttgtagtattatagctatactgggaaagcatagatacagcaataaagtacagtaattttactttttttcttgtgttacatctaaattacaacccttaattgccacgtgtgcacttactactctccagtatgtcttattactctccagtatgtcacgcatctttaacttttcacgtcctatgtttgctttctcccatttttaagagatggtaagttaactggaattgatttactgaatgaaattaaatgcagatatccctgtttttgaaataagaaaaaaa

SEQ ID NO: 258597 - DNA, 1457 bp, Homo Sapiens
acacccagccttctaatcttttcatagaaaacattaatacttgtgtacttacgccaaaccacagtctggatagtaacaggaagtttgcattttgtttatctctgggcaggatgaaggaaggtaggtgggggtggggaaggattgtgggtgatttttattttctttgtatttagcaatattttctgctttatgtgaagtagacatattttctttgtattaaaagagcaaaataaatttgttttctttaaaagcaaaacaagaaaaaacaggaaactctgcaggtgacaagtgggtccataatagggagccagccacggaggtgagataaggggggagtccttcgaaagtggcctggggagtaggagagagtggaaacttcccctggaaacattccctctttcatgtctttctggccccttgacttgagagtgcttgacttggttatggtcccaccccaaggggtggaagtggggaccgaacaggaccattgtctgcccatcaggtctgtgggggtcgagggggaggtggggagtactgggaacctggagactggggatgctttctcacactcactagtactagaagatggggaaggtgaaccaggctggaggtcgagttaacagggtaaagaggccagggccctagtttcgcatccgccgactggcagctcttcttacgtgttctttcacggaagcccctccttgggaagccccgcgccccacccaccaggagtcgtccctttttgggcggggctgaggcttccaggctgggtcctgagaaagtttggtggccggagactgtggggcgcttaggtaccgacctaacaacttctgcgcctgtttccagggacgagccacgcacggtgccccctgaacacctaacagtcccgggggcagccccacctctggctgggtggacagagacagcctgtgggcgtggcccagaactgaaagcctgtgactccttgcgacccgccgggcacaccccctactcagtacgcagctcccgagcgcttgaggggagcttcccaggctcccactagcccaccctcaagctggggtttcgcacgtgcgatcggctggggtgggcaagggggtctccgctcaaggaaagtattcagaaccagccccttctcccccaccctctctcctgcagggccctactgcacctcgaaagtgctggcagggacgaggagcctgcgggggccaaattccgtaccgtcccccgcctcccacggtgttcgaacagctcagtagaccgccgccaccagctggctggagcagccgccggtgacatctgcgccgcgcccacgcttcggagccaagatccacctcctctcccgcccgcaccggggagcccacccacccacctgctgcactaacctggccgcctcggcggggcctgggttcccacgcccgccagctccgctctactccgccgatcccgggaattccgga

SEQ ID NO: 258598 - DNA, 1593 bp, Homo Sapiens
  misc_feature (244)..(259): n is a, c, g, or t
  misc_feature (315)..(324): n is a, c, g, or t
  misc_feature (1081)..(1081): n is a, c, g, or t
  misc_feature (1280)..(1280): n is a, c, g, or t
  misc_feature (1453)..(1453): n is a, c, g, or t
  misc_feature (1466)..(1466): n is a, c, g, or t
  misc_feature (1480)..(1480): n is a, c, g, or t
  misc_feature (1485)..(1485): n is a, c, g, or t
  misc_feature (1497)..(1497): n is a, c, g, or t
  misc_feature (1530)..(1530): n is a, c, g, or t
  misc_feature (1535)..(1535): n is a, c, g, or t
  misc_feature (1544)..(1544): n is a, c, g, or t
  misc_feature (1550)..(1550): n is a, c, g, or t
  misc_feature (1570)..(1570): n is a, c, g, or t
  misc_feature (1574)..(1574): n is a, c, g, or t
  misc_feature (1583)..(1583): n is a, c, g, or t
  misc_feature (1590)..(1590): n is a, c, g, or t
aagagcccttgatttctctcccccctccagaaaaaattcacggtgccccgctcttttttgggttaaaggatctctcctcccccaggtgtcccaaattatattttttaaacttgggtttttctttcaacaaaaaacacaattttgtttataagagggcaattcccgggggtggaaatatcccttttgggcccaatagaatttgtctcaattgaaaatggtttaaaatattgcgcataccctttgnnnnnnnnnnnnnnnngggtttgggaaatccccttccaaaccccctgtggtgggttttccaagttttttgtnnnnnnnnnnactggggttctggggagactccataggcacagggggctggaagccccctgcccccgtaaaacccgccttgccttcccttaatcttccagttatttttgtgcctttcccctttacccaaaggacggaattttttgtttgttgcccttcaaccaccaagttgccttttttgctggaagcttgcccagggaccgccagcttttgaaggacgggtggttgctccccttgctgggttttgccgagccccccccggtgtgcatggtagggaccactcagatggggagctgtctcgaggccatctgcttaggtggttttgcgttacagctttggctgtctgtgctctgaagtccaggggccgggtcctccctgtgtccctgtcctgtttgggccacagatcaggtgcttgggtttctctcagcagcttccgcctgaggtaccctcatccaaaggaccaggggcccgatcagatcacatggctgacatttcttcctggaaggactttggtacctgaccagaaatgtctgtgagggtgggaggcagcgatgcagggttagatgcagggtttgctgtctgtttctagggagcggcaccggggggcgtggccccgggcttccaggtggtgcacctcaacgctgtgaccgtggacaatcgcctggacaacctgcaactggtgccgtggggctggcggcccaaggctgaagagacctccagcaagcagagggagcaaagcttgtattggcttgcaattcagcagctgccnacagaccctatagaagaacagtttcctgtcctaaatgtgacccggtattataatgccaacggggatgtagtggaagaggaggagaaatcttgcacctactatgagtgccactaccctcccagcacagtgattgagaagcagctccgggagttcaacatctgtgggcgctgccaggtggcccggtactgcggcacccagngccagcagaaggactggcctgcccacaagaagcactgtcgggagaggaagcgtcccttccagcatgagcttgagccagagcgatgacgggcaggggagccacacatactcacagcccccgggctctaccctgggcacagcagagacagactggtggttgaacctggaggtgcnaaaaaagccagcngcgggcccaggacngctgncgtgagacgccngatgtgacaggcagggtgtgtgggtacagcgcncgtcngtgtgcatnaccggnagagacaacggaggaggcgnccgncaggacggntcgcagnatt

SEQ ID NO: 258599 - DNA, 1457 bp, Homo Sapiens
  misc_feature (129)..(129): n is a, c, g, or t
  misc_feature (160)..(161): n is a, c, g, or t
ctgtagtgccgaaaaggatcgtggtactgctatggcggaaccatcgaaatccttcaccatggcatccagcccggcccagcgtcggcgaggcaatgatcctctcacctccagccctggccgaagctcccnggcgtactgatgccctcacctccagccctgnngccgtgaccttccaccatttgaggatgagtccgaggggctcctaggcacagaggggcccctggaggaagaagaggatggagaggagctcattggagatggcatggaaagggactaccgcgccatcccagagctggacgcctatgaggccgagggactggctctggatgatgaggacgtagaggagctgacggccagtcagagggaggcagcagagcgggccatgcggcagcgtgaccgggaggctggccggggcctgggccgcatgcgccgtgggctcctgtatgacagcgatgaggaggacgaggagcgccctgcccgcaagcgccgccaggtggagcgggccacggaggacggcgaggaggacgaggagatgatcgagagcatcgagaacctggaggatctcaaaggccactctgtgcgcgagtgggtgagcatggcgggcccccggctggagatccaccaccgcttcaagaacttcctgcgcactcacgtcgacagccacggccacaacgtcttcaaggagcgcatcagcgacatgtgcaaagagaaccgtgagagcctggtggtgaactatgaggacttggcagccagggagcacgtgctggcctacttcctgcctgaagcaccggcggagctgctgcagatctttgatgaggctgccctggaagtggtactggccatgtaccccaagtacgaccgcatcaccaaccacatccatgtccgcatctcccacctgcctctggtggaggagctgcgctcgctgaggcagctgcatctgaaccagctgatccgcaccagtggggtggtgaccagctgcactggcgtcctgccccagctcagcatggtcaagtacaactgcaacaagtgcaatttcgtcctgggtcctttctgccagtcccagaaccaggaggtgaaaccaggctcctgtcctgagtgccagtcggccggcccctttgaggtcaacatggaggagaccatctatcagaactaccagcgtatccgaatccaggagagtccaggcaaagtggcggctggccggctgccccgctccaaggacgccattctcctcgcagatctggtggacagctgcaagccaggagacgagatagagctgactggcatctatcacaacaactatgatggctccctcaacactgccaatggcttccctgtctttgccactgtcatcctagccaaccacgtggccaagaaagacaacaaggttgcctgtagggggaactggaccgatgaaaaatggggaagaagattcccttaacctcctcccagggatcagc

SEQ ID NO: 258600 - DNA, 1372 bp, Homo Sapiens
  misc_feature (263)..(328): n is a, c, g, or t
  misc_feature (877)..(877): n is a, c, g, or t
  misc_feature (1007)..(1007): n is a, c, g, or t
  misc_feature (1011)..(1011): n is a, c, g, or t
  misc_feature (1048)..(1048): n is a, c, g, or t
  misc_feature (1051)..(1051): n is a, c, g, or t
  misc_feature (1065)..(1065): n is a, c, g, or t
  misc_feature (1318)..(1318): n is a, c, g, or t
cagtcccccttcttggaaaggaaaacccatattctcaaaggaaatggttttggcctcccattttaaaggctggacatgggtgggccatatcttgcagcttgagcttcttaaagacccggctccctttaccctaggtggccctcgggcccctttaagcccaaaaataagcccaaagggtgcatccaagcactttgttactattggtggcaggttcatgaatggcaaccaaaagccagtgtatgggtcaagattatcaccaggannnnnnnnnnnnnnnnnnnnnnnnnnnnnnnnnnnnnnnnnnnnnnnnnnnnnnnnnnnnnnnnnnttaatttaatatttacaataattctaccaggaagctaccattattaccacaacttcacaaatgagaacaccgaggcttagaggggttgggttgcccaaggttacagaggaagaaaacaggggagctggatctgagccaaggcatcaactccaaggtaacccctcagtcacttcagtgtgtgtcccctggttactgggacattcttgacaagctcggggcaagccggtgagtcagtgggggaggactttcaggaagaggtgggttcccagttggtgacagaagaggaggctgcaaagtgaaggagcaggggctccaggtctggcgacaaccagggaagggacagggcagggatggcttggaccacgagaggcacctgagtcaggcagtcacatacttcccactggggtctaccatgtgaggcatggtgtgggatcctgggaaggagaccaagcctcatttcagtttgcttatggccaaagacaggacctgtgtacccgacatacccctgggacctttaccaaaaaaacagcaaacaccattcactcactnatgttagataaacactgagtgaagtcactggagcccaaggactgtgcgaggtcagcactgccaatacaagaagctgcagccctccagctcgcctccctcaatggcactccgtgcttccagccatgctggnttcnttttaggtcctccacctccaggctgtagttcatgtgnttntttctggaatgttnttcccaacctacccactcaaccctcagactttaccataaatgtcatttcctcacatctgccttccctgacctgagaccaagccaggcttcccatgacgagcctcacagtaccccatctcccctgaacagatgcagtaataacctacataacccggggccatgatctatggctttgaatcctggctctgtcactaggccaggtctctcagcctttctgtgcctcagtttcctcatctataaaatgagatgacgnagtgcctgctcatgaagtgtgaattaatgaactcaaatcaatggttgatcccgg

SEQ ID NO: 258601 - DNA, 1118 bp, Homo Sapiens
  misc_feature (18)..(19): n is a, c, g, or t
  misc_feature (21)..(21): n is a, c, g, or t
  misc_feature (27)..(27): n is a, c, g, or t
  misc_feature (30)..(30): n is a, c, g, or t
  misc_feature (32)..(32): n is a, c, g, or t
  misc_feature (35)..(35): n is a, c, g, or t
  misc_feature (37)..(37): n is a, c, g, or t
  misc_feature (39)..(39): n is a, c, g, or t
  misc_feature (49)..(49): n is a, c, g, or t
  misc_feature (56)..(56): n is a, c, g, or t
  misc_feature (58)..(58): n is a, c, g, or t
  misc_feature (61)..(61): n is a, c, g, or t
  misc_feature (73)..(73): n is a, c, g, or t
  misc_feature (91)..(91): n is a, c, g, or t
  misc_feature (112)..(112): n is a, c, g, or t
  misc_feature (153)..(153): n is a, c, g, or t
  misc_feature (528)..(528): n is a, c, g, or t
tcccccccgaaaaaactnnanatcctngcncntangngngggaaacaangaggctncnccngactgcaccccnccaaagattccatgaaantaattgctaccacttgctgtncaagacataacttacctattttagcaccaagaattatagcngttataagtacaacttggaacgatggaatgcatctgttactagagactgtatataaaaagcagccaaagctcaggggaaatttttcaaaaattgaattttaaaatttcttatgattttaaataccttgacattgattttgcttcccatctttgaagtaattggttagttttctttgttcagccatttcaagttggtggttgggatatctgctctctgggatggcatcagttgggcagtcatctttttggaagagaagtgtgcttttgagtggaagattcaaagccagtctttgttaaactgcagggtgtactctcaaagaccaaaactattggccacttttgtatgttgccagcatattttgaacttgtaccttnttttatactagcaacactacaaaggagaagttactcatttcaaaatggatgaattgttattatgtgtgaagagactctgagtttatgatctgtgccataaaatttcagtgtaataagacctcctcaatacatctcccaataaggggcgcctctttgtgacagtatttttatttctgacattcattttatttgggtacatagtgtggttgttgataccttgcaatagtattgcttctgaaagtaataaaaaattttaggagaatttgagaagtttacagaattacttattcattgttttcttagtaagtcagtttaatgtttatttttctcattatttcatcactgcaataaagaataagggtgtttgagctcacctccatgcaaagacttcagttttaaaacattatttgcctaaaattagcattgtgatgctttctgaaagaaatattttataaatcctgtttaacagcagaatttctgaatgtgtagagactactacaaaattggaaaaagattggcaattctttgtaaagaatttgtgaattgtgtataaatttattctaacatttaataaaaatgtattttaaccg

SEQ ID NO: 258602 - DNA, 752 bp, Homo Sapiens
agtgcgcgcctagcagtgtcccagccgggttcgtgtcgccatggggcagatcgagtgggccatgtgggccaacgagcaggcgctggcgtccggcctgatcctcatcaccgggggcatcgtggccacagctgggcgcttcacccagtggtactttggtgcctactccattgtggcgggcgtgtttgtgtgcctgctggagtacccccgggggaagaggaagaagggctccaccatggagcgctggggacagaagcacatgaccgccgtggtgaagctgttcgggccctttaccaggaattactatgttcgggccgtcctgcatctcctgctctcggtgcccgccggcttcctgctggccaccatccttgggaccgcctgcctggccattgcgagcggcatctacctactggcggctgtgcgtggcgagcagtggacgcccatcgagcccaagccccgggagcggccgcagatcggaggcaccatcaagcagccgcccagcaaccccccgccgcggcccccggccgaggcccgcaagaagcccagcgaggaggaggctgcggcggcggcggggggacccccgggaggtccccaggtcaaccccatcccggtgaccgacgaggtcgtgtgacctcgccccggacctgccctcccaccaggtgcacccacctgcaataaacgcagcgaagccgggaaaacaacggaacccatggtgcgcttgggctaaaacaagaatagaaaacactgaaatagat

SEQ ID NO: 258603 - DNA, 1030 bp, Homo Sapiens
tactggtcgtccacgtgccaggccatgctggcaacggggcatcaccctgccttatgggcccatgagcatcggagcaccagacatgccgtcagttccgacagttgcatcacatacgttctagcatcctcagacacccgtgcattccaggatcactgcttgctgaactgccatgccctccgatgcaggggcgccgctggagcaccggagctcccgcccagcatagctgcagtgatcacaaagccatggcagacggtcctagcggcgccaaccctgccccagcctagaggaaggagggagcagggaggaacaatcgctgggcagacggggtcctcagggacctgtgtccgtccgcctccagagctgcccagccacgggcatctccagggtgctggggcagccccaggtcccctcattgaactcacgactggggccaggggccctcagaatgaaggcaggcaccaggcaggagcagcatccccctccttgacggtgctggcaggagggccgcgccatgctgactgcttgaacctctgctgacctgacagtgctggcgggagggccgcaccatgctgactgcctgaatctctgctgaggctgcctgcctgccgggcccagctcagcgccctctccactgcgaatcagtggcgatcatgtgatttctatttctgccccacagggtaagggacgagtcttctggaaggctctgccatggacatttgtcctcgggctcagaggccccaccctgccccacacctgcccctaatcactgcagtgtccagcccagtgttgaacagattgtaccgttctgtctcattacgagcaaataaatagactttcattggaccccccccagggaacacaccacccccaaatcttgtgcggccgcctccggccctccaaaaaagctttctaaaccattccgtttggcgcgccggccccaataaggtaagtggaaccatggcccctaacctggtttcctaaggaaaatcctgggtcaaggaactaagggcgttggaattccccccccaat

SEQ ID NO: 258604 - DNA, 1109 bp, Homo Sapiens
  misc_feature (38)..(38): n is a, c, g, or t
  misc_feature (212)..(212): n is a, c, g, or t
  misc_feature (969)..(969): n is a, c, g, or t
  misc_feature (1004)..(1004): n is a, c, g, or t
  misc_feature (1086)..(1086): n is a, c, g, or t
  misc_feature (1095)..(1095): n is a, c, g, or t
agtggacacggcggataaattccgcttcttcagcatgncccgtgacctcctctcctggatggagagcatcatccggcagatcgagacccaggagaggcccagggatgtctcctctgtggaactgctcatgaagtatcaccagggcatcaatgcagagattgaaacccggagcaagaacttcagtgcctgcctggagcttggcgagtcccctntgcagcggcagcaccaggcctcagaggagatccgcgagaaactgcagcaggtgatgtccaggaggaaagagatgaatgagaagtgggaagcccgctgggagcgcttccgcatgttgctggaggtgtgccagttctcgagggatgcctctgtggctgaggcgtggctgattgcccaggagccctacctggccagcggggactttggacacacagtggacagtgtggagaagctcatcaagaggcatgaggcttttgagaagtccacggccagctgggcagagcgctttgctgccctggagaagcccaccacgcttgagctgaaagaacgccagattgcagagagacccgcagaggagactgggcctcaagaggaggaaggcgagacagcaggggaggctccagtttcccaccatgcggccaccgagagaacgtccccggtcagtctctggtctcgtttgtctagttcctgggagtcactgcagccagagccctctcacccctactaggctcagcccaggtggaggcgagattgagctgcgcagccccgccctccatcctccccacatccctgcagccacctcccagcagagcaggctacgtcctcactgaggtgttcttcatgagagtactagcctcctccactcctccccacagcgcagaggaaacaggccagcccagtgacatgacgttattagttttgttttacctaatgtaataaattttattgtataaatatatcaccatttacatgaggggnaaacactaggccagaggatgattagttgcaatttnctgtacaccggtccttttccccattttccaactccttcctctaggcagtaattaacccctgcaaccacacctacacacaggnacatgccanacacacatgcatgg

SEQ ID NO: 258605 - DNA, 1063 bp, Homo Sapiens
  misc_feature (3)..(3): n is a, c, g, or t
  misc_feature (10)..(11): n is a, c, g, or t
  misc_feature (39)..(40): n is a, c, g, or t
  misc_feature (50)..(50): n is a, c, g, or t
  misc_feature (71)..(71): n is a, c, g, or t
  misc_feature (127)..(127): n is a, c, g, or t
  misc_feature (755)..(755): n is a, c, g, or t
  misc_feature (1000)..(1000): n is a, c, g, or t
  misc_feature (1003)..(1003): n is a, c, g, or t
  misc_feature (1006)..(1006): n is a, c, g, or t
  misc_feature (1025)..(1025): n is a, c, g, or t
  misc_feature (1044)..(1044): n is a, c, g, or t
ggnccacacnnaccctaggaaatgtctcctgatcagttnntaccatctgngtcaagaaatgagatagtggngcaaatggtcacaaatagctcagctgtgggctcagaaactgctaggtaaaagaatnccagaaggaggccagggcataagttggatgacctatgaactttagtctaaagaattgagactaccgtaattgagactactgtagtgacatctgagaaatgggatggaagagtgaccatgtgttattttcttgttcttgtcactattgtattttattttgcataatcatgcccttcactgacagtctccttaacatcatctgtttactctgctcagtgtaaactacaatgctctgtcatctccctactgggtctcctgggaggaggggagccatccagggtgcaaactcaaaggcagagggcacagcgtctttaggcccaagcttagaattcaattgagaagttctgttgttcatccttacctcagcaggtagaaaagaggtggagatcagaagccagggattagagattgaattgctttccctgggagtgtgcagtatctcattaaaatgttgtatattcaaaaaaatacagacacacacaagtgcctatataatgataaaacatatccaaagcacccaaacctgtgattccagaaaagtagatcctatttttgtttatttttattggctttagctgtgtcttttgaaaggactattatcctctaaaatgtatgtgtatgaagatccntggcttgcagctcgggagctttacacaccttgtgtcactttatcttggtaacgagccaagatcatgcaaccagttcatccatgtctgacccaagagctcttaactgctatgctgcactgcctcattcagagatagatgcctgcatgggtcctggcgattattttaatgctggctacacccccacaggtgacttggattcagaaatacaatttatatttcttctttttaaattgttttattttatnttnctnttaatagttatatgtcagngagaacaatttatatgtcntacactgagaaataaaact

SEQ ID NO: 258606 - DNA, 699 bp, Homo Sapiens
  misc_feature (176)..(184): n is a, c, g, or t
catgctggctatcattcttcttcaaggtactttggcccagtcaatcaaaggaaaccacttggttaaggtgtatgactatcaagaagatggttcggtacttctgacttgtgatgcagaagccaaaaatatcacatggtttaaagatgggaagatgatcggcttcctaactgaagatnnnnnnnnntggaatctgggaagtaatgccaaggaccctcgagggatgtatcatgtgtaaaggatcacagaacaagtcaaaaccactccaagtgtattacagaatgtgtcagaactgcattgaacctaaatgcagccaccatatctggctttctctttgctgaaatcgtcagcattttcgtccttgcctttggggtctacttcattgctggacaggatggagttcgccagtcgagagcttcagacaagcagactctgttgcccaatgaccagctctaccagcccctcaaggatcgagaagatgaccagtacagccaccttcaaggaaaccagttgaggaggaattgaactcaggactcagagtagtccaggtgttctcctcctattcagttcccagaatcaaagcaatgcattttggaaagctcctagcagagagactttcagccctaaatctagactcaaggttcccagagatgacaaatggagaagaaaggccatcagagcaaatttgggggtttctcaaat

SEQ ID NO: 258607 - DNA, 934 bp, Homo Sapiens
  misc_feature (19)..(19): n is a, c, g, or t
  misc_feature (31)..(31): n is a, c, g, or t
  misc_feature (37)..(37): n is a, c, g, or t
  misc_feature (58)..(58): n is a, c, g, or t
ccagcagagagcgttgatntgccccctcccnagcgcnccccctcgcatggtgctggancccgctctgagccagccagtcaatcagctcatcttggccacctggacagcctgggtcagtcctggaacccggtcctgctgcttcacaaagatctggaagatggcatgggagcgggaggaagtcgcgttggcatcagtggggtgctgcgtgcggttacgttccccctggtcagtatctccagcagctgctcggctgaggctggctggtggaaagaaagtccttgcaccaccacacccctgtcggggtcctcgaggatggcaaggggccccttgggctacaggagatcatggatctgttcataatacacctcctggtaactaatgagcacctcgaagtgcttctcctgctggcgggcctccaggcgcctgtacagttccacggtggtcaggtacatgatgccggggtccccctcccttcccagcatggtgtgtgtcttcccagccccggtggccccgtaggcaaacactgagcagttgtagccctggaggaagctgtccaggacgctgtgcgtggtgtgctggaacacgtcctgttgggtggccgcctcgccaaagacccggtcaaagacaaacgtcaggtctttgcccttcttcttggggccatcatgggtgccaccccatttcaggccagggaaccctccatcgggctcctcagggttaaacaccagcacccgctcgtccaccacctgaaccactggccgccgctgactgtccagctcccgaggggtggggggccgcacccgtaccactacttgcagcgtgctgtcctccactgccatcactgtggtgacacctttcgtcggttctccgccgctggcgtcgctgcttgctcacgggtcccacagccacaccacagacagcagtacccacaccggga

SEQ ID NO: 258608 - DNA, 628 bp, Homo Sapiens
  misc_feature (44)..(44): n is a, c, g, or t
  misc_feature (47)..(47): n is a, c, g, or t
  misc_feature (73)..(73): n is a, c, g, or t
  misc_feature (80)..(80): n is a, c, g, or t
  misc_feature (82)..(82): n is a, c, g, or t
  misc_feature (154)..(154): n is a, c, g, or t
cttcccagctcctggccagccggccggcggtccttttcacctgnagnccaccctcacatccccaaatctccantctcctnanagttgggactggacaggagtctaccagcttgttttgaaactcatgaaattgctgtgtgaccttgggcaagtnacttaccctgtctggatcaacatttctcctgctgccaagtgtgggagcctggctgggtctttctcagcagaagttgtttccaggtgtgctcaagtgccttcctctagcagagcacagaaagctagaatacccccagggagacagggatgccaagagtagaccagagctgggacccacagacagaacctccacctgcctgctgcccactgagctgggacctggtcaccttggattttagccggcctctttctggctataacaggcagagtcggagctgcctcccaccccagtcagaagcctggcaccccctctgcttcggccagatgtgctggctgactccgacttccgaccagcactcagctggcctctggggattctagctccacaaccaggccgtgaggctggagaaactggcagttattgctgtcaaaagcctgttctctcaactgctgtcaataaaattaaagatacaga

SEQ ID NO: 258609 - DNA, 932 bp, Homo Sapiens
  misc_feature (764)..(765): n is a, c, g, or t
  misc_feature (780)..(781): n is a, c, g, or t
  misc_feature (858)..(858): n is a, c, g, or t
  misc_feature (872)..(872): n is a, c, g, or t
  misc_feature (893)..(893): n is a, c, g, or t
aagctggcctgccgcacccccagccccgccaggcccgcactccgcgccccggcctccgctaccagtggcagccgcaagcgcgcccgcccgcccgccgcccccggacgcgaccaggccaggccaccggcccgcaggagactgcggctgtcggtggacgaggtttccagccccagtacccccgaggccccagacatcccagcctgcccttctccgggccagaagataaagaaatccaccccggcagcaggtcagccgccccacctgacatccgcgcaggaccaggacaccatctctgagcttgcgtcatgcctgcaacgggcccgggagctgggggcaagagtccgggcgctgaaggccagtgcccaggatgctggggagtcctgcaccccagaggccgagggccgccctgaggagccatgtggcgagaaggcgcccgcctaccagcgcttccatgccctggcccagcccggcctgccgggactcgtgctgccctacaagtaccaggtgctggcggagatgttccgcagcatggacaccatcgtgggcatgctccacaaccgctccgagacgcccacctttgccaaggtccagcggggcgtccaggacatgatgcgtaggcgttttgaggagcgcaatgttggccagatcaaaaccgtgtacccggcctcctaccgcttccgccaggagcgcagtgtccccacccttcaaggatggcaccaggaggtcagattaccagctcaccatcgagccactgcctggagcanngagggctgacggagnncagccccccagctcacgggcctcgcgccctcctgcagcgacgggcagaatcttcagccagaaagctgggtggagcancgtcaagggagcanccacagggccttcctggcctncctgagcccgccattggtggtgcccgggagaccagctga

SEQ ID NO: 258610 - DNA, 1777 bp, Homo Sapiens
  misc_feature (865)..(865): n is a, c, g, or t
  misc_feature (1702)..(1705): n is a, c, g, or t
  misc_feature (1707)..(1708): n is a, c, g, or t
  misc_feature (1710)..(1712): n is a, c, g, or t
  misc_feature (1717)..(1718): n is a, c, g, or t
  misc_feature (1721)..(1721): n is a, c, g, or t
gctggtaccggtccggaattcccgggatcgccgccccgcgcagtacccagcccggccccgccgacccgcctctactgccggctccgcgcccttccccgagggctggatgatgggctgtttcgccctgcaaacggtggacaccgagctgaccgcggactcggtggagtggtgcccgctgcaaggctgcaggcacctgctggcgtgcgggacctaccagctgcggcggccggaggaccggcctgccggcccccagaacaagatatacaaccacttcctgttgtgtcacacttgcctgcagtaacatgctgtaaggtttgtggcataggagcagtgggccataccatataatcaaggtgtcacatcccggtggctggacatgccctcttgggcttggcagatgccagtggatccatacaactgctccgcctggtggaatctgagaagagccacgtgctggagccattgtccagccttgccctggaggagcagtgtctggctttgtccctagattggtccactgggaaaactggaagggccggggaccagcccttgaagatcatcagcagtgactccacagggcagctccacctcctgatggtgaatgagacgaggcccaggctgcagaaagtggcctcatggcaggcacatcaattcgaggcctggattgctgctttcaattactggcatccagaaattgtgtattcagggggcgacgatggccttctgaggggctgggacaccagggtacccggcaaatttctcttcaccagcaaaagctatgatgaacacatcctactgtgggacacacgaaacatgaagcagccgttggcagatacgcctgtgcagggtggggtatggagaatcnaagtggcaccctttccaccaccacctgctcctggccgcctgcatgcacagtggctttaagatcctcaactgccaaaaggcaatggaggagaggcaggaggcgacggtcctgacatctcacacattgcccgactcgctggtgtatggagccgactggtcctggctgctcttccgttctctgcagcgggccccctcgtggtcctttcctagcaacctaggaaccaagacggcagacctgaagggtgcaagcgagttgccaacaccctgtcatgaatgcagagaggataacgatggggagggccatgccagaccccagagtggaatgaagccactcacagagggcatgaggaagaatggcacctggctgcaggctacagcagccaccacacgtgactgtggcgtgaacccagaagaagcagactcagccttcagcctcctggccacctgctccttctatgaccatgcgctccacctctgggagtgggaggggaactgagcttgaaatcatgaagccccttcccacaaggaaaccaggagggagactgcgagtgagtgcccgggaccacctcatcagagatgcttactgcagccctgcaggtgcctgggcactgatggaatccacagtgtagtcagaaaagctgttgacttctcttaaatcagcttccctgctgggcccccgaaagtggactgggtgattctgtctggcagagagtggggaaaagacgcggtttccagcttgcagatttgttaagtttctcaggcagattttgactttcagcctttcatacttggttaagcaactatttggtattaaatgaaagttttttggcaaaaaaannnnannannnaaaannaanaaaaacatgttcgggccgccctcgggcccttccaagaagacttttctaagaccatt

SEQ ID NO: 258611 - DNA, 855 bp, Homo Sapiens
  misc_feature (237)..(237): n is a, c, g, or t
  misc_feature (366)..(366): n is a, c, g, or t
  misc_feature (387)..(387): n is a, c, g, or t
  misc_feature (435)..(435): n is a, c, g, or t
  misc_feature (437)..(437): n is a, c, g, or t
  misc_feature (441)..(441): n is a, c, g, or t
  misc_feature (461)..(461): n is a, c, g, or t
  misc_feature (511)..(511): n is a, c, g, or t
  misc_feature (517)..(517): n is a, c, g, or t
  misc_feature (521)..(521): n is a, c, g, or t
  misc_feature (566)..(566): n is a, c, g, or t
  misc_feature (582)..(582): n is a, c, g, or t
  misc_feature (589)..(589): n is a, c, g, or t
  misc_feature (592)..(593): n is a, c, g, or t
  misc_feature (598)..(598): n is a, c, g, or t
  misc_feature (601)..(601): n is a, c, g, or t
  misc_feature (603)..(603): n is a, c, g, or t
  misc_feature (605)..(606): n is a, c, g, or t
  misc_feature (608)..(608): n is a, c, g, or t
  misc_feature (612)..(612): n is a, c, g, or t
  misc_feature (614)..(615): n is a, c, g, or t
  misc_feature (617)..(617): n is a, c, g, or t
  misc_feature (619)..(619): n is a, c, g, or t
  misc_feature (624)..(624): n is a, c, g, or t
  misc_feature (627)..(627): n is a, c, g, or t
  misc_feature (629)..(629): n is a, c, g, or t
  misc_feature (633)..(633): n is a, c, g, or t
  misc_feature (636)..(636): n is a, c, g, or t
  misc_feature (640)..(640): n is a, c, g, or t
  misc_feature (642)..(642): n is a, c, g, or t
  misc_feature (646)..(646): n is a, c, g, or t
  misc_feature (650)..(650): n is a, c, g, or t
  misc_feature (659)..(659): n is a, c, g, or t
  misc_feature (663)..(663): n is a, c, g, or t
  misc_feature (669)..(669): n is a, c, g, or t
  misc_feature (687)..(689): n is a, c, g, or t
  misc_feature (712)..(712): n is a, c, g, or t
  misc_feature (726)..(726): n is a, c, g, or t
  misc_feature (729)..(729): n is a, c, g, or t
  misc_feature (735)..(735): n is a, c, g, or t
  misc_feature (768)..(768): n is a, c, g, or t
  misc_feature (771)..(771): n is a, c, g, or t
  misc_feature (784)..(784): n is a, c, g, or t
  misc_feature (809)..(809): n is a, c, g, or t
  misc_feature (844)..(844): n is a, c, g, or t
  misc_feature (846)..(846): n is a, c, g, or t
  misc_feature (851)..(851): n is a, c, g, or t
gggatggccgggtcactgttaagggggccgccatggcccggctgtggggcgcgctgagtctttggccactgtgggcggccgtgccgtggggcggggcggcagccgtcggtgtccgggcttgcagctccacggccgccccggacggcgtcgagggcccggagatacggcgctcctattgaagccacctgaagcgtatggtgctgggtcctcccgaaccgccgttctcgcacgtgtgcnaagtcggggacccggtgctgcgcggcgtggcggccccggtggagcgggcgcactaggcgggcccgagctgcagcggctgacgcaacggctggtccaggtgatgcggcggcggcgctgcgtgggcctaancgcgccgcagctgggggtgcngcggcaggtgctggcgctggagctccccgaggcgctgtgtcgggagtncncgcnccgccagcgcgcgctccgcnaaatggagcccttccccctgcgcgtgttcgtgaaccccagcctgcgagtncttganagcngcctggtacacctttcccgagggctgcgagacgtcgccggcttcntggcctgcgtgcaaancggccangcnnggganagngnanngncgcncnncncncaccnccncngcgngancacncncgcngcgnggcggcccnacgncgccanacccacaagggggcgcgnnncataccccggactccgcagagcnaagtgcgatgcggnacngagagnctcaggacggatagaagctcttgtggggtaganccnctcagataggacnaggggcgaggagaggtccctagttngctgttactgacacctggcgtctgcttttgctccntnctctntgag

SEQ ID NO: 258612 - DNA, 1647 bp, Homo Sapiens
  misc_feature (39)..(39): n is a, c, g, or t
tctacttctctcccccctcattgcaagctagtaaaaccncctacgtaacgaggcctgtgtggcgaattcggcacgaggcgttcgccaaacgaagtcgtggaggtggcgaaacgaggaggagataacgcggccttgggctctggtgtctcccagtctgctaaagccctaaggccatcaccatggacttccagcatcgccccgggggcaagaccgggagcgggggcgtggcctcctcctccgagagcaaccgtgaccgcagggagcgcctccggcagctggccctggagaccatcgacatcaacaaggacccgtacttcatgaagaaccacctgggctcctatgaatgcaaactctgcctgacacttcacaacaatgaggggagctacctggcacatacgcaggggaagaagcaccagaccaacctggcccggcgagcagccaaggaggccaaggaggcccctgcccagcccgcgcctgagaaggtcaaggtggaggtgaagaagtttgtgaagatcggccgcccgggctacaaagtgaccaagcagagagactcggagatgggccagcagagcctcctcttccagattgactaccctgagatcgccgagggcatcatgccacgtcaccgcttcatgtctgcgtacgagcagaggatcgagcctccggaccggcgctggcagtacctgctcatggccgccgagccctacgagaccattgccttcaaggtgccgagcagagagatcgacaaggcggagggcaagttctggacacactggaaccgggagaccaagcagttcttcctccagttccactttaagatggagaagcccccggctccacccagcctccctgctggccccctggggtgaagcggcctccacccccgctgatgaacggtctgccccctcggccaccgctgcctgagtctttgccaccgcccccgccaggaggcctgcctctgccacccatgccccccacagggcctgcgccctcagggcccccgggaccaccccagctacccccgccagctccaggggtccaccccccggccccagtggtgcatccccctgcatctggggtccatcccccagctcctggcgtccaccccccagctcctggcgtccatcccccagcccctggggtccacccaccaacctctggggtccaccccccagctcctggagtccaccctccagcccccggggttcacccaccagcccccggagtccacccaccagcccctggggttcacccaccagccccaggggtccatcctcccccatcagtgggggttcacccccaggccccgggggtgcacccagcagcccccgccgttcaccctcaggccccaggggtgcacccaccagccccagggatgcaccctcaggccccgggggtccacccccaacctcccggggtccatccgtcggctcctggggtccaccctcagcctccgggagttcacccctcaaatcctggggtgcaccccccaactcccatgcccccaatgctgaggcccccacttccctccgaaggcccagggaacatacctccctcccccaaccaactgagaagctgctccctcccccagcaagcccagcgccaggtgctcttgccttttcccactgagagaaggctgctcttttg

SEQ ID NO: 258613 - DNA, 978 bp, Homo Sapiens
aaaattgaataaagattttattataccacacacacaaaaagcaatcggtacaaaaaaggcagttttcagttattctgttgagaatttctttccatgatttctcccattaaagtatagttttcaaagtcaaccaccacgacaaaggaagcatctaattagtccgttttcttctgatccaagaatgctgaacatttactgtcccatctgtagttgtatcagcagtgtaatgaacacagtttatattacttaactattctttgaactccaagaactgttgaagtcttttctgatgttctgcagatgcttgcacagcattcagatgttcaccaaatgtagtagttattcgatagatggcagttttcagtgatgctctgaatgcaaatcttaatgttttatatgaagtgtccacaaggcttcctgaaatccggggtggtttactggaagcatgaggaagcttaaagtacttgtcgactgcctcttgcagtgtcaacaaagtattaaggatagctggtagtgtcgtctggacaactccaaatctatcctctgtaaatgatgctgctactaagtgcgacagaccttctaatgcccaaatatgcatttgggcatctgaaaaaacagcctgaatggaggcctctgggtgcttactgaaaaaatacattatcagcacccgttttgacaagaaattcttaatctgttcacgtttattctgaatccatgaataaatcacactgggttgtctcattgtcttaccctcagcactaatagaggtagatggagaaggattagaaaattcagtcatttgctgatcagaagctgatgtccacaatcttggcccccttcttattagctgaggactttgcggtgacccatagcaggtgtttacatcaaaaattccagccatccgattcattacactagagccaaatggggtcccaaatgggctcacaacatcaggtgtagataattttgaagaaacag

SEQ ID NO: 258614 - DNA, 721 bp, Homo Sapiens
  misc_feature (511)..(511): n is a, c, g, or t
  misc_feature (526)..(526): n is a, c, g, or t
  misc_feature (534)..(535): n is a, c, g, or t
  misc_feature (545)..(545): n is a, c, g, or t
  misc_feature (547)..(548): n is a, c, g, or t
  misc_feature (553)..(553): n is a, c, g, or t
  misc_feature (555)..(555): n is a, c, g, or t
  misc_feature (560)..(561): n is a, c, g, or t
  misc_feature (563)..(565): n is a, c, g, or t
  misc_feature (568)..(568): n is a, c, g, or t
  misc_feature (572)..(572): n is a, c, g, or t
  misc_feature (581)..(581): n is a, c, g, or t
  misc_feature (584)..(584): n is a, c, g, or t
  misc_feature (588)..(588): n is a, c, g, or t
  misc_feature (600)..(600): n is a, c, g, or t
  misc_feature (602)..(602): n is a, c, g, or t
  misc_feature (611)..(611): n is a, c, g, or t
  misc_feature (615)..(615): n is a, c, g, or t
  misc_feature (624)..(624): n is a, c, g, or t
  misc_feature (633)..(633): n is a, c, g, or t
  misc_feature (647)..(647): n is a, c, g, or t
  misc_feature (649)..(649): n is a, c, g, or t
  misc_feature (660)..(661): n is a, c, g, or t
  misc_feature (665)..(665): n is a, c, g, or t
  misc_feature (667)..(667): n is a, c, g, or t
  misc_feature (686)..(686): n is a, c, g, or t
  misc_feature (692)..(693): n is a, c, g, or t
  misc_feature (702)..(702): n is a, c, g, or t
  misc_feature (705)..(705): n is a, c, g, or t
  misc_feature (710)..(711): n is a, c, g, or t
  misc_feature (719)..(719): n is a, c, g, or t
tgtttatgtggctggaccgccgcggatggctcagggttcttggacattggcgctacgaccttaggcgccctagccttaccaggacttggagtggcgataagggcccaatggcagaaacagtgtctacccaggttgggacagagggcgggctgagggcttcgcatcagcaaaacggtgacgctggtggcgacgcgaaggttgagctgtcccccgggcccccgaagccggctggccgggaagtggagccggccccagtaggcggggagcatccctcggctgcagccccaggcccgggcaagcataagaagcggcggggcgcaaccagggagcgtgtcgtgccgcccccgaagaagcggcggaccggggtgagcttcggagatgagcactttgcagaaaccagttattacttcgagggcggcctgcgtaaggtgcggccctattactttgacttccggacctactgcaaaggtcgctgggtgggccacagcttgctgcacgtcttcagtaccgnagttccgagctcgancccgcgtnncttactaatnanncgcgngntcctnncnnnccncctncaactgaanganaagngggttgaggacntnaagatggtngtgnaggagaatnatttgttgnggaagagagtagananggatgagcgannagtnanaagagaagggattggggtnggaagnnaaaaggaanatnttgtnnttttaganaa

SEQ ID NO: 258615 - DNA, 1491 bp, Homo Sapiens
  misc_feature (12)..(12): n is a, c, g, or t
  misc_feature (23)..(23): n is a, c, g, or t
  misc_feature (25)..(25): n is a, c, g, or t
  misc_feature (33)..(35): n is a, c, g, or t
  misc_feature (55)..(57): n is a, c, g, or t
  misc_feature (65)..(65): n is a, c, g, or t
  misc_feature (81)..(81): n is a, c, g, or t
  misc_feature (88)..(88): n is a, c, g, or t
  misc_feature (95)..(95): n is a, c, g, or t
  misc_feature (97)..(98): n is a, c, g, or t
gcctccaccccngccctcctcangncccctgcnnncccgcctcgtcctcctcagnnnccctccgnctccggctccgtcctnctctggncccctcngnncccggccccggccccacggcgggatgcgggacaacaccagccccatcagcgtgattctggtgagctcggggagcaggggcaataagctgctgttcaggtaccccttccagagaagccaggagcacccggcgtcccagacaagtaagccgcgtagagatacgctgccagcaacacgggcgaccatgctgatgagcaggacggcgattccaggttttcagatgttattctggcaacaattttggcaaccaagtctgaaatgtgtggccaaaaatttgaactgaagattgataatgtgcgatttgttgggcacccaacactgctacagcatgctctggggcagatctccaaaacagatccttccccgaagagggaagcacctactatgattctttttaatgtggtgtttgcactgagggccaacgcagacccgtcagtgataaactgtctgcataacctgtcccgtcgtatcgccaccgtgctgcagcacgaggagcgccgctgccagtacctcacccgggaggccaagctgatcctggcgctccaggatgaggtgtccgccatggctgatggaaatgaaggtcctcagtccccattccatcacatcctgcccaagtgcaagctggccagggacctcaaggaagcttatgacagcctgtgcacgtcgggcgtagttcggcttcacatcaacagctggctggaggtgagcttctgcctgccccacaagatccactatgcggcctccagtctgatccccccagaggccatcgaacggagcctgaaagccatccgcccctaccatgccctgctgctgctcagtgatgagaagtccttgctgggtgagcttcctattgactgctcccctgccctagtgcgggtgatcaagaccacatctgctgtgaagaacctgcagcagctagcccaagatgcggacctggccttgctgcaggttttccagcttgcagctcatctggtgtactggggcaaggccatcatcatctacccgctgtgtgagaacaacgtctacatgctgtctcccaatgccagcgtatgtctgtactccccgctggccgagcagttctcccaccagttcccatctcatgacctgccgtccgttcttgccaagttctccttgccggttctccttgtcagaatttaggaatcccctgggcccccgctgtgcaggagacccagctcatccagaatggtggtggtggatgctgcagcggccggcttctcatccagctgcacacctatgtctgcctgatgggctcacccagcgagggaggagccccgtccgcgaagaagacgacgtcccccttcacttgccccggggtcgggggggcggcagccctcagcaagccccaaagcccctcagcttttgggcttccccact

SEQ ID NO: 258616 - DNA, 724 bp, Homo Sapiens
  misc_feature (651)..(651): n is a, c, g, or t
ggccccaccccgagccccgcctcccaggccgccaaggctgcagagagctcgcgcgggcgtacgattctggcggcgtgggggcccaggcaaccgccgcttccagaaggttcggtggcggttgggccgcgccggtgcggggaaggcccgctagccgcggcagccgcgcccgacccggtggcagccccgagggaagcgtctggggcggcctaagtggcggagcagggcggacttgggccctcactctccgcgcggcggtaaatatttgtgctgggcgttcccggccgcccgcgccgccgattcgctgccgcgcccagtgcctgggcggccggatgaggtcagagcggaaggcgcggcccgggctcctggcagtggggcctgattcccacccccgcccccaacccaccccggcaccagtagcccgcatcgcgctctcgctaagatcggccctaagagagaatggaaggctgtttcctagaaaggagcattggtggcggctgctgggaagacacggggaatggaacgggcctttgcttccgcagcacaaagcgtcacgaggtggggaggaggaaaggccggcgactatctacaccgccgcctgcagcttttactgggagcgctgagcgccagcctggaggtgcacgtgttgcagtnaggagccctgaaacatgcgtgttttactgcacaagatgtgcccttgaatggagtttaggccagttggggtcac

SEQ ID NO: 258617 - DNA, 595 bp, Homo Sapiens
atcaccatcagagtctgaatcatcatcatcatcttttaagagtatctccagggtgctgctgttgttatcatacaccacgcagtacttcacacactccaggtccacagactccgggagaagatattcattatttttcttcttcactcgaagggcagtgatcacatggctttcgtcatactcccatttggaacggacatccaataaacagagatagttggggtctgttaatctggagagttttgtggcctgattcaggatgttgtaaagctctgtcggttcacataaaagcaaaccaggcatcctgctttccgaagctcagagtcccctctggcctccaaggacagaaggaatgggtttggctgaggtcgggggctcgggtctgggacgcgatccacctccccggctgcgcgactatggccaggctccctgtcggagcctctgcctggggccccacctggaaaaatggctcctctaaggcgcttccagcctaaagcccgtcctcttccacctcttgggtgcagactggccctcccactccgaccgcaggtcccccaccggccacacagacggctacgctagaacccagccaaaaaac

SEQ ID NO: 258618 - DNA, 1261 bp, Homo Sapiens
ttcgacatgagactttcaggcagcaaaggccttctccttccagacaagcctgggtatacacactctggccctccacccacaaaatgcccccaggtgaggctcttcagtacccttcggtgggcctcggagaagatcagtagagcggatccatgatgtttgtgatggaatctccaaggatagtcttctcccattccagcagctggctcaccaatccccgatttggacacatgttgtttttgcacttcttgacataggcccaggacctctgcaaggtctgctcgttactatgcatgaggtaggctatgatggcggcacaactgcggctgataccctgggtggaaaagatcagaatgacagagccaaggtgatggtgaatttcaatgaagtgacacatgtggcgtaagaagggaagaatctgggcttccggggaatcttctatccggatgtgcagaagcttgtcagcatcgcctgcaaaaaagggccctgtatccatggagacattgacatgggctttgattttcaagtccttctgaatcttggggtcacaggcttgactgaaattgccaacgaagaccttccctggcacgatttcaatggggtatggctgaaatgcatccagttcctgaggcatccagatgatcttctgggtccggagaaagtggtacgtgcctgagaagcgctcatagccccctttcaggatgtagacggggtggtgggtgaggcgggtcaggatcctgccatactcaatggctgcttgaggcacaagatctttgccatcaccatcagagtctgaatcatcatcatcatcttttaagagtatctccagggtgctgctgttgttatcatacaccacgcagtacttcacacactccaggtccacagactccgggagaagatattcattatttttcttcttcactcgaagggcagtgatcacatggctttcgtcatactcccatttggaacggacatccaataaacagagatagttggggtctgttaatctggagagttttgtggcctgattcaggatgttgtaaagctctgttggttcacataaaagcaaaccaggcatcctgctggaaaaatggctcctctaaggcgcttccagcctaaagcccgtcctcttccacctcttgggtgcagactggccctcccactccgaccgcaggtcccccaccggccacacagacggctacgctagaacccagccaaacaccggggttgccaggatggtcccacagctttcctttccgacccc

SEQ ID NO: 258619 - DNA, 1058 bp, Homo Sapiens
  misc_feature (5)..(5): n is a, c, g, or t
  misc_feature (9)..(9): n is a, c, g, or t
  misc_feature (14)..(14): n is a, c, g, or t
  misc_feature (26)..(27): n is a, c, g, or t
  misc_feature (30)..(30): n is a, c, g, or t
  misc_feature (39)..(39): n is a, c, g, or t
  misc_feature (46)..(46): n is a, c, g, or t
  misc_feature (50)..(50): n is a, c, g, or t
  misc_feature (53)..(53): n is a, c, g, or t
  misc_feature (62)..(212): n is a, c, g, or t
  misc_feature (550)..(550): n is a, c, g, or t
  misc_feature (648)..(648): n is a, c, g, or t
gacanccantaccnccacacccatannttnccaatatgnagcactngctngtntgctactcnnnnnnnnnnnnnnnnnnnnnnnnnnnnnnnnnnnnnnnnnnnnnnnnnnnnnnnnnnnnnnnnnnnnnnnnnnnnnnnnnnnnnnnnnnnnnnnnnnnnnnnnnnnnnnnnnnnnnnnnnnnnnnnnnnnnnnnnnnnnnnnnnnnnnnnaaacttctataaaaagtttgagagcaggaattctcatttccattcgtctgtagcttctatccccaaaggcaaagaaactaaaagagaaatgactcattgaagattggcctctttcctttctctaagacaaacctaagtaaaagcctgagctttgagtcctatgctcagcacacgggaaggagatgttaataattaaaataaagttgatatcctgtctttagggagttcccttgatctcttgaaagagacacagccccatttacattatttcgtggatttcaccagcatagtatagtttttttctgtaagtccctcattcttatgtaataacaggtggnactgaggtttgaagaacctcagtggcccatcctgatgacattggagactcaaagagacaagagagagtagggtttaaaacctgagctttaagactccnactagcttcgtgtcctttggcatgttaacgtgcctcagtttcctcatctgtataatggggatatatgaaaggcaccagtcctaaggtgaacattaagtgagatgattctagttacagacttagaaaaatttccagcacatagttaaatatccaggaaattctggtactgtaatgtgtgggtgagctgacctggatgtagatgttttcctctctcttgctgacccctccgccagttttgtcttgtgatgccattaacacatctctccctttctgacctggctcctgcccattggtgtcccaagaaatcgtgagaatagttagcccccctcgccccagcctgttgctttctcgtgtagttgttcacagtagttgagaagttgaagagcttttgcctattgaaggtgcactga

SEQ ID NO: 258620 - DNA, 1084 bp, Homo Sapiens
  misc_feature (4)..(4): n is a, c, g, or t
  misc_feature (12)..(12): n is a, c, g, or t
  misc_feature (16)..(16): n is a, c, g, or t
  misc_feature (22)..(22): n is a, c, g, or t
  misc_feature (71)..(71): n is a, c, g, or t
  misc_feature (76)..(76): n is a, c, g, or t
  misc_feature (86)..(86): n is a, c, g, or t
  misc_feature (91)..(91): n is a, c, g, or t
  misc_feature (116)..(116): n is a, c, g, or t
  misc_feature (181)..(181): n is a, c, g, or t
  misc_feature (187)..(187): n is a, c, g, or t
  misc_feature (190)..(190): n is a, c, g, or t
  misc_feature (419)..(474): n is a, c, g, or t
  misc_feature (524)..(575): n is a, c, g, or t
caanttcattcngganggccantgagttcttcaacctccagtccaccttgtttaacataagaatgagggantacanaaaaaaactntactntgctggtgaaatccacgaaataatntaaatgggctgtgtctctttcaagagatcaagggaactccctaaagacaggatatcaactttatnttaatnatnaacatctccttccccgtgtgctgagcataggactcaaagctcaggcttttacttaggttgtcttagagaaaggaaagaggccaatcttcaatgagtcatttctcttttagtttctttgcctttggggatagaagctacagacgaatggaaatgagaattcctgctctcaaactttttatagaagtgttgtccaataggactttcttcgatgatgaaaatgttccatatnnnnnnnnnnnnnnnnnnnnnnnnnnnnnnnnnnnnnnnnnnnnnnnnnnnnnnnngtggccagggcgactgaagagctgcatttttaattaaaattaaaactgannnnnnnnnnnnnnnnnnnnnnnnnnnnnnnnnnnnnnnnnnnnnnnnnnnntatgggtgtggtgagtaactgggatgtctctaagttctgtctttccccagagggctgggtccactccagagtctctgaaaaagcttgggaaagaggaaagtaggttaggctttgtcacacgctgggctcgttcctgtcgcctgccctggaccttgggggctgaatggctcacattttataatctgaacaattttgggggaagaaggtcctgtttaacaccaaatcagactataacacagggtcattttaaaacatttaaaacttcatgggcaccatttcctagctgttttggattgggacccgggtgctacaatctaggggccaagagaagtctccactgctcttgcttaagcccatgacaacgttggaggagaaaagccgatctctttttctcctccgcctgagacttgtgctccttctagggttttgcttccagaagctgacctctgagttctgaaacgatgtctgtgaggtcaaacggcagaggcatcgaagcatcatccttttcc

SEQ ID NO: 258621 - DNA, 1808 bp, Homo Sapiens
  misc_feature (1654)..(1654): n is a, c, g, or t
acttccgttgagttccgcctcgccgtttgtcccttgcggtacccgtccgcatacgaatctagcccgggaaccgagttgcgggagtgcggtctgtgccgttccggccaggagtttgccgactgcagacgtcctgcgaaccggcaagatgtgctctctggggttgttccctcctccaccgcctcggggtcaagtcaccctatatgagcacaataacgagctggtgacgggcagtagctatgagagcccgccccccgacttccggggccagtggatcaatcttcctgtcctacaactgacaaaggatcccctaaagacccctggaaggctggaccatggcacaagaactgccttcatccatcaccgggagcaagtgtggaagagatgcatcaacatttggcgtgatgtgggcctttttggggtgctaaatgaaattgcaaactcagaagaagaggtgtttgagtgggtgaagacggcatccggctgggccctggcactctgtcgatgggcctcttccctccatgggtccctgttcccccatctgtctctcaggagcgaagatctgatcgctgaatttgcccaagtcacaaattggtccagctgctgcttgcgtgtctttgcatggcacccccacaccaacaagtttgcagtggccctgctagatgactcagtccgtgtgtataatgccagcagcaccatagtcccctccctgaagcaccggctgcagcgaaatgtggcgtctctggcctggaagccccttagtgcctctgtcttggctgtggcctgccagagctgcattcttatctggaccctggaccctacctccttgtctacccgaccctcttctggctgtgcccaagtgctgtctcaccctgggcatacacctgttaccagcttggcctgggcccccagtggggggcggctgctctcagcttcacccgtggatgctgctatccgggtatgggatgtctcaacagagacctgtgtcccccttccctggtttcgaggaggtggggtgaccaacctgctctggtccccagacggcagcaaaatcctggctaccactccttcagctgtctttcgagtctgggaggcccagatgtggacttgtgagaggtggcctactctatcagggcgctgtcagactggctgctggagcccagatggcagccgactgctgttcactgtattgggagagccactgatttactccctgtcttttccagaacgttgtggtgagggaaaggggtgcgttggaggtgcaaagtcagcaacgattgtggcagatctgtctgagacaacaatacagacaccagatggtgaggagaggcttgggggagaggctcactccatggtctgggaccccagtggggaacgtctggctgtgcttatgaaaggaaagccaagggtacaggatggtaaaccagtcatcctcctttttcgcactcgaaacagccctgtgtttgagctccttccctgtggcattatccagggggagccaggagcccagccccagctcatcactttccatccttccttcaacaaaggggccctgctcagtgtgggctggtccacaggccgaattgcccacatcccgctgtactttgtcaatgcccagtttccacgttttagcccagtgcttgggcgggcccagganaaacctgctgggggtggaggctctattcatgacctgcccctctttactgagacatccccaacctcttgcccttgggaccctctcccagggccaccacctgttctgccccactccccacattcccacctctaagaataaataagttttccttttg

SEQ ID NO: 258622 - DNA, 1049 bp, Homo Sapiens
  misc_feature (10)..(11): n is a, c, g, or t
cctgcccatnncctcaccaacaagcctccaaatctcctcacccccacaccacctacccctgtcgcactgctcctgaaaagggggccaagtcaatgtttcaggtcagtctaaaaaccctagggaagctggccatttaaaagaacccaaactgaccatgggtaaatccagttcccctaaataaggcctgaagaaatccacaggtaccattcccactttccttctccctagctttcttagaggtttggccactaaatcttatgagacttgaaccaagtggcttcctctttctaggcttaggacgggttggggttagaaagggtgatcactgaaggccttgcctgctctgacattctgtgacattaaatgtctattctcctgttacctgtggcctgggacaccagtggggtttatcgaggggaccagaggggcctcaggctttcagatgaaatggctcctcctactcacccactttattcctctccatgtaattcaggacaagctgcaacttcccccagcttaacacaatgcccatacctcatacgatatgcgccctcccgttccatccctggccccctcaaacgagacttctcacaaggctgattacagatggtcaaacctggcttccaaggacagaattgcctctcggaagccagctgtggatctgagtccagagttggccacttgtgtgggtcctcacaagcaaagagagcactaaacttgacattgggggtccaccactccaactttgctttctgaaggttttggtgtacattgagccccagaaggaaaggagagtatctgtgagtgggggcctcccttgaccccagtacgaagtctatgccctgaatccccagagtagcccttcctggtgcccaactggcctggggacaaacagcgtccactacatctaggactgccggctaagtggacacacttcttgacctcctaccaggaactttggtaaaagctagctttggggaaggggttgggtgtaaatatgagaagggtggagggagaccagctggtagcaataaacatgggtagaacta

SEQ ID NO: 258623 - DNA, 2328 bp, Homo Sapiens
  misc_feature (2120)..(2120): n is a, c, g, or t
aggtcgctgtcaagatggagtttccaacccattaaatccaagggccagaccgtgacctcataaagcatgatctccttctgtccagactgtggcaaaagtatccaagcggcattcaaattctgcccctactgtggaaattctttgcctgtagaggagcatgtagggtcccagacctttgttcaatccaacatgtgtcatccttccaagggctcaaagagaggggctgaactcccaggttttgaaacctcttcctaagaaagtaaaatggtccagcaccgtcacctctccccgattatccctcttctcagatggtgacagttctgagtctgaagatactctgagttcctctgagagatccaaaggctccgggagcagaaccccaaacccccaaaagcagccctcagaagaccaggaagagccctcaggtgaccaggggtagccctcagaagaccagctgtagccctcagaagaccaggcagagccctcagacgctgaagcggagccgagtgaccacctcacttgaagctttgcccacagggacagtgctgacagacaagagtgggcgacagtggaagctgaagtccttccagaacagggacaaccagggcattctctatgaagctgcacccacctccaccctcacctgtgactcaggaccacagaagcaaaagttctcactcaaactggatgccaaggatgggcgcttgttcaatgagcagaacttcttccagcgggccgccaagcctctgcaagtcaacaagtggaagaagctgtactcgaccccactgctggccatccctacctgcatgggtttcggtgttcaccaggacaaatacaggttcttggtgttacccagcctggggaggagccttcagtcggccctggatgtcagcccaaagcatgtgctgtcagagaggtctgtgctgcaggtggcctgccggctgctggatgccctggagttcctccatgagaatgagtatgttcatggaaatgtgacagctgaaaatatctttgtggatccagaggaccagagtcaggtgactttggcaggctatggcttcgccttccgctattgcccaagtggcaaacacgtggcctacgtggaaggcagcaggagccctcacgagggggaccttgagttcattagcatggacctgcacaagggatgcgggccctcccgccgcagcgacctccagagcctgggctactgcatgctgaagtggctctacgggtttctgccatggacaaattgccttcccaacactgaggacatcatgaagcaaaaacagaagtttgttgataagccggggcccttcgtgggaccctgcggtcactggatcaggccctcagagaccctgcagaagtacctgaaggtggtgatggccctcacgtatgaggagaagccgccctacgccatgctgaggaacaacctagaagctttgctgcaggatctgcgtgtgtctccatatgaccccattggcctcccgatggtgccctaggtggaatccagaactttccatttgcagtgtgcaacagaaaaaaaacaatgaagtaatgtgactcaaggcctgcatgcttaatcacagataagcttctagaacaagccctggaatgtgcattcctgccactggtttcaggacactcatcagccctgattagcctcccggagggcccccagtttccctcccgcgactgccaacctccctctctttggtggtcttgccctttcccccagtgtccctagccccgcctgggctgggcgtcgggctccggcccaccggggggggaccccctccccaccccttggacactctctggcggctttcggtcaagcaagtccgtgtctccaccgtcacccgctgcgccgccatccccgacgtgttgcgcgccagcctcgcggtctcgcgctcggtgccgagcgtcgcctcgcccggcctaaacacggtgcttctcgttaagcgcgcccaatcggcgtgtctccgtgggctcgcgccctcgggacgcccaacctaaacgcgaatccatcgtacccccaatggaccttccttactggcccgcgcctcccccctctctgtggccgtctcttcgctcgtgcccaccactctccttgtcggtcgctngtctgggcgttctccctctcccaccccgctacccatcacggccgcgcccagcgcgtcgggcccaccctctactttggctttatgcgctccgctctgcatccccggggcgggtggaggcgttgtgcccggtatcccatgctttctgtgccagaccccttcttccgccgccaggaattttctccgcctggtgattgttccaagaccctcc

SEQ ID NO: 258624 - DNA, 630 bp, Homo Sapiens
tccacttgttgacttgcagaggcttggcggcccgctggaagaagttctgctcattgaacaagcgcccatccttggcatccagtttgagtgagaacttttgcttctgtggtcctgagtcacaggtgagggtggaggtgggtgcagcttcatagagaatgccctggttgtccctggtctggaaggacttcagcttccactgtcgcccactcttgtctgtcagcactgtccctgtgggcaaagcttcaagtgaggtggtcactcggctccgcttcagcgtctgagggctctgcctggtcttctgagggctacagctggtcttctgagggctacccctggtcacctgagggctcttcctggtcttctgagggctgcttttgggggttgggggtctgctcccggagccttggaaggatgacacatgtggattgacaaaggtctgggaccctacatgctcctctacaggcaaagaatttccacagtaggggcagaatttgaatgccgcttggatacttttgccacagtctggacagaaggagatcatgctttatgaggtcacggtctggcccttggatttactgggttggaaactccatcttgacagcgaccttctcagttgcccagcgaaaaact

SEQ ID NO: 258625 - DNA, 2085 bp, Homo Sapiens
  misc_feature (71)..(130): n is a, c, g, or t
  misc_feature (591)..(591): n is a, c, g, or t
  misc_feature (1638)..(1638): n is a, c, g, or t
gacacgggtggctgctgagcacttgaaatgtgattagcgcaactgagaaactgagcttttaattttatttnnnnnnnnnnnnnnnnnnnnnnnnnnnnnnnnnnnnnnnnnnnnnnnnnnnnnnnnnnnnaggaaacaacacagaacattcagctaggggtgtaccctcatagcctgtgagtgtctcttactcactgtcatgggggaaggtgagttacacagggaggtaccttcttgccgcctcttttaggatttcctaagtatctctccttcatcctaccctgccatcattctttgactttatgtccattttcataaacctttgcctacactggctcttatctacatggaggttgttcaacctgccgaagtgattaaattctgtgtacacaggccgtatatattgcagctaattaaaacaacaaacatcctaggcatgcacaaaggtataattccaccgttataacaggcagcaacttgtatgtctaatattagacatcttgctttctgtctgtaggcatagaaacaaaggattgaaagccattctcatacagcaaccgggtgaaaaaaacaaaacactgtgctgttacnaatgtgctccctgctatttatacctcattaagtttccccaatattaaagggctgacaacttaataaactgtactcactgcaaaagggataataagcacaccaggaaaaggatttaaggagacagacaacaaagagctggcagaaattaatcccaccatgaagcttgagtgctgtagggatcctctggcttcgctccaaaagagaggatcctgggagaagtctgtatccagcacagaggggaaaaatgctgtcaccatccaaaaatgaaaggaggatgacatggctcactaagcaagtactagggcacctggcatgtgaggtccttgctttccctagaagccactggtggggggcagcaaattcctgggattagctggttatctggtggagaaagctaaagctggggtcagggatctttaaaaggcaagcacattttgcttaaaggattagctccagaggagccctgggatgggtgccagcttagctcagacagaagtcatgttcttagcgttcaggcaagtcagcctttgcataagacaccctgtcgtcgggcaggaatttgccgttacaaatcccaaacccatgacagtaggaatgtcaccccatgcttcacatatgcattatgctctgaacccagggcaactatgaccatgcttccttcaatctttattgagcaaatatatggccaaggttattcccttatctgtgactgggtggagaagaatggtcaggaagggagactgcctcactgttgaccaattccaaaacctaaggataagcccatggggtatgtcaagctagcaggttcttctcggcccaggatgacagtgtctgggggcatcacaaaacagttgtacaatccaatgcagccgtcctgctcatacagtaagatccattaggccagagcaggcctaacttgggtggagagcccagcctgagcaccagaattagttgcttccacttgtgcagcctgctgaagagccggactcaggttgaagcagctttcctcccagtcttcactgatctccacagggagaaaacagaagnccccacaagtaccaagctcttcctgagactgcagccaccacacctcggggaaggggaggctggcaggagaggagtacactgtccccggtgacccacaccaaggtggctccaagtgtaaacaaagcctggtgccagggacagaagaggatgcagcctgatgtgaggttttcagaaaagtgaaatgacctagcaccaggttgggattgcttgggtctgcacagcagtccctcacactgcccttacagagaggaacaggttatttgatgacttgggcccatgagatgttctccaagccattgacagctgagagaattcaggtgatccacctgaatatcagaagtttcagccctcttagagttcgtaacagaaacccagagatttactgtcagctagaacaaagatgtaaggtctcaagtaaaataaaggattgtccttcaaaatttgcaa

SEQ ID NO: 258626 - DNA, 980 bp, Homo Sapiens
  misc_feature (722)..(722): n is a, c, g, or t
  misc_feature (771)..(771): n is a, c, g, or t
  misc_feature (786)..(786): n is a, c, g, or t
  misc_feature (813)..(813): n is a, c, g, or t
  misc_feature (907)..(907): n is a, c, g, or t
accagatttggagcttggttctgtgggtgaaggccaactacttgaagggtttcctgtgacagaaacaagcagtgggtcacttgagtttgaccacacgcagggcagggcacggaaagagccgaagcatctgtaggtccctccgtgggtggcagggcccagaggaaagtctgcctggaatgttctgttgaccttgggcactgcacggagcctacgttcatgggcctccccttccctggacagatggtagatgtcataggagctccaggagctacaggacaaggtcacgttctctcctgcctgaaccgtggggcccggctgggctgagagagaaggtttctcatatagacctgtgatcacgatgtccagggggtcactgggagctgacaactgatagggggagtgaggaacagaaccataacatctgtaggttcctgcaaggacaggacatcaagggaccgatggagaagttggccttggagaccccatcatggatctgtccaacgaggcgtgaggggtcatcagagatcccctctctgtgcagaaagaagtgactcaaacatgacatctgaccaacattgcaggatgactgtctctcctgatttcagcaggggccctgggtggcccaggagggaaggttttctgtgggttcctgtgaccatgatcaccaaggggttgctgggtgtcgaccacccagtgagggaagtgtgggcgtgaaccccganatctgtaggtccctgcatgtgctggggtcacaagggcccatgatgaagntctcctggaatattntgccgtggaagatgggaacgtggcttntgtcttctttgtacagcatgaaattgttaaaccacacgacgatagatgacactgaaagagcacacgtgtccatccatcgaaggcaccacagtgntgggccgggcagacaggaagggtttgtccatgaccacccatgagtggccaggccccctgcagcaagaagaacc

SEQ ID NO: 258627 - DNA, 1077 bp, Homo Sapiens
  misc_feature (5)..(5): n is a, c, g, or t
  misc_feature (7)..(7): n is a, c, g, or t
  misc_feature (11)..(11): n is a, c, g, or t
  misc_feature (18)..(18): n is a, c, g, or t
  misc_feature (35)..(35): n is a, c, g, or t
  misc_feature (39)..(39): n is a, c, g, or t
  misc_feature (43)..(43): n is a, c, g, or t
  misc_feature (55)..(55): n is a, c, g, or t
  misc_feature (64)..(65): n is a, c, g, or t
  misc_feature (68)..(68): n is a, c, g, or t
  misc_feature (71)..(71): n is a, c, g, or t
  misc_feature (83)..(83): n is a, c, g, or t
  misc_feature (98)..(99): n is a, c, g, or t
  misc_feature (117)..(117): n is a, c, g, or t
  misc_feature (130)..(130): n is a, c, g, or t
  misc_feature (143)..(143): n is a, c, g, or t
  misc_feature (195)..(195): n is a, c, g, or t
  misc_feature (262)..(262): n is a, c, g, or t
  misc_feature (315)..(315): n is a, c, g, or t
  misc_feature (385)..(385): n is a, c, g, or t
  misc_feature (390)..(390): n is a, c, g, or t
  misc_feature (433)..(433): n is a, c, g, or t
  misc_feature (480)..(480): n is a, c, g, or t
  misc_feature (485)..(485): n is a, c, g, or t
  misc_feature (535)..(535): n is a, c, g, or t
  misc_feature (541)..(541): n is a, c, g, or t
  misc_feature (550)..(550): n is a, c, g, or t
  misc_feature (567)..(567): n is a, c, g, or t
  misc_feature (592)..(592): n is a, c, g, or t
  misc_feature (646)..(646): n is a, c, g, or t
  misc_feature (663)..(663): n is a, c, g, or t
  misc_feature (688)..(688): n is a, c, g, or t
  misc_feature (690)..(690): n is a, c, g, or t
ccatntntccnggagggnagcccataacgtagtcncgtncagnccaaggtcaaanagacattcnnganganttcttatggccntgccacccacggagnncctacagatgcttcgctncttccgtgccctntcctgcgtgtgtnaaactaaagtgacccactgcttgtttctgtcacagaaaccattcaagtagtngccttcacccacagaaccaagctccaaatctggtatctgcagacacctgcatgttctgattgggacntcagtggtcatcttcctcttcatcctcctcctcttctctctcctttatcgctngtgctccaacaaaaagaatgctgctgtaatggcccaggagcctgcgggggacagcacagtgaataaaaanaaatntgatgaaaaagaccctcaggaggtgatgtacgcacagttggantatgcgttttcatacagagaaaaatcagtcgcccttatcagaggccnaaganacccctaacagataccagcgtgtacacggaacttcacaaatgctgagccnagatcnaaagttgtntcctgcccacgagcacnacagtcaggtcttgagggggttttntagggagacaacagccctgtctcaaaaccaggttgccagatccaatgaaccagnagctggaatctgaaggnatcagtctgcatcttaggggatcgntnttcctcacaccacgaatcatgaacatgcctctctcttgcttacaaaatgacacataaggtcgccactgcctgctgacagagaaaacacactcctttgcttagcccacaagtatctatttcacttgacccctgcccacctctccaacctaactggcttacttcctagtcctacttgaggctgcaatcacactgaggaactcaacaattccaaacatacaagaggctccctcttaacacggcacttacacacttgctgttccaccttccctcatgctgttccacctcccctcagactatctttcagccttctgtcatcagtaaaatttataaattttttttataacttcagtgtagctctctcctcttcaaataaacatgtctgccctc

SEQ ID NO: 258628 - DNA, 1513 bp, Homo Sapiens
  misc_feature (631)..(631): n is a, c, g, or t
atacatgtcattttatttctacttgcagcaacaagataaacaagtataattccatggtcaaggagttacaaatagtagcaagcccagtaaccttgagcatatctataaggcaaataaaacaaatatttctttcatagtgtgggcatccaactttagataatctggaaaaaaatcactctagcccctgaataccatgatgtgcatgatgtgcaaaatgaaagtatcacccaaaatattttcaaagctaaaaagaaaatatttaaattcaaatactttaaccaaattggaaatgcaaacagtacacttagagtcatccttagccagctgttctccaaacaaaagatcgagaaacaaaaccaagaacaatgtaaaaaagaaaaggtttatctagaaaaactggaagctcatcaaagtcacatttcttcttctgattcttgttctcgttcagcatttttcagaagtccaacttctgaggagcagagcctcttaagtctagatttaaccaaccaggtaatgaaagcataattcattccaacgatgacaatggttactgcataatgccaacaaaagcatatggtgagaaacaaaatattttcatgatccatcagatcccatgcaggacctccactgnggggatacaggacaaatccaatctgaaagaaccagctcccctgaagcagaatgagacttgaccgcaatagctccagaagtacattgttccgaacaaggaactctaggaaggcaacgaggcctgtcagaaagacgaccaaaaccagcagctggtgcacaaagatgtccagcatttcccggccatgagtgtggttgtagaagataaaggcctccacaaataaggcatttgacaacattaacttggttaaggacacaggaagtgaactgatggtgaaacataagatatctgccacacccaacagcccaaagaagaaatacatggtgaaatgatgccagcccaggagttgattccagtgaccttgtttatagtcatataacatcagatggggccctccaggaataaactgctccccagccatgccagttaaagccatgccaactattgtaattccctccaaaatttccaatcgatagaataatgttttggaaccaagatagcaggttcgcttttgctttttgcagatatacttcagaatactctttgtacaccaccaaagaccaataataaaaaagaaggttccagggagggcatgacctctgaaattccccatgatccaacttgggctgtttaatcaacactttatttttcccactctgccagctcaaaatcagacagcggctgggcctcagtagatgcaggcacgttagaactgtggcagaagagataagaatgaagcagccaaattgagcctttgcttcttaggtaatgctgaaaagtttccaacttggtctgtttactcaacactttcgacgcgtggtcgacgatatcccggattccggaccgtaccagcctgctgtttttaacccaaacgggttcatattc

SEQ ID NO: 258629 - DNA, 1290 bp, Homo Sapiens
  misc_feature (1012)..(1012): n is a, c, g, or t
  misc_feature (1014)..(1014): n is a, c, g, or t
  misc_feature (1033)..(1033): n is a, c, g, or t
  misc_feature (1040)..(1043): n is a, c, g, or t
  misc_feature (1055)..(1055): n is a, c, g, or t
  misc_feature (1086)..(1086): n is a, c, g, or t
  misc_feature (1088)..(1088): n is a, c, g, or t
  misc_feature (1125)..(1126): n is a, c, g, or t
  misc_feature (1129)..(1137): n is a, c, g, or t
ggggcagaggtagaggtggccaccaagggacacagactgcctgcatgaaggctggagctgggcccaggatgaggaaaagcctcaggaaggaagggctgacacgaaataaggaataccatggcattcatgagatgtgcgtctgaatcctctctcttgcctgagaagctttagcttccaccttgagacacaaaacatgtggttatgaagagatgacaaggtttttgtaaaagaatgagccattgtggataggctttgggaatgtgctgcattgcgggtccggcactcaagtgattgttttaccacatatccagaaccctgaccctgccgtgtaccagctgagagactctaaatccagtgacaagtctgtctgcctattcaccgattttgattctcaaacaaatgtgtcacaaagtaaggattctgatgtgtatatcacagacaaaactgtgctagacatgaggtctatggacttcaagagcaacagtgctgtggcctggagcaacaaatctgactttgcatgtgcaaacgccttcaacaacagcattattccagaagacaccttcttccccagcccagaaagttcctgtgatgtcaagctggtcgagaaaaagctttgaaacagatacgaaactaaactttcaaaacctgtcagtgattgggttccgaatcctccccctgaaagtggccggggtttaatctgctcatgacgctgcggctgtgggccacctgagatctgcaagattggtaagacagcctgtggctccctcgctccttcctctgcattgcccctcttctccctcttccaaaaagagggaactctcctacccccaaggaggtgaaagctgctaccacctctgtgcccccccggcaatgccaccaactggatcctacccgaatttatgattaagattgctgaagagctgccaaacactgctgccaccccctctgttcccttattgctgcttgtcactgcctgacattcacggcagaggcaaggctgctgcagcctccnanagctgtgcacattccctcnagctccnnnnagactgcctccnccatcccacagatgatggatcttcagtgggntntcttgggctctaggtcctggagagtgttgtgaggggnntannnnnnnnnaatagtgttcataaagaaagacatagtattcttcttctcaagacgtggggggaaattatctcattatcgaggccctgctatgctgtgtgtctgggcgtgttgtatgtcctgctgccgatgccttcattaaaatgatttggaagagcaaaaaaa

SEQ ID NO: 258630 - DNA, 929 bp, Homo Sapiens
  misc_feature (8)..(8): n is a, c, g, or t
  misc_feature (10)..(10): n is a, c, g, or t
  misc_feature (12)..(12): n is a, c, g, or t
  misc_feature (22)..(23): n is a, c, g, or t
  misc_feature (30)..(31): n is a, c, g, or t
  misc_feature (40)..(40): n is a, c, g, or t
  misc_feature (58)..(58): n is a, c, g, or t
  misc_feature (67)..(67): n is a, c, g, or t
  misc_feature (89)..(89): n is a, c, g, or t
  misc_feature (98)..(98): n is a, c, g, or t
  misc_feature (118)..(120): n is a, c, g, or t
  misc_feature (134)..(135): n is a, c, g, or t
  misc_feature (140)..(140): n is a, c, g, or t
  misc_feature (142)..(157): n is a, c, g, or t
  misc_feature (180)..(180): n is a, c, g, or t
  misc_feature (190)..(190): n is a, c, g, or t
  misc_feature (207)..(207): n is a, c, g, or t
  misc_feature (211)..(211): n is a, c, g, or t
  misc_feature (215)..(215): n is a, c, g, or t
  misc_feature (217)..(217): n is a, c, g, or t
  misc_feature (237)..(237): n is a, c, g, or t
  misc_feature (253)..(253): n is a, c, g, or t
  misc_feature (261)..(261): n is a, c, g, or t
  misc_feature (264)..(264): n is a, c, g, or t
  misc_feature (266)..(266): n is a, c, g, or t
  misc_feature (268)..(268): n is a, c, g, or t
  misc_feature (276)..(277): n is a, c, g, or t
  misc_feature (287)..(287): n is a, c, g, or t
  misc_feature (297)..(298): n is a, c, g, or t
  misc_feature (317)..(317): n is a, c, g, or t
  misc_feature (362)..(362): n is a, c, g, or t
  misc_feature (385)..(385): n is a, c, g, or t
  misc_feature (388)..(388): n is a, c, g, or t
  misc_feature (412)..(413): n is a, c, g, or t
  misc_feature (418)..(418): n is a, c, g, or t
  misc_feature (490)..(490): n is a, c, g, or t
  misc_feature (499)..(499): n is a, c, g, or t
  misc_feature (563)..(563): n is a, c, g, or t
  misc_feature (565)..(565): n is a, c, g, or t
  misc_feature (592)..(592): n is a, c, g, or t
  misc_feature (598)..(598): n is a, c, g, or t
  misc_feature (603)..(603): n is a, c, g, or t
  misc_feature (628)..(628): n is a, c, g, or t
  misc_feature (821)..(821): n is a, c, g, or t
  misc_feature (824)..(824): n is a, c, g, or t
  misc_feature (826)..(827): n is a, c, g, or t
  misc_feature (832)..(832): n is a, c, g, or t
  misc_feature (856)..(856): n is a, c, g, or t
  misc_feature (875)..(875): n is a, c, g, or t
  misc_feature (890)..(891): n is a, c, g, or t
  misc_feature (897)..(897): n is a, c, g, or t
  misc_feature (900)..(900): n is a, c, g, or t
  misc_feature (903)..(903): n is a, c, g, or t
  misc_feature (920)..(920): n is a, c, g, or t
gccctganantntattctgcannctgtganncaccgagantgaaccaaacccaggaanaggcgccanaaaccagcctcgaagacaaaangccctggancagtgaaagcacaggagatnnnatggctcggggganngggangnnnnnnnnnnnnnnnnggagtgatcaagtgaaactcgtnccgccctccntgcgccggcccatgatntgtnaatnanaggcgcggcaaggaccaaanctccgcgcggcgaaanggttgcanttnancnagctgganntgaggcggangctggggcanntgagctgcaatgtccaganacgctctgaaaatgcgctcctggcccttgaccgtcctctaataantcctgcccttaggcagccctcanaangctcagccgggtgggatggaggcnngtaancagggtggctttgtaaaaataaatgccaaagagcttgctgtcacgcgcgcctggcgcgctagcctcaatcangtggagatnaaacaatggctgcgcaggcccgtctacagcctgtacatctggacgtttggggtgaacatgaaanangccgctgtggaggacctgcatcactancgcaanctcancgagttcttccggcgcaactgcaanccgcagcccggccctgtctgtggcctgcacagcgtgattagcccatcggatggaaggatcctcaactttgggcaggtgaagaactgtgaggtggagcaggtaaagggggtcactactccctggagtcgttctgggcccgcgtatgtgcacagaggactgcccttcccacagccgcgtcgtgtgactcttcaanaananntggtnaccggggaaggaatgactctatantgtgtatctactggccctngggatacactgctcnntccccncgntgnctgtgtccacggcgcanttccagctc

SEQ ID NO: 258631 - DNA, 2018 bp, Homo Sapiens
  misc_feature (487)..(487): n is a, c, g, or t
  misc_feature (618)..(618): n is a, c, g, or t
  misc_feature (1675)..(1717): n is a, c, g, or t
gcaggctggtaccggtccggaattcccgggatcgctggcgtagtctgtggccgggtggtcgttgctgcgcgccccgagccccgagagccatgcagatgtcctacgccatccggtgcgccttctaccagctgctgctggccgcgctcatgctggtggcgatgctgcagctgctctacctgtcgctgctgtccggactgcacgggcaggaggagcaagaccaatattttgagttctttcccccgtccccacggtccgtggaccaggtcaaggcgcactccgcaccgcgctggcctctggaggcgtcctggacgctagcggcgattaccgcgtctacaggggcctgctgaagaccaccatggaccccaacgatgtgatcctggccacgcacgccagcgtggacaacctgctgcacctgtcgggtctgctggagcgctgggagggcccgctgtccgtgtcggtgttcgcggccaccaaggaggaggcgcantggccacggtgctggcctacgcgctgagcagccactgccccgacatgcgcgccagggtcgccatgcacctcgtgtgcccctcgcgttacgaggcagccgtgcccgaaccccgggagccgggggagtttgcnctgctgcggtcctgccaggaggtctttgacaagctagccagggtggcccagcccggggattaattatgcgctgggcaccaatgtctcctaccccaataacctgctgaggaatctggctcgtgagggggccaactatgccctggtgatcgatgtggacatggtgcccagcgaggggctgtggagaggcctgcgggaaatgctggatcagagcaaccagtggggaggcaccgcgctggtggtgcctgccttcgaaatccgaagagcccgccgcatgcccatgaacaaaaacgagctggtgcagctctaccaggttggcgaggtgcggcccttctattatggggtgtgcaccccctgccaggcacccaccaactattcccgctgggtcaacctgccggaagagagcttgctgcggcccgcctacgtggtaccttggcaggacccctgggagccattctacgtggcaggaggcaaggtgcccaccttcgacgagcgctttcggcagtacggcttcaaccgaatcagccaggcctgcgagctgcatgtggcggggtttgattttgaggtcctgaacgaaggtttcttggttcataagggcttcaaagaagcgttgaagttccatccccaaaaggaggctgaaaatcagcacaataagatcctatatcgccagttcaaacaggagttgaaggccaagtaccccaactctccccgacgctgctgagcccttccctcccctaatctgagaagtcagcctcttggctcctcaggccaccatttaggcctgactggggtaagaaatgtcgctccactttacagaggtagctgtggtgttgaaacactgggacttgggatatggggtgctgggatcgattcctagctttaccactaactaggctgtgtgggccttgagtaaatcccgttacctcttctgaggccttcggttaccctgtctgtaaaaagggaggtgagaatacctacctcacggaactgttgggaggctcagatgagatgctatatgtgaaaactttctgtaagcttcgtacaaatgtgaagtattaannnnnnnnnnnnnnnnnnnnnnnnnnnnnnnnnnnnnnnnnnnacaatcttgggtgggtagtaggagagcaaaaagtatgaatgggatggagctaagaagtctgaatacttaatgaaatggactttttggaaagaaatcagatgaaggcataaaatttagttcttagctcttgaacagaagcctaaaattcctggttctctcaggttcgccttcaagggttctggaggagggaagggtctgcaggttccatgggtgacagcctgagatctgtcccttcaacgggctgggctgggtatgtgcctaccgatgacaatgtgtaaataaatgcgtgttcacacccaaa

SEQ ID NO: 258632 - DNA, 855 bp, Homo Sapiens
  misc_feature (149)..(149): n is a, c, g, or t
  misc_feature (302)..(351): n is a, c, g, or t
  misc_feature (382)..(538): n is a, c, g, or t
gggggtgacccacgcatttatttaccacatggtcatcggtaggcacatacccagcccagcccgtgaagggacagatctcagcttgtcacccatggaacctgcagacccttccctcctccagaacctttgaaggcgaagccctgagaganccaggaattttaggcttctgttcaagagctaagaactaaattttatgccttcatctgatttctttccaaaaagtccatttcattaagtattcagacttcttagctccatcccattcatactttttgctctcctactacccacccaagattgtnnnnnnnnnnnnnnnnnnnnnnnnnnnnnnnnnnnnnnnnnnnnnnnnnnttcacatttgtacgaagcttacagaatgttnnnnnnnnnnnnnnnnnnnnnnnnnnnnnnnnnnnnnnnnnnnnnnnnnnnnnnnnnnnnnnnnnnnnnnnnnnnnnnnnnnnnnnnnnnnnnnnnnnnnnnnnnnnnnnnnnnnnnnnnnnnnnnnnnnnnnnnnnnnnnnnnnnnnnnnnnnnnncaccccatatccaagtccagtgtttcaacaccacagctacctctgtaaagtggagcgacatttcttaccccagtcaggcctaaatggtggcctgaggagccaagaggctgacttctcagattaggggagggaagggctcagcagcgtcggggagagttggggtacttggccttcaactcctgtttgaactggcgatataggatcttattgtgctgattttcagcctccttttggggatggaacttcaacgcttctttgaagcccttatgaaccaagaaaccttcctcgtgccgaattcgccacccaggcctcgctac

SEQ ID NO: 258633 - DNA, 846 bp, Homo Sapiens
  misc_feature (309)..(465): n is a, c, g, or t
  misc_feature (497)..(545): n is a, c, g, or t
cctgggtggcgaattcggcacgaggaaggtttcttggttcataagggcttcaaagaagcgttgaagttccatccccaaaaggaggctgaaaatcagcacaataagatcctatatcgccagttcaaacaggagttgaaggccaagtaccccaactctccccgacgctgctgagcccttccctcccctaatctgagaagtcagcctcttggctcctcaggccaccatttaggcctgactggggtaagaaatgtcgctccactttacagaggtagctgtggtgttgaaacactggacttggatatggggtgnnnnnnnnnnnnnnnnnnnnnnnnnnnnnnnnnnnnnnnnnnnnnnnnnnnnnnnnnnnnnnnnnnnnnnnnnnnnnnnnnnnnnnnnnnnnnnnnnnnnnnnnnnnnnnnnnnnnnnnnnnnnnnnnnnnnnnnnnnnnnnnnnnnnnnnnnnnnnaacattctgtaagcttcgtacaaatgtgaagnnnnnnnnnnnnnnnnnnnnnnnnnnnnnnnnnnnnnnnnnnnnnnnnnacaatcttgggtgggtagtaggagagcaaaaagtatgaatgggatggagctaagaagtctgaatacttaatgaaatggactttttggaaagaaatcagatgaaggcataaaatttagttcttagctcttgaacagaagcctaaaattcctggttctctcagggcttcgccttcaagggttctggaggagggaagggtctgcaggttccatgggtgacagcctgagatctgtcccttcacgggctgggctgggaatgtgcctaccgatgaccatgggtaaataaaatgcgtggtcccacccc

SEQ ID NO: 258634 - DNA, 813 bp, Homo Sapiens
  misc_feature (12)..(12): n is a, c, g, or t
  misc_feature (25)..(25): n is a, c, g, or t
  misc_feature (38)..(38): n is a, c, g, or t
  misc_feature (58)..(58): n is a, c, g, or t
  misc_feature (63)..(63): n is a, c, g, or t
  misc_feature (69)..(69): n is a, c, g, or t
  misc_feature (71)..(72): n is a, c, g, or t
  misc_feature (85)..(86): n is a, c, g, or t
  misc_feature (90)..(90): n is a, c, g, or t
  misc_feature (94)..(94): n is a, c, g, or t
  misc_feature (102)..(102): n is a, c, g, or t
  misc_feature (104)..(104): n is a, c, g, or t
  misc_feature (110)..(111): n is a, c, g, or t
  misc_feature (113)..(113): n is a, c, g, or t
  misc_feature (122)..(122): n is a, c, g, or t
  misc_feature (124)..(124): n is a, c, g, or t
  misc_feature (140)..(140): n is a, c, g, or t
  misc_feature (147)..(147): n is a, c, g, or t
  misc_feature (168)..(168): n is a, c, g, or t
  misc_feature (186)..(186): n is a, c, g, or t
  misc_feature (192)..(192): n is a, c, g, or t
  misc_feature (216)..(216): n is a, c, g, or t
  misc_feature (226)..(227): n is a, c, g, or t
cagttcaggacntcaaggcgctcgnctataaaaaaggnggcctttcggtctattggcngtganaggggngnnggggggccagaanngggngctnaagggggngnaggagnngnggcagatgnangacatgatcatgcagnacaagcngggccatgcaggaacatgcgngctgctctgggagaaggnagtccnacaggaccaggaccgctatcacantcatcagaanntggacagcgagctgggcgacctcggagcgagcgcgagcgtgcggcggcatgagatgataagaccagggaatgggccgagcagctaacaaagatgggccggggcaagcacttcatcggagacttcctgcctccagacgagctggaaaagtttatggagaccttcaaggccctaaaggaggcccggtgagcctgactactcagagtacaaggagttcaagctgactgtggagaacatcggctaccagatgctgatgaagatgggctggaaggagggcgaggggctgggctcagagggccagggcatcaagaacccagtgaacaagggcaccaccacagtggacggcgctggcttcggcattgaccggccggcggagctctccaaggaggacgacgagtatgagggttccgcaagaggatgatgctggcctaccgcttccggcccaaccccctgaacaatcccagacggccttactactgagtgttctggaaatacatactttctgaatgaccaaccgtccctggactgtggaatgttccggcctgcatttctgcccaccccttccgttgtcacgagtgccgtgccgtg

SEQ ID NO: 258635 - DNA, 990 bp, Homo Sapiens
atttgtgggattggatgagtctcaagatggacaaccgggatgttgcaggaaaggctaaccggtggtttggggttgctccccctaaatctggaaaaatgaacatgaacatccttcaccaggaagagctcatcgctcagaagaaacgggaaattgaagccaaaatggaacagaaagccaagcagaatcaggtggccagccctcagcccccacatcctggcgaaatcacaaatgcacacaactcttcctgcatttccaacaagtttgccaacgatggtagcttcttgcagcagtttctgaagttgcagaaggcacagaccagcacagacgccccgaccagtgcgcccagcgcccctcccagcacacccacccccagcgctgggaagaggtccctgctcatcagcaggcggacaggcctggggctggccagcctgccgggccctgtgaagagctactcccacgccaagcagctgcccgtggcgcaccgcccgagtgtcttccagtcccctgacgaggacgaggaggaggactatgagcagtggctggagatcaaagtttcacccccagagggagccgagactcggaaagtgatagagaaattggcccgctttgtggcagaaggaggcccgagttagaaaaagtagctatggaggactacaaggataacccagatatgcatttttgcacgataagaatagcgggagtccctctactacaggaagaaagtggcgagatcagaacgacgcccggagtcgcagccagcccctcagaaagtttaccgcagaggacgaaaggcagacgctgcccaaagtggccgtcaacgacggggcccaaggggaacatgcccagaaaacgggaacgcgatccgtctggagcccagacgggctccccgaaagggagaccagacagagccgccaagcgcgccaacacgcgacgggaaacacaacacacccagatcacagacccacggccacacacaccccccggaagaaa

SEQ ID NO: 258636 - DNA, 1034 bp, Homo Sapiens
  misc_feature (816)..(849): n is a, c, g, or t
ggcctgggtggcgctcgctcacggcggcggcggcggagcggagaggccagagccggagaccgagctgggatcgggccccgggcgggggcggtgcgagcggcgccaagcagatcttaggggcggggacggagccggggcgggcgggactgaagcggagcccgggaacggggcgggaggtcccagggtcccgggttgggggggtggagcagcatttcgtcgccgcgggggtgccgggactccggccgcagtgtcgccgccatcacggacttcctgtgggacaagcgcacgggcctcgccgccagaacgatgccgcatcctcgaaggtaccactcctcagagcgaggcagccgggggagttaccgtgaacactatcggagccgaaagcataagcgacgaagaagtcgctcctggtcaagtagtagtgaccggacacgacggcgtcggcgagaggacagctaccatgtccgttctcgaagcagttatgatgatcgttcgtccgaccggagggtgtatgaccggcgatactgtggcagctacagacgcaacgattatagccgggatcggggagatgcctactatgacacagactatcggcattcctatgaatatcagcgggagaacaacagttaccgcaacccagcgcagcaacccggaggaaacacagacgggcggaagaggggccgcccggacatttaaccccctcatccttcgcagccccgccagccggaaagcccaaaatggcacgaggattacccctgagggcccccccctttttcccgggccggggacttgcatcacccgaaccccaccgaaatnnnnnnnnnnnnnnnnnnnnnnnnnnnnnnnnnnacccgcgccgcaacgcgggcccggaccgccgcacgcccttaccgtcccggcggtttaagaagggccgttccccgaaccgggcggcatttccgccggccagaataccctacgcgggcgccccgccggttgccgccgccgcgcccggggacggcctcgcctcccacagcaagcgcggcgctggcccc

SEQ ID NO: 258637 - DNA, 1136 bp, Homo Sapiens
cctgggtggcgaattcggcacgaggcaactacactgtgcggaccctgggcctgggagaggagtggcgagggggtgatgtggctcgaacagttggtggaggacagaaggtccggtggttaaagaaggaaatggagaaatacgctgaccgggaggatatgatcatcatgtttgtggatagctacgacgtgattctggccggcagccccacagagctgctgaagaagttcgtccagagtggcagccgcctgctcttctctgcagagagcttctgctggcccgagtgggggctggcggagcagtaccctgaggtgggcacggggaagcgcttcctcaattctggtggattcatcggttttgccaccaccatccaccaaatcgtgcgccagtggaagtacaaggatgatgacgacgaccagctgttctacacacggctctacctggacccaggactgagggagaaactcagccttaatctggatcataagtctcggatctttcagaacctcaacggggctttagatgaagtggttttaaagtttgatcggaaccgtgtgcgtatccggaacgtggcctacgacacgctccccattgtggtccatggaaacggtcccactaagctgcagctcaactacctgggaaactacgtccccaatggctggactcctgagggaggctgtggcttctgcaaccaggaccggagacactcccccggggggggcagcctcccccccggggtggttctgggccggggttttgtggaacagccctactcccgtttctgccccgccttcctgcagcgggctgctactccctggactatcccccccgaacagggtcaccctttttcctggaccaacaaccaagggtcttccatggagcccccacatcgccttgaatcctggcccgcagcctcccggaaaccttttctaaccttggaaaaccccctgggggcgccggaagaaagcttcttaagccccagggcgagaggccaggggacatggggcccaggggaccctggtgtcccccaaggacccccccaaaagggggaggttctttattttaagcccctgaaaacccccgaaccctttgtcctttcccccaaaccctgggggaaaaccccttgagggaaatccttc

SEQ ID NO: 258638 - DNA, 1378 bp, Homo Sapiens
  misc_feature (25)..(25): n is a, c, g, or t
  misc_feature (27)..(27): n is a, c, g, or t
  misc_feature (29)..(29): n is a, c, g, or t
  misc_feature (33)..(33): n is a, c, g, or t
  misc_feature (38)..(38): n is a, c, g, or t
  misc_feature (40)..(40): n is a, c, g, or t
  misc_feature (46)..(46): n is a, c, g, or t
  misc_feature (48)..(48): n is a, c, g, or t
  misc_feature (50)..(51): n is a, c, g, or t
  misc_feature (55)..(55): n is a, c, g, or t
  misc_feature (57)..(57): n is a, c, g, or t
  misc_feature (79)..(79): n is a, c, g, or t
  misc_feature (88)..(89): n is a, c, g, or t
  misc_feature (93)..(93): n is a, c, g, or t
  misc_feature (98)..(98): n is a, c, g, or t
  misc_feature (106)..(106): n is a, c, g, or t
  misc_feature (113)..(113): n is a, c, g, or t
  misc_feature (147)..(147): n is a, c, g, or t
  misc_feature (178)..(178): n is a, c, g, or t
  misc_feature (288)..(288): n is a, c, g, or t
  misc_feature (646)..(690): n is a, c, g, or t
  misc_feature (771)..(801): n is a, c, g, or t
  misc_feature (1049)..(1049): n is a, c, g, or t
  misc_feature (1247)..(1247): n is a, c, g, or t
  misc_feature (1291)..(1291): n is a, c, g, or t
  misc_feature (1312)..(1312): n is a, c, g, or t
  misc_feature (1321)..(1321): n is a, c, g, or t
  misc_feature (1333)..(1333): n is a, c, g, or t
  misc_feature (1353)..(1353): n is a, c, g, or t
  misc_feature (1363)..(1363): n is a, c, g, or t
ggaaacaaattccatggcccggggngntntaangtttntntcggcnangnngttnancctccactgatttccaattatncctcatttnnatcngaaantacttacntcgtagnaggaagtatattatataaccaaggtttcaggtancctcctgtcaccacctctactattcaggagncctaaaattgaaataagtactaaacagaaaccttaccatctgaagtcccttccattgttttctagttgcttcctcattcctttacccccaaactttctaagggctccccnactgcagtgcaaggtggccttgggcacagttttgcaaccaacctactcccctggaaagatggcttcctttctccaattagcctgaatgagctttagtaagcaattgagagaactgtgtttttccgacaaacggtcacatgtccatcgttatggcatgtgcagaaaaacagagttatccacacaagtcaggagcaaaacccaagtagatgcctctaggggcatatggccctcacatcacaagccagaacctaagctaagcattttttaaattgagtttgagactagcctgggcaacatagtgagaccccatctctatttaaaaaatgaacaaaattacctgggcatagtggtgtatacnnnnnnnnnnnnnnnnnnnnnnnnnnnnnnnnnnnnnnnnnnnnnagccccaaagatggtggctgcagtaagccaagatcacaccactggcactccagcctgggcaacagagtgtgaccctgtctnnnnnnnnnnnnnnnnnnnnnnnnnnnnnnntatatagcgacttgaataggaaaccatagtatttcattgttttaatttgcatttattttatttctagtgaaacttttatatacgtatcggtcatttctatttccttttttgagaactgccaaatgttgccctagtagccaaaaatatcaggttgctattctgccttttcagtttgatctgaaagaaataaaggcatttaagcaatggaaattagatttctgcatgtccttgggaagaatatataaatngaaaaaacaaaggagagctgaaacctgaaccttggggtttagcttaaggtcaaccaactgattatctagtcaggctataaaatgcaaacgtcatttcttcatttccctcacacctaatagggctctcaggtacatacttgtggaatcaggctggctatttgctgtggggtaggataggagggcaacccgtggctttcnggctccgagtataggaaacttccgttttctattgggggagagcngttggattttgtggaaaggcnggttgtttnccacataattgntccgttggtttacaaaaccnggggttccanggtggggccgtgggt

SEQ ID NO: 258639 - DNA, 673 bp, Homo Sapiens
  misc_feature (181)..(181): n is a, c, g, or t
  misc_feature (233)..(264): n is a, c, g, or t
  misc_feature (309)..(353): n is a, c, g, or t
  misc_feature (434)..(464): n is a, c, g, or t
  misc_feature (490)..(603): n is a, c, g, or t
actggaaagatggcttccttctccaattagcctgaatgagctttagtaagcaattgagagaactgtgtttttccgacaaacggtcacatgtccatcgttatggcatgtgcagaaaaacagagttatccacacaagtcaggagcaaaacccaagtagatgcctctaggggcatatggccctncacatcacaagccagaacctaagctaagcattttttaaattgagtttgagannnnnnnnnnnnnnnnnnnnnnnnnnnnnnnntatttaaaaaatgaacagaattacctgggcatagtggtgtatacnnnnnnnnnnnnnnnnnnnnnnnnnnnnnnnnnnnnnnnnnnnnnagccccaaagatggtggctgcagtaagccaagatcacaccactggcactccagcctgggcaacagagtgagaccctgtctnnnnnnnnnnnnnnnnnnnnnnnnnnnnnnntatgtagcgacttgaataggaaaccnnnnnnnnnnnnnnnnnnnnnnnnnnnnnnnnnnnnnnnnnnnnnnnnnnnnnnnnnnnnnnnnnnnnnnnnnnnnnnnnnnnnnnnnnnnnnnnnnnnnnnnnnnnnnnnnnnaaaaatatcaggttgctattctgccttttcagtttgatctgaaagaaataaaggcatttaagcaatggaa

SEQ ID NO: 258640 - DNA, 1346 bp, Homo Sapiens
cgacccccttccagacccgctcccgaaaccttgtcgaaggaccaaaggcgaccggtgcaggtgcacgacgccagctcccttctggggggccggggcctgggggttgccatggcccccagccacctgtcagtgcgggagatgagggaagatgagaagcccctggtgctggagatgctgaaggccggcgtgaaggacacggaaaaccgcgtggccctccatgccttgacacggccgccggccctgctcctcctggcggcggccagcagcggcctgcgctttgtcctggcttccttcgccctggccctcctcctgccggtgttcctggctgtggccgccgtgaagctgggcctgcgggcccgatggggctcgctgcctccgccgggtggcctggggggcccctgggtggccgtgcggggctccggtgacgtgtgtggggtcctggctctggcccctggcacaaatgcaggggacggggcccgggtcacccgcctgtctgtctctcgctggcaccgccgccggggcgtgggcaggaggctgctggccttcgcggaggcccgggctcgggcctgggctgggggcatgggggagccccgggcccggctcgtggtccccgtggctgtggccgcctggggggtgggagggatgctggagggctgtggctaccaggccgaggggggctggggctgcctgggctacacgctggtgagggaattcagcaaagacctgtgaagctacagactgacagccagggcaggggaggagggaggggcgccagcacctgatgatcgcctactgtctgcgggttcttttacctgctctccctcagtgagtcctcaaccaccctgggcccagaaacagaggcctgccgaggggaggagcctggcctctgtccacccgtcagcagtgtgaagtctgttgtgtttgagcttctcagagtggaatgactccttttccttcctggccctcgggggcctctcgaggtcagcctctccaacccctacctcagctcctgtctgcactgagaaacctccccgggtgatgtctgcaaagtctgtgctgtccgtgccccaggctgggagagctatctggggagggggagaggaggccgagcagaatacaccccagagttagggtttgcgactccgcctccctgggacctggattgggtcagatgcctgtccttggaggggacaaggttgactgcttaggaggcgcgacgcacagggctgccaggcctggcccctctctgggaaggttgagagctgagacgggcagccctggccccttcctccagatccgggctgggtttttttacaccgtttgggtaataaaagcctcgaaaccgc

SEQ ID NO: 258641 - DNA, 1747 bp, Homo Sapiens
  misc_feature (824)..(824): n is a, c, g, or t
  misc_feature (1028)..(1053): n is a, c, g, or t
ggaaataccacctccacaaacgttgagccaattcaggggctgccagtagaatcctaaagagtgatgtctccggttcatgtgaacaccatctgcagtccacaccccttgaggacaattcaggccataaggcagaccatgctcagcagaactgccccttcaccaccccagtcaccacccttagcctgattgggcaggcgatggctcatagccaggaaggctgcctccctcaggcttcccaaaaccaatcaagggcatacgcggctcagccacacttttgcactcatattcccgtatgcttccgcttaaatgtactcatgaaaaattttaagatggtttgctgtgactcatcccctgacccagacgggttacacagatctggcagtggacacaccctccaacacagcatgaaaagagcataggaaaacccaggtccagctaagccctacctcaaagtaatttggcctttggttcctcctctgaaagcaggtggatacaaactgtttggctataaaattgtgaatctatggaactgtagaataattaaagcttccaacactaaaccacaaaggcaagtagtgtctgtgcacactgatggggcaccacctgcaccaagccccagactccagtgcgctgggggcatcagacatctgttatagtcacaaggagcaagaagttctaggttccctcaccactccctcctacgctcctccagtcttcaaaaatgccttgaaataacccactttgggaccaattcttaatctgttgcaaacaatctgcttaaaatagccttaattaagatgtaagtgcaaaccattgctcttccnttcataaaaaggagaaggtaagattaccagaggttgtcatgactatgccagtaacagatctatcccagaattataccacttaaagcagactgttagaagccccctcagtgcagtgggcagcacgtcagtctcataatctcaaggtcctgagttaaagcagactgtataggaagatctatagaaacccgttactactaaaggggnnnnnnnnnnnnnnnnnnnnnnnnnnttagaagccagtttaccattagagagagttttgatttgagatataaagaacatattcctctccaaaactgagtttcctctgatacaaaagtatttgccttctggagaagatatggtttgcaccgtccaacaggtgtgctctgaaggcccccactgaaatatattgcatcatagatgaggggaaagacttggttaatttctcttatcaaaagctagtcttcaggacatcctgtccaacttggctcccaggggcccaagggttcttctcagagattgttcttagagacccccaaacctgcagcccaagcccaggagccacctgtgcatcttcgccacgtcgccaggctgttcaggagcatgcgtctcttcatagactggtctcctcacacactctgacggggatgttatagtgccgatcgtcctcagcaatgagcgttaccactggccagtccttgggtgggtcggtggggtagactgtgatgaattcttccgtgctgtacttggagagccggtacacctggatggtgtggcgcacagcataggcaagaaggaacatttcaacctgggaagaagagcaaacgggtattctgaggaagatcacactgaaaaacgtggcttaacaccatgttccatccattatcccacagtgcacagcaatggtgaagccacaacgttttttcctcctgctttgggcc

SEQ ID NO: 258642 - DNA, 1065 bp, Homo Sapiens
  misc_feature (129)..(185): n is a, c, g, or t
  misc_feature (916)..(916): n is a, c, g, or t
  misc_feature (954)..(954): n is a, c, g, or t
  misc_feature (1012)..(1012): n is a, c, g, or t
ctggtaccggtccggaattcccgggatgttcggagccggctgaaccccttcggccgcgagcgaccgcatgagtcgggggactatgccccagcccgaagcgtggccaggcgcgagctgcgccgagacgcnnnnnnnnnnnnnnnnnnnnnnnnnnnnnnnnnnnnnnnnnnnnnnnnnnnnnnnnnagccgcggcccgagatgcagttcccggccgagcatgaggaggacatgtaccgtgctgcagatgaaatagaaaaggagaaagaattgcttatacatgaaagaggggcatcagaaccgagattaagcgtactcctgaaatggatatcatggactactgcaaaaaagaatggagaggaaatacacagaaagcaacgtgtatgaaaatgggctatgaagaggtttctcagaagttcacctccatacggcgagtccgtggtgataattactgtgcactgagggccacgctgttccaggccatgagccaggctgtggggctgccgccctggctgcaggacccggagctcatgctgttaccagaaaaactcataagcaaatacaactggatcaagcaatggaaacttggactgaaatttgatgggaagaatgaggacctggttgataaaattaaagagtcccttactctgctgaggaagaagtgggcaggcttggctgaaatgagaactgctgaagcaagacagatagcttgtgatgaactattcacaaatgaggcggaggaatatagcctctatgaagctgtaaaatttctaatgctaaacagagccattgaactatataatgataaagagaaaggaaaggaagtaccatttttctctgtgcttctgtttgctcgggacacatcaaatgacccaggacagcttctgaggaaccacctcaaccaggtgggacacactnggtggtcttggaacaggttggaaatggttccttccttngcctaatgctggtgcgccacaccatccagggtgtaaccgggcttctccaagtacaacncggaagaattcatcacagtctaccccaccgacccacccaaggactgggccagt

SEQ ID NO: 258643 - DNA, 915 bp, Homo Sapiens
caagatactgaaatgtgatgaacatatccagaagcttggaagctgtattacagatccaggtaatcgagagacctcaggaaataccatgcacacagtgtttcaccgtgacaagaccaaagatacacatcctgaaagctgttgcagctctgaaaagggtgggcagccattgccttggtttgagcataggaaaaatgtaccacagtttgcagaacctacagaaacgttgtttggtcccgattccggaaaaggtgccaagagcttagttgaactccttgatgagtctgaatgtacttcagatgaggaaatctttatctcacaagatgaaatacagtcatttatggctaataaccagtctttctacagcaatagagaacaataccgacagcatctgaaggagaaatttaataaatactgccggttaaatgatcacaagaggcccatttgtagtggctggttgacaacggctggagcaaattaaataaataaaatagctctgtctttcaatgaaacactcacgatgactactgcgccttctctttcgaaaaactcttaatttagtgacttatggcaaaattttatcttaaatcaatgtgattctttcttgttttgggagacggtggaggtatcctcattagttctttcttcaggcttgtgtctttagttgcgtggctgcgcaggcctgccatatgatttaagccatctcttttcattaaatgtttctcttcctgtgagacttactaaagcaacttagtggcaaaaagtaatgttgtacttataattctgtacagaaatgacaatgagctgaatatatggttttacaaagtagacatccacttgcaaaatgtttggatgtaatgttaaagcgcaatgtgcaaaatttaaaataaagaatatttattaatacgcacagcaaaa

SEQ ID NO: 258644 - DNA, 720 bp, Homo Sapiens
  misc_feature (19)..(19): n is a, c, g, or t
  misc_feature (45)..(45): n is a, c, g, or t
ttaacataaaattaaagtntgtctcaaaaccaaacagccatcttntctgccatcactgagcaaattacaaatcgactcaatacaaatttccccacgggggctggcttgcaatactatttcacaaagcggacggtattcttcatcttcataaatggccagtctgatgcatagcatgtttagctacaaatgcctctgctgactctccctgcaacattttcatcgctcgccagtagatctgtccacagttctcaggtctaccaagggggtggttcaattcttctttcatataatccatccaaagatcagaatctgcggatccaaactctctcaaagctctctcataatattctcttatgttcgccatattgcaggattcttgctccttttcaaactgaatcattttcctgaaaaagtcaactgaaaatggtcggctctcctgtaaacttttaaacacagctctggcctttttgtagccaccacttcgataagcccaatccaggtacttattcttcagggttactgagtcggcacgctatgacagctaagagagctttcttaaagactgcctcagtgtcttcttggcttttggcaccttcactccactctgcccaggaaatccacaatggcagacaaaactggggtttcaggtgcaaaaaggctttcttcaaaaagcatggctatgtcagggctctttgactcgatcaacacctgcagcttcag

SEQ ID NO: 258645 - DNA, 909 bp, Homo Sapiens
  misc_feature (773)..(773): n is a, c, g, or t
caatcataaaaattttttaatttttaaaaagatttaacaagttaacataaaattaaagtgtggctacaaaaaggccagagctgtgtttaaaagtttacaggagagccgaccattttcagttgactttttcaggaaaatgattcagtttgaaaaggagcaagaatcctgcaatatggcgaacataagagaatattatgagagagctttgagagagttgggatccgcagattctgatcttgggatggattatatgaaagaagaattgaaccacccccttggtagacctgagaactgtggacagatctactggcgagcgatgaaaatgttgcacgggagagtcagcagaggcatttgtagctaaacatgctatgcatcagacgggccatttatgaagatgaagaatacagtcagcttggtgaaatagtattgcaagcaagccccgtgggcaaattggttattgagtccatctgtaattggctcagtgatggcagacaagatggctgtctggtttggagacacactttaattttatgttaactgtgttaaatctttttaaaacattaacaaaatttttatgattgagaaaacacaacaaacagagcgcgcgcgcatcacaaacgcgcacgcgtgtctcgcagaatctccgcgacatacagaacagacaacaggggggacgcttgtataaccccgaggaggggcgcaccacaacaattgcgacacaccaatgtttcctgaaaaagagggagcgaacacaatgggagggggagcgtatnataaaaaagaaggcgacgctgcgcgccgctctacaacacccactgcgaccgggagaaacaagacgccatgagtaggagtacggcaggggagacaccacacatgcggggggggaagacaacggtggggaccacataa

SEQ ID NO: 258646 - DNA, 1398 bp, Homo Sapiens
aaatagtagtactagaaagaagaaaatgagattttaggaacataaaactggctttagatatttgaaaatgagaggaattttatgtttacagatttcaaaaggctttgatattatatttcaatgcaaacagtaacttatcgtatgatttggttcattaataattggagtgatgttcagatttaaacatttcatagaatctcaaatatgacttcaggtaccacattttacagggaaattactgtgattcacccactaaatgatagtgagtaaataataactgggatctgtaactataacctaggagtcttgcgttctagtctaataactgttctcaaaaatatcattaactttttgggtataataaacagcaaactgcagaataaattgcacatactaaagagtaagcaacaaaacaaattgcacatgctgtgcagtatgcaaagccacagaattatcaatctgagaaacaactgaatacaaaataaaacacacagttgtgttttgattaaggctccttttaggcagtttgcttcagccaaggctgtgtaacttctttgagtttccatgtactttataaggctctgtttgaattcctttactctttcatctgatcccacaggtccacatttagacctctgtattaggctgtacaacccattggtatagtgatcaccatttttctccatcaacagatcctcaatacagtccattagttccttcacttggtcatcctgattgctcccttcagcacggttattaaaggcacagattcgcccaccacatgctgccaccagcttgcttagggctttgttatctgagtcgtgcatgtaatccatcagggagccaccattgaggtcttccttgtgggtaaagaggacaattgtgtgtcccatggcatcctctccaaagatctccttcaccctctgtgcagcctgctggtcctgtgaggtatagcggcccagctgagtcaccaggagcagcacatggggtcctggtgcagacagcaagtagcacctctgcacctctttgtacagagcttcacagtggtccttccaagaaaacatatctggtgtgtcaataatgaaaatctctctatttccccagcttccctgacttttgctgcaagtcttagtcaaggtctgggaacccagcttcgattcaaatgcttgcttcctgaggatgctgttccctgcagcacttttgccagttcctgttttgcccaccaggatgattctcagctcagatctgctggcacattggccctttgcatgtggtccccagtgactgtgttcattttggtccattggtgttcctgatttactgttcaaagaaacagttggctccctgttcagtcctgttgtcttatagctcagctccaagagaaaaagaaagtaaaac

SEQ ID NO: 258647 - DNA, 1252 bp, Homo Sapiens
cggctggaccggtccggaattttccggatgcgtcttggcccgggcagcagtggcggcagcgcccgagagagggaaccaacagtgtttgtaatgaagaacatcagactctgagctgtaacctgaattcttgtccaaaattcagcacactggcaacgagcacatcaaacagattgccacttgtcctgtcggcgtctttgagacacacttgcccatctaggaaagcacagtgcaggtatctgtgttctgccaccgtgtgccagcccggaccagctcacagacagccctgcctgtcttacttgggctgctcggcttcactgtctcagggcccctgaacctcccagagccctccgtgattgttggaatggtgagcttgtcggccacagactgctacattgtgcatgagatctacaatggggagaatgcccaagaccagtttgagtacgagctggagcaggccctggaagcccagtacaagtacattgtgattgagcccactcgcattggcgacgagacagcccgctggatcaccgtgggcaactgcctgcacaagacggccgtgctggcgggcaccgcctgcctcttcaccccgttggcgctgcccttagattattcccactacatttccctgcccgctggtgtgctgagcctggcctgctgcaccctctatgggatctcctggcagtttgacccttgctgcaagtaccaagtggagtacgacgcctataaactgtcgcgcctgcctctgcacacactcacctcctccaccccggtggtgctggtccggaaggacgacctgcacagaaagagactgcacaacacgatagcactggccgccctggtgtactgtgtaaagaagatttacgaactctatgccgtatgatttcagtagaacagggagcgaagcaaaacccacccggcccacaagagacaacagagtattcagatcgccacactctgtgaggcagcagagcctgggcaggtgtttggcttagtatttgttatttttaaaaaataacagatcacgggtgtacccagggtttttcagctcattacactaagatgtggatttccataacccaagaggggggtctgaggctgtggaagtccgactgggcagtggaatgctgatggaggcagacgctgccgagggggtgtggacgtgctttgggggaggtctttaagtctattgtttaactgtaccatccagagcccaccagaagctattgatcattaaaattatgagaaaatcaaa

SEQ ID NO: 258648 - DNA, 789 bp, Homo Sapiens
  misc_feature (736)..(736): n is a, c, g, or t
gggttatggaaatccacattcttagtgtaatgagctgaaaaccctgggaccacccgtgatctgtaatttttttgaaagttcctatcctaaggccaacaccctgccacaggctctgctgcctcacagattgtggcgatctggatacttctggtgtctcttgtgggccggtggttttgcttcgctcccatgttctactgaaatcatacggccatagagttcgtaaatcttgctttacacaagtacaccagggcggcccaggtgctatcgtgttgtgcaagtctcgttctggtgcaggtcgtccttccggaccagcaccaccggggtggaggaggtgagtgttgtgcagaggcaggcgcgacagtttataggcgtcgtactccacttggtacttgcagcaagggtcaaactgccaggagatcccatacagggtgcagcaagcccaggctcaacaacaccaccgggcagggaaatgtagtgggaataatctcaagggcagcgccaacggggtgaagaggcaggcaaggtgcccgccagcacggccgtcttgtgcaggcagttgcccacggtgatccagcgggctgtctcgtcgccaatgcgagtgggctcaatcacaatgtacttgtactgggcttccagggcctgctccagctcgtactcaaactggtcttgggcattctccccattgtagatctcatgcacaatgtagcagtctgtggccgacaagctcaccctctcntcgggcgtgccgccactgctgcccgggccaagacgcctccttccccaaggggc

SEQ ID NO: 258649 - DNA, 896 bp, Homo Sapiens
  misc_feature (7)..(8): n is a, c, g, or t
  misc_feature (44)..(44): n is a, c, g, or t
  misc_feature (61)..(61): n is a, c, g, or t
  misc_feature (173)..(173): n is a, c, g, or t
  misc_feature (178)..(178): n is a, c, g, or t
  misc_feature (197)..(197): n is a, c, g, or t
  misc_feature (203)..(203): n is a, c, g, or t
  misc_feature (205)..(205): n is a, c, g, or t
  misc_feature (221)..(221): n is a, c, g, or t
  misc_feature (226)..(249): n is a, c, g, or t
  misc_feature (252)..(253): n is a, c, g, or t
  misc_feature (265)..(265): n is a, c, g, or t
  misc_feature (270)..(270): n is a, c, g, or t
  misc_feature (272)..(272): n is a, c, g, or t
  misc_feature (275)..(275): n is a, c, g, or t
  misc_feature (305)..(305): n is a, c, g, or t
  misc_feature (309)..(309): n is a, c, g, or t
  misc_feature (313)..(313): n is a, c, g, or t
  misc_feature (317)..(318): n is a, c, g, or t
  misc_feature (322)..(322): n is a, c, g, or t
  misc_feature (324)..(401): n is a, c, g, or t
  misc_feature (421)..(445): n is a, c, g, or t
ggccagnnctctgcactagagaacacagacatgaataacgacantcgctccctgtccctanacgcgtgctttcagtctagtaggaaaaaccaggcaagtttcggctaattactgtcctgttggattaacgcgtcaaaatgttgagggggagttgtgtatcctagaccacctancccancctgggcgctttacgacanttcctnanctgagagcgagtggtnggttnnnnnnnnnnnnnnnnnnnnnnnnggnngaggaattaaangaaantnaanggtttcccaggccaggagcagcaggttganggcncagnggcnngaancnnnnnnnnnnnnnnnnnnnnnnnnnnnnnnnnnnnnnnnnnnnnnnnnnnnnnnnnnnnnnnnnnnnnnnnnnnnnnnccctccccaacccctgcgtnnnnnnnnnnnnnnnnnnnnnnnnnctggtcctgcctggctccggcgttccccccgtgtgtttccttgctgcttgctggcagcaagccatactggggggcctgggccttcagtataaaaaatatctcaacctaggggagggccttgttgactgtttgaacatggaaacccttggtccaacatgatttcccgtggtccactgaggaggtttaggccataatggggtaggtgcttagagaggattcaagcccagtgaacccttggcctcccagctctgaggagggcaacagagccagtattccctacccccacccacagaaatgtatagcagtctctgactgtggctttcacacaccatcacggttgctgttctgtaggtgctgctcagggaaggtgggaaggacagcaggctatttcttgacctcaaataggatacactccaaagacgggatggcctggcacagaggcccagccccc

SEQ ID NO: 258650 - DNA, 518 bp, Homo Sapiens
  misc_feature (370)..(370): n is a, c, g, or t
tggcagggaaggcttatgtctgcgctggtctaattgggttggggaaggccagatggggaggcggggcaagaaggtgtgacgctgcctcagccctctacccacctcccacaaaggtgcctcgggcctggctgcagtcctcctgggacccagggagaagcctgatggcaagtgcaccttctggggccctcacctccccctgagctccgggaggactccagcccagtgtgggaagaagccaagtctgggaatcttggttggtctggggcatttcagatcaacacactttattaaacaccaacagcgggccaaggctctgcactaagaacacagagatgaataagacactgtccctgtccctagagggcttacnagtctcgtaggaaaaaccaggcaagtttcggctaattactgtactgttggattaaggtaaaatgttgagggggagttggtatcctagaccacctaacccagcctggggctttagacagtgcatgaactgagagctagttgtaggttaa

SEQ ID NO: 258651 - DNA, 831 bp, Homo Sapiens
  misc_feature (172)..(172): n is a, c, g, or t
  misc_feature (338)..(338): n is a, c, g, or t
  misc_feature (342)..(342): n is a, c, g, or t
ctctcctgctgttaaaaacacattgttaagctgtggatttgtactcaataatgacttaggataaacatttattttcattcattgctttacatactagacatttttcttctctttgtaagtagattcaaattagatagtcaataaaacatcttgaaaatcccacaagccaatnatgtctctctagtctgaatggcttcattgtttctttctcagtattagaaattatagttacaatgaattgcatatgaagaaggcagacatttatttttaatagccaagtagttctgcaaatagttcttttaacaatttgacctctctccaaaacagagacacatatnagtngtgctcatccatgcactactaataatacatggcttattccaaagtttttagtcaacttttgggacttggggtgcattttctcacagaaagaatagtagttaggttccctaacactaccgctgatagctcacctgggaactgaatccacctaaccatgaatgtccttcacttgtaacgtggttcacaggttactaatcatagatcctgaccagcatttgtaacactgctctaactaggacacagcatgcagcagccacactcacaccctgggatgtctgtgtacctctgtccctaggtgtaggaaatggaagaaaaagattcagccaagtggggaggtgacagatgcacaattatgaaacctggttgtacatgttatgaaagtatacttaagtaagttagtttttattattaatgtgaaagcaaaaacttgtatgtttaacttatttacaatatcttgaccctaatttatgatctgctaaagtggtgatt

SEQ ID NO: 258652 - DNA, 564 bp, Homo Sapiens
ctgaagtctgctgactgtgtctcttgaacatacttaggatattctgcacattatggaaaaaggtaaattttagaagtttctgctctactaactgtagatatttatgactctgcgagttatctatttttataaccacctgtggtccattgttcattttaattcacatttcttatgaagtatggtaacagggagggagacacctagattagcagctcaatttgtactacttcagccaatctgtgaatgtaaaaactacactgttgccttgctaggatccaccctcctataatatggaacaaatatctgaatgaaatccaccctaggagacggagtcaaactaaacttgtggtttttcatttaacttttgactacagcatggccccatggcatccacaccaagagggtgttgtgatgaggtgccggtgtgcaaagggaactttagtttttccactggttcttatctgctagccttttacatacatgtgtactatatttgtttatagactgtaggtggatatataatttaaaagcttgatttaataaacatttaaccccctaaacttg

SEQ ID NO: 258653 - DNA, 456 bp, Homo Sapiens
  misc_feature (31)..(31): n is a, c, g, or t
accccatggttccattttaaattccacattnccctaaggaaagtatgggtaaaccaggggaggggaagacaccccctagattaagccagcctcaatttggtaccctaccttccagcccaatcctgtgaatgtaaaaaacctacacctgttgcccttgcctaggatcccacccctccctataatatggaacaaatatcctgaatgaaatcccacccctaggagacggagtcaaactaaacttgtggtttttcatttaacttttgactacagcatggccccatggcatcccacaccaagagggtgttgtgatgaggtgccggtgtgcaaagggaactttagtttttccactggttcttatctgctagccttttacatacatgtgtactatatttgtttatagactgtaggtggatatataatttaaaagcttgatttaataaacatttaacctaattt

SEQ ID NO: 258654 - DNA, 2562 bp, Homo Sapiens
ttcccgggatcccgaggccgctccccaaccgacaaccaagaccccgcagccacgcagccctggagccgaggccccccgacggcggaggcgcccgcgggtcccctacagccaaggtccctgagtgccagaggtggtggtgttgcttatcttctggaaccccatgcagccagatcccaggcctagcggggctggggcctgctgccgattcctgcccctgcagtcacagtgccctgagggggcaggggacgcggtgatgtacgcctccactgagtgcaaggcggaggtgacgccctcccagcatggcaaccgcaccttcagctacaccctggaggatcataccaagcaggcctttggcatcatgaacgagctgcggctcagccagcagctgtgtgacgtcacactgcaggtcaagtaccaggatgcaccggccgcccagttcatggcccacaaggtggtgctggcctcatccagccctgtcttcaaggccatgttcaccaacgggctgcgggagcagggcatggaggtggtgtccattgagggtatccaccccaaggtcatggagcgcctcattgaattcgcctacacggcctccatctccatgggcgagaagtgtgtcctccacgtcatgaacggtgctgtcatgtaccagatcgacagcgttgtccgtgcctgcagtgacttcctggtgcagcagctggaccccagcaatgccatcggcatcgccaacttcgctgagcagattggctgtgtggagttgcaccagcgtgcccgggagtacatctacatgcattttggggaggtggccaagcaagaggagttcttcaacctgtcccactgccaactggtgaccctcatcagccgggacgacctgaacgtgcgctgcgagtccgaggtcttccacgcctgcatcaactgggtcaagtacgactgcgaacagcgacggttctacgtccaggcgctgctgcgggccgtgcgctgccactcgttgacgccgaacttcctgcagatgcagctgcagaagtgcgagatcctgcagtccgactcccgctgcaaggactacctggtcaagatcttcgaggagctcaccctgcacaagcccacgcaggtgatgccctgccgggcgcccaaggtgggccgcctgatctacaccgcgggcggctacttccgacagtcgctcagctacctggaggcttacaaccccagtgacggcacctggctccggttggcggacctgcaggtgccgcggagcggcctggccggctgcgtggtgggcgggctgttgtacgccgtgggcggcaggaaaaactcgcccgacggcaacaccgactccagcgccctggactgttacaaccccatgaccaatcagtggtcgccctgcgcccccatgagcgtgccccgtaaccgcatcggggtgggggtcatcgatggccacatctatgccgtcggcggctcccacggctgcatccaccacaacagtgtggagaggtatgagccagagcgggatgagtggcacttggtggccccaatgctgacacgaaggatcggggtgggcgtggctgtcctcaatcgtctcctttatgccgtggggggctttgacgggacaaaccgccttaattcagctgagtgttactacccagagaggaacgagtggcgaatgatcacagcaatgaacaccatccgaagcggggcaggcgtctgcgtcctgcacaactgtatctatgctgctgggggctatgatggtcaggaccagctgaacagcgtggagcgctacgatgtggaaacagagacgtggactttcgtagcccccatgaagcaccggcgaagtgccctggggatcactgtccaccaggggagaatctacgtccttggaggctatgatggtcacacgttcctggacagtgtggagtgttacgacccagatacagacacctggagcgaggtgacccgaatgacatcgggccgggagtggggtgggcgtggctgtcaccatggagccctgccggaagcagattgaccagcagaactgtacctgttgaggcacttttgtttcttgggcaaaaatacagtccaatggggagtatcattgtttttgtacaaaaaccgggactaaaagaaaagacagcactgcaaataacccatcttccgggaagggaggccaggatgcctcagtgttaaaatgacatctcaaaagaagtccaaagcgggaatcatgtgcccctcagcggagccccgggagtgtccaagacagcctggctgggaaagggggtgtggaaagagcaggcttccaggagagaggcccccaaaccctctggccgggtaataggcctgggtcccactcacccatgccggcagctgtcaccatgtgatttattcttggatacctgggagggggccaatgggggcctcagggggaggccccctctggaaatgtggttcccagggatgggcctgtacatagaagccaccggatggcacttccccaccggatggacagttattttgttgataagtaaccctgtaattttccaaggaaaataaagaacagactaactagtgtctttc

SEQ ID NO: 258655 - DNA, 912 bp, Homo Sapiens
aggcagtactctaacggtttaaggtagcgaggcctgggtggcgccaggatgcaccggccgcccagttcatggcccacaaggtggtgctggcctcatccagccctgtcttcaaggccatgttcaccaacgggctgcgggagcagggcatggaggtggtgtccattgagggtatccaccccaaggtcatggagcgcctcattgaattcgcctacacggcctccatctccatgggcgagaagtgtgtcctccacgtcatgaacggtgctgtcatgtaccagatcgacagcgttgtccgtgcctgcagtgacttcctggtgcagcagctggaccccagcaatgccatcggcatcgccaacttcgctgagcagattggctgtgtggagttgcaccagcgtgcccgggagtacatctacatgcattttggggaggtggccaagcaagaggagttcttcaacctgtcccactgccaactggtgaccctcatcagccgggacgacctgaacgtgcgctgcgagtccgaggtcttccacgcctgcatcaactgggtcaagtacgactgcgaacagcgacggttctacgtccaggcgctgctgcgggcgtgcgctgccactcgttgacgccgaacttcctgcagatgcagctgcagaagtgcgagatcctgcagtccgactcccgctgcaaggactacctggtcaagatcttcgaggagctcaccctgcacaagcccacgcaggtgatgccctgccgggcgccccaaggtgggccgctgatctacagcgggagcggtacttccgacagtcgctcagtacctggaggttacaaccccgagtgacgggcacctggctccggtggcggacctgggttccgcgagccggctggccggctgcgtggtgggcggggtgtgtacgccct

SEQ ID NO: 258656 - DNA, 548 bp, Homo Sapiens
tacttatcacccaagactatcatccggtggggaagtgccatccggtggcttctatgtacaggcccatccctgggaaccacatttccagagggggcctccccctgaggcccccattggccccctcccaggtatccaagaataaatcacatggtgacagctgccggcatgggtgagtgggacccaggcctattacccggccagagggtttgggggcctctctcctggaagcctgctctttccacaccccctttcccagccaggctgtcttggacactcccggggctccgctgaggggcacatgattcccgctttggacttcttttgagatgtcattttaacactgaggcatcctggcctcccttcccggaagatgggttatttgcagtgctgtcttttcttttagtcccggtttttgtacaaaaacaatgatactccccattggactgtatttttgcccaagaaacaaaagtgcctcaacaggtacagttctgctggtcaatctgctcctcgtgccgaattcgccacccaggcctcgctaccttaggacc

SEQ ID NO: 258657 - DNA, 1086 bp, Homo Sapiens
  misc_feature (1018)..(1029): n is a, c, g, or t
ggcctgggtggcgcaggatgcaccggccgcccagttcatggcccacaaggtggtgctggcctcatccagccctgtcttcaaggccatgttcaccaacgggctgcgggagcagggcatggaggtggtgtccattgagggtatccaccccaaggtcatggagcgcctcattgaattcgcctacacggcctccatctccatgggcgagaagtgtgtcctccacgtcatgaacggtgctgtcatgtaccagatcgacagcgttgtccgtgcctgcagtgacttcctggtgcagcagctggaccccagcaatgccatcggcatcgccaacttcgctgagcagattggctgtgtggagttgcaccagcgtgcccgggagtacatctacatgcattttggggaggtggccaagcaagaggagttcttcaacctgtcccactgccaactggtgaccctcatcagccgggacgacctgaacgtgcgctgcgagtccgaggtcttccacgcctgcatcaactgggtcaagtacgactgcgaacagcgacggttctacgtccaggcgctgctgcgggccgtgcgctgccactcgttgacgccgaacttcctgcagatgcagctgcagaagtgcgagatcctgcagtccgactcccgctgcaaggactacctggtcaagatcttcgaggagctcaccctgcacaagcccacgcaggtgatgccctgccgggcgcccaaggtgggccgcctgatctacaccgcgggcggctacttccgacagtcgctcagctacctggaggcttacaaccccagtgacggcacctggctccggttggcggaactgcaagtgccgcggagcggcctgcccggcttgcatggggggccgggccttttttacccccgggggcggcaaggaacaactcgcccgacggcaaaaaccgattccaacggcccggactgtttacaaccccatgaccaatcagtgggccgcccggcgccccccataaacgtgcccccgaaaccccattcnnnnnnnnnnnnccattcagggacacatcttcttccgctcaacgataccctcgttcgtgtcatacccag

SEQ ID NO: 258658 - DNA, 987 bp, Homo Sapiens
ctgcggctcagccagcagctgtgtgacgtcacactgcaggtcaagtaccaggatgcaccggccgcccagttctggcccaaaggtggtgctggcctcatccagccctgtcttcaaggccatgttcaccaacgggctgcgggagcagggcatggaggtggtgtccattgagggtatccaccccaaggtcatggagcgcctcattgaattcgcctacacggcctccatctccatgggcgagaagtgtgtcctccacgtcatgaacggtgctgtcatgtaccagatcgacagcgttgtccgtgcctgcagtgacttcctggtgcagcagctggaccccagcaatgccatcggcatcgccaacttcgctgagcagattggctgtgtggagttgcaccagcgtgcccgggagtacatctacatgcattttggggaggtggccaagcaagaggagttcttcaacctgtcccactgccaactggtgaccctcatcagccgggacgacctgaacgtgcgctgcgagtccgaggtcttccacgcctgcatcaactgggtcaagtacgactgcgaacagcgacggttctacgtccaggcgctgctgcgggccgtgcgctgccactcgttgacgccgaacttcctgcagatgcagctgcagaagtgcgagatcctgcagtccgactcccgctgcaaggactacctggtcaagatcttcgaggagctcaccctgcacaagcccacgcaggtgatgccctgccgggcgcccaaaggtgggccgcctgatctacaccgcgggcggctacttccgacagtcgctcagctacctggaagcttacaaccccagtgacggcacctggctcccggttggcggaactgcagggtgccgcgggagcggcctggcccggctgccttggtggggccggcctttttgtaaccccttgggccggcaggaaacaactccccccgaagggaaaaacccgaattcaggcgcccttg

SEQ ID NO: 258659 - DNA, 993 bp, Homo Sapiens
gggctgggtggcgaattcggcacgaggaggtggtgctggcctcatccagccctgtcttcaggccatgttcaccaacgggctgcgggagcagggcatggaggtggtgtccattgagggtatccaccccaaggtcatggagcgcctcattgaattcgcctacacggcctccatctccatgggcgagaagtgtgtcctccacgtcatgaacggtgctgtcatgtaccagatcgacagcgttgtccgtgcctgcagtgacttcctggtgcagcagctggaccccagcaatgccatcggcatcgccaacttcgctgagcagattggctgtgtggagttgcaccagcgtgcccgggagtacatctacatgcattttggggaggtggccaagcaagaggagttcttcaacctgtcccactgccaactggtgaccctcatcagccgggacgacctgaacgtgcgctgcgagtccgaggtcttccacgcctgcatcaactgggtcaagtacgactgcgaacagcgacggttctacgtccaggcgctgctgcgggccgtgcgctgccactcgttgacgcccaacttcctgcagatgcagctgcagaagtgcgagatcctgcaatccgactcccccgcttgcaaggactacctgggtcaagatcttcgaggagctcaccctgcacaagcccacgcaagtggatgccccgtccggggcgccccagggtgggcccccctgatctaaccgtgggcggggtacttccgacagtcggctcagctacctgggaggcttaaaaccccagtgacgggaccttggcctccggttggcggacctgcatggggccgcgaaacggccctgcccggcttttttggggggccgggcctgtttttaacccccggggggggaagaaaaacctcccccccgagggaaaaacctaactttccgcggccctgtaatgttccaaccccatgtgtcccatcatcggttccccccttcgcccccct

SEQ ID NO: 258660 - DNA, 1155 bp, Homo Sapiens
  misc_feature (246)..(246): n is a, c, g, or t
  misc_feature (270)..(270): n is a, c, g, or t
  misc_feature (282)..(282): n is a, c, g, or t
  misc_feature (286)..(286): n is a, c, g, or t
  misc_feature (1067)..(1067): n is a, c, g, or t
  misc_feature (1084)..(1084): n is a, c, g, or t
  misc_feature (1141)..(1141): n is a, c, g, or t
gcagtggagatggtagcctccagccacccaggaaggtccagatgggggccaaggatgccaccccggtgccctgtggccgctgggcaaagatactggagaaggataagcggacccagcagatgcgtatgcagcggttgaaggcgaactgcagatgccattccagagcggggagttcaaggcgctgaccaggcgcctgcaggtggagccccggctcctgagcaagcagatggccgggtgcctggaggnctgcacgcgccaggcccccgagancccctgggaggngcanctggcccggctgctgcagggaggcccctgggaagctgagcctcgatgtggagcaggccccgtcggggcagcactcgcaggcccagctctcaggtcagcagcagaggctcctggccttcttcaagtgctgcctgctcactgaccagctgcccctcgcccaccacctgctggtcgtccaccacggccagcggcagaagcggaagctgctcacgctggacatgtacaacgccgtgatgcttggctgggcgcggcagggtgccttcaaggagctggtatatgtgttattcatggggaaggatgccggcttgaccccggacctgctgtcctatgcggctgccctccagtgcatggggaggcaggaccaggacgccgggaccatcgaaaggtgtctggaacagatgagccaggaggggctgaagctgcaggcactcttcaccgccgttctgctgtctgaggaggatcgggccactgttctgaaggccgtgcacaaggtgaagcccaccttcagcctcccgccgcagatgccgcccccggtcaacacctccaagctgctcagggacgtgtatgccaaggatgggcgtgtgtcctacccgaagctgcacctgcccttgaagaccctgcagtgcctctttgagaagcagctccacatggagctggccagcagggtgtgcgtggtgtccgtggagaagccacgttgccaagcaaggaggtcaagcacgcgccggagaccctgtagaccctgcaggaccaatgtgagaaagcactgtgccgggcgctgaggnagacaagaaccgcctanagcgcgaggtgtacgaggggccggtctcactttaccccttcctgtgcctgctgaacnagcgcaagtggtgc

SEQ ID NO: 258661 - DNA, 1937 bp, Homo Sapiens
  misc_feature (841)..(841): n is a, c, g, or t
  misc_feature (1615)..(1615): n is a, c, g, or t
ccgggatcatggagcccccggacgcaccggcccaggcgcgcggggccccgcggctgctgttgctcgcagtcctgctggcggcgcacccagatgcccaggcggaggtgcgcttgtctgtacccccgctggtggaggtgatgcgaggaaagtctgtcattctggactgcacccctacgggaacccacgaccattatatgctggaatggttccttaccgaccgctcgggagctcgcccccgcctagcctcggctgagatgcagggctctgagctccaggtcacaatgcacgacacccggggccgcagtcccccataccagctggactcccaggggcgcctggtgctggctgaggcccaggtgggcgacgagcgagactacgtgtgcgtggtgagggcaggggcggcaggcactgctgaggccactgcgcggctcaacgtgtttgcaaagccagaggccactgaggtctcccccaacaaagggacactgtctgtgatggaggactctgcccaggagatcgccacctgcaacagccggaacggaacccggcccccaagatcacgtggtatcgcaacgggcagcgcctgagaggtgcccgtagagatgaacccagagggctacatgaccagccgcacggtccgggaggcctcgggctgctctccctcaccagcaccctctacctgcggctccgcaaggatgaccgagacgccagcttccactgcgccgcccactacagcctgcccgagggccgccacggcgcctggacagccccaccttccacctcaccctgcactatcccacggagcacgtgcagttctgggtgggcagcccgtccaccccagcanggctgggtacgcgagggtgacactgtccagctgctctgccggggggacggcagccccagcccggagtatacgcttttccgccttcaggatgagcaggaggaagtgctgaatgtgaatctcgaggggaacttgaccctggagggagtgacccggggccagagcgggacctatggctgcagagtggaggattacgacgcggcagatgacgtgcagctctccaagacgctggagctgcgcgtggcctatctggaccccctggagctcagcgaggggaaggtgctttccttacctctaaacagcagtgcagtcgtgaactgctccgtgcacggcctgcccacccctgccctacgctggaccaaggactccactcccctgggcgatggccccatgctgtcgctcagttctatcaccttcgattccaatggcacctacgtatgtgaggcctccctgcccacagtcccggtcctcagccgcacccagaacttcacgctgctggtccaaggctcgccagagctaaagacagcggaaatagagcccaaggcagatggcagctggagggaagggagacgaagtcacactcatctgctctgcccgcggccatccagaccccaaactcagctggagccaattggggggcagccccgcagagcccaatccccggacggcagggttgggtgagcagctctctgaccccgaaagtgaccagcgccctgagccgcgatggcatctcctgtgaagcctccaacccccacgggaacaagcgccatgtcttcncacttcggcgccgtgagcccccagacctcccaggctggagtggccgtcatggccgtggccgtcagcgtgggcctcctgctcctcgtcgttgctgtcttctactgcgtgagacgcaaagggggcccctgctgccgccagcggcgggaagaagggggctccgccgccaggggagccagggctgaaccactcgggggtcggagcaaccagagcagaccggcctttctcatgggaggtggcctccggaaggagcccagggggtggcagccggggggctttcgggaaaaccagtggctgaacccaaaaaaacctccctaaaagggcg

SEQ ID NO: 258662 - DNA, 605 bp, Homo Sapiens
gggatctgggatgggagccagccccatgcctgtctgtgaccccacagtgggtgagagcccgtcacagtcctgggtgtggctgctctggaagaattaggaggcagccataataagagtcttcagagagatgatgggaggggccagtgaggacaggaacagagagtagatgtcctataataaaggggcttctgggaggtgcctgggcacagatgtctgttcagcaggtgtgtgggcctagaggagagagcagagcccagaaatgtcttttgcaggcccacgttctgacttgaagctttcgtgggcatgttgccattgggttttgcccttgcaaaggcttcctaggtctccagtggcccctcaggacccagggtcccagctgctgcttggggatgtgcactgctggccgccggccttgcagtctctctaccctggggaggaacagtggcttctcagagcctggggcatacagaagaaggcaggagttgatttttgtgttgggtttggggtttctttgtcctcaaggtactgttctgtttctctttacccctctgctttatttattgtaagcattcccacgttaaataaactttggctgttgtctacca

SEQ ID NO: 258663 - DNA, 1448 bp, Homo Sapiens
  misc_feature (66)..(77): n is a, c, g, or t
  misc_feature (1264)..(1272): n is a, c, g, or t
cagagctggaaggtctgtgcaagctggctcctgctggggaatcaataaaggaggcagagcaacgcnnnnnnnnnnnncgccgtggccagggcagggttctgccagggctctatcgccaatggagcaggggtccacctggggcctaggacgcctgcagatagccctctcttagccccaacggccgcgggcttcagcgctccccggctccctcgctctgcagggtcttcccggtaccggcaggccgcggcgggagctgctttcgctcttaaccttgcagatggaacagattaaaagggccaataaactgtttaccaatgattgtatatttctgaagaaaactttgaacatcccagttatatcagagaagcctttgttgtttaatggacttaactccattgattctccagaaaatgaaactgctgataacagtttttctcaggaagaggagccagtggtggccggggaagacctccctcctcccagtcctcaagaatctgatgttcagcctgtgcagcctgaggaagtgtcagccagagatttcctgcagagacttgacttgcagattaagttatcaacacaggcagccaagaagctaaaagaagagagcagagatgaagaaagtccctatgcaacttccctctatcacagttaggtgatttgggggcataactctaaccaaaattaagatatgtttggaccataaagaatccaacaactgaagattcaaaaacatcccttctggattcctatagtgtccatcttaaaatcataactaggtagttctacctgctgcagttgcactgaagtgattagttccctctggctttctataattttaagtctttattatggcatgatggcaaggttgtagcctaaagctcatcacttttgtaggtggtgttagtttttagactagcttttataaatactaattgacataaagcatcaaagattatttatatatttaggctaaaaataatgtttatctccttatgcaatcctgattatgtgaaaatatggttgctgtttaagtgatgctgaatttgctgtgtgtttataacttaagtgctatatatatatttcgatatgtcttacatattctctattaatataaagaaccaaattttgtctgctattttgtaaaaataaactacaaaagcctgaatgagaaaataaaactatgttttcaagacttgagtctcccttcttttttttcacaaactgagaaattaaattgcttttaaatttttcacaaacaaacaannnnnnnnncctaaaagttcattgagggggccagtacgcgtaccaggttttggaacaaggggccaaagaggaggggataaaaagaaggatgcggggaaacacgtggcggaaatgattggacttggaagacactctgggggaaatggcacccagaagtatcaggattataggtaatgacacatttg

SEQ ID NO: 258664 - DNA, 527 bp, Homo Sapiens
gataacaagaggtcagaacacatccaggctccttaagagaaagcctttctttaaccatttttgaaacccttcaaaggcagagacttgtccagcctaacctgcctgctgctcctagctcctgaggctcagggcccttggcttctgtccgctctgctcagggccctccagcgtggccactgctcagccatgctcctgctgctcgtcccagtgctcgaggtgatttttaccctgggaggaaccagagcccagtcggtgacccagcttggcagccacgtctctgtctctgaaggagccctggttctgctgaggtgcaactactcatcgtctgttccaccatatctcttctggtatgtgcaataccccaaccaaggactccagcttctcctgaagtacacatcagcggccaccctggttaaaggcatcaacggttttgaggctgaatttaagaagagtgaaacctccttccacctgacgaaaccctcagcccatatgagcgacgcggctgagtacttctgtgctgtgagtga

SEQ ID NO: 258665 - DNA, 1808 bp, Homo Sapiens
tccggaattcccgggatcgagttgtggctgaggaccccggcggcagacgcaggttcgggaccatgagctggattccttttaagattgggcagcccaagaaacagattgtgcccaaaacagtggagagagactttgaaagggagtatggaaaacttcagcagctggaagagcagacccggaggctgcagaaagacatgaagaagagcaccgacgcagacctggccatgtcaaaatctgccgtgaagatatccttggacttactctccaatcccctctgtgagcaagaccaggaccttctgaacatggtgacggccctggacacggccatgaagcggatggatgccttcaatcaggaaaaggtgaaccagatccagaagactgtgatcgagcccttaaaaaagttcggcagtgtcttcccgagcctcaacatggctgtgaagaggcgggaacaggccttgcaggactacaggaggctgcaggccaaggtggagaagtatgaggaaaaggagaagacggggccagtgctggccaagctccaccaggcacgagaggagctgcggcctgtgcgggaggactttgaagccaagaacaggcagctgctggaggagatgccgcgcttctacggcagccgcctcgactacttccagcccagctttgagtccctcatccgagctcaggttgtgtactactcggaaatgcacaagatctttggagacctgtcccatcagcttgaccagccaggccactccgatgagcagcgggagcgggagaacgaggccaaactcagtgagctccgggccctctccattgtggccgatgactgaatccccgtcactcttggaggactcctgtgacgtggtcagcctcattcatccttgcccttctcagggctagctgctcctctcacaggctggggacagaggtggccctggttcacttgccggccctttgcaatgaatgactcttcctgagcctggcaccaggagccctaggcaggccgccgtctccccactcacagccccagcaggtaagcagtgtagacaaacccttggggcttttttatttggagaaccgtccagcatgcatcctggcccacggcctgagcaagctgcagcccttctgaggccatgggcttcgttggctaagttgggggtcttagccttgcatgcgttgtgggcatcaaatctacctccaaaagacccatcctggggagccctctggcccctcgttgccttttcacttcaaaacctcttttttctgggagaggccctgaaccctgtgcgggagagctggtcctccagccctggcaggccctcagccagcttcccagcaagacaaagggcacccttgtggctttgggacctaagtggttggggttcccgaggtcactgaggactggtacctcgggaacgcaagctgtcagtggaactgtcccacaagaattcacaggtctcaaagcaggaacagtgggtttgtgtctcacctgagtatctggaattttattttttcaagtaaaattttcaatgaaacgtccacatagtattgtgctgtaacttaggcgagcagaggaaaccccttccttggcctgctgccctccacggagcagcagcaccctccagcaggcagcccagcatgccaggggtgtgtgcgcacctccccgccctggcccaccttctggagcgaactgcaccgtggtccagcagaggcgctgggtgggagggcacgcggcaagcctaggagagtaggaagagctgtggaggacacactctcagtttgtttttgactttggtttatttaaaaaacaagcc

SEQ ID NO: 258666 - DNA, 1439 bp, Homo Sapiens
  misc_feature (156)..(158): n is a, c, g, or t
  misc_feature (390)..(390): n is a, c, g, or t
  misc_feature (396)..(396): n is a, c, g, or t
  misc_feature (416)..(416): n is a, c, g, or t
  misc_feature (1212)..(1224): n is a, c, g, or t
ggattggcaatagctcccaaccctcacttcgtgagggccacgacaaacctgtttttaatggagctggaaagcctcattccagcacctcttcaccaagtgtcccaaagacttctgctagcaggactcagaaatctgctgttgagcacaaagccaaannntctctgtcccatcctagccattccaggcctgggcccatggtcaccccacacaataaggctaagagtccaggtgtcaggcagccaggcagcagctctagctcagcccctgggcagcccagcacaggggttgctcgacccacagttagttctggccctgtgcctaggcgccagaatggcagctccagctcaggacctgagcgatcaatcagtgggtccaagaagccaaccaatnactcanatccctctaggcggacagtnagtggtacatgtggccctggacaacctgcaagcagctcaggtggccctgggcgacccatcagtggttcagttagttctgcaagacccttgggcagctctcgtggccctggccggcctgtgagcagtccacatgaacttcgacgaccagtgagtggcttgggccccccggggcggtctgtcagtggccctgggagatccataagtggctcaattccagctggacggactgtcagtaattcagtcccaggaagaccagtgagcagcttgggacctgggcaaacagttagtagctcacgtcccactataaagcctaagtgcactgttgtctccgaaacaatttcttccaagaatatcattagccggtccagcaatggacagatgaatggaatgaagcctcccctatctggctacagagctgcccaaggtcctcaaaggcttcccttccctactggttacaaaaggcagcgagaatatgaagaggaacatgacgatgatgatgaatacgactctgaaatggaagattttattgaagatgaacgagagcctcaggaagaaatatccaagcacattagagaaatctttggttatgacccgaaaaaaatacaaagatgacagtgattatgccttacgttacatgggaaagtagttggaaagagcaccagaaggaagaagcaaagagcttaagactgggtatgccagagggaccttagaggaaatggagacgtgaacaaaaaagaaatgccaccgtcccaaggggccaaaaaaatctgaaccaggccccttagcctgcctgccnnnnnnnnnnnnnggcggaaaatttcctaacaagcctggcctcctcgcttggccaaaggaaattttccctgggccctttcccccacttgcaaagaaaagcccccccctttaacccttttctcacaaatttcactccctttgcgggtcaccctcccagggagaaaaaaggaaatcgccctaccccggcccacttttggcccgggccttggcccctcttttgaagacatt

SEQ ID NO: 258667 - DNA, 1281 bp, Homo Sapiens
  misc_feature (1154)..(1155): n is a, c, g, or t
  misc_feature (1169)..(1169): n is a, c, g, or t
  misc_feature (1177)..(1177): n is a, c, g, or t
  misc_feature (1252)..(1252): n is a, c, g, or t
gatggaaccagcggacagccgagcgagttagtgtcagccgagggccgaaaccggaaggcggtgctgtgccagcgttgcggctcccgggtgctgcagccagggaccgctctcttctctcgccgacagcttttccttccctccatgagaaagaagccagctctgtctgacggcagcaagcctgacggcgatctcctccaggaacactggctggttgaggacatgttcatttttgagaatgtgggcttcaccaaggacgtgggcaacatcaagtttctggtctgcgcagactgtgaaattggaccaattggctggcattgcctagatgacaagaacagtttctatgtggccttggaacgagtttcccatgagtaactgaggggaggggtaatcagctccatctccaaagataaacctactccccacaagaactggcctttaatgtggtataactgttccgctgccttcttgtctgtgctaatataaatactgagtaccagcatgtccatttgaacatgcagagggttaatcctgcttcctaaagcctcaagtacatgcctcctgcttagttcactttgtatcacatttcctaagctcccttttcccccagttttgggacactgtgcttacctccaaaaatctcatctcttccctggcattctccctaggctctgttttgcccaggggctcccgctttttcttgctctagaggagcagtattcaaccttttagctatgatgacacataacaaaagatgtttatgtactaatagttgaaatctgcctttttctcattcaagaaggcatacaaatatctgagagtgactttgttgtatggctacccttgtgatctacagtaatttattctttctaaaagtaaagcattttcaaaactcagtatttaaaccactaaccagaaacattactttggatgcatctctaataccatgtttgagcacctctgctctaggttgagaatgacattttattgtgaagatgggtgtggtccctcttcccttgaaatcttgtagtttctttttatattagctcctcactgctacagcctagaaggtgagaagcagattttaacccccatctggcagccattcaagggaaaacccagcccctggctgtttactcaggctctcttagaatgannagtggagggtgtangatatgangggttaggccttttgcacattatacaaaagtttataatttgccacatctgggacaagtaactttccttcctttgntcataggcaagaacttctttaatggaata

SEQ ID NO: 258668 - DNA, 1162 bp, Homo Sapiens
  misc_feature (5)..(5): n is a, c, g, or t
  misc_feature (7)..(7): n is a, c, g, or t
  misc_feature (10)..(10): n is a, c, g, or t
  misc_feature (17)..(17): n is a, c, g, or t
  misc_feature (22)..(22): n is a, c, g, or t
  misc_feature (26)..(26): n is a, c, g, or t
  misc_feature (54)..(54): n is a, c, g, or t
  misc_feature (56)..(56): n is a, c, g, or t
  misc_feature (64)..(64): n is a, c, g, or t
  misc_feature (77)..(77): n is a, c, g, or t
  misc_feature (99)..(99): n is a, c, g, or t
  misc_feature (125)..(125): n is a, c, g, or t
  misc_feature (139)..(139): n is a, c, g, or t
cagcncnctnctgaatnaacantccntgagtcaggctcaccactgacttcatcncntcttgcangaggtcccgcgangcagctgaagccctcagctatnctcggcacttccagccctttgctcgntgcaccagcggganatccaggtgatgatgggcagccttggtgttactgcggctgggcttggagaagtcaccctactgccacctgctggacagcagccactgggcagagatctgtgagacctttaccccgggacgcctgttccctgctggggctttctgtggagtcccccccttagcgtcagctttgcctctggctgtgtggcgctgcctgtgttgatgaacatcaaggctgtgattgagcagcggcagtgcactggggtctggaatcacaaggacgagttaccgattgagattgaactaggcatgaagtgctggtaccactccgtgttcgcttgccccatcctccgccagcagacgtcagattccaaccctcccatttagctcatctgtggccatgttatctcccgagatgcactcaataagctcattaatggaggaaagctgaagtgtccctactgtcccatggagcagaacccggcagatgggaaacgcatcatattctgattcctacctggaaggaattttgttgaaaggggttttcacctgtgagccttggtctgtctcggtagggtggtcaacttcagtggactgtggttggtttcagagcgcctggctgaggagttccactgaggggagcactggagcagccctttggcagaggctgaggagggagatggaccagcccacgcctggcacctggctccatggcataaggaaagggagatgctggcctctgtgctcctgctgtcttttcctgtttctgtttgcgtttgacttagtagcaaccgacagagtggcaagggatttggtcttcagcagtagacatccttccacccctgccctcagccaagtctcttgctgccatgccaatgctatgtccacccttgcccctcggcccaagagtgtccagcggtggcccacctcttcctcccactacagcctcaacagtatgtaccatctcccactgtaaatagtcccagttagaacggaatgccgttgttttataactttgaacaaatgtatttactgcccttctca

SEQ ID NO: 258669 - DNA, 893 bp, Homo Sapiens
  misc_feature (17)..(17): n is a, c, g, or t
  misc_feature (35)..(35): n is a, c, g, or t
  misc_feature (137)..(137): n is a, c, g, or t
  misc_feature (168)..(168): n is a, c, g, or t
  misc_feature (344)..(344): n is a, c, g, or t
tgaacttgactgcagcnaagaaaagggctactgtnctgcactttatgaaggcttgcggtgctgtccacatgaacgacacatacatgtttgctgtgaacagacttcattgcacatcttttgggtcgtgctgagccagngttcgcaggagggcgaagagaaaggcatgcnaagacaatagatatagctcaagaagaagttctgacctgcttgggaattcatctttatgaaagactgcatcgaatctggcagaagctacgggcagaagagcagacatggcagatgcttttctatcttggtgttgatgctttacgcaagagttttgagatgaccgtggaaaaagtacngggtattagcagattggaacaactttgtgaggaattttcagaagaggaacgagtaagagaactcaagcaagaaaagaaacgccaaaaaaggaagaatagacgaaaaaataagtgtgtgtgtgatattcctactcccttaaaaaaagaagatgaaaaggaagtaagccaagagaaggaaacagacttcatagaaaatagcagctgcaaagcctgtggcagcactgaagatggtaatacttgtgtagaagtaattgttaccaatgaaaatacatcatgtacctgtcctagcagtggcaatcttttggggtcccctaaaataaagaaaggcttatctccacactgtaatggtagtgattgtggatattcatctagcatggaagggagtgaaacaggttctcgggagggttcggatgttgcctgcactgaaggcatttgtaatcatgatgaacacggtgatgactcttgtgttcatcactgtgaagacaaagaggatgatggtgatagttgtgttgaatgttgggcaaattctgaagagaacgacacaaaagg

SEQ ID NO: 258670 - DNA, 994 bp, Homo Sapiens
gagggaggaattatgggtggggcccaacaaggtaaccctgtttccctgcccaatccttttctttgggcaatcagaacggttttcgatgtctgctgaagatgaagcctcgataggcggagtgtcttcaatgatgtttggcaatgttcttgcagtcgttcaatgcccgctgtggggccggcctatgtgttgcaggctgaggcccttgttcatgtctagaagtccattcttgggccagcagcccatggcgaagctgtaagcctttttcagattaatccactgcttgaagtaatccgccactggcaagcccaagtactggcactggcctgggagcatgacttttaagtcccagtctccacaggtgacaaaaattgacttgacgtttggatctaagaggccttccttcgccatccattcatcgaccctctccagcacttgctgcaggcttggctgaccatccaccatggcttgaataatcccggtgagctctgtacagaatggggtaagctgtggatggactacaggctggacatacatgtgaaaggtagactcaatctccatggtccggccatttagctttaggatggggaactcgatgatttcctgaggatgaatctgtggcttgtcgcacgtggcctcaaagtccagcactaaaaagtagtgatacctctggggagggaaggacaccattgccgccatggatgcgccaaagccgtgggccgccagctttctggtggatatggagcagaactccggaacaccacagggagaaaataagtgggagcccagcacttttcttgctcttgaaagtaaatacgaagaaaatcgagctgctccagtctgtaaaggtgctagcattgaacatccagaagcatctaaaactctccttacttcgaagatgccaagaccggcagctggggatgctgaaggttctgtgagagctggaaagccccaatgctcccctcgtgccgaattcgccacccaggcctcgctacct

SEQ ID NO: 258671 - DNA, 1108 bp, Homo Sapiens
  misc_feature (1064)..(1064): n is a, c, g, or t
gcctcgtttccccgactttattcagtggcacgttcacagcggggatgggggtagacacaaggtggggcctgatctgtcctggagccctgggggcaccacacaccatgcactatggatgggagggggcacaggaggggcttggtggccccacagaagcctgtgtaccagggaggaggcggtgagtgcctgggtccccctagcccaggcccgcaatgggaggggctgatactgggctgagattgaggggtggggatggggggcacaaagtgtctgctccagaagggccaagtggccaagcccttgcaagggcacaagcccacgccaagggcatgagcccacagggcagctggggacactctggacacagagctatgccactctccctcttcccctctggtgagggagaggaggattctgggctgggccaaacagctaccctgtcctgccccatcctgtcctcggccaatcagaacggcttcgatgtctgcttgaagatgaagcctcgataggcgagtgtcttcatgatgttggcaatgttcttgcagtcgtcaatgccgctgtggggccggcctatgtgttgcaggctgaggcccttgttcatgtctagaagtccattcttgggccagcagcccatggcgaagctgtaagcctttttcagattaatccactgcttgaagtaatccgccactggcaagcccaagtactggcactggcctgggagcatgacttttaagtcccagtctccacaggtgacaaaaattgacttgacgtttggatctaagaggccttccttcgccatccattcatcgaccctctccagcacttgctgcaggcttggctgaccatccaccatggcttgaataatcccggtgagctctgtacagaatggggtaagctgtggatggactacaggctggacatacatgtgaaaggtagactcaatctccatggtccggccatttagctttaggatggggaactcgatgatttcctgaggatgaatctgtagcttgtcgcacgtggcctcaaagtcccctcgtgccgaattcgccacccaggcgtcntgccgtccgggtgagggggggcgccgtcgccgtccgcgccgccg

SEQ ID NO: 258672 - DNA, 1022 bp, Homo Sapiens
  misc_feature (1)..(1): n is a, c, g, or t
  misc_feature (3)..(3): n is a, c, g, or t
  misc_feature (11)..(12): n is a, c, g, or t
  misc_feature (17)..(17): n is a, c, g, or t
  misc_feature (19)..(20): n is a, c, g, or t
  misc_feature (27)..(28): n is a, c, g, or t
  misc_feature (30)..(31): n is a, c, g, or t
  misc_feature (33)..(33): n is a, c, g, or t
  misc_feature (37)..(37): n is a, c, g, or t
  misc_feature (62)..(62): n is a, c, g, or t
  misc_feature (69)..(69): n is a, c, g, or t
  misc_feature (79)..(79): n is a, c, g, or t
  misc_feature (83)..(83): n is a, c, g, or t
  misc_feature (86)..(86): n is a, c, g, or t
  misc_feature (112)..(112): n is a, c, g, or t
  misc_feature (145)..(145): n is a, c, g, or t
  misc_feature (162)..(162): n is a, c, g, or t
  misc_feature (165)..(168): n is a, c, g, or t
  misc_feature (173)..(174): n is a, c, g, or t
  misc_feature (177)..(177): n is a, c, g, or t
  misc_feature (183)..(183): n is a, c, g, or t
  misc_feature (189)..(189): n is a, c, g, or t
  misc_feature (191)..(191): n is a, c, g, or t
  misc_feature (198)..(198): n is a, c, g, or t
  misc_feature (274)..(274): n is a, c, g, or t
  misc_feature (568)..(570): n is a, c, g, or t
ntnatggttcnnaaatngnngaacagnnanngngcancagttcccattaactcttcctgacnaataggntggcaccgtngctnccnctttgggaagaggaaagggtgtgtgnacatggctaacaatcttcaaatacccaaattgngatagcataaataaagnatnnnncttannccncagtanattatnanttaaccncttaggtaatgcctatctcttggtctattaaggaaagaagcaatcagtagagaattcaggatagttttgtttaaantcttgcagattacatgtttttacagtggcctgctattgaggaaaggtattcttctatacaactcgttttaacctttgagaacattgacagaaattatgcaatggtttgttgagaaacggacttgatggtgctgctaaatcagttggctcccaaagtggcctactcaagaggccctaagactggtagaaattaaaaggatttcaaaaactttctatccctttcttaaacctaccagcaaactaggattgtgatagcaatgaatggtatgatgaagaaagtttgaccaaatttgtnnntttgttgttgttgttgttttgaatttgaaatcattcttattccctttaagaatgtttatgtatgagtgtgaagatgctagcgaacctatgctcagatattcatcgtaagtctcccttcacctgttacagagtttcagatcggtcactgatagtatgtatttctttagtaagaatgtgttaaaattacaatgatcttttaaaaagatgatgcagttctgtatttattgtgctgtgtctggtcctaagtggagccaattaaacaagtttcatatgtatttttccagtgttgaatctcacacactgtactttgaaaatttccttccatcctgaataacgaatagaagaggccatatatattgcctccttatccttgagatttcactacctttatgttaaaagttgtgtataattgttaaaatctgtgaaagaataaaaagtggatttaaatacgt

SEQ ID NO: 258673 - DNA, 1095 bp, Homo Sapiens
  misc_feature (1067)..(1067): n is a, c, g, or t
ggagcgaggcctgggtggcgaattcggcacgagggtggctctcacgcagacttacagcagcggagtggtgcctgattcctggtacagctgctcccactgagtctccagggatctgtggttcaggaccccctgcaaccccctcccagacccctgtactggtgggaggagaggacctagaggaaaggtgctgggcagataagcagccgagggaggccctgggtttagcttatcagtcttctgggccctcctgccccaggaagggcagcgaggaccatggtgttgcccctgtcatcgttatcgtcctggccatgagcttgcaggactgggagggccggagtcagccaggcagacggcagcacagcatttgcctgttggcaggtggccttggtggcttcccaaaggcaatcgctccacgcagaacaaaactcacttttttggggggtgaagcaccttggttcatttgtttagttcgttaattccagcagtctgtttctaagggaaacatggctgcagcccgtcctgcccctccacccacccaccaggtgcccagtgttcccaagggccccgaatcccaaccttattcaggcgtcagcatctctgcaccccaaatgcctgttagggaggatagtgaaaggctgagccctcctgggctcatcaaaagccagcagtgagagaacacccccatctctctgaggtgaccttgtagggcagtccgtgctgtctggctggcctgggttgaggtgggcagggaccaaggcctggcgcctgggcctcgctggccttgctctgcgtgctgacttcatcctgatagtaccttgattttcctactgggacttccccttctggcgacttcctcaccaactttaaaattccgaattgagagcagtttcctaagttacctcaaatcctattcagaagaaggttcttccctggaagttgggagggcggaaaacaagtttagtcacagaagactactccatgtttgagcttctgtttcaagggaagtgagtaactgccggaggagccctgcccctctgcagtgtgtggtgttgccctgatacttttcnagattgaggtgttacttacatgtaataa

SEQ ID NO: 258674 - DNA, 1818 bp, Homo Sapiens
  misc_feature (1236)..(1280): n is a, c, g, or t
cagactgtaaaaatatcagatattgtaattaagagctccaaacaagtcttgcagtttcaaaggtagaaacccacccagccagttcagctgcttggacttcaaagccctccgcctagccatctcagccaggctcaggttccttctcccacccatcaggccaagcaggacttgtcaaacatacacattcaagttcctagcacacagtaggtgctaagtgggaattgattataaacttgaattcttccatcaacaaatatccacctctcctgtccagcttgcctcagatcttcaggttctctcttctctgaggcagctaagcttctacatccttcatgaagtttcctttacttctcgacagaagacagttccctttaggcctatcatctctaaatgcaactggctttccattttccacttactcaacactccacaaagtacacttgctacatggtatttattcaatgactgtatatttagtcaccacctcaatcactgctaagctctcttcatgtctatctgtaccacagtttcccatcttagactgtgacgtcagctggcaagggctggctgttggccgattcatcatgactgacatggtgtgtcacaaagagctccaagtaaatgctgtgaaggaagaggatgaggatggagatgaggatcctgagaagggcccagactggctgcccaacccatggacctgaggcctgagtaaggcctgggagctgctttcccctctgcccaggaactctgtccaggggcgattctaaggcacagtggtgaaggacatgattggtcccccaagtgtggtcctcaggtctcatggcagccactcgcctgggaacagtgcaacaagcattccatttagaagatcttccagaacacacacaagaagcattgtctaatgaaaatggagacaaggtctttcttggaagagagtgcccaagtagatactctctgccccaagactaaccaggtcccttttaaggtccctgagaacagcagcctgggagcaaccaagcctttcaaaggctgacaaggcacagagtggatgaatggaacgaacgatacatgaaaaaaaacactttggctgataaaacctccaacctgaggcagggacagtgtcgctcgctgacatgcagaaacatgaatgtagcagagatgatgaatgatgagaaatgcttcgcatttcccacactgccgatatcccaagccctgtgctaccaccctctccccgannnnnnnnnnnnnnnnnnnnnnnnnnnnnnnnnnnnnnnnnnnnngagcatctgcagaataagtcagaggttgacacccagagcctgacgtcaggataggactcttggcactccgcactgaaacaccgtgattagtcctgactagacagcaaaagtaacgccagcctaagcttgaaatgaagggtccatcttgtgaaaagttaggctgcgcccaagacagccaggtctgggaagtctttcacttctcctacttcgctgaaaggctgtccaccttggttgaatgtcagcttgtaccgtaagcggataggttctttgtgtggattgtcaagcagcagcatctgagatatcacagctggaggcatcaaaggactgaatgcaggaagcttggagctggatgccggctgcagcttcactctcattgactttggcacagccacttgaaacatgatatcccagacaggctggggagccgtgctcatcatggtcaagagcagcacctgtacctctgggtgcccaggggctcccgtctcctcgtgccgaattcgccacccaggcctcgctaccatacgccgtggatactgtc

SEQ ID NO: 258675 - DNA, 853 bp, Homo Sapiens
  misc_feature (4)..(4): n is a, c, g, or t
  misc_feature (6)..(6): n is a, c, g, or t
  misc_feature (14)..(14): n is a, c, g, or t
  misc_feature (456)..(456): n is a, c, g, or t
  misc_feature (458)..(458): n is a, c, g, or t
  misc_feature (461)..(462): n is a, c, g, or t
  misc_feature (468)..(468): n is a, c, g, or t
  misc_feature (470)..(470): n is a, c, g, or t
  misc_feature (476)..(476): n is a, c, g, or t
  misc_feature (483)..(484): n is a, c, g, or t
  misc_feature (486)..(486): n is a, c, g, or t
  misc_feature (501)..(501): n is a, c, g, or t
  misc_feature (506)..(506): n is a, c, g, or t
  misc_feature (535)..(535): n is a, c, g, or t
  misc_feature (542)..(542): n is a, c, g, or t
  misc_feature (553)..(553): n is a, c, g, or t
  misc_feature (563)..(563): n is a, c, g, or t
  misc_feature (565)..(566): n is a, c, g, or t
  misc_feature (576)..(576): n is a, c, g, or t
  misc_feature (586)..(586): n is a, c, g, or t
  misc_feature (602)..(602): n is a, c, g, or t
  misc_feature (611)..(611): n is a, c, g, or t
  misc_feature (625)..(625): n is a, c, g, or t
  misc_feature (628)..(628): n is a, c, g, or t
  misc_feature (658)..(658): n is a, c, g, or t
  misc_feature (669)..(669): n is a, c, g, or t
  misc_feature (674)..(674): n is a, c, g, or t
  misc_feature (677)..(677): n is a, c, g, or t
  misc_feature (680)..(681): n is a, c, g, or t
  misc_feature (684)..(685): n is a, c, g, or t
  misc_feature (687)..(687): n is a, c, g, or t
  misc_feature (706)..(706): n is a, c, g, or t
  misc_feature (708)..(708): n is a, c, g, or t
  misc_feature (710)..(710): n is a, c, g, or t
  misc_feature (713)..(713): n is a, c, g, or t
  misc_feature (715)..(715): n is a, c, g, or t
  misc_feature (733)..(733): n is a, c, g, or t
  misc_feature (736)..(736): n is a, c, g, or t
  misc_feature (743)..(743): n is a, c, g, or t
  misc_feature (745)..(745): n is a, c, g, or t
  misc_feature (755)..(755): n is a, c, g, or t
  misc_feature (765)..(765): n is a, c, g, or t
  misc_feature (768)..(768): n is a, c, g, or t
  misc_feature (772)..(772): n is a, c, g, or t
  misc_feature (783)..(783): n is a, c, g, or t
  misc_feature (785)..(785): n is a, c, g, or t
  misc_feature (791)..(791): n is a, c, g, or t
  misc_feature (795)..(795): n is a, c, g, or t
  misc_feature (827)..(827): n is a, c, g, or t
  misc_feature (833)..(834): n is a, c, g, or t
  misc_feature (839)..(839): n is a, c, g, or t
  misc_feature (842)..(842): n is a, c, g, or t
  misc_feature (848)..(848): n is a, c, g, or t
tcancnggaataanatccatttaaaaaaaacatagcatcagtatcagtacacagttaatgaattggcttaaacaagattaaccacatgacaggtccacttatctgcaggagcttttcacattaagccattggagcaaaaataaaatatgtttaaacatgtacagtaggatagttatatggaaaaactagagagtttccattaggggcatgattttcatcaaacagtttatggtattttgcatgaaaggaactgcagtgtcagctgcaaacaaaataaaagccatctgtaaggccataaaattgaactataataactaaattcacattttaaaaaaaggtaaagtgaaataagttctattagtttcttggcacaagaaatgcaattgcatatggcacacgcatttcaagaaatgaagtaaaatctgaaaatatccctagaataattgtctgccaatncnccnntctgtncntttcantcatttnncnttccctcagagtgancatgncagccatttattttattagtctaaaaggntgacttnttctactctanaattgtgctngnntttgagattnttttagcatntcctgtgcgtgtgggngcctctatntcagggggtttggntgngggggggttcctttccacccaacccctgtntccccccttgnatctnacnacnnaanncnattgtctcttctgtttaanananaananttctgagaaacctgattnctnaaatgantncttaaaattnataataattnacnacantaatgaaatgnantttatnaaantagagaactaaatttgttacggaacctccgcnctgaanntgacnagngtgtcngcata

SEQ ID NO: 258676 - DNA, 2039 bp, Homo Sapiens
  misc_feature (1438)..(1461): n is a, c, g, or t
  misc_feature (1851)..(1878): n is a, c, g, or t
gggttccccggcgtgtactcggactcctggccgctcgaggtggtccccaaggatcggcggctggaaagcacccggtagcggccctcctgccggacctcccgagccgaggcgcggagattacggcggacacgctgctggctgtcccgtgacgggcgcagaacttcccgcagcagaggctggactggttcctcctggcagcacacagtggccaccaagtgcaagacattattgtccgccgctctctccaaaccctccgacgtcttctgtgccactatggaggccgccaggaccgctgtactccgggtgaagcggaagcgcagtgcggagccggcggaggctcttgtgctcgcttgtaaacgcctccggagcgacgcggtcgagtcagcggcacagaagacgtcggagggtttggagagagcggcggagaataatgtcttccacttggtggccactgtgtgctcccaggaggaaccagtccagcctctcctgcgggaagttctgcgcccgtcacgggacagccagcagcgtgtccgccgtaatctccgcgcctcggctcgggaggtccggcaggagggccgctaccgggtgctttccagccgccgatccttggggaccaccgcgagcggccaggagtccgagtacacgccggggaacccagaagccgccgggaactcgggctttcagttgttagaccttgtccacgaggagggagaacctgaagccgcctctgcaggctcctgcaaaacatctgacccagatgtgatcctctgcaattctgtagagttgatccgtgagcgattgactgtgtctgaggatggaccaggagtcaggcgccaggaagaacaaaaacacgatgactatgtgtatgacatttactacttggagacggccactccaggctggattgagaacatcctctccgtgcagccctacagccaagaatgggagctggtgaatgatgatcaagaaccagaggacatttacgacgatgaagatgacgagaacagtgagaataactggcgcaatgagtacccagaggaggagagcagtgatggagatgaggattccagaggctctgctgactacaacagcctgagtgaggaggaaagaggcagcagcagacagcggatgtggagcaagtaccctctggatgtgcagaaggagttcggctatgacagcccccacgacctggattcagactgatggtcttgtgatgtccatgaggttctgccacatgcccttgagggctctgagtccagagttaactgccctgctgacatcctgttaggtttcctagcttaacatgtggaaggaaaagcatatcaagcatatcgggcggcaccatcccaccacagtgaaaacttatgttaggggagtgagtcttttccacttacagtaggacccctttgcctcaatcaaaagtgaccctacagtttgnnnnnnnnnnnnnnnnnnnnnnnnggaaggtttctttagctttagcttcttggcccaggaatttttcctggcattcaggttctgtgctgaaaccacaagggagggggaggttcccatttcattagcagtaagcttctgctgtgccataccaccaggctgcctgcctctaggaaaaccctgttccttttgatagaatctaaaaggggtaccagtgggtcccttgtagcaatacagactggatagtaatggccattagggcagaaagtagtctgagcagtgggagattttagttaacagctatttctgcttccaaactctgataacggttgtgaaattactgactgacttcctttggcagtggggccaagaaacaatatatatgaatgtgatacatgtgtttagtaaaatctagcnnnnnnnnnnnnnnnnnnnnnnnnnnnnacatgtcgggcggccccggcccccaaaaagttttccaaaacctttcgttttggcggcgggggccccaggagaggaaaggggaaacgtgggcataacctggtttccctagggaaaaccctgggggcatgaacataggggcttggggattcctcccccacaat

SEQ ID NO: 258677 - DNA, 1082 bp, Homo Sapiens
  misc_feature (14)..(14): n is a, c, g, or t
  misc_feature (20)..(20): n is a, c, g, or t
  misc_feature (26)..(26): n is a, c, g, or t
  misc_feature (31)..(31): n is a, c, g, or t
  misc_feature (50)..(50): n is a, c, g, or t
  misc_feature (55)..(55): n is a, c, g, or t
  misc_feature (77)..(77): n is a, c, g, or t
  misc_feature (81)..(82): n is a, c, g, or t
  misc_feature (100)..(100): n is a, c, g, or t
  misc_feature (120)..(120): n is a, c, g, or t
  misc_feature (130)..(130): n is a, c, g, or t
  misc_feature (137)..(137): n is a, c, g, or t
cagaagaacacagnctttantctggntctgntttgcatttgttcataccncgggnaagcgacctgtgtgattcgacntgtnnttactcacccagatggcngtcccaccgggtatcttcancccctccttnacagtcntcggcaggaagggttcctcacagatgacttggtgagccaagaggagaatggtcagcaacagaagtacttgggggtgtgccggctcccagggccagggcggcggcaccggcgcctggacatcatcgtggtgccctatagcgagtttgcctgtgccctgctctacttcaccggctctgcacacttcaaccgctccatgcgagccctggccaaaaccaagggcatgagtctgtcagaacatgccctcagcactgctgtggtccggaacacccatggctgcaaggtggggcctggccgagtgctgcccactcccactgagaaggatgtcttcaggctcttaggcctcccctaccgagaacctgctgagcgggactggtgacccatggctgggggtgctgaggagagccgagttggactggctacccctcctggccacccagtactccctccagcctcagctggctgaacctcgccgctccaaccaccagcttcctcagcgagcagggcccagggctctgggcctgaagcaagagccagcccggctcccagtgtctgcccggctcccagtgtctgcccagccctctcccagacaggagcaggctgccaccccttctacctcaccactgcccctcgaagaattttgcaaatggccccttgccccattttaagcaggagcaggtggctggtttgaagccccaggtatcccccttccctgctatgggaaaggccaagctgctgggtggggacagaagctgcaggggagagggaagcagccgtgctgtcaacatcatccggcacctctggggtaggagaacagccattccacatgtgttccctctatccgtcctgcttcctgggcagctggtggtgctgggaatggggtgccccagccttggtgaggacagtgttggggacccaggggcccagtaaagtgcatttgacattgaa

SEQ ID NO: 258678 - DNA, 1092 bp, Homo Sapiens
  misc_feature (993)..(994): n is a, c, g, or t
  misc_feature (1018)..(1019): n is a, c, g, or t
  misc_feature (1037)..(1037): n is a, c, g, or t
  misc_feature (1048)..(1048): n is a, c, g, or t
  misc_feature (1050)..(1050): n is a, c, g, or t
  misc_feature (1057)..(1058): n is a, c, g, or t
  misc_feature (1060)..(1060): n is a, c, g, or t
  misc_feature (1078)..(1078): n is a, c, g, or t
  misc_feature (1080)..(1080): n is a, c, g, or t
cggccccgggagcggagagcgaggggaggcggagacggtaggaaggtctgaggagcagcttcagtccccgccgagccgccaccgcagtcgaggacggtcggactcccgcggcgggaggagcctgttcccctgagggtatttgaagtataccatacaactgttttgaaaatccagcgtggacaatggctactcaagctgatttgatggagttggacatggccatggaaccagacagaaaagcggctgttagtcactggcagcaacagtcttacctggactctggaatccattctggtgccactaccacagctccttctctgagtggtaaaggcaatcctgaggaagaggatgtggatacctcccaagtcctgtatgagtgggaacagggattttctcagtccttcactcaagaacaagtagctgatattgatggacagtatgcaatgactcgagctcagagggtacgagctgctatgttccctgagacattagatgagggcatgcagatcccatctacacagtttgatgctgctcatcccactaatgtccagcgtttggctgaaccatcacagatgctgaaacatgcagttgtaaacttgattaactatcaagatgatgcagaacttgccacacgtgcaatccctgaactgacaaaactgctaaatgacgaggaccaggtggtggttaataaggctgcagttatggtccatcagctttctaaaaaggaagcttccagacacgctatcatgcgttctcctcagatggtgtctgctattgtacgtaccatgcagaatacaaatgatgtagaaacagctcgttgtaccgctgggaccttgcataacctttcccatcatcgtgagggcttactggccatctttaagtctggaggcattcctgccctggtgaaaatgcttggttcaccagtggattctgtgttgttttatgccattacaactctccacaaccttttattacatcaagaaggagctaaannggagtgcgttagctggtgggctgnnaaaatggtgcttgctcanaaaacaatgtnantcttggnntncgacgatgcctcaatttngntttggaccagaa

SEQ ID NO: 258679 - DNA, 329 bp, Homo Sapiens
  misc_feature (148)..(157): n is a, c, g, or t
atgattttcttaatcttcagacactcactattttcatgaacagttaccctctgtccccacaaccaaagacaactcatggcctcctttggcccttgtgtaacattgcaaacctgtggctttgcaaaatgtacccaggtcacaaggggannnnnnnnnnagcaatgatatccctgtctgggtcactttttaagcttgtaaccgcccccccagacttataatcttaaatgtattttcctttgtttaagctgctgcttcctctgtttcattggattgtgccagttatcagtggctcttgggttcaaagtaataaagaattccaaaactgaaaa

SEQ ID NO: 258680 - DNA, 1376 bp, Homo Sapiens
  misc_feature (34)..(34): n is a, c, g, or t
  misc_feature (57)..(57): n is a, c, g, or t
  misc_feature (75)..(119): n is a, c, g, or t
  misc_feature (446)..(489): n is a, c, g, or t
  misc_feature (514)..(514): n is a, c, g, or t
  misc_feature (561)..(561): n is a, c, g, or t
  misc_feature (642)..(642): n is a, c, g, or t
  misc_feature (660)..(660): n is a, c, g, or t
  misc_feature (667)..(667): n is a, c, g, or t
  misc_feature (673)..(673): n is a, c, g, or t
  misc_feature (832)..(832): n is a, c, g, or t
  misc_feature (837)..(837): n is a, c, g, or t
  misc_feature (841)..(841): n is a, c, g, or t
  misc_feature (846)..(846): n is a, c, g, or t
  misc_feature (849)..(849): n is a, c, g, or t
  misc_feature (854)..(859): n is a, c, g, or t
  misc_feature (867)..(869): n is a, c, g, or t
  misc_feature (899)..(899): n is a, c, g, or t
  misc_feature (937)..(937): n is a, c, g, or t
  misc_feature (1280)..(1333): n is a, c, g, or t
tcactgatattctcatggttcacatttgccaacnccgctcctctccttacagtagtnaaatgtgcaatctcactnnnnnnnnnnnnnnnnnnnnnnnnnnnnnnnnnnnnnnnnnnnnncgttggcacttcacgtggacagggtgggcagcctgtcctgcgtgaaagaggtgtgggttgagtgggcggccagggaaggggagttggcaggggagggccccacagtcttttttctctggtggttggtgattctccattcagattccttcctggctgcccagggtgggggaaccatgcagctcagggcaggggaggaagagaaggaaaaagcagcaggccgcccaggggtaggggtggagggtgaatggcagggcaaggggggtacaggggtggctcctggggtaaggcacaaccctgtctttggctctcctggtgaggagtttcctnnnnnnnnnnnnnnnnnnnnnnnnnnnnnnnnnnnnnnnnnnnngccggacccacacacagtcctgggngccagggggcacctcctaggggtccctgaaacaagtgggctctgccncccaagccaatgccacaggggctcgaggagggacacccgaggaaaaggcagacaggggcaggcaggggcctacccaggacnagggggtgggggtgagangaccccnggcccnggagctggcccccccaccccaactaaggcctggaagtgggggagcacctgcttcctttcaggggtctggctggagccccggtctgcccctcggcctccgtcaggcccagccgcttgccaagtgaccagggcattgtgctttggggtaaacgctggggtngggtngcancccangangcggnnnnnnaggagggnnnactaaggtgcttgtgctttagctgggggtntcaatatcccccactcaggccggctgggggctaaggtntcaggccccggccaggaagacagtgccaagaccccagccagaccctggcactcatgactgacccccgcaacaagcagatgttaagagggacccccagtgggccggcggggctgctggtcccatcggggggatggtctccaaatcagattacaagggtccagtaggggctggcccccaccccatctcctaaaatccccctgcccctggagagacccctgggagcagtgggtaggtgggggttggggaggcagatgagaggcagggaggacgagggccagaaacacaaacaaggatgtggatgtggatggtgaaatgacaccctgcatagggggatggggagttnnnnnnnnnnnnnnnnnnnnnnnnnnnnnnnnnnnnnnnnnnnnnnnnnnnnnnacccactctgggcgagaacaaaaagagaggaatggtaaaagag

SEQ ID NO: 258681 - DNA, 446 bp, Homo Sapiens
cccccaacaaccagcccagcctcttaccggtgggtattgtggggcagggccaggccagctgcataaatcgccagcagtgtcagcaccacagcctcagcatctgccactgggaagtgctgggtggcaacgtgttggcccagcactggcaggacatagagggccagtcccatggcctgtgagatcagcagaggtgccacgagcgaggccagccccacaccctgcagggcacacaggctcttggagatggaccctggggccaggggatccccaaagaccaccaccatcccaccagctgaggctaagttgcaacactaaacaccagtcagaccccagaagcccattccaacaacagaagggggtgccatcacctgtgatgggggaaggggtacactggggccaggggcacccccgggctcctcaaggcccattccagcctcatgcagctg

SEQ ID NO: 258682 - DNA, 2087 bp, Homo Sapiens
atgcgcgccgtcgcgagcgtctctgggaccggaagtgcgggcgagacgggtccccgggtctgacaggagcagcctgtgggcaccgcggcggtagttggaggcgggagagggtccgtagccgcgccgccctgccccgccatgggcctcctgtcggacccggttcgccggcgcgcgctcgcccgcctagtgctgcgcctcaacgcgccgttgtgcgtgctgagctacgtggcgggcatcgcctggttcttggcgctggttttcccgccgctgacccagcgcacttacatgtcggagaacgccatgggctccaccatggtggaggagcagtttgcgggcggagaccgtgcccgggcttttgcccgggacttcgccgcccaccgcaagaagtcgggggctctgccagtggcctggcttgaacggacgatgcggtcagtagggctggaggtctacacgcagagtttctcccggaaactgcccttcccagatgagacccacgagcgctatatggtgtcgggcaccaacgtgtacggcatcctgcgggccccgcgtgctgccagcaccgagtcgcttgtgctcaccgtgccctgtggctctgactctaccaacagccaggctgtggggctgctgctggcactggctgcccacttccgggggcagatttattgggccaaagatatcgtcttcctggtaacagaacatgaccttctgggcactgaggcttggcttgaagcctaccacgatgtcaatgtcactggcatgcagtcgtctcccctgcagggccgagctggggccattcaggcagccgtggccctggagctgagcagtgatgtggtcaccagcctcgatgtggccgtggaggggcttaacgggcagctgcccaaccttgacctgctcaatctcttccagaccttctgccagaaagggggcctgttgtgcacgcttcagggcaagctgcagcccgaggactggacatcattggatggaccgctgcagggcctgcagacactgctgctcatggttctgcggcaggcctccggccgcccccacggctcccatggcctcttcctgcgctaccgtgtggaggccctaaccctgcgtggcatcaatagcttccgccagtacaagtatgacctggtggcagtgggcaaggctttggagggcatgttccgcaagctcaaccacctcctggagcgcctgcaccagtccttcttcctctacttgctccccggcctctcccgcttcgtctccatcggcctctacatgcccgctgtcggcttcttgctcctggtccttggtctcaaggctctggaactgtggatgcagctgcatgaggctggaatgggccttgaggagcccgggggtgcccctggccccagtgtaccccttcccccatcacagggtgtggggctggcctcgctcgtggcacctctgctgatctcacaggccatgggactggccctctatgtcctgccagtgctgggccaacacgttgccacccagcacttcccagtggcagaggctgaggctgtggtgctgacactgctggcgatttatgcagctggcctggccctgccccacaatacccaccgggtggtaagcacacaggccccagacaggggctggatggcactgaagctggtagccctgatctacctagcactgcagctgggctgcatcgccctcaccaacttctcactgggcttcctgctggccaccaccatggtgcccactgctgcgcttgccaagcctcatgggccccggaccctctatgctgccctgctggtgctgaccagcccggcagccacgctccttggcagcctgttcctgtggcgggagctgcaggaggcgccactgtcactggccgagggctggcagctcttcctggcagcgctagcccagggtgtgctggagcaccaacactacggcgccctgctcttcccactgctgtccctgggcctctacccctgctggctgcttttctggaatgtgctcttctggaagtgagatctgcctgtccgggctgggacagagactccccaaggaccccattctgcctccttctggggaaataaatgagtgtctgtttc

SEQ ID NO: 258683 - DNA, 934 bp, Homo Sapiens
  misc_feature (5)..(5): n is a, c, g, or t
  misc_feature (8)..(8): n is a, c, g, or t
  misc_feature (11)..(11): n is a, c, g, or t
  misc_feature (16)..(16): n is a, c, g, or t
  misc_feature (18)..(18): n is a, c, g, or t
  misc_feature (20)..(20): n is a, c, g, or t
  misc_feature (22)..(22): n is a, c, g, or t
  misc_feature (25)..(25): n is a, c, g, or t
  misc_feature (29)..(29): n is a, c, g, or t
  misc_feature (33)..(33): n is a, c, g, or t
  misc_feature (40)..(41): n is a, c, g, or t
  misc_feature (44)..(44): n is a, c, g, or t
  misc_feature (47)..(47): n is a, c, g, or t
  misc_feature (49)..(50): n is a, c, g, or t
  misc_feature (57)..(57): n is a, c, g, or t
  misc_feature (80)..(80): n is a, c, g, or t
  misc_feature (82)..(82): n is a, c, g, or t
  misc_feature (84)..(84): n is a, c, g, or t
  misc_feature (90)..(90): n is a, c, g, or t
  misc_feature (93)..(93): n is a, c, g, or t
  misc_feature (95)..(95): n is a, c, g, or t
  misc_feature (123)..(123): n is a, c, g, or t
  misc_feature (125)..(125): n is a, c, g, or t
  misc_feature (128)..(129): n is a, c, g, or t
  misc_feature (139)..(139): n is a, c, g, or t
  misc_feature (141)..(145): n is a, c, g, or t
  misc_feature (149)..(150): n is a, c, g, or t
  misc_feature (160)..(160): n is a, c, g, or t
  misc_feature (163)..(163): n is a, c, g, or t
  misc_feature (177)..(178): n is a, c, g, or t
  misc_feature (183)..(184): n is a, c, g, or t
  misc_feature (189)..(189): n is a, c, g, or t
  misc_feature (198)..(198): n is a, c, g, or t
  misc_feature (206)..(206): n is a, c, g, or t
  misc_feature (211)..(211): n is a, c, g, or t
  misc_feature (222)..(222): n is a, c, g, or t
  misc_feature (235)..(235): n is a, c, g, or t
  misc_feature (241)..(241): n is a, c, g, or t
  misc_feature (252)..(252): n is a, c, g, or t
  misc_feature (256)..(256): n is a, c, g, or t
  misc_feature (262)..(262): n is a, c, g, or t
  misc_feature (265)..(265): n is a, c, g, or t
  misc_feature (274)..(274): n is a, c, g, or t
  misc_feature (276)..(277): n is a, c, g, or t
  misc_feature (294)..(294): n is a, c, g, or t
  misc_feature (299)..(299): n is a, c, g, or t
  misc_feature (302)..(303): n is a, c, g, or t
  misc_feature (306)..(307): n is a, c, g, or t
  misc_feature (314)..(314): n is a, c, g, or t
  misc_feature (337)..(337): n is a, c, g, or t
  misc_feature (343)..(343): n is a, c, g, or t
  misc_feature (345)..(345): n is a, c, g, or t
  misc_feature (352)..(352): n is a, c, g, or t
  misc_feature (360)..(360): n is a, c, g, or t
  misc_feature (363)..(363): n is a, c, g, or t
  misc_feature (375)..(375): n is a, c, g, or t
  misc_feature (381)..(381): n is a, c, g, or t
  misc_feature (385)..(385): n is a, c, g, or t
  misc_feature (395)..(395): n is a, c, g, or t
  misc_feature (401)..(401): n is a, c, g, or t
  misc_feature (403)..(403): n is a, c, g, or t
  misc_feature (454)..(454): n is a, c, g, or t
  misc_feature (475)..(475): n is a, c, g, or t
  misc_feature (914)..(914): n is a, c, g, or t
caaancgnatngagcnancntnttntatngtanccccganntcnacncnntttaacngcgcggccggaacccggagaagncnanagggtnggntntgcccacctggaacgggccagctcgganancgnntcccccgccngnnnnnaaanntgggccgttnagntctgaagggggccnntctcnnccgcngctcggtcnctgttgcnggagngggccccgggngcgcgttcccctntggcgntgtccggtggntggngcgcantgncccgcgtgntnnaagtggttgtcatgggnttaangannggnntcggcgngagccccgccgctgacaaggctnggcgcnantggggcntggaattngcnaaaggacggatntaaaanaggnaagtggtccntggacntnttttgcatccattttttaaacggccgtgtcagaggctccaccctgttgtgnacttggtatggaggcaaaggnttagaggctggaccagccattgttgggcaagaactgactctccaagggttttgttcttggctttggacacctgagaaccccctcctcccctcccccaatacaaggtttttgacatgagtgaactcctgcttagttcctcttgtggggctgcaattgcggtgctttgcccctcccccactgtgagtgaggggccaagggatctcctgaaacctgtctccccagcggctctgtttcctccttccttccttggcctctgtcctttgctgacttcctcttccttacccagcagaactcaccctggggtcggggcagtggggaggggcctatccactgctcttcctagtccttggcagctggcctagctgggcagactataggagggactggttaggagtctgcattgctttgacttccctctccttggttaataaacacaaangcttgtttctcattttaaaa

SEQ ID NO: 258684 - DNA, 1292 bp, Homo Sapiens
  misc_feature (5)..(5): n is a, c, g, or t
  misc_feature (43)..(43): n is a, c, g, or t
  misc_feature (362)..(362): n is a, c, g, or t
  misc_feature (436)..(436): n is a, c, g, or t
  misc_feature (1148)..(1148): n is a, c, g, or t
aaacntctcttataaatatgcattacaatgtccgacaacacangccaagggctgtaaaattaaggttaaatcaagactgaatttcccgcacggaccagcaggaaagccagttacctaaaagagcctaatccccaaatccgctgaaggtgcagggcggcctcagtcccggggcatcttgaactggtccttctccctgcgcacggcccgcatggtggtcaccgggtccgtctcacctgcgtgctgctgcaccgtcttctccctgcggaggccagcaccgggctgcaggctgtgccgagccacgcccaccggaggagccagggccactcactctcatgaaggggttgtaggtaaactcctctgcnagggtggatggcactgtgggctccccgatgctgtacttctccttggcccaggccagcttctcccggatggcgcnattgccgggctccacgtggcgtgcaaacttgaggttgttgatggtgtactcgtggccacagtagactcttgtgtccggggggagccggcccaagacctccagcagagctttacacatctcatccgcagtcccttcatagaacttcccgcagccagccacaaacaaggtgtcacctgtgaacacggcagggggctccgagcctccgggcttgctcacgaagtaacaaatgtgtcctgaagtgtggcacgggtcgccaggcacttgacgttcagagaccccacctgcagtgtggacaggtgagtgatcttgtgagtcagggccccgatacggtcgtcacccccgtacaccttcagtcccgactccagcttgaccagtttctcattcccgccagcatggtcccagtggtggtgggtggtgagcactgtggtcagtttcaccccgtgctttctcgccgcgtccacgaccttctggggctgcaccggatccacaatggcagcctccttggtctcatcatcaatgaccaggtacatgtagttgtcggtcagggcaggcagcacctctaccttcatggtgccctcgtccacggtcaggttcttccgcaaatctgtgtggcagaaaactcccagcagggctggacttgttttctccgcgagccccgactgccacgggccgggagacgggcctgggagcggcggcggcggcggcccgagantgcgccgggagagctgtgccgcgagcctccgcctcttttttggcaccgcacagtggatccctggaggccgagcgccacgccgcccgggtacccggcagatcgcgaggtggaacgggccgtcgctgcgggggacagcgttccgag

SEQ ID NO: 258685 - DNA, 405 bp, Homo Sapiens
tttatgggaataaatacttgttaaacttctcttataaatatgcattaaaacgtcctgataacacaagccaaggcctgtaaaattaaggttaaatcaagacttgaatttcccgcacggaccagcaggaaagccagttacctaaaagagccttaatccccaaatcctgctgaaggtgcaggggcggcctcaggtcccggggcatcttgaacttggtccttctccctgcgcacggcccgcatggtggtcaccgggtccgtctcacctgcgtgctgctgcaccgtctttctccctcactctcatgaaggggttgtaggtaaactcctctgccagggtggatggcactgtgggctccccgatgctgtacttctccttggcccaggcagacttctcccggatggcggcatt

SEQ ID NO: 258686 - DNA, 1411 bp, Homo Sapiens
cccagaatacttttattaaaataaactgagcaaggccaggcggctcaaaatgatccacacaagggggttcaaagataatccaacgatggagacaggagacagggtgggagggaagcgggtcacgaatgcacaggaaacagcgggactgtgggaggacaccctgcagcctcgggccctccagctgggctgacaggtcaggctctgggctttggaggcagtgagggtcaattcggggctccatggggcgtcctgtccctgtgtgccttctgcgtgtgcttgcagaacagaccatagagcacccgcagtgtgctcttggcatccttgttcacgatatcttcagggctgacagggcagctgagcaggccctcgtccttcagcagctccagcgccagggtgacgttgtgcagcatttctgcaggagagttgggagtgaggtagaattcctttaagtgcaggaagaagccttcaagttgtccaatcagcaagagtaagatgaccccatctgcaaactgggtgtccagattctgcacagacaggcccaggcggtccagcttctggttgacaaagttcacgatggcctctttcactgcgttcactttctccggagccagcttaaataattcatcaaagacgtcctttggaggctcgtccttgtctgtgctgtattcagtgagctgttccaccaacttctctgacttcagaccacttttggtgctctcgatagtgatgacctccacctgggcgttggttgggagggagaggtcgggctggaagcgcttggccagggccacaaggaggtgcagggtagacaacaggtccttgttgaagatgctctccacgctccacttggcctgccactcctccagctgcagactccggttcacggcctccagcaccactgtgagcttgtgcttctggcttgtggctgtcagggtgatgtcctctgcttccagcttgagcgccgccagcctctggaataggtggtgtaggatgagcccgtcgaacatgtcctcctccaggctgcggaccacaatgtgctcggggagaagagtggcattgatccactccatcaacaccttctgcagttcttcaaatttggggtccttccgggaagtgggtggcaggtatttcttctttcctccttttgagagctcctcctccgctgggggctccacccccttggggagctgcagcaggtcgtacaagaactccggctccatcgcctcccaagcccaaccgctttccacgcaggaaaacaaaggcctactgagtgcaaagggtggtccctggattccgaatggaagcaagttccgggttcttctggggtcttcggggaccaggccgggaggcaggagccccgctgctcacttcctccaggcccgctcagccggcaggagcttcctcctctctg

SEQ ID NO: 258687 - DNA, 1702 bp, Homo Sapiens
  misc_feature (71)..(71): n is a, c, g, or t
accacaaaaaggtctggattgggttaaggtgaaaaaacgtcccataatcatggggttgggccaggcgactnaagtccagggtgctgggctggatggtaatgggagcaggtaatgtggcatatccctaaaaagaaggacccctgagcccctgaagggctgggccaaggccagggggcaaggacaggattatatccttcacctctggggcctccgggggtagtaaagaagagttcaccttgagggacacatctccattagcatggccttccccttctggcctggggacaattgattcctctgatttgtgtagttctgaacaaatgactagaggtcctgtgtttttccctccatcatgaaggcaaggttcaaagaaagggcgaagggggccagagaaattgtgggtgaaagtaaagatgtgggacttgttggtcacattgtagaaagagatgactcctgcttcatagtccaggaaaatccccacacaccgtggaggctctttaaggcggaaggaggtctgcggggatgtgagagcttcatactcattcccacgactctgtcgcagaagccagtgtccattggcaggtgaggcagtaaccttccccttcctgctcactgactcactacatactccaagaatccatttggtcttgtctcccacatacacctcccagtagtggcagccagtcgtgaagtactcagagcctaggatgctgacaacgaaatcaaatctctgggggttgtcaggtacaggctgccgtctgtctccaagccttacacatctttggtcctcagaaaggatgaatttggaatgtgctgtgtctgggtccagggtcactgccacaaaatgcaaccgggctcttctccagcctgagtttgctgcagctcttttcaacttcagttcactccggagtttcttgacagctttatggagttttcctttttctttagcatggtctgaaagaagattgtccacctccgtcacatgttcatagagaagcttttcttttgctcttctttgcttccagataaggcaaaggcacaccatgatgagaagtaccaggacaggcaggatcacagccagagccactgctgagggggagagactccccacagatggggctgcaacctgcaggatcacggtgtcctctttactcagatttccaacttggatcagacatcggtaagacccttggtcctcaaggcgcacgtcaagagatctgcagagtgacacttccctcttgggcatctctcactagcaccgtcctccccttatattccggcatcagatcttcatcctggtccttcccatcccggaatatgtgaacagcctgggagcgctgcgggaatggggaccgcagccacctcacctccttgggtaccgtcccgggccagagggagagagggcagagcagctcggctgtgccccctagtagggccacgtggaacttgccggcatcccctgcgtggcctgacacatgcacagacagccggaggaagacgagagggatgaggcagccagagagccaggagccagcagaactcgccatctccatccgaacaccttctggatcagggacgcttgttcctctcacaggcaaagctggagtttgcaagctgggaacactccttccccatgcagagagaccagggagcaggcaagcgcatcaggaaggcctagggatgtgggccgggaaaagttcat

SEQ ID NO: 258688 - DNA, 1286 bp, Homo Sapiens
  misc_feature (44)..(44): n is a, c, g, or t
  misc_feature (643)..(756): n is a, c, g, or t
  misc_feature (1072)..(1072): n is a, c, g, or t
tcccgggatcggcgttggagctctttggggcccagctttgcggnacccgggagctcgggacgcaggcggggcttgtgctccgcgggggcagggcgtagggtgggcctcctacctcccctgatctcgcggtttgttccgtttcattggagcttcccggaccgtgtgctcgacggtgccctaggtgccgtggggccacacgcgagtctgataagcaccctcccccggaatcatgcggtgctgtgaggcctagcgaagatgaagatagaatgcaaggtagaaagtgctggatacctttagaaagctgcaggactggtgcgatgggagttgagacgtaagaacctgcccgtccgtagggctctggatgctgctgaggcccgaggcccctatggcagatttgaaaattcacccttgtagagtcattcctgcctttgagcggactcccttttaagtttacagaagcacttgcagaactcatcagaagccaccccgcttatcagcagatctcaagagagcgttcggtggaggccctgggtctgcacagctcacctccctgggaactgctcgcccgagcgtcggagccggcgctggccccctgcagccggaaggttgcagccgcaggagccccggaggcccaggacacagnnnnnnnnnnnnnnnnnnnnnnnnnnnnnnnnnnnnnnnnnnnnnnnnnnnnnnnnnnnnnnnnnnnnnnnnnnnnnnnnnnnnnnnnnnnnnnnnnnnnnnnnnnnnnnnnnnggctcttgctcttgcagaatccacaggtctttcttgaggaaatctgtagacagaactttgtgctgcgtttttatctagggaaggaacagaagagtgtcgtctcctagaaatctagcactggagaaacgaggaaaattcttccagcgatggtcctccactcagagctgaggaaagctttctactcagcagatgctgtgtgttttgattgtgacagcacggtcctcagaaaagaaaggaatcgatgagctacccaaaatctggggcggttgagacgccggtggcaataatgacaacgcgagcccatgggcgggggcantggctttcaaaggttggtttacagaagcgctaagcccttatccgccctccggggggcaggggcaagaacttataccagaagaacccccccacctgaccccggcattagggaactggtaggtcccttaccgaccaaatggtcaggtttcctaaaacgggggccttaagagatttgaaaacagttgtttcagagtcaattccagcaacaatgtttt

SEQ ID NO: 258689 - DNA, 1738 bp, Homo Sapiens
  misc_feature (42)..(42): n is a, c, g, or t
  misc_feature (53)..(53): n is a, c, g, or t
  misc_feature (86)..(86): n is a, c, g, or t
ttaaacaagagaggcaaggcacagaacatttttttattctgngtggaaaatgnacaaaatatccccacttcccctggagaaagagnatatctaaaatacactttgatgaacacagaatattaaaacattatatgctatagaagtgaacacaaatacattttctccaaaatttcaatagtctaaggaatatataagcattgataatatgaaggaaaatgtttggatttatttttaaattcaaaattctcctggttgtagaggtgaaaaagtaatcaggttaccaccaaaagaaatgtgtctggcatgttcttgatgtctcctctccagctgagtaaatggattactgcagtttagacctggtgaatcaagaaggtggcattcagtagtgagacttttattatcaaatagttctgactgagaaattttagtttccccttcttctaagatgctattttgtgaagctgtatttttttcagggctactcatcaaaacatcctgtgatgtaattgaagaattcagttccattccttccacaacatctgaaattccttcttttttgttagtattaatatcatctgctactccaccagcaagaagaggcaaactcattctctcactggataaacaatccaccttcaagtctgtcttatttacaacatgattttcttcaattaaatctggtaatccaggacactgagcatcttctatgctgctcctgctttcaggaatactcaaaaacaaagtcttcttcacatgttcacttttcgtattctgaggaccggcattttctggtgatgtagtttgttgtggaatgcccatctcatttctactctgagatacagctttgttgacagacttaggtgttccaagtctttgagaagggccttcagaagagacagaaagtcctgagaataatttaacaggactttcaactctgaaaaatccagcatcgaacactattttatcaacttcctttggtatcacagaaactgctgtttcagcacattcttcctgcctaattctctctctcattgcattttttatggcagctaggcgatttctcgctgcaattcttccagcatcatcctgttttggtttacttgctatacctgagacaacttttttcctaaagacatttttgttcatattatgattcatattattattgacttgccacccagattcctcaagtttgatcagattgttgaatttgtggattacatcttctatctgaaaactaaccatatcccaaaatccatccagatctgtacaggtagtctcctttatacctcgtttatattcacaatcatcaaccagtccttcaaactgtttaaacctttccttcataaggagtcttgtttgaccaactgctgtgcgaataagatctttagcatcatctggaatgtccaattcaagtttcctgtcccactcgaagcaatgtgaagttaatttctcagtttctgactggaggatatttctgaaatatggcacaccatggtggggctgagcaattcgaccttcatttctttcaagtgatgggacttcttttattggaaggccatttaaatttttagtagtagcttcatttttatttaaaacatgttcttcatgccaaacagttagaggacccaaaggacatggcaatttatttgaatcttgctgtattgtcttggtagagtaagttttacatttttgtgccaaaatttcttttgttgcttgagactcatcaacttctgtt

SEQ ID NO: 258690 - DNA, 983 bp, Homo Sapiens
ctgctctgccccgtccggcccccagtgttgggccctccgagcccgaggccttgccgccctgctcgtgcccttgccctccgcgtgcctgagtccccgttcttacccggaagaacgactgcccagtcaaaagccaataccaccgcgccccccgaatcctcggtcctcctgagggatgtgccccgtcttcgtctggcgtcaaatgcctggccctcacccgtcaagcacgggcctccggcagggaaacccggcccgagccctcccgcttgtggggtgcgcgggacttccacctccttctgctgtctgtcagcacctcagtcaccacgtacacgttgtccccgcggctacgcagctgctgcaggactttgtgttctggctgccgcaggtgcctctcatggagcagagtctgccaggtgttagggtccacactcagcgagtacacattcattgaggtgctggagctgtcagacaccgcggccccgcctgcgatctttgcctgtcctggggctgccagctccacgctgccctgtatctgcccatccatggcatcgtagaagtggaagctcctgccacgctgcacgtctggttccgcggcatccggctccaggatgtccttgatagacaggttgacacacttataacggggtttccagaaccatgagcttgagggcttcctaaccaccaggcagtagggctggaagccagtggagctctgcaggctggtcacagggatgaactccccaccatggtccagctcctggaccactctccggactacccgctcaaaggccgaccccatgctccgtgaccgtcggcgccccgagggtggcgcgtctggcgcgtctgctctccctgggagccgtccggcgagcaggagctggaggtgcccagagcctaaaagtgaaactgcaacctgaccagggcccgcccagcgacgcgtgggttcgacgatatcccggaattccggacctgtaccagcctgcttt

SEQ ID NO: 258691 - DNA, 1176 bp, Homo Sapiens
  misc_feature (381)..(381): n is a, c, g, or t
cgctcgcccgtggtggagctgagcaaggtgccgctggtccagcgcggcagttccaacgcctctgacccgcccacccgccttttataaacctctaatttattttgtcgaatttttattatttgttttcccgccaagcggaaaaggttttattttgtaattattgtgatttcccgtggccccagcctggcccagctcccccggaaggggcccgcttgcctccgctcctgctgcaccaaccccagccgctgcccggcgccctctgtcctaacttcaggggctgcccgctcccagtgtcttcctgtgggggaagagcacagccctcccgccccttccccgagggatgatgccacaccaagctgtgccaccctgggctctgtgggnctgcactcctgtgcccatgggcactgctgggtggcccatcccccctcaacaggggcaggcacagaacagggatccgacttgaattttcccactgcaccccctcctgctgcagaggggcaggccctgaactgtcctgctccacagtgttggcgagaggaggggcccgttgtctccctggccctcaaggcctcccacagtgactcgcgctcctgtgcccttattcaggaaaagcctctgtgtgactggctgcctccactcccacttccctgacactgcggggcttggctgagaaagtggcattggcagcaggtgctgctaccctccctgctgtcccctcttgccccaacccccagcacccgggctcagggaccacagcaaggcacctgcaggttggcgccaaactggcctcgcctggcctgaggtctcgctgatgctgggctgggtgcgaccccatctgcccaggacggggccggccaggtgggcgggcagcacagcaaggaggctggctggggcctatcagtgtgccccccatcctggcccatcagtgtacccccgcccaggctggccagccccacagcccacgtcctgtcagtgccgccgcctcgcccaccgcatgccccctcgtgccagtcgcgctgcctgtgtggtgtcgcgccttctcccccccggggctgggttggcgcaccctcccctcccgtctactcattccccggggcgtttctttgccgatttttgaatgtgattttaaagagtgaaaaatgagactatgcgtttttataaaaaatggtgcctgaa

SEQ ID NO: 258692 - DNA, 1008 bp, Homo Sapiens
  misc_feature (820)..(820): n is a, c, g, or t
  misc_feature (971)..(971): n is a, c, g, or t
  misc_feature (978)..(978): n is a, c, g, or t
  misc_feature (990)..(990): n is a, c, g, or t
  misc_feature (995)..(995): n is a, c, g, or t
aagaggctccacgttgggcggggatggggcctgaaactgtctgggtctgagctggggagcggaagccacttgtccctctccctccccaggacttctgtgactcctgggccacagaggtccaaccaggctaagggcctggggataccccctgcctggcccccttgcccaaactggcaggggggccaggctgggcagcagcccctctttcacctcaactatggatctcctgccccccaagcccaagtacaatccactccggaatgagtctctgtcatcgctggaggaaggggcttctgggtccacccccccggaggagctgccttccccatcagcttcatccctggggcccatcctgcctcctctgcctggggacgatagtcccactaccctgtgctccttcttcccccggatgagcaacctgaggctggccaacccggctggggggcgcccagggtctaagggggagccaggaagggcagctgatgatggggaggggatcgtaggggcagccatgccagactcaggccccctacccctcctccaggacatgaacaagctgagtggaggcggcgggcgcaggactcgggtggaagggggccagcttgggggcgaggagtggacccgacacgggagcttagtcaataagcccacgcggggctggctgcatcccaacgacaacagtcactgggacccggggtttcctacttggttcggtacatgggttgtgtggaggtcctccagtcaatgcgtgccctggacttcaacacccggactcaggtcaccagggaggccatcagtctggtgtgtgaggctgtgccgngtgctaagggggcgacaaggaggagaaagcctgtagccgccgctcagctctatcctggggaggagtaactgaaatttgctggaatgccaatcactctcaccgtctccaccagcagctcaacctcatggcgcagactgcaacagatatcgcnaccacanatgcatctattnatttnatcgggcgggatc

SEQ ID NO: 258693 - DNA, 1234 bp, Homo Sapiens
  misc_feature (711)..(711): n is a, c, g, or t
aacggcagcaccaggggtctggcctgagaacggagagatccggaatcggggccaaggtgtatccttgaccgcacgacaaggagtaatgggcggacctgaacccgcgacgaggggctgggggccaagatgcctgggtcggcccttacggctttgggagtgtcgcaaccacatgggggcgccagagacccagacgccgcccgctggccttttatttcgtattgcacttcaggtgaatcattggtagggaggcgagtgctgacgtgacgagatgctacgggtcggtggatctggaacacagcctgcagcttcacaccgggaacatccactcgtgggctctgattccgtactggatctccttcagctccttctggaagcggaggatcagctcaggcccattttccatggtgggaatgtggaggttcctgtctttgtacaggattcggtgcactgggcagacctggcaagcggtgcccgagccaaagacttcccgcacgcggccctcctccagggcccgcagcaactgcttcatggtgatcgtgcgctccaccacccggaactcaccccaggtctgagccatgtccagtacgactctttctgaccactccaggcaggataacaccattcagcgggggcgtcaccagctccagcaccccatcttcgtgggtccagtagacaaagatgtgcatggttcccacctcggtgagctggtgngtcgggcccatacagccagaggacctgtgcacagccccgcttgagtgcctcctgttgcactaacacggtgggcccataattcccacctaacttgtagttgccgaccccgcccacccaggcccggatgaaggctgggtcggccaggagggagaccggggtcacggagcctccagggaagtaggcacccactgggcagagaatgacgaacaggagcgcgcgcctgggctggctgacacccagcgagggctcgttcccaatgagcacaggccgcacatagaggctggtgccggcggcatcggggacccagtcattgtccacttcgatgagccggcggatgcactccagcaactccagcttgtcgaaactcggcaggcacaggcgcatggctgagcgcagcatccggtccatgttgagccaggggcggaagaggcgcacctgctggtctttgcctttgaacgccttcatgccctcaaacagctgccccagagaggctgcggccatgatccgtgcggcgcgtaactgt

SEQ ID NO: 258694 - DNA, 942 bp, Homo Sapiens
  misc_feature (10)..(10): n is a, c, g, or t
  misc_feature (13)..(13): n is a, c, g, or t
  misc_feature (18)..(19): n is a, c, g, or t
  misc_feature (22)..(22): n is a, c, g, or t
  misc_feature (25)..(26): n is a, c, g, or t
  misc_feature (34)..(34): n is a, c, g, or t
  misc_feature (50)..(50): n is a, c, g, or t
  misc_feature (62)..(62): n is a, c, g, or t
  misc_feature (74)..(74): n is a, c, g, or t
  misc_feature (109)..(109): n is a, c, g, or t
tcccccagtntanccatnncantanntttgtctnccactccaggcagatnacaccattcagnggggcgtcaccngctccagcaccccatcttcgtgggtccagtagacnaaagatgttcatgttcccacctcggtgagctggtggtcgggcccatacagccagaggacctgttcacagccccgcttgagtgcctcctgtgcactaacacggtgggcccataattcccacctaacttgtagttgccgaccccgcccacccaggcccggatgaaggctgggtcggccaggagggagaccggggtcacggagcctccagggaagtaggcacccactgggcagagaatgacgaacaggagcgcgcgcgtgggctggctgacacccagcgagggctcgttcccaatgagcacaggccgcacatagaggctggtgccggcggcatcggggacccagtccttgtccacttcgatgagccggcggatgcactccagcaactccagcttgtcgaaactcggcaggcacaggcgcatggctgagcgcagcatccggtccatgttgagccaggggcggaagaggcgcacctgctggtctttgcctttgaacgccttcatgccctcaaacagctgcagggagtagtggaggctggaggaggctgggtgcagcgtgaggttctggaagggctggattcggggctggccccagcccttgtcattccattccaccatcagcatgtggtcggtaaatgtcttcccaaacaccaggggctcgccggggccaggcttcttatgaggcttctgtgtcatttccagctgcaggtctgcagccttgaaactggaggaggcatatcttctgggaccacacagaagccaagggacagagagaagctttcgtgcccagatctgccccagagcggctgcggccatgatccgtgcggcgcgtaactgt

SEQ ID NO: 258695 - DNA, 917 bp, Homo Sapiens
  misc_feature (521)..(521): n is a, c, g, or t
cccattcagggtgggctgaagagcccctgagcttttaacgtgaggtctttattggataggactactccctatttcttgcctagagaacacacatgggctttggagcccgacagacctgggcttgaatcccggctcgtgttcttgctgcaggacctgggcaagaaacttcacctctgctgagccctcattccccatgtgtaaaatgggacaacgcaacctacctcacagggttgttgtggggatgctgcctgatacataccctgtcaccatttggtctctgcttcctctctgggacagggcctagaattggaggcagagaaccttcctatagaaagtcttcgtgtgtcctaggacttggctatcgtagagtggtaccttaggcagtggatgtaactcacactttcaggagtcaccccccagcatttggggttgggttggccctactccagcctggagctccctgagggagcctgaactccctgctcccaatccccgctactggtgcagggatgcagcctggngctggcgtccttgttctgggcctgctgctgccgccaccccaggaggccccaggcctgtcctgaattgacatcagtgcttccctgaactgcctcccccaccccctggcattatccccaggaaacttatgttttctagaagctaagcagctgctgggactcagggactggtgcaggtaggctgagtggcagctcagtcctagaaggtctctgaagatctggactgaggaccctgctactccccaagccagagcccatcagccaggcctgctgtgagccacctgcctgtggagtgctgagctcaaccaaaggctggcaagctctgggcctcatttaagggattctgatgagccgatgggccctggaggcagcccattaaagcatctggctcgtttttgg

SEQ ID NO: 258696 - DNA, 1547 bp, Homo Sapiens
  misc_feature (1480)..(1480): n is a, c, g, or t
ttaaactaaaatggaggctggtttcttgccttaaggagcccattgcctttcccgctgaagtctagatgttgacatgtaataaagcgggcagcaggatggtggtggatgcggccaactccaatgggcctttccagcccgtggtccttctccatattcgagatgttcctcctgctgatcaagagaagctttttatccagaagttacgtcagtgttgcgtcctctttgactttgtttctgatccactaagtgacctaaagtggaaggaagtaaaacgagctgctttaagtgaaatggtagaatatatcacccataatcggaatgtgatcacagagcctatttacccagaagtagtccatatgtttgcagttaacatgtttcgaacattaccaccttcctccaatcctacgggagcggaatttgacccggaggaagatgaaccaacgttagaagcagcctggcctcatctacagcttgtttatgaatttttcttaagatttttagagtctccagatttccaacctaatatagcgaagaaatatattgatcagaagtttgtattgcagcttttagagctctttgacagtgaagatcctcgggagagagattttcttaaaaccacccttcacagaatctatgggaaattcctaggcttgagagcttacatcagaaaacagataaataatatattttataggtttatttatgaaacagagcatcataatggcatagcagagttactggaaatattgggaagtataattaatggatttgccttaccactaaaagaagagcacaagattttcttattgaaggtgttactacctttgcacaaagtgaaatctctgagtgtctaccatccccagctggcatactgtgtagtgcagtttttagaaaaggacagcaccctcacggaaccagtggtgatggcacttctcaaatactggccaaagactcacagtccaaaagaagtaatgttcttaaacgaattagaagagattttagatgtcattgaaccatcagaatttgtgaagatcatggaacccctcttccggcagttggccaaatgtgtctccagcccacacttccaggtggcagagcgagctctctattactggaataatgaatacatcatgagtttaatcagtgacaacgcagcgaagattctgcccatcatgtttccttccttgtaccgcaactcaaagacccattggaacaagacaatacatggcttgatatacaacgccctgaagctcttcatggagatgaaccaaaagctatttgatgactgtacacaacagttcaaagcagagaaactaaaagagaagctaaaaatgaaagaacgggaagaagcatgggttaaaatagaaaatctagccaaagccaatccccaggtactaaaaaagagaataacatgaaaacgcccagggttacttgaatgtttttataagataggaatatatgtcttcaccatggggggggntctcgatttcactaacgttgtatatgaaaatgtctgcaataaaaagtacttttaaactttgtaaaaa

SEQ ID NO: 258697 - DNA, 414 bp, Homo Sapiens
  misc_feature (17)..(17): n is a, c, g, or t
  misc_feature (342)..(350): n is a, c, g, or t
  misc_feature (359)..(359): n is a, c, g, or t
aagattcctgccccccnccatgttccccctccccttgtaccccgcaacctcaaagacccccttggaaacaagaacaataccatggccttgatataccaacgccccctgaagcctccttcatggagatgaacccaaaagcctatttgatgacctgtacacaacagttcaaagccagcagaaacctaaaagagaagcctaaaaatgaaagaacgggaagaagcatgggttaaaatagaaaatctagccaaagccaatccccaggtactaaaaaagagaataacatgaaaacgcccagggttacttgaatgtttttataagataggaatatatgtcttcaccatnnnnnnnnntctcgattntcactaacgttgtatatgaaaatgtctgcaataaaaagtacttttaaactttgaa

SEQ ID NO: 258698 - DNA, 774 bp, Homo Sapiens
  misc_feature (769)..(769): n is a, c, g, or t
aaaagacattaagcaaatgcttctgtttcttaaagatgtgggtatagaggataaccaactgggagcattcctgacaaaaaaatcatgcaattttctctgaagaccttgaaaatctgaagaccagggtggcttatctgcattcaaaaaatttcagtaaagcagatgttgcacagatggtcagaaaagcaccatttttgctgaacttttcagtggaaagactggataacagattgggattttttcagaaagaacttgaacttagtgtgaagaagactagagatctggtagttcgtctcccaaggctgctaactggaagtctggaacccgtgaaagaaaatatgaaggtttatcgtcttgaacttggttttaaacataacgaaattcaacatatgatcaccagaatcccaaagatgttaactgcaaataaaatgaaacttaccgagacgtttgattttgtgcacaatgtgatgagcattccccaccacatcattgtcaagttcccacaggtatttaatacaaggctgtttaaggtcaaagaaagacacttgtttcttacctatttaggaagagcacagtatgatccagcaaaacctaactacatctctttggacaaactagtatctattcctgatgaaatattttgtgaagagattgccaaagcatcagtacaggactttgaaaaattcttaaaaacgctttagatttttatgtatgttaaaatgcagtattgtaaagtgaatatatatatgaataaatgaatatatttttnaatgc

SEQ ID NO: 258699 - DNA, 938 bp, Homo Sapiens
  misc_feature (788)..(788): n is a, c, g, or t
  misc_feature (902)..(902): n is a, c, g, or t
  misc_feature (907)..(907): n is a, c, g, or t
  misc_feature (912)..(912): n is a, c, g, or t
  misc_feature (914)..(914): n is a, c, g, or t
  misc_feature (921)..(921): n is a, c, g, or t
  misc_feature (929)..(929): n is a, c, g, or t
ggatgtggagcctgggagccttgacgttaggaacgaagtctaacctggatctggagccgggtgagatcaaattgggaatgctttcataatgaacgtcaaccagtcagttccacctgtgccaccatttgggcagccccagcccatctacccagggtatcatcagtccagctacggtgggcaatcagggtccacagcccccgccattccctatggagcctacaatggcccagtaccaggctatcagcaaacacctccccaaggtatgtcaagagccccaccttcctcgggggcacctccagcctcaacagcacaggctccttgtggccaggctgcatatggccagtttggccaaggagatgtacagaatgggccaagctccactgttcagatgcaaaggctgcctgggtctcagccatttgggtccccattggcccctgtgggcaaccagccacctgtgcttcagccctatggccctcccccgacaagtgcacaggtggctacgcagctgtctggaatgcagatcagcggtgctgtggccccagcccctccttcttcagggctgggctttggcccaccaacatcgctggcttcagcctcaggaagtttccctaactctggtctgtatggctcctatcctcagggccaggctcctccccttagccaggcccaaggtcatcctgggatccagactccccagcgatctgccccatcacaggcctccagcttcacacccccagcttcagggggtcctcggctgccttcgatgactggtccactcctgcctggancagagttttggagggccctcagtgagccagcccaaccatgtgtcttcacctcctcaagctctgccccctggcacccagatgactgggcccctgggaccactgccacctatggantcctncagcnancaggtantagcccanaaaaatggt

SEQ ID NO: 258700 - DNA, 1305 bp, Homo Sapiens
gccgggatccagccatacttcaatggatcccaggggtatcttgaaggcatttcccaagcggcagaaaattcatgctgatgcatcatcaaaagtacttgcaaagattcctaggagggaagagggagaagaagcagaagagtggctgagctcccttcgggcccatgttgtgcgcactggcattggacgagcccgggcagaactctttgagaagcagattgttcagcatggcggccagctatgccctgcccagggcccaggtgtcactcacattgtggtggatgaaggcatggactatgagcgagccctccgccttctcagactaccccagctgcccccgggtgctcagctggtgaagtcagcctggctgagcttgtgccttcaggagaggaggctggtggatgtagctggattcagcatcttcatccccagtaggtacttggaccatccacagcccagcaaggcagagcaggatgcttctattcctcctggcacccatgaggccctgcttcagacagccctttctcctcctcctcctcccaccaggcctgtgtctcctccccaaaaggcaaaagaggcaccaaacacccaagcccagcccatctctgatgatgaagccactgatggggaagaaacccaggttagtgcagctgatctggaagccctcatcagtggccactaccccacctcccttgagggagattgtgagcctagcccagcccctgctgtcctggataagtgggtctgtgcacagccctcaagccagaaggcgaccaatcacaacctccatatcacagagaagctggaagttctggccaaagcctacagtgttcagggagacaagtggagggccctgggctatgccaaggccatcaatgccctcaagagcttccataagcctgtcacctcgtaccaggaggcctgcagtatccctgggattgggaagcggatggctgagaaaatcatagagatcctggagagcgggcatttgcggaagctggaccatatcagtgagagcgtgcctgtcttggagctcttctccaacatctggggagctgggaccaagactgcccagatgtggtaccaacagggcttccgaagtctggaagacatccgcagccaggcctccctgacaacccagcaggccatcggcctgaagcattacagtgacttcctggaacgtatgcccagggaggaggctacagaggttgagcagacagtccagaaagcagcccaggcctttaactccgggctgctgtgtgtggcatgtggttcataccgacggggaaaggcgacctgtggtgatgt

SEQ ID NO: 258701 - DNA, 1603 bp, Homo Sapiens
  misc_feature (41)..(41): n is a, c, g, or t
  misc_feature (45)..(45): n is a, c, g, or t
  misc_feature (696)..(696): n is a, c, g, or t
  misc_feature (725)..(725): n is a, c, g, or t
  misc_feature (1064)..(1064): n is a, c, g, or t
ggaaggagatgtcaaacagcagggcccggacggaggccggntttngtgctttcttcgctgccataggttgtgaattcattcaaattgatgaatttccgggcgaaggatttcagctttccagtggcggcggcggcagcagcagcaagtccagactcttcccggacagcatgtggcccaggactcccagcagtccctccggtgacttagagtggtctgcatccatcgtcttgaggatgtttgtgacagttggctccgcccggaggatcagctggatgttgggctggatgttggcattctctcccgatttctgctggggtgcgtgctctcggtccgctttgcgcttagccataaggttgttgacgctggcctcagacagaagcccctgcttgccacattcttggagcaggaagtttgtacagtcacagttgcagcgctggtcagctttgtccaacaagggggtgagcttcagcaggaactcaaaagcacagttgacatcctcagtgaagtccttgtctccatgagagttcttcttcaacttcaccaaaacctgtggaatcttgaggaaagtgaaagctgttcacttgagctcctccgtaccctcgggagactcaatgagccccacgaagcaagctttccagatctccaggacaaaaagtggggtggggatatgctgcatgcgcttcaccatcgtcagcngctccaccagggactgcgtctcgcctgtnaggttcatggtgccctcgagcaggatcacggcgtggacagtggggaagccggtcttgtgcattctgctccgcatgcacagacagcatcgtggggatgctcctaatgagggtgccacactgctcggcctgactccggagctgcgggttgctgagattggccaggatctctccaagtttcaagagagaatgctcgatggcagtccaagaagaggcctcctctagtttggcgatgtgcagaagggcccgggtcttggtgctgctgagggttttctccaggcgctgaaggcacatggcaagctgcttctccccagcggctggagtgccgcctccagcccctcncgcagccgctctgcagaggctgccgtgcagcgcagcagccagtggagggcgctaagaagggctcggcacagtccgatgcattcctctgctttgccgtgacagctcagacggtcacaaaacatgtccatgatgtccagcaatgcctggacacacaggtcccgagaaaagtcatcaaacttactgatggctgtgaggacagaagagtaggacaccatctgggaactaatggcatacttcaggtaggacaagatgagaggattgggggatggtccaatcatggcctgctctagtaacgcatctgccaggttgagaatatcccaggtggctcctttaggaaagaatttcttcatgttgattgcccattggtagtcactccagcgctccttccaggcttgcaaaatggcttgcttcaggttgaccaccttcattatttcactctgagcaggtggcagcggtggcggccagctttgaggtgaaagaaatggagcgcacaatccagttctaggtggtaggcatcgccattttggcacttgtcaaga

SEQ ID NO: 258702 - DNA, 1191 bp, Homo Sapiens
  misc_feature (750)..(751): n is a, c, g, or t
  misc_feature (753)..(753): n is a, c, g, or t
  misc_feature (862)..(862): n is a, c, g, or t
  misc_feature (1089)..(1090): n is a, c, g, or t
  misc_feature (1097)..(1111): n is a, c, g, or t
atttgcagacactgagccctgacatgcagggtgcctactgcacattccctgcctcggtgctggcaccggtgcctacccactcaacagtctcagagctcagcagaagccctgtggcaacggccacatcctgctaaaactgggatggaggaatcggcccagccccaagagcaactgtgatttttgtttttaagactcatggacatttcatacctgtgcaatactgaagacctcattctgtcatgctgccccagtgagatagtgagtggtcaccaggcttgcaaatgaacttcagacggacctcagggtaggttctcgggactgaaggaaggccaagccattacgggagcacagcatgtgctgactactgtacttccagacccctgccctcttgggactgcccagtccttgcacctcagagttcgccttttcatttcaagcataaggcaataaatacctgcagcaacgtgggagaaagaagttgctggaccaggagaaaaggcagttatgaagccaattcattttgaaggaagcacaatttccaccttattttttgaactttggcagtttcaatgtctgtctctgtttgcttcggggcataagctgatcaccgtctagttgggaaagtaaccctacagggtttgtagggacatgatcagcatccggatttgaaccctgaaatgttgtgtagacaccctcttgggtccaatgaagtagttggttgaagtagcaagatgttggcttttctggatnncntttgccatgggttcttcactgaccttggactttggcatgattcttagtcatacttgaacttgtctcattccacctcttctcagagcaactcttcctttgggaaaagagntcttcagatcatagaccaaaaaagtcataccttcgaggtggtagcagtagattccaggaggagaagggtacttgctaggtatcctgggtcagtggcggtgcaaactggtttcctcagctgcctgtccttctgtgtgcttatgtctcttgtgacaattgttttcctccctgcccctggaggttgtcttcaagctgtggacttctgggatttgcagattttgcaacgtnntactacnnnnnnnnnnnnnnngtctgttagttatttctccaggggaaaaggcaataattttctaagacccgtgtgaatgtgaagaaaagcagtatgttact

SEQ ID NO: 258703 - DNA, 1112 bp, Homo Sapiens
  misc_feature (3)..(3): n is a, c, g, or t
  misc_feature (8)..(8): n is a, c, g, or t
  misc_feature (15)..(15): n is a, c, g, or t
  misc_feature (21)..(22): n is a, c, g, or t
  misc_feature (28)..(28): n is a, c, g, or t
  misc_feature (35)..(35): n is a, c, g, or t
  misc_feature (45)..(45): n is a, c, g, or t
  misc_feature (47)..(47): n is a, c, g, or t
  misc_feature (61)..(61): n is a, c, g, or t
  misc_feature (65)..(65): n is a, c, g, or t
  misc_feature (69)..(70): n is a, c, g, or t
  misc_feature (74)..(74): n is a, c, g, or t
  misc_feature (79)..(90): n is a, c, g, or t
  misc_feature (92)..(92): n is a, c, g, or t
  misc_feature (97)..(97): n is a, c, g, or t
  misc_feature (99)..(99): n is a, c, g, or t
  misc_feature (125)..(125): n is a, c, g, or t
  misc_feature (128)..(128): n is a, c, g, or t
  misc_feature (146)..(146): n is a, c, g, or t
  misc_feature (167)..(167): n is a, c, g, or t
  misc_feature (186)..(186): n is a, c, g, or t
  misc_feature (188)..(188): n is a, c, g, or t
  misc_feature (214)..(214): n is a, c, g, or t
  misc_feature (257)..(257): n is a, c, g, or t
  misc_feature (261)..(261): n is a, c, g, or t
  misc_feature (282)..(282): n is a, c, g, or t
  misc_feature (308)..(308): n is a, c, g, or t
  misc_feature (315)..(315): n is a, c, g, or t
ccnaaccnagtcaanttttanntccttnccctttncctttccccncnctaatggttgagcntcangaannagcnagaannnnnnnnnnnngnagatntnctagagagttggagccttgctgtcanatnccctctgaagaggaggantattagatataaatcctcttnatttggtcctttatgcttngngttccaacctggagccacagtgtgtnagaggaggaggagagggagaattctgttctcccagagctgcancctncctcgcagaggccagcacccnactctcctgcctccagtggccctgcngcagatntctcccaaaaagttgagcctttctagatggcttaggtggcaccatggctcagcaggaggggcgggaggcaccagggttcttgtttggaccctgcccctgggccatggccaggtgaccatggctacattgccaaacctctaactcgccacagctgcagactgagagggtgggtctgagtccccacaatgtctgaagctgcccctgggattctcaggccaacctgccaacagcaagcggattttcttgcaagatcagggaccccatttctgcagccagtgtctcctgggtgccttctgaggactcccacccccatcccagtatctcatctgtcccctctcctggggcttaagtgggttgcttccaggcagaagcagccaaggaccgattccaggcactttctgtagcaaatgactgtgaattacgacttctcttgcccttcttctagcagtctgtgcctcctctctgaccagtttggagggcactgaagaaaggcaagggccgtgctgctgctgggcggggcaggagaggagcctggccagtgtgccacattaaatacccgtgcaggcgcggagaagcaaccggcacccccttccggcctgaaagccctccctgcaagaaggtgtgcaggagagaagaggccccggcatggggatctgggttctagagggcatgtgatgactgtaaatgttcactgggtgggtagggagtggtatccagtgttcaagtgcagaaatctttggctttgctaccagttccatatgatgagaaataaacgttcgctgaggttttgtttcata

SEQ ID NO: 258704 - DNA, 1104 bp, Homo Sapiens
  misc_feature (943)..(943): n is a, c, g, or t
  misc_feature (986)..(986): n is a, c, g, or t
  misc_feature (1003)..(1003): n is a, c, g, or t
  misc_feature (1006)..(1006): n is a, c, g, or t
  misc_feature (1021)..(1021): n is a, c, g, or t
  misc_feature (1025)..(1025): n is a, c, g, or t
  misc_feature (1036)..(1036): n is a, c, g, or t
  misc_feature (1043)..(1043): n is a, c, g, or t
  misc_feature (1046)..(1049): n is a, c, g, or t
  misc_feature (1052)..(1053): n is a, c, g, or t
  misc_feature (1059)..(1059): n is a, c, g, or t
  misc_feature (1068)..(1068): n is a, c, g, or t
  misc_feature (1074)..(1074): n is a, c, g, or t
  misc_feature (1079)..(1079): n is a, c, g, or t
  misc_feature (1090)..(1090): n is a, c, g, or t
  misc_feature (1092)..(1092): n is a, c, g, or t
  misc_feature (1097)..(1097): n is a, c, g, or t
  misc_feature (1101)..(1101): n is a, c, g, or t
tttttaattaccattattgcaccaatacagcatacactttatatacatatatcttaaacattttccatttttcaggaattcaaatacataatatattatcatctcaagaatacaaagaacacaacatggaggaagattgagaaaataggttcccagtatttagtcactagtgattccacagactttccttttagtgttttctattggaattttaacatgtcctgctatggctctgcaagaatagagctgcctggaaaaggaggcaatgaaaagaaaatggacccaaagtcagaaaaagtgaagaagagaatccaggaaagtaatatattttgaaactaaacataaggactcccttcggccagagtgtacatacccaataggtgcaaaaaaggaagcaatgatatcttcccatttcatcctcaaaattgctcgtttagaaacaaaatagaaagtacccattcacctaagaagcagaacttttttcacagcattgtaataggaatggcagggcagagggaaaggaaagtagtgggagaacaacttgcttttaagataccctgggtgacaggtatcaaagccttgggcaaaacctgtcacagtaaagctgtgactctccaacttccttcacaaatgacaatatacataatagcagctttctattaaagaactacatgaactgaaaagaaatgtttatggaaaggggccagatacccaggcagcaaggcaatgaggatactaaacaagagttaagtgctttcaacctctctgctctacagatcaggttaaaaactctaaacccttcaactttaggtcaaagaacagggcaaatacaaattaatgccatgcttcaaatgcagcaaccagatggagctgcaagaaattaaacactcctatagactatcacttggaaagcacagcctcttgaacctccttcattacaganacacccactgatcaaagatgttacacaattcaaactcaacaancagaaaagagtagtggnggngcaccaacacaaccncttntcatagaaagngcatgtnaannnncanngggggntggggctgncccacnctggntgttcctgagncnataanctgnagg

SEQ ID NO: 258705 - DNA, 1648 bp, Homo Sapiens
  misc_feature (585)..(598): n is a, c, g, or t
  misc_feature (1042)..(1042): n is a, c, g, or t
  misc_feature (1062)..(1062): n is a, c, g, or t
  misc_feature (1112)..(1112): n is a, c, g, or t
  misc_feature (1168)..(1189): n is a, c, g, or t
  misc_feature (1192)..(1192): n is a, c, g, or t
  misc_feature (1403)..(1403): n is a, c, g, or t
  misc_feature (1440)..(1440): n is a, c, g, or t
  misc_feature (1494)..(1494): n is a, c, g, or t
  misc_feature (1509)..(1509): n is a, c, g, or t
  misc_feature (1589)..(1589): n is a, c, g, or t
  misc_feature (1591)..(1591): n is a, c, g, or t
attcccgggatggagccgccactgccgccgccattttgtgtctgtggagaaagaagcttctgtggcggctggaagtggacggagatcacccgcgagacggcggcgtttcatacccgaggttccccctgtgtcgtcccccatcccccctccgcggtcagcatgtggtgaagccggagccgcgagagagccggggagaggaagaggagtcggaagggaggcggggtatccagagcggcttcagcttcagctgcagcggacctcggaggggggccgcggcgcaatgtcagagcagacgccggccgaggccggtgctgcgggggcccgggaggacgcctgtcgggattatcagtcatcgctcgaagacctgaccttcaatagcaagccgcacatcaatatgctgaccattctagccgaggagaacctgcccttcgccaaggagatcgtctctctcatcgaggcccaaaccgccaaggtttttatacaccccgcagcctcctattacttctaatactccctgattttagtgtcagcctcatcccaggtctcgcttccatcccaagggggacagtgttccttctctccaannnnnnnnnnnnnntccaactcaggctcggtctttggcccaggcttcgagcatgggcctctgggggggagggagtggggaggataaagggtggagtcccacttccgctttccaactccctttttaggccaccgcattgtatatcccgacacacacacgctttgaatagagccctttggggtgggggagacttaaaggcaggttgtggtttggggaagtaagagttaacataagccattttaattccctgggaagtgggagagtgggtctcccattttccccaagcaccctttttggtaattgtgttctgtgggttggaaggaggtgaagggggacctgggagcgagctgttggtgggtgggaatagggatttggccccgagtggagcagccgcctgttaggagcccaacatggcgcctgaaaagcacatgatgcgaaagggaagagaggagaatccantccctgccagccaggcagcngctcactcccgtcagccccattttggggtgggggcggctagataaaactnttattctcctattggagggtctaatttgtcccaaaataggggcaagtggggttgannnnnnnnnnnnnnnnnnnnnnggngatcttatccaacctgtaggtggagaactggcccagagggtaacaagtacttgcagtttctctgaaaagttcagtccctcctcctcttccttttctctttttctcccttccctgatagcgaaggagtgtttttctttaccccttgacagaagtggtcctctgccaccttatatttccctgtagtcctcctcttctgtggattcatatgggngcgatatgtcatttaagtaaagttactgttcaacttngttacaatgagttttaatagcgtcccagtgctacattttatttttcaagcttgnactcacggtttagtnttttctagttgttagtgattgcaattatcaggatgagcctccttttagcagagtgaacccctttttaaaggccactttgncnacaaccaccaatatattgtttagagacggtttctgtctagtgtaaaacttgagtgga

SEQ ID NO: 258706 - DNA, 944 bp, Homo Sapiens
  misc_feature (362)..(362): n is a, c, g, or t
  misc_feature (742)..(742): n is a, c, g, or t
  misc_feature (754)..(754): n is a, c, g, or t
  misc_feature (767)..(767): n is a, c, g, or t
  misc_feature (770)..(770): n is a, c, g, or t
  misc_feature (775)..(775): n is a, c, g, or t
  misc_feature (777)..(777): n is a, c, g, or t
  misc_feature (795)..(795): n is a, c, g, or t
  misc_feature (797)..(797): n is a, c, g, or t
  misc_feature (805)..(805): n is a, c, g, or t
  misc_feature (811)..(811): n is a, c, g, or t
  misc_feature (822)..(822): n is a, c, g, or t
  misc_feature (825)..(825): n is a, c, g, or t
  misc_feature (830)..(830): n is a, c, g, or t
  misc_feature (832)..(832): n is a, c, g, or t
  misc_feature (834)..(834): n is a, c, g, or t
  misc_feature (866)..(866): n is a, c, g, or t
  misc_feature (872)..(873): n is a, c, g, or t
  misc_feature (883)..(883): n is a, c, g, or t
  misc_feature (891)..(891): n is a, c, g, or t
  misc_feature (894)..(896): n is a, c, g, or t
  misc_feature (904)..(904): n is a, c, g, or t
  misc_feature (908)..(908): n is a, c, g, or t
  misc_feature (911)..(911): n is a, c, g, or t
  misc_feature (914)..(914): n is a, c, g, or t
  misc_feature (917)..(917): n is a, c, g, or t
  misc_feature (921)..(921): n is a, c, g, or t
  misc_feature (928)..(928): n is a, c, g, or t
  misc_feature (938)..(938): n is a, c, g, or t
ttcccgggatgccccagggactttccctgcggtgggggccttcgacagttagggccacccgctcagctcgaccgcggagggcagctccaaaggggaccccaaaggtgcccacgcggggctggggcctcctgggcgtcgttgggagcggccactaccggcccgggtccgagctgtcagcctctccaaagcctgcgcgagaggagccgggacacgcctagcgcgggctccagcagtggccggtgtccagctgcctactttctgcccggatctctggctcctcatctctccggtctccgcagactaaagccctcgggatatgcagcagccatgcctgtgcacacgctgagccccggagccccgtncgcccccgccctaccttgccgcctgcggaccagggtccctggctacctgctacgggggccggcagatggtggagcccggaaaccgagcgctgtggagccctggaggccgacaaggccaagtacgtcaagagcctgcacgtggccaacacccgccaggagcctgtgcagcccctgctgttcaaacagccgctcttcagccctgagactcgccgcacagtgctcacgcccagccgccgagccctgcctggcccctgccgacggccccagctggacctggacatcctcagcagcctcatcgacttgtgtgacagccccgtgtcccctgccgaggccagccgcactcctggacgggccgacgggagccggccgtcctcccccanccacccctccgngaccgccgcccantanctctncngtccgccgggtggacgtncncccctgcncgctcngcttgccggcntgncgatnancnggcctgcggcggctccagcccagccggccgcnggtttnnaactccaatnggattgangannntttttaanggancgntgnttngacnttttttncttttgggcntgtacc

SEQ ID NO: 258707 - DNA, 1993 bp, Homo Sapiens
  misc_feature (107)..(107): n is a, c, g, or t
  misc_feature (744)..(744): n is a, c, g, or t
  misc_feature (827)..(827): n is a, c, g, or t
  misc_feature (831)..(831): n is a, c, g, or t
  misc_feature (852)..(852): n is a, c, g, or t
  misc_feature (890)..(890): n is a, c, g, or t
  misc_feature (1031)..(1031): n is a, c, g, or t
  misc_feature (1116)..(1116): n is a, c, g, or t
cgggtcagtcttccttcaggctcccaaacactgcggctggcacgctctgctgctccagccgaacctcgttgggctccaggtccatctcgtcctcgtcctcgtcctcncccagctggatctcctcggggttgacctgctgtgccagctctgccagctcctcccgggaggcgtcactcctcacgaacaggatcttgctctgggcgcgcaagggctggtcacgctccgcctcagccgccagctgctctgcccgctgttccagcagcttcatgtcgtccatgccactctgcccaggggccaggtcagacacggtgcccgtggcactgcccgagaccttgagcatctgcgaggccatgaagttgacctgcgtgttgtacgtggcctgcacgctgcgccggatacgcagcatttccttgatggtgtcctcattgccatgccggacctcaaagtccttccacgtctgccagaacgcgccggtcgtccgggggtcacagatctgggagcagaagctgtagatggcccgggcgcggtcaatctccccgagcttgcactccatgtctgcaaaccgcagccacatctcacgcgcgtgctcgtccgacagcacctcaatggccttctggtagatgccgcgggtgtgggtgaccccatagatctcggccgcccgcttgatgtagatgttgaacatgtcatactgctgggcgggctccacggccctggtggcacgctcgtacacggccatggcatgcncgggccaggccccactcctcctcccagctgtgcgtacagaaggtacaaggtcttggcatattttggggggcagccgtccagancctnttcaaacaggtcccgtgcccnctccagcttgcggcccccatagcgggcaatgaatttgntcaggtaggtgctccagatgtcggacacgttgggccacttgaacagcgagatgccgcgctcgtacgccttgaagctctcctcgaagtacttgtgctcctccaggaacatggcatagttgatgaacgatctggggttgttgncgatacgcaggtccaaggatgcgcgttcgtacacggcccttgggggactggaaaggtgccgaggctctccttccaggtcggcgangcatgaaccagaccttcagtgacttgtacacgcggttctgcacgggctctgaaccatcaaagtactcgggcccggcgggcaggcagcgccgtgccctttcgcagcagccgcaaggcctcatcgtagttctcgtgtcggagctccagctctccgcactgacaccacacgcttgccaggtcatccacctgcttgaagttcaccttggtggccttctccaggatgacacgggcatcgtccagctgtccgttgtcctcataaaacttggcaaacgccacccacagagtgtggggcttgcctgtggccttgaaggggtccaccgtctgcacagcctctgtgtaggtgttgatgatctcccgggggcggccctggtgcagggcgacacgcttgtgccactcgtgcacgtggtgtgggttttggcgcagcaagacgctgttgaggagcaggggccgccggctgatgagctgctcgaagcgggccaggcgcagctccaggtccacatcatcctcctcctcgcgccccagctccgaggcggtctccatctttgcagcgatcatgctctcctcgaactgggcgtagctgtcaaacacctgtgtgaagtcccgcacggtcatcactgtccggatggcctcctcgtacacgtcccgagccttctcgaaatggccgctgcggatgtagtagtcggcgagagaacaccagagcttgcccagctggtcggtgaagcgggtgaggcccccgcggatgatggcgtccacattgagggactgtaccttgtccggattctgggagatgaggtcgcacagctcgtgccacagctggtagttggacttgccggccttagacacgaaacgctcgtcgttcaccacggtggccaggcgct

SEQ ID NO: 258708 - DNA, 1665 bp, Homo Sapiens
  misc_feature (138)..(138): n is a, c, g, or t
  misc_feature (422)..(422): n is a, c, g, or t
cccccaataaaggaccctccaaagtggtcccttattccctcaaaatgggtttcagcccagcaaaacaagtcctgggcctccggtaaggagcttagggtccgcccaataagaaacgctggaaccagccttaacctcaanccccagctccattcaaagataaccatgttgagtccatgcacacaatccaggcatttgctccacacaaagaatttcttagctttggggaaaacatccttaccaaaggagttaatagttttggaaaggtcactaaacatgtctcagtaattgttaagatagacactgtgggtgtgtgtttaaataaggaaatgggtcagttatgagagtagggaatttgccagtgcatttttaggacagaaactcagatctgacagttgccagatagtaatcaaaccctgtttggnagattcctcattctgccccagcgcttccttttcatccctgcagatctttcttatttcttcctcagtaggcttctttctctcctctcttactgtttcccagtgtgtctgaggtgagtgcagtctgactgcttcccgagggtcttcttcatagacatgcaaagtggtcagcttatggagcacacgctgtagctcttggaaggtgggtctgcgggtggcgagggggatatcccaaagtcggggatcccccctttgcaggggtgctcccttgcctccaaagaacaaagaccggccagagcggggagcacgcaacagtattgtaccagcctcctccagcgccttagcccagcttggccctgccagcaggtcacgaacatccttatatagtgtggcttcattgtagcgcctcaggttggctccagcagagtgtgatggcccacctcgggcatcccgaagcccctgggctgtgccccgctgggcccgaaccgtatagcggtgaaaagttttgtgtgtcaccacttctcttccttgaaatatagcaccagcaaagtgcccagctgcagccatgagcaccacgcagtctctgggacctctactttgcaggttctgtagcagcagttctgcctcttctgggggatcctgatgagggcctaggacacagcggtaggcataaagaaactggccctgggcattctggaaaagaactcgatgagggtaaaagcctgggggtcggctcaacttctcaaatgtagccctctcccgatccagtgtctgcaagtcctcctcactggctgagtctgagtcttctgatcccgagatgctggaaagatctcctgtggagctctgcttttcaaagtccagggcagacaggagaggcttgtccttgagacgttgctttaggttaaaccgatgccagtcaagcttataatgttccctctgttcttggtggttctggaaggtctggtcacaagttgaacaaaataacttctctgaaatatccataggaccctggagtagctttctttctgggctttctctctcccctgagccaggctcaggccctgaaagaccggagcatccgcgctgaggtcaaacagggagatcgacgcaggagccggggctgcatctggagccggcgacatggctgagcagaaattatttagcagcagctccaaacgtcccgggagctgagcggctcgcaagtcctcaggtcgattgccggatttctgcaacacaacaatccccg

SEQ ID NO: 258709 - DNA, 1832 bp, Homo Sapiens
  misc_feature (5)..(5): n is a, c, g, or t
  misc_feature (17)..(17): n is a, c, g, or t
  misc_feature (201)..(201): n is a, c, g, or t
  misc_feature (210)..(210): n is a, c, g, or t
  misc_feature (214)..(214): n is a, c, g, or t
tttcnagggtgattgtngttctggagtcctatctacctgggttcagatctttgttggccagtccctggctgtgtgacttcactgctttaagcctctgtcttcatccttaaagtggcgatgatagtacctacctcactctgatctctgaatgagaacacatgtaagacacttagcacagttcctggtgctcaaagagttccnacacctganagcnccatggccctgtttgtttttcagtcaagatttctaaaagccgttattaccagacgttcagtgagaacatgggcagggtaaactcaaaatggagaacataaaaactgggactcccagaccagtcacttagaagactgctgcaggaagtaccaaggtcgttaagaatcagtaataataataagtaatgtgtgaatccattagaatgttgagaagtagacctttgacatttcagaaaaatgtatatctcagacacagccatatgtattgttatccctgagttggaagagcatcacagggcatagtttcacaaaagcttcaaaaaatatactaattgctggtaatatgtgaactaacagaaaaaaatagccatgttaaaataggagtgcctgacaattagctctattcatcttgtctcctagctgtaagaccctagattcaaattatgcacctagaaaactaaattactatgtatgttataggcctttgaaatggatacatgaaaattagtgaaatcagaatgaacgtttcgcctgccaaagatatgtatttttataagtgatacaagggccccatgagctccatggccacatctgtacaaaacaggccctcctttcaggaactggtctcgagagagcaaaggggtcaactccctaaatggcagctgagacagtcctccctggtggcatggccctgtttcctgttgatatggtgatagttggagagtcaaatttttaccagaatttgtgaatatcatctctggttaatgattacacaaaaccttttaaaattttaaaaaattatttctaattctataaataaactctgcagttgtacagccactgtacagctaacatctcaacactggaaatgaggctggtttcttccagtttggctcagattcttcagggaagcccagttaagacaaacagctctctatactcaatccttactttgctgagaagatacaggcctgcccactcgctcccacctgctcttcatgaggagtcctttattcctgcatgtttcctgttctttgggacctttaggagctaacctccacagatgctgatagtctgtagagtcaggaataccatgtaacatgttgaagtagactaaagattagttctttggcaatagcccagtctggacttactatgtacttttgaaaataaaactgcttatttgtaaactctgtaattaggaccttttgctatttgagttatattcctttctaacttcaaacgtctgcattcatgtataatagccattttatgcacagatgaggtgattcccacactttttttcgcagatgtttcattatctggatgagtgtattacataataaatttgaataatggtagtcttccaaatgacaaaaagcaagctagttgatttgtcaattttgagtttaaatgttttgactgcttatcagcaaaaaaaatcaaagaatagcatactaatattaatggaaatgcagagtatatttaattggcatgattttttcatggatgtgtgcttcatttgatctattgtatgtagctcgtgatcacattttctgttggttaacattgttcctagcttatatgatggaattaaatatattctgtgtaaaaagaaaa

SEQ ID NO: 258710 - DNA, 1830 bp, Homo Sapiens
  misc_feature (118)..(118): n is a, c, g, or t
  misc_feature (120)..(120): n is a, c, g, or t
  misc_feature (137)..(137): n is a, c, g, or t
  misc_feature (139)..(139): n is a, c, g, or t
  misc_feature (159)..(159): n is a, c, g, or t
  misc_feature (168)..(168): n is a, c, g, or t
  misc_feature (219)..(220): n is a, c, g, or t
  misc_feature (258)..(258): n is a, c, g, or t
  misc_feature (270)..(270): n is a, c, g, or t
  misc_feature (286)..(286): n is a, c, g, or t
  misc_feature (289)..(289): n is a, c, g, or t
  misc_feature (291)..(291): n is a, c, g, or t
  misc_feature (293)..(293): n is a, c, g, or t
  misc_feature (295)..(295): n is a, c, g, or t
  misc_feature (306)..(306): n is a, c, g, or t
  misc_feature (320)..(320): n is a, c, g, or t
  misc_feature (332)..(332): n is a, c, g, or t
  misc_feature (336)..(336): n is a, c, g, or t
  misc_feature (356)..(356): n is a, c, g, or t
  misc_feature (358)..(359): n is a, c, g, or t
  misc_feature (367)..(367): n is a, c, g, or t
  misc_feature (369)..(369): n is a, c, g, or t
  misc_feature (372)..(372): n is a, c, g, or t
  misc_feature (380)..(380): n is a, c, g, or t
  misc_feature (399)..(399): n is a, c, g, or t
  misc_feature (404)..(405): n is a, c, g, or t
  misc_feature (407)..(407): n is a, c, g, or t
  misc_feature (1527)..(1527): n is a, c, g, or t
  misc_feature (1539)..(1539): n is a, c, g, or t
  misc_feature (1547)..(1547): n is a, c, g, or t
  misc_feature (1571)..(1598): n is a, c, g, or t
  misc_feature (1667)..(1667): n is a, c, g, or t
  misc_feature (1737)..(1737): n is a, c, g, or t
  misc_feature (1750)..(1750): n is a, c, g, or t
  misc_feature (1795)..(1795): n is a, c, g, or t
  misc_feature (1797)..(1797): n is a, c, g, or t
  misc_feature (1808)..(1808): n is a, c, g, or t
  misc_feature (1812)..(1812): n is a, c, g, or t
ttagtaaagcatacaaagaatctagtgtgctcagggcttggtacaatgagctgaattagatggccttatgaaactctttctaacctcttacccaacctgtttctccttggttaaaatnanacttgaaggcccagaanantcatggcacatttgtttaanaatgcttanagttagtttaaggtaattttgcttctacagtattttggaaggtctgaaaanntgcacagggtcatctttgtaattaaataaccccaaacnaagaagcacaangtctccttcaggtgancanananantggacgagtangtgcaaacaagganaaaaaaattcanttanaaaagtgatttgatgttaanannaaaaaatnangantgtagaanaattgagcaagtaaaaaantaaannanaaagtgagtgtatgtccatctaactggtacattgataatttagtttgggcacataaaaggaaaatttatatggcttcccaaatgcagagttacatcttattcgtgtaattctctgagtaattaaaacccgtctccttttttcattcttaaaaataaatgaattttcactgttggcacaaaagaggcttaaatataaggaacaaaacacttgcattctaatttttgcatatattgtaaatgtgtctggtatttacagcaaaatactgtgtatccttttatgggtaaaacaaaagtgaacattgcatgcatgtaatgtgatgaatttgtaatttaggagttctttggggcttctgtgacttgggaaatgcttacattcaggccttaatgttgcattagctagcatgttttccctctgatgtatatagtcactgttgtataaactaatctttgcttgttttctactctgtgatctttccatatcatatttcattaatgatcagttagtgtcaaggagtcaaaacagattaaaattaatttcatgtgtatatggtggaaatttgtggctagtgtgatttttgtttgtttccttttaagtactgttgatcagttgtgacacttactggttaaacttacgttgctaaagatttctctataataagccacacattatatttagactatattaagggaccttggttttcttctagatagcagctgtcccaaagaaaatatttcttctttgtctgttaagatttagctattatctgccagttgttaagaggttttggttccaaactcaaccagcaatgttgagagctgaacttaagatagctgttgtactttttgctttccatctgttactgtccttcattcttggctccctactatctataaacagctgctgtgaagaagaaaagttgaataagagttggcttaaattttaaaaaagaaaaggaaaattgaggtttttaggattttcatggtaacaagctctggtataagctaaggctggcaagttcagatactaaaaatattatttgatcatatcctgggatcctttttgaaaaagttaagactatatgaaggtaaattagaaataagtatgaatattaataaaatngcatttatcttntttctctnttttatgttgtgacttaacctaannnnnnnnnnnnnnnnnnnnnnnnnnnnttataatatgaatgctgatatttaaaggtagatctatgtggtattctttgtgtttcttaattgtttaantcttaagattatttgtgatctggatttatgtatttgttagatacatacgaattgttaaaatggaatgcanttttttcaaaagnccaggtctaaatgtaatggttggtttattgttctataaccccagncnataattttctntgtnaatcataaacaataaaca

SEQ ID NO: 258711 - DNA, 2124 bp, Homo Sapiens
  misc_feature (1475)..(1475): n is a, c, g, or t
  misc_feature (1483)..(1483): n is a, c, g, or t
  misc_feature (1545)..(1545): n is a, c, g, or t
  misc_feature (1562)..(1562): n is a, c, g, or t
  misc_feature (1680)..(1680): n is a, c, g, or t
  misc_feature (1689)..(1690): n is a, c, g, or t
  misc_feature (1694)..(1694): n is a, c, g, or t
  misc_feature (1698)..(1699): n is a, c, g, or t
  misc_feature (1711)..(1711): n is a, c, g, or t
  misc_feature (1719)..(1719): n is a, c, g, or t
  misc_feature (1746)..(1746): n is a, c, g, or t
  misc_feature (1805)..(1805): n is a, c, g, or t
  misc_feature (1807)..(1807): n is a, c, g, or t
ggggagccctggcctccccacctcctcccgtccccaccctgttcccagcactcaagccttgccaccgccgagccgggcttcctgggtgtttcaggcaaggaagtctaggtccctggggggtgacccccaaggaaaaggcagcctccctgcgcacccggttgcccggagccctctccagggccggctgggctgggggttgccctggccagcaggggcccgggggcgatgccacccggtgccgactgaggccaccgcaccatggcccgctcgctgacctggcgctgctgcccctggtgcctgacggaggatgagaaggccgccgcccgggtggaccaggagatcaacaaggatcctcctggagcagaagaagcaggaccccggggagctgaagctgctgcttttgggcccaggcgagagcgggaaagagcaccttcatcaagcagatgcggatcatccacggcgccggctactcggaggagaagcgcaagggcttccggcccctggtctaccagaacatcttcgtgtccatgcgggccatgatcgaggccatggagcggctgcagattccattcagcaggcccgagagcaagcaccacgctagcctggtcatgagccaggacccctataaagtgaccacgtttgagaagcgctacgctgcggccatgcagtggctgtggagggatgccggcatccgggcctgctatgagcgtcggcgggaattccacctgctcgattcagccgtgtactacctgtcccacctggagcgcatcaccgaggagggctacgtccccacagctcaggacgtgctccgcagccgcatgcccaccactggcatcaacgagtactgcttctccgtgcagaaaaccaacctgcggatcgtggacgtcgggggccagaagtcagagcgtaagaaatggatccattgtttcgagaacgtgatcgccctcatctacctggcctcactgagtgaatacgaccagtgcctggaggagaacaaccaggagaaccgcatgaaggagagcctcgcattgtttgggactatcctggaactaccctggttcaaaagcacatccgtcatcctctttctcaacaaaaccgacatcctggaggagaaaatccccacctcccacctggctacctatttccccagtttccagggccctaagcaggatgctgaggcagccaagaggttcatcctggacatgtacacgaggatgtacaccgggtgcgtggacggcccccgagggcagcaagaagggcgcacgaccccgacgcctcttcagccactacacatgtgccacagacacacagaacatccgcaaggtcttcaaggacgtgcgggactcggtgctcgcccgctacctggacgagatcaacctgctgtgacccaggccccacctggggcaggcggcacccgcgggcgggtgggaggtgggaatggcttgaagggacccctaatgtccctgggctatctntccagccncggcccacacgcaagggagtcgggggacggacggcccgctgctggccgctctcttctctgcntctcaccaggacagccnccccccagggtactcctgcccttgcttgactcagtttccctcctttgaaagggaaggagcaaaacgcgccatttgggatgccagggtggatgaaaaggtgaagaaaatcaggggattnagaacttgnntggntgcnnatctctcagganccccatcnccgggcgtgtcaccccctgggcagggntctgggaccctctgtgggtgacgcacaccctgggatggggctagtagagccctcaggcncntcgggcgtggacctctggcgcactcctagtggacaggagaaggaacggccttcccaggaacctgtggactaggggtgcaggaacttccctttgcaaggggtaacagaccgctggaaaacactgtcactttcagagctcggtggctcacagcgtgtcctgccccggtttgcggacgagagaaatcgcggccaacaagcatccccccatcccttgcaggctgggggctggcatgctgcatcttaaccttttgtatttattccctcaccttcttgcagggctccgtgcgggctgaaattaaagatttcttagaggctgaa

SEQ ID NO: 258712 - DNA, 1415 bp, Homo Sapiens
  misc_feature (1258)..(1269): n is a, c, g, or t
ttgtttttttctctcccccccgccctcaccacccagccccaggcctgggtggcgaattccgcacgaggtgatggcgtgttgcctgagcgatgaggtgaaggagtccaagcggatcaacgccgagatcgagaagcagctgcggcgggacaagcgcgacgcccggcgcgagctcaagctgctgctgctcggcacgggcgagagcgggaagagcacgttcatcaagcagatgcgcatcatccacggcgccggctactcggaggaggacaagcgcggcttcaccaagctcgtctaccagaacatcttcaccgccatgcaggccatgatccgggccatggagacgctcaagatcctctacaagtacgagcagaacaaggccaatgcgctcctgatccgggaggtggacgtggagaaggtgaccaccttcgagcatcagtacgtcagtgccatcaagaccctgtgggaggacccgggcatccaggaatgctacgaccgcaggcgcgagtaccagctctccgactctgccaagtactacctgaccgacgttgaccgcatcgccaccttgggctacctggcccacccagcaggacgtgctgcgggtccgcgtgcccaccaccggcatcatcgagtaccctttcgacctggaaaacatcatcttccggatggtggatgtggggggccagcggtcggagcggaggaagtggatccactgctttgagaacgtgacatccatcatgtttctcgtcgccctcagcgaatacgaccaagtcctggtggagtcggacaacgagaaccggatggaggagagcaaagccctgttccggactatcatcacctacccctggttccagaactcctccgtcatcctcttcctcaacaagaaggacctgctggaggacaagatcctgtactcgcaactggttggactactttccccgagtccgatggtccccagcgggacgcccagccggcgcgggagttcatcctgaagatgttcgtggacctgaaccccgacagcgacaagatcatctactcacacttcacgtgtgccaccgacacggagaacatccgcttcgtgttcgcggccgtgaaggacaccatcctgcagctcaacctcaaggagtacaacctggtctgagcgcccaggcccagggagacgggatggagacacggggcaggaccttccttccacggagcctgcggctgccgggcgggtggcgctgccgagtccgggccggggcctctgcccgcgggaggagannnnnnnnnnnncatatttttaacaaatggtttttatttcacagttatcaggggatgtacatctctccctccgtacacttcgcgcaccttctcaccttttgtcaacggcaaaggcagcctttttctggccttgacttatggctcgcttttttttaaaa

SEQ ID NO: 258713 - DNA, 1098 bp, Homo Sapiens
  misc_feature (814)..(823): n is a, c, g, or t
  misc_feature (925)..(946): n is a, c, g, or t
gaagaagatttgcagagttgttttggtgaagttaaaggagcatgtatatgaggtggacaagaagagcctgcgagatatttgtgagagattgggcagtaggagttcacataggaaaaagtaaagattaatgtcttacgagttaggaggtggtgatgaacgataacatcaagatggagaatgggaagtcaaagaggtgtggtgtggttaagttcgagtaaccagtaggtgaacaaagagagcctgccggatgatgaatggcatgaagctgagtggccgagagattgacgttcgaattgatagaaacgcttaagcagttgccttttttaaacatcgatacgagacctctgaatttgtattttttcttgttaaccattttaatttgttggctggatgtataaagatgtttaaaaaattcagttgctttttggggtaatttgaattacttttttaatgactggggttccatttgactgtttgcattgagattgcaatgtgcgcaattttttttgtagttgtggcatcttgttgacatcgaatatgactttgataataaataccggttcctgaaaaattaaatcttaaaaataaccccgctaagagtaatataaaaaacacccctgtgaaaaagtccacccaatcctttttcccgcgagaaagaaaacaacaaatgaaaacttggttttgggggccgccccgcggcctccagaaattttttaaaccttttctttgggccgcgggcccccgagggaaagagaagtgggccatactgttttccaaagaaaccccggccataaatagggttgggatccccccnnnnnnnnnnccccgggggggaacgagtggttttaaaaaattccagatgggcctccaggggcttttggggttcttctaccggggacccaggggccctttaatcctatttaannnnnnnnnnnnnnnnnnnnnngcggaggggggaaaatcctgaacgactttcccccgctcggacaacccttccaaaacgggggggtgaaaaccgatccccccccgggagttttaccctctgtgtcccccctcgcggatagaattttcgcgtacggggggggaaacccgggagcg

SEQ ID NO: 258714 - DNA, 1030 bp, Homo Sapiens
  misc_feature (908)..(908): n is a, c, g, or t
  misc_feature (937)..(937): n is a, c, g, or t
  misc_feature (941)..(941): n is a, c, g, or t
  misc_feature (944)..(944): n is a, c, g, or t
  misc_feature (981)..(981): n is a, c, g, or t
  misc_feature (984)..(985): n is a, c, g, or t
  misc_feature (992)..(992): n is a, c, g, or t
  misc_feature (994)..(994): n is a, c, g, or t
  misc_feature (998)..(998): n is a, c, g, or t
  misc_feature (1015)..(1015): n is a, c, g, or t
  misc_feature (1023)..(1023): n is a, c, g, or t
ccgggatgcagccttgtagtggggctggagcagagcctgccgcgaacccccggagcccacgatccctcgtgccatccctcgaatccaccagcacgagcgtcccacccgcgcctgggaccatggccactgactcatgggccctggcggtggacgagcaggaagctgcggctgagtcgctgagcaacttgcatcttaaggaagagaaaatcaaaccagataccaatggtgctgttgtcaagaccaatgccaatgcagagaagacagatgaagaagagaaagaggacagagctgcccagtccttactcaacaagctgatcagaagcaaccttgttgataacacaaaccaagtggaagtcctgcagcgggatccaaactcccctctgtactcggtgaagtcttttgaagagcttcggctgaaaccacagcttctccaaggagtctatgccatgggtttcaatcgtccatccaagatacaagagaacgcattgccactgatgcttgctgagcccccacagaacttaattgcccaatctcagtctggtactggtaaaacagctgccttcgtgctggccatgcttagccaagtagaacctgcaaacaaatacccccagtgtctatgtctctccccaacgtatgagctcgccctccaaacaggaaaagtgattgaacaaatgggcaaattttaccctgaactgaagctagcttatgctgttcgaggcaataaattggaaagaggccagaagatcagtgagcagattgtcattggcacccctgggactgtgctggactggtgctccaagctcaagttcattgatcccaagaaaatcaaggtgtttgttctggatgaggctgatgtcatgatagccactcagggccaccaagatcagagcatccgcatccagaggatntgcccaggaactgccagatgctgcttttntcgncanctttgaagactctgtgtggagtttgccagaaagtggnccnnacccaangntatnaactgaagggggggagngacctggncacatca

SEQ ID NO: 258715 - DNA, 1808 bp, Homo Sapiens
gtgctcaccgccgcttccggtccgcgtgaggtgcattctcgcgccggtggcgaggttagggcccgcgttgcgacgtggtgcagcgcatattttcacaagtgggtctcccttgtccgggactatggccaccgactcgtgggccctggcggtggacgagcaggaagcggctgtcaagtcgatgaccaatttgcagatcaaggaagagaaagtcaaagcagataccaatggtattatcaaaaccagtaccactgccgagaaaacagatgaagaggagaaagaggacagagctgcccagtccttactcaacaagctgatcagaagcaaccttgttgataacacaaaccaagtggaagtcctgcaacgggatccaaactcccctctgtactcggtgaagtcgtttgaagagcttcggctgaaaccacagcttctccagggagtctatgccatgggcttcaatcgaccctccaagatacaagagaacgcattacccatgatgcttgctgaacccccacagaatctgattgcccagtctcagtctggcactggtaaaacagctgcctttgtcttagccatgctcagccgagtggagccatcagacagatacccccagtgtctgtgcctctccccaacatatgagctggcgcttcaaacaggaaaaagtgattgagcagatgggcaaatttttacccagaactgaaaagcttgcctatgccgttcgaggcaataaattggaaagaggccagaagatcagtgagcagattgtcattggcacccctgggaccgtgctgaactggtgctccaagctcaagttcattgatcccaagaaaatcaaggtgtttgttctggatgaggctgatgtcatgatagccactcagggccaccaagatcagagcatccgcatccagaggatgctgcccaggaactgccagatgctgcttttctccgccacctttgaagactctgtgtggaagtttgcccagaaagtggtcccagacccaaatgttatcaaactgaagcgtgaggaagagaccctggataccatcaagcagtactatgtcctgtgcagcagcagagacgagaagttccaggccttgtgtaacctctacggggccatcaccattgctcaagccatgatcttctgccatactcgcaaaacagctagttggctggcagcagagctctcaaaagaaggccaccaggtggctctgctgagtggggagatgatggtggagcagagggctgcggtgattgagcgcttccgagagggcaaagagaaggttttggtgaccaccaacgtgtgtgcccgcggcattgatgttgaacaagtgtctgtcgtcatcaactttgatcttcccgtggacaaggacgggaatcctgacaatgagacctacctgcaccggatcgggcgcacgggccgctttggcaagaggggcctggcagtgaacatggtggacagcaagcacagcatgaacatcctgaacagaatccaggagcattttaataagaagatagaaagattggacacagatgatttggacgagattgagaaaatagccaactgagaagctccaccagccactgatgccagcccctggcactgcccctgcacaggagacaagtgcgttcagggcacaggccccgacatcaccccaaggacaacggcacaagtagagagaaactacctacctcacttcaaattatgtttggacttgacaaaaatgtatgcaaatgatgggggatggtagaaaaaaattatttacacaaccttggaagattaggcatgaatacacagagatttaccttttgga

SEQ ID NO: 258716 - DNA, 1322 bp, Homo Sapiens
  misc_feature (1174)..(1174): n is a, c, g, or t
ggactcgcaaaacagctagttggctggcagcagagctctcaaaagaaggccaccaggtggctctgctgagtggggagatgatggtggagcagagggctgcggtgattgagcgcttccgagagggcaaagagaaggttttggtgaccaccaacgtgtgtgcccgcggcattgatgttgaacaagtgtctgtcgtcatcaactttgatcttcccgtggacaaggacgggaatcctgacaatgagacctacctgcaccggaatcgggcgcacgggccgctttggcaagaggggcctggcagtgaacatggtggacagcaagcacagcatgaacatcctgaacagaatccaggagcattttaataagaagatagaaagattggacacagatgatttggacgagattgagaaaatagccaactgagaagctccaccagccactgatgccagccctggcactgcccctgcacaggagacaagtgcatttagggcacaggccccgacatcaccccaaggacaacggcagaagtagagagaaactacctacctcacttcaaattatgtttggacttgacaaaaataggtgcaaatgatggggggcaatagaagaaaaaatttgcattttggaaaattgggtcctttccccacttttttaaagccacattcccccatctttataataatctggtcacagtggtagtcgctggccccaggacccccctcctgattttggctaggcatcgtggaaccagctccagcccctgaagaaacgatagatgtgcaggttgtgcggaagaggctgagtggaaaatggtgtgagccccaccgctgtgcatcgaatgagggaagtggcagcagagaggccagagctgccccctctctgtctcttcaatggacccttcacaagtgtttctcctgcccttggggctgtcttccttctcctgaaatccagagactttcttgctcatcccttctccctttcacttctgttctctgctgcagaaagcagacttgcatatccctgatgagcagctcggctacttttgtaaacttcagatttggagagaaacacgaaagtctgaatcctgaccccttgagagagagtgatctggcgagggccgatgaaagggctgggcctggtcttgccttctcttctctcggttgctccctctgcctangcccctggtactcagtcacggcagccaggagacccccggtgagtttctgagcgccttccgtatttggttcttacccccaggtgtcccaccggggcccaaagctggaacaaaaattttggaatgggaagttattgaccagggggaattt

SEQ ID NO: 258717 - DNA, 423 bp, Homo Sapiens
tgcaacctctgtctccagggttcaagcaattttcctgccttgggattgcaggcatgagcaccgcacctggcatgtgtgagttcttaccacctcagggaaatccaaacagtctctcctagaaaggaatagtgtcaccaaccccacccatctccctgagaccatccgacttccctgtatacaaggatttctggctctaattgggcctgggaccccgagcctggcagaccaggtgggacacgtcctcttgcttcaccgcggggcacacacgttggtgggtcaccaaaaccttctctttgccctctcggaagcgctcaatcaccgcagccctctgctccaccatcatctccccactcagcaagaccacctggtggccttcttttgagagctctgctgccagccaactagctgttttgcgagtctgga

SEQ ID NO: 258718 - DNA, 2363 bp, Homo Sapiens
  misc_feature (431)..(431): n is a, c, g, or t
  misc_feature (433)..(434): n is a, c, g, or t
  misc_feature (442)..(442): n is a, c, g, or t
  misc_feature (460)..(460): n is a, c, g, or t
  misc_feature (475)..(475): n is a, c, g, or t
  misc_feature (550)..(550): n is a, c, g, or t
gagctgacggagagggccaccgcccagcaatagacggtgcctcagcctgccgagccgcagtttccgtggtgtgagtgagtccgggcccgtgtcccctctcccgccgccgccatgggctgcacgttgagcgccgaagacaaggcggcagtggagcgaagcaagatgatcgaccgcaacttacgggaggacggggaaaaagcggccaaagaagtgaagctgctgctactcggtgctggagaatctggtaaaagcaccattgtgaaacagatgaaaatcattcatgaggatggctattcagaggatgaatgtaaacaatataaagtagttgtctacagcaatactatacagtccatcattgcaatcataagagccatgggacggctaaagattgactttggggaagctgccagggcagatgaagcccggcaatnanntgttttanctggcagtgctgaaaaangagtcaagactccanaacaagcaggagtgaataaacggttatggcgagaaggtggggtacaagcatgcttcaacagaaccagggaatatnagctcaatgattctgcttcatattatctaaatgatctggatagaatatcccagtctaactacattccaactcagcaagatgttcttcggacgagagtgaagaccacaggcattgtagaaacacatttcaccttcaaagacctatacttcaagatgtttgatgtaggtggccaaagatcagaacgaaaaaagtggattcactgttttgagggagtgacagcaattatcttctgtgtggccctcagtgattatgaccttgttctggctgaggacgaggagatgaaccgaatgcatgaaagcatgaaactgtttgacagcatttgtaataacaaatggtttacagaaacttcaatcattctcttccttaacaagaaagacctttttgaggaaaaaataaagaggagtccgttaactatctgttatccagaatacacaggttccaatacatatgaagaggcagctgcctatattcaatgccagtttgaagatctgaacagaagaaaagataccaaggagatctatactcacttcacctgtgccacagacacgaagaatgtgcagtttgtttttgatgctgttacagatgtcatcattaaaaacaacttaaaggaatgtggactttattgagaagcatggatgttagtgaaagttactacagtgtggagtgttgagaccagacaccttttgctgtctcatggggcagctacaagcatgaacgggaccagggaatggcagcagcatgcagaatcttagcactctttagcacaatattttgtattagggaacttttaattgacatgagatgctaaagtcagacattggaattggaagaactataaagtgtgattcgatcgtcaagacatcacttggatttcttaatcttaaatgcttatggaagatgtgaagttgaggtgctgcattctagaacttcaatatgtagcttactctttttttccccccttcttaaaccaccagtggttcatttttaaggttttttcatcaagagaagaataactttactaaattttatttctttatttgcaaaagaatctttattaaaacaaacaatcttaactatgcacatgatgtgaccagatcatcttgaaaatattcctctttagtaggaactctttgtttttaactcttggtatggtcagaatataatacttccataattacttataattctttccggttactggggctataaatacaactttttaaatgaaatttatgttattatcctgctcaaagtaccattatggtttccatatggtaattacattggaaagttctgcaataagattctagttctctcttttctttaagcttatggttgaaggttaaccttgtttgtgcagattaccaaattactgctgatgtagtatgataaagtcagcttcttggatacagacacacccagggcagctgccaatcagaaatgcaaattgctaaattccaaacagaaccagtgactttgctgctacatatttactaaattgaccactttgattcttgcttgtttgtctcagttatagggagttttgtacatggtgcctcttgttttccatcttcatggccttttctgttgagaaacatctaaagtgtattaacagtgcatgcttttactttgtaaatgtggtgccaaatccctgtttgccatcgtttttactgtaccgatgttaactgtagtaatccttagccagtatgttcttttgctgaaactgttgcattttgggacttttttccactttgtcatgtgtacatttttaatctgttatagttggcggcagtattaaaatggtgagtaaaga

SEQ ID NO: 258719 - DNA, 1677 bp, Homo Sapiens
  misc_feature (286)..(297): n is a, c, g, or t
  misc_feature (312)..(312): n is a, c, g, or t
  misc_feature (315)..(315): n is a, c, g, or t
  misc_feature (327)..(327): n is a, c, g, or t
  misc_feature (883)..(883): n is a, c, g, or t
  misc_feature (1164)..(1164): n is a, c, g, or t
  misc_feature (1168)..(1168): n is a, c, g, or t
  misc_feature (1202)..(1202): n is a, c, g, or t
  misc_feature (1228)..(1228): n is a, c, g, or t
  misc_feature (1230)..(1230): n is a, c, g, or t
  misc_feature (1242)..(1242): n is a, c, g, or t
  misc_feature (1276)..(1276): n is a, c, g, or t
  misc_feature (1314)..(1314): n is a, c, g, or t
  misc_feature (1318)..(1318): n is a, c, g, or t
  misc_feature (1342)..(1342): n is a, c, g, or t
  misc_feature (1344)..(1344): n is a, c, g, or t
  misc_feature (1357)..(1357): n is a, c, g, or t
  misc_feature (1367)..(1367): n is a, c, g, or t
  misc_feature (1389)..(1389): n is a, c, g, or t
  misc_feature (1393)..(1393): n is a, c, g, or t
  misc_feature (1467)..(1468): n is a, c, g, or t
  misc_feature (1500)..(1500): n is a, c, g, or t
  misc_feature (1541)..(1541): n is a, c, g, or t
  misc_feature (1619)..(1619): n is a, c, g, or t
tgggatttgagtggttcaagtctttgctattgtaaatggtgctgcaataaacatacgtgtgcatgtgttttcatagtgctcctcaattcttaaaaaacaactgggggataaaacctcacagaggtgttataagaattacgtgtgggaagcaaccgtttatgtgcgatgtgcgttttaataagtacctgacacagaaagcattcaaggaaagacttatttacaggtaactaatgagaggattagccttttgataacagaagagctggtaggcaaagaggaggaattnnnnnnnnnnnnttacaaaatcttttnggngagaagaatgtngccagggaagcaagaggtaaaactctctcttcacactaactacccacctaggcaccaaagttaccctcaagaaaagtaaacagttttgctttgatttgtgttattcaagctggaaataagacacccaaggatggatgctcacctctagaagcaggaagacaagcaaccattatgcagggagcaaaagaagaggtagtggaaaaaaagattcttgcaaacagaacatccaaaaattaaggtctgtaaccaagaagaagctgttgatttcagggaatgggaaggaaacattttcaaaccaccatttggcagactcaatgctgggctctcatttgcattatctcttgaaatccacaatgatcctgccacataaaatccccatgtatagacaaggaaattgagtcaaggaggtgaggtcaatatctgaagttacaagatatttttcttgaaaaacatcaaattttagtaagccttctactgtcgcttttcagcaaagttctgtactacattctgtaacattacctatctgtaactatcaataaaaatttcccctttgtcnttcaattagaaatagaaacgaaaatgcaaaaagagaaacagtacagaaaaagttcctggcaataagaagttagaatctagggtaaaaatctaaaaggaaaatgagtaacatttccctttcaagtgcagagctttccgggagaatcccaggcagtgtctgagctaccagaaaagtaacccacttgtccccaatcacagatggaaggctaaaatgtttgtccacggccatctatatgcaaaaccgcctgtttctatctgtagattctgcacgaaatgcttttngctnagacgtgcaagcaaaacaagtgcagaccaacagnttatctgccaagcggttaggagaatnanttacaaaacctnacaagcaacatcagctcttccgtacaattctatnaagcacttcctgccacgggtcccgctatttaaaacaanttangctgctcgctccccacaaatcccntntagcacctctcgnttcctcattntagctaataaaccatgcactgnattnttccgaaagagaccccccgcccccgaccccgccacctccgccactttgcataactggccaaatgcattctccanntttgcaatcaaggagcttaattcacaattttngatggggcggggggaaccgccaagtgcaagaacacggaacngttgcaattcgcagttcagcaagaacaactcttgctctaggcattgctccgtcgacccgaggtggtggggtgggagantcttaccggcgtggaaacagttaaaaaggcacttttccttacaactcgcaagacaaca

SEQ ID NO: 258720 - DNA, 397 bp, Homo Sapiens
gacttgaagaggaccttgagcgccacgatgaaatggcttttcttctcccgagccaagtacacgtttccaaacttgcctttgcccagaggacgcccaatctcaaagtcatcaattgtgaagtgccgcgttaagatgtcgggtgtcccactgctattctccatcacattctggccaggggcagctgtgggctggacattggagcggctcatgaggacaagtgcagatggggtgacaggctctttccggaggactcgctggggcagggtgctcaggccagatggagcctgagaaggagcagggggtagctctgagggtgcctttgtctgatgaccggggtggaatgtgctggggtccaaggcactgctactctcccggccgcccgcaaacaactgaatct

SEQ ID NO: 258721 - DNA, 1250 bp, Homo Sapiens
gggagattcagttgtttgcgggcggccgggagagtagcagtgccttggaccccagctctcctccccctttctctctaaggatggcccagaaggagaactcctacccctggccctacggccgacagacggctccatctggcctgagcaccctgccccagcgagtcctccggaaagagcctgtcaccccatctgcacttgtcctcatgagccgctccaatgtccagcccacagctgcccctggccagaaggtgatggagaatagcagtgggacacccgacatcttaacgcggcacttcacaattgatgactttgagattgggcgtcctctgggcaaaggcaagtttggaaacgtgtacttggctcgggagaagaaaagccatttcatcgtggcgctcaaggtcctcttcaagtcccagatagagaaggagggcgtggagcatcagctgcgcagagagatcgaaatccaggcccacctgcaccatcccaacatcctgcgtctctacaactatttttatgaccggaggaggatctacttgattctagagtatgccccccgcggggagctctacaaggagctgcagaagagctgcacatttgacgagcagcgaacagccacgatcatggaggagttggcagatgctctaatgtactgccatgggaagaaggtgattcacagagacataaagccagaaaatctgctcttagggctcaagggagagctgaagattgctgacttcggctggtctgtgcatgcgccctccctgaggaggaagacaatgtgtggcaccctggactacctgcccccagagatgattgaggggcgcatgcacaatgagaaggtggatctgtggtgcattggagtgctttgctatgagctgctggtggggaacccaccctttgagagtgcatcacacaacgagacctatcgccgcatcgtcaaggtggacctaaagttccccgcttctgtgcccacgggagcccaggacctcatctccaaactgctcaggcataacccctcggaacggctgcccctggcccaggtctcagcccacccttgggtccgggccaactctcggagggtgctgcctccctctgcccttcaatctgtcgcctgatggtccctgtcattcactcgggtgcgtgtgtttgtatgtctgtgtatgtataggggaaagaagggatccctaactgttcccttatctgttttctacctcctcctttgtttaataaaggctgaagctttttgtaaa

SEQ ID NO: 258722 - DNA, 851 bp, Homo Sapiens
agtctctggggagcactctcaagggtggttccccaccacagttcatagcaagcactccgatgcaccacagatccaccttctcatggcatgcgccctcatcatctctggggcaaggtagtccagggtgccacacaagtgtcttcctcctcaggggagggcgcatgcacagaccagccgaagtcagcaatcttcagctctcccttgagccctaagagcagattttctggctttatgtctctgtgaatcaccttcttcccatggcagtacattagagcatctgccaactcctccatgatcgtggctgttcgctgctcgtcaaatgtgcagctcttctgcagctccttgtagagctccccgcggggggcatactctagaatcaagtagatcctcctccggtcataaaaatagttgtagagacgcaggatgttgggatggtgcaggtgggcctggatttcgatctctctgcgcagctgatgctccacgccctccttctctatctgggacttgaagaggaccttgagcgccacgatgaaatggcttttcttctcccgagccaagtacacgtttccaaacttgcctttgcccagaggacgcccaatctcaaagtcatcaattgtgaagtgccgcgttaagatgtcgggtgtcccactgctattctccatcaccttctggccaggggcagctgtgggctggacattggagcggctcatgaggacaagtgcagatggggtgacaggctctttccggaggactcgctggggcagggtgctcaggccagatggagcctggggtccaaggcactgctaccgacgcgtgggtcgacgatatcccggaattccggaccgtaccag

SEQ ID NO: 258723 - DNA, 1353 bp, Homo Sapiens
  misc_feature (25)..(25): n is a, c, g, or t
  misc_feature (72)..(72): n is a, c, g, or t
  misc_feature (340)..(341): n is a, c, g, or t
  misc_feature (410)..(767): n is a, c, g, or t
  misc_feature (1286)..(1286): n is a, c, g, or t
acattctaataataacggttgaagnataaattttgaaattagttaccaaaaatcatttactaaacagtagtnttactaaaaatactaggattgggaaaaataaacactaatagaaagtactccaaaatgttaacaacgtttctatgggcattgggattgggggtggtttatactttctcattttctgtattaccaacacttacaattcacaatcaggagaaaaacctattatatgatacttaaaacattaaatctctgattgtcacctataggaaaaggcaactcactatccatttgaaagatccctttagacttctgatcgacctcactcgataactgnncaacctctggacacaaagaggccgaattgtccccccaatttcacctcccctattacccacaacagcagnnnnnnnnnnnnnnnnnnnnnnnnnnnnnnnnnnnnnnnnnnnnnnnnnnnnnnnnnnnnnnnnnnnnnnnnnnnnnnnnnnnnnnnnnnnnnnnnnnnnnnnnnnnnnnnnnnnnnnnnnnnnnnnnnnnnnnnnnnnnnnnnnnnnnnnnnnnnnnnnnnnnnnnnnnnnnnnnnnnnnnnnnnnnnnnnnnnnnnnnnnnnnnnnnnnnnnnnnnnnnnnnnnnnnnnnnnnnnnnnnnnnnnnnnnnnnnnnnnnnnnnnnnnnnnnnnnnnnnnnnnnnnnnnnnnnnnnnnnnnnnnnnnnnnnnnnnnnnnnnnnnnnnnnnnnnnnnnnnnnnnnnnnnnnnnnnnnnnnagcagtgatcaccaagtcttctttagaaatgacactacctaggatatcttagaagaggaatcaaactttcttttaggtattaattgccctcagcaattgtgggttaattaaaactgccaaaataaaaattagcagagagagttacaggcagaggttatagcccatacaatggcatgaagataagataggatctggagacagcccatcatcaggactcttctctccagcaggaattagttgtcataaagcctggctcagaatccccatgtgttgcttttcctcttcctacttataatcactgagttggggagcctattctagacccagaatgacctgtgagactctgaagtactcagaattagtgtggtgagagactggtgcattttatggggaaaagggcatgtatatacacagggaaagaatgcatatcagaggctagagagacagtgggggactgggagtgtttgtgtcccatgacttctggggacttcagggcagttggggaaggtattaaagggnaccacgggtgatcctgcctttcccagggttctgcttatttcccccttttccctggcccacacccttc

SEQ ID NO: 258724 - DNA, 1051 bp, Homo Sapiens
  misc_feature (10)..(10): n is a, c, g, or t
  misc_feature (18)..(18): n is a, c, g, or t
  misc_feature (21)..(21): n is a, c, g, or t
  misc_feature (25)..(25): n is a, c, g, or t
  misc_feature (34)..(34): n is a, c, g, or t
  misc_feature (42)..(42): n is a, c, g, or t
  misc_feature (45)..(45): n is a, c, g, or t
  misc_feature (57)..(58): n is a, c, g, or t
  misc_feature (69)..(69): n is a, c, g, or t
  misc_feature (85)..(85): n is a, c, g, or t
  misc_feature (102)..(102): n is a, c, g, or t
  misc_feature (106)..(106): n is a, c, g, or t
  misc_feature (109)..(109): n is a, c, g, or t
  misc_feature (111)..(111): n is a, c, g, or t
  misc_feature (114)..(115): n is a, c, g, or t
  misc_feature (119)..(119): n is a, c, g, or t
  misc_feature (130)..(130): n is a, c, g, or t
  misc_feature (198)..(198): n is a, c, g, or t
  misc_feature (209)..(209): n is a, c, g, or t
  misc_feature (214)..(214): n is a, c, g, or t
  misc_feature (224)..(224): n is a, c, g, or t
  misc_feature (229)..(230): n is a, c, g, or t
  misc_feature (232)..(232): n is a, c, g, or t
  misc_feature (239)..(239): n is a, c, g, or t
  misc_feature (242)..(599): n is a, c, g, or t
ttatcacaanaattcctntgnaganagagccctnatgatggntgnctcaaaacctannttatcttcatnccattgtatgggctanaacctctgccagtaacnctcncgncnaanntttnttttggcagtnttaattaacccacaattgctgagggcaattaatacctaaaagaaagtttgattcctcttctaagatancctaggtagtntcatntctaaagaanacttnntnatcactnctnnnnnnnnnnnnnnnnnnnnnnnnnnnnnnnnnnnnnnnnnnnnnnnnnnnnnnnnnnnnnnnnnnnnnnnnnnnnnnnnnnnnnnnnnnnnnnnnnnnnnnnnnnnnnnnnnnnnnnnnnnnnnnnnnnnnnnnnnnnnnnnnnnnnnnnnnnnnnnnnnnnnnnnnnnnnnnnnnnnnnnnnnnnnnnnnnnnnnnnnnnnnnnnnnnnnnnnnnnnnnnnnnnnnnnnnnnnnnnnnnnnnnnnnnnnnnnnnnnnnnnnnnnnnnnnnnnnnnnnnnnnnnnnnnnnnnnnnnnnnnnnnnnnnnnnnnnnnnnnnnnnnnnnnnnnnnnnnnnnnnnnnnnnnnnnnnnnnnnctgctgttgtgggtaataggggaggtgaaattggggggacaattcggcctctttgtgtccagaggttgtgcagttatcgagtgaggtcgatcagaagtctaaagggatcttttcaaatggatagtgagttgccttttcctataggtgacaatcagagatttaatgttttaagtatcatataataggtttttctcctgattgtgaattgtaagtgttggtaatacagaaaatgagaaagtataaaccacccccaatcccaatgcccatagaaacgttgttaacattttggagtactttctattagtgtttatttttcccaatcctagtatttttagtaaaactactgtttagtaaatgatttttggtaactaatttcaaaatttatacttcaaccgtttattattagaatgtaatgcaagatgtattgcaataaaacttgagttttaaaagtt

SEQ ID NO: 258725 - DNA, 152 bp, Homo Sapiens
aataaattacccagtatcaggtagtatcttcatagcactgtgaaaatggactaatacaagcagtgatcaccaagtcttctttagaaatgacactacctaggatatcttagaagaggaatcaaactttcttttaggtattaattgccctcagc

SEQ ID NO: 258726 - DNA, 858 bp, Homo Sapiens
  misc_feature (584)..(584): n is a, c, g, or t
  misc_feature (588)..(588): n is a, c, g, or t
  misc_feature (608)..(608): n is a, c, g, or t
  misc_feature (647)..(647): n is a, c, g, or t
  misc_feature (650)..(650): n is a, c, g, or t
  misc_feature (657)..(657): n is a, c, g, or t
  misc_feature (660)..(660): n is a, c, g, or t
  misc_feature (665)..(665): n is a, c, g, or t
  misc_feature (682)..(682): n is a, c, g, or t
  misc_feature (709)..(709): n is a, c, g, or t
  misc_feature (716)..(716): n is a, c, g, or t
  misc_feature (718)..(718): n is a, c, g, or t
  misc_feature (721)..(721): n is a, c, g, or t
  misc_feature (731)..(731): n is a, c, g, or t
  misc_feature (755)..(755): n is a, c, g, or t
  misc_feature (760)..(760): n is a, c, g, or t
  misc_feature (767)..(767): n is a, c, g, or t
  misc_feature (770)..(770): n is a, c, g, or t
  misc_feature (782)..(782): n is a, c, g, or t
  misc_feature (784)..(784): n is a, c, g, or t
  misc_feature (787)..(788): n is a, c, g, or t
  misc_feature (791)..(791): n is a, c, g, or t
  misc_feature (793)..(793): n is a, c, g, or t
  misc_feature (823)..(823): n is a, c, g, or t
  misc_feature (827)..(827): n is a, c, g, or t
  misc_feature (831)..(832): n is a, c, g, or t
  misc_feature (839)..(840): n is a, c, g, or t
atagtcgctctgagcatcttgtctgcctccatccagctctcactttccctgtctggctctaattctggttgacccagagggcatagctgaggctcggaggtcaggaaccgtggactccaggaggcagttttgagggtccttcaggcttggcacggcaggataccaccattccatctcagaggcatgaggagtccctaggccccgacttggtgacccttgccctgtgtgccccctcaacagtggccaggccctcctgtgtgtgtctgctgggggagcaggagccgggtgtgggggcatgggaaggcgggacgcctgggttcccacaggcccggtggctgagtcaccaggcggccatctggctcccattagcccagggcggcagggggctccatggggcgggccctgcggccagctgggggcagggacgctggggcaggctgtgtgtgggatgactcaggacccatgataacagcctgtgcgcatttggggagtgtaaacaggagagggagaggaaggcggaggaagggaaaattgtggttgggcagaggggggctggtggggctgagaagggtagagtccccccncccnctacactcaagctggcaggncccgtgatccacagcctgggtcctggggagagaagaganctncccccanccnccctncctggggtctcctcccncccctggggctgtattactcagtggtnagggttntnctncctatacgcncccaggtttgagggaagggggaanaaggnccccagnccntggagtgggggntnaannccnanaaataaagggtgagacaaacaaagagaggnaaantgannaaagacnnatagagaggtggaaatgt

SEQ ID NO: 258727 - DNA, 734 bp, Homo Sapiens
  misc_feature (576)..(576): n is a, c, g, or t
  misc_feature (582)..(583): n is a, c, g, or t
  misc_feature (596)..(596): n is a, c, g, or t
  misc_feature (606)..(606): n is a, c, g, or t
  misc_feature (622)..(622): n is a, c, g, or t
  misc_feature (691)..(691): n is a, c, g, or t
ggcacgagacaggttcaggggagttagtatcacctatcaatcacctacttgagtgcaagctttgactctgtcacctgacattcaagtccccctctgcccccatgccagtcttatcccctcccctacatatgccctatcctgcagccaaattggactctgttcttcctgacaagacctggtattggcatctctatgcctcagtttgccttccctccactttaaaaagcctcttcagtctcgatacaaaaaacatcccacacatgttctaaaaccatgctttccttgatttctcctcatgtcaagacatttcttacttctctagtctcctagcattttgtgcctcacaaccctcaggacaggccagctagtgtatggctgtgggtttttatctaacctcccctgcctgaccctgagcccttgtggggagtatactcaccctactcctacagtgccttgcattccgtagctgctcagtacattaacccattcaatgtctttaagatttttacaagttagttttcctgtaattactaatcatttatctttaattctgagtaaaattcacaacaacaaatnaaaggnnatagtagtaatgntttaagctgnttagtcaataaagatntaatgcgtcagttattggactgtttggtttgaagccaatcaaccagtctggtatgtaaatctactgttntattatacaagtaacacaaaatgtattgcctcagtcaaggaag

SEQ ID NO: 258728 - DNA, 1028 bp, Homo Sapiens
  misc_feature (12)..(12): n is a, c, g, or t
  misc_feature (19)..(19): n is a, c, g, or t
  misc_feature (28)..(28): n is a, c, g, or t
  misc_feature (51)..(52): n is a, c, g, or t
  misc_feature (56)..(56): n is a, c, g, or t
  misc_feature (68)..(68): n is a, c, g, or t
  misc_feature (97)..(97): n is a, c, g, or t
ggattaaccaanactgganacccctatntagtggagagggaggtcagatgnnggtnaatagaaacatncttttggggagatgctagacagacgcctngcctaggtggttaccctagcccagcccctcctgcctgtgcccacctgcagctgggcctgcagcagccggatgtcctggttctccttggccagcttgtccagcagaagacccatgttttgcaggctggggacactgtcaggaggcactggggcctgcagctgttcccttagcccatcctgcctgtcccccaacagcttccagcacctcggggtctgggaggacctgccgctccacttcctccatgggcccagtctcagactctgagaggccacccccagcctggttctccacagccaggggcaccatgggctgaggtgggccgcctcccggccccgccgtctccgcagaccctccatgtccacgtcggtgtcatcgtcactgctggagcagcggccctcctccctgatccaagctgctttgggggttgaaggcaggctctgtggagggctctggccttccaggtcctgtgtgtctggtcccaggcctgtcaccacggtggtctcctgcaggtctccctggactactgtgtctcctgggccaggaggctccacaccacaaacatcaccttccagggtgcccttgacctcagtctcctctgttagaatgctgccagactgagggctttcagtctggaagagcgtcccttctccatccatggtcccagctaattctttcccatctgtcttggaggggctgtgaggggcctgcagggctctctcagattctgggtccatcctggatgccgggcccagtgtctccactggcaggctctcggagccagcaagcacccagctattatcagagtctgggcaggaggccatagttgctgaggtccctgaggctgctgtggctgccacctgaaccagctcttgcttcggtcttcagcttaacttgttgcaggcttccctttgtttgcagcccgagaagaaaa

SEQ ID NO: 258729 - DNA, 1992 bp, Homo Sapiens
  misc_feature (231)..(231): n is a, c, g, or t
  misc_feature (1302)..(1302): n is a, c, g, or t
  misc_feature (1352)..(1352): n is a, c, g, or t
  misc_feature (1367)..(1367): n is a, c, g, or t
  misc_feature (1378)..(1378): n is a, c, g, or t
  misc_feature (1390)..(1390): n is a, c, g, or t
  misc_feature (1505)..(1505): n is a, c, g, or t
  misc_feature (1538)..(1538): n is a, c, g, or t
  misc_feature (1610)..(1610): n is a, c, g, or t
  misc_feature (1783)..(1795): n is a, c, g, or t
  misc_feature (1891)..(1891): n is a, c, g, or t
  misc_feature (1928)..(1928): n is a, c, g, or t
  misc_feature (1936)..(1936): n is a, c, g, or t
  misc_feature (1956)..(1956): n is a, c, g, or t
tgtcctgctccccaatgacaggttgctcagagactgctgatttccatccctatataaagagagtccctggcatacagggactgctctgctccaggcatctgccacaatgtgggtgcttacacctgctgcttttgctgggaagctcttgagtgtgttcaggcaacctctgagctctctgtggaggagcctggtcccgctgttctgctggctgagggcaaccttctggctgcnagctaccaagaggagaaagcagcagctggtcctgagagggccagatgagaccaaagaggaggaagaggaccctcctctgcccaccaccccaaccagcgtcaactatcacttcactcgccagtgcaactacaaatgcggcttctgtttccacacagccaaaacatcctttgtgctgccccttgaggaagcaaagagaggattgcttttgcttaaggaagctggtatggagaagatcaacttttcaggtggagagccatttcttcaagaccggggagaatacctgggcaagttggtgaggttctgcaaagtagagttgcggctgcccagcgtgagcatcgtgagcgatggaagcctgatccgggagaggtggttccagaattatggtgagtatttggacattctcgctatctcctgtgacagctttgacgaggaagtcaatgtccttattggccgtggccaaggaaagaagaaccatgtggaaaaccttcaaaagctgaggaggtggtgtagggataataaagtcgctttcaagataaattctgtcataaatcgttacaacgtggaagaggacatgacggaacagatcaaagcactaaaccctgtccgctggaaagtgtcccagtgcctcttaattgagggtgagaattgtggagaagatgctctaagagaagcagaaagatttgttattggtgatgaagaatttgaaagattcttggagcgccacaaagaagtgtcctgcttggtgcctgaatctaaccagaagatgaaagactcctaccttattctggatgaatatatgcgctttctgaactgtagaaagggacggaaggacccttccaagtccatcctggatgttggtgtagaagaagctataaaattcagtggatttgatgaaaagatgtttctgaagcgaggaggaaaacacatatggagtaaggctgatctgaagctggattggtagagcggaaagtggaacgagacttcaacacaccagtgggaaaacccctagagtcactgccattgtcggcaacactatcccgttggtatttcccagtggctgaaaacctgatnttctgctgcacgtggcatctgattacctggggtcactggacacacgaatnacttggatagcaaancctgagacaanggaaaaccattnacttcacttcattggcttataaccttgttgttattgaaacagcacttctgtttttgagtttgttttagctaaaaagaaggaacacacacaggaataatgaccccaaaaaggcttngataaggcccctatacacaggacctgacatttngctcaatgatgcgtttgtaagaaataagctctagtgatatctgggggggcaaaatttaatttggatttgatnttttaaaacaatgttaactgcgatttctatatttccattttgaaactatttcttgttccaggtttgttcatttgacagagtcagtattttttgccaaatatccagataaccagttttcacatctgagacattacaaagtatctgcctcaattatttctgctggttataatgcnnnnnnnnnnnnngcctttatgccattgcagtcttgtactttttactgtgatgtacagaaatagtcaacaggatgtttccaaggacatatggatatggtaatcctaccnattttccaaggaaggtcttctaggaaaggggataacncatggggnaaggacgggtgtgggtgccngccccggcccacggtgggccgtttccctggaatggt

SEQ ID NO: 258730 - DNA, 1285 bp, Homo Sapiens
gtttcaatacatactgcattctgtgctacacaagccttagcctcagtggagctgtggttctcttggtactttcttgtcaaacaaaaccaatggctctgggtttggagaacacagtggctggttttaaaaattctttccacacctgtcaaaccaaaaatctatcagcccacgtggtgtggttggtgaacagtgcatgccaggaggaagcagtccctcctcaccagctctccagccagggacgatcacacagagatgaatggcatctgagtattacgggcatccagagccactgctgactcccacttggcacgccaccatttcagtcaccagactggggtgccctccgatgggtgggaataagtctgcttcatgccaaggctgggctttgggtcccaccaagatgagttctctgtaagactgtggtggagttgcaccaggaggtgcctctgcctctcgacttgcaccctggtcatttgtaagggaaaagagctggaggtggggagagaaagatctccttcagttgggagtccttccacttcaacactggagaactgagccttgcatctctccagggtccaaggccacgcttggtgcacaggcaagacttgcttcagccccaggtgtggtgacttagacctaggaaaccaattatgagtggaaagtgaccctctagttcaactgtgccagaggaaacagccctccagtgcccacctgcctcactcctccctatcatgtaccgtgaaaaccccctctgatggcctcaaggcagtgcctgcaggccgaggcccttctgggggtttctatctttcttccaccagactccaagcccactctcctccaagactgtgttgtcttttctcaccaagagtattaacactactaagtctttcaccttaacttatgactcaggatttattcacgtcctgcccactctaggctcacaggaataaaatcaagtgctagacacactggctgctactaaggcactagcctctgtagctggtggtggcagcgtggggtgccgcccagcgtgctgggtcctggcagtgcctctgctgtgctgcacattgagccctttctcagtcagtggagtatcaagttgggccatctgtctactgacctggccttcatgtaagcagctgtgggctgcgggcagacaggagctcagagatgcagcatgaggcgcttagaaaaacctggccatttgctgcctctaattcccttttgctttgccatattgggctatgtattacctccttgaaataataaaagaataacattttct

SEQ ID NO: 258731 - DNA, 1375 bp, Homo Sapiens
tactttttgtctttttgagtcagctctgtataaactcatttctctcaagcttcctgggaaataaaaaccaagatatttcatttattctttgcagttaacaagagatggcagcgggctcaaggtaggtatgttcttgataattcagagtcagaaagtacttcttcttgagcagaaggttcataatctcctacattttcagccaactcaatatctaactcatcattactttctgcactgtaatcaacttcttcaaggaatcgaggttcatcttcatccaagacataagtggtagggctagttactttgcagcttgattcaattaaatcattttcaaagtcaagcaggctggaaggcagattatactccaatggagaggtcagtcttttcaaacgtaaaagaccaacacaaaattttgctcccatctcttccagttctcgggtaccaatctgtaaacccttgtattttccctgatcacagccacataaagtactctccatggtataacttctttgtactcctatttccctccaaactacaacacgtgctgtggattctttagatttttccactacgaagctacagctgctcatgcaaaatgctggggcgatatggctcagtatcttaggcaaagtcctgtatcccgtatcctccacaacatcacatgaagttgcattatcattggtatgccacactgtctctttgatgctgcaaccatacataaatacattcttctttcgggaatggccatgataatcacaataaaccaagggtaaacgcttcactggcagccaagtattgcaaccagccccttagcatggtaaattgtaggatgtaaatccggacttgggactttgccactgcctattcaaatcctctccacttaaagaacagcgatgatttccattgatgacaccatctggatttaacatagggacaattttaaaaatataagattctcgtaagctctgagcagtggggttattgctcatgagatattccaacgttcctttcataacccaacttgcattagtttctccaggatgtacccgagcagacaagaaaacgtaagggcgatttctgaaatggcagatatgttcatataattagactctggcattgctgttataggcacccaggggcagctgttttcagacacgggtttaccatacacatcttttccaaaatagaattgctgaagattgggtgctgaatcccaattttggagaagcgtttggaaaggtgaaaccgatatgggtagggggtaaccaaggtgcaaacatcatttttatgtgggaaatggccaggaaatggtaatgggtagaaggaattttcctttttgccacctggggaaaatgggaattttggggaaagagtt

SEQ ID NO: 258732 - DNA, 542 bp, Homo Sapiens
aggagcggccgggatgggcctccgggacggtgtgccaggccggggccaagtcggaggcccctcgctctgggtgggcgctggggcccgcgagggctactgaaacaagctcacatcttcctgtgggaaaccttctagcaacaggatgagtctgcagtggactgcagttgccaccttcctctatgcggaggtctttgttgtgttgcttctctgcattcccttcatttctcctaaaagatggcagaagattttcaagtcccggctggtggagttgttagtgtcctatggcaacaccttctttgtggttctcattgtcatccttgtgctgttggtcatcgatgccgtgcgcgaaattcggaagtatgatgatgtgacggaaaaggtgaacctccagaacaatcccggggccatggagcacttccacatgaagcttttccgtgcccagaggaatctctacattgctggcttttccttgctgctgtccttcctgcttagacgcctggtgactctcatttcgcagcaggccacgctgctggcctccaatg

SEQ ID NO: 258733 - DNA, 1364 bp, Homo Sapiens
  misc_feature (1329)..(1329): n is a, c, g, or t
tccggtttccggccgcggtatgaggggcggggccggggctgctgtgggagagttcggttgctgcggcggggcctgcacgttgactgtgggaaactcggaaacaagctcacatcttcctgtgggaaaccttctagcaacaggatgagtctgcagtggactgcagttgccaccttcctctatgcggaggtctttgttgtgttgcttctctgcattcccttcatttctcctaaaagatggcagaagattttcaagtcccggctggtggagttgttagtgtcctatggcaacaccttctttgtggttctcattgtcatccttgtgctgttggtcatcgatgccgtgcgcgaaattcggaagtatgatgatgtgacggaaaaggtgaacctccagaacaatcccggggccatggagcacttccacatgaagcttttccgtgcccagaggaatctctacattgctggcttttccttgctgctgtccttcctgcttagacgcctggtgactctcatttcgcagcaggccacgctgctggcctccaatgaagcctttaaaaagcaggcggagagtgctagtgaggcggccaagaagtacatggaggagaatgaccagctcaagaagggagctgctgttgacggaggcaagttggatgtcgggaatgctgaggtgaagttggaggaagagaacaggagcctgaaggctgacctgcagaagctaaaggacgagctggccagcactaagcaaaaactagagaaagctgaaaaccaggttctggccatgcggaagcagtctgagggcctcaccaaggagtacgaccgcttgctggaggagcacgcaaagctgcaggctgcagtagatggtcccatggacaagaaggaagagtaagggcctccttcctcccctgcctgcagctggcttccacctggcacgtgcctgctgcttcctgagagcccggcctctccctccagtacttctgtttgtgcccttctgcttcccccattcccttccacagctcatagctcgtcatctcggcccttgtccacactctccaagcacattacaggggacctgattgctacacgttcagaatgcgtttgctgtcatcctgcttggcctggccaggcctggcacagccttggcttccacgcctgagcgtggagagcacgagttagttgtagtccggcttgcggtggggctgacttcctgttggtttgagcccctttttgttttgccctctgggtgttttctttggtcccgcaggagggtgggtggagcaggtggactggagtttctcttgagggcaataaaagttgtcatggtgtgctattcccncgccagcccgttcgccaaccaccaaaccctgtcgg

SEQ ID NO: 258734 - DNA, 1427 bp, Homo Sapiens
  misc_feature (1005)..(1005): n is a, c, g, or t
  misc_feature (1198)..(1246): n is a, c, g, or t
cccgatgggtgccgaggcgtcctcctcttggtgccctggcactgctcttcccgaagaacgcctttcagttaaacgggcgtcggaaatctcgggcttcctggggcagggatcgtcgggagaggccgctctggacgtgttgacacacgtgctggagggggcaggaaacaagctcacatcttcctgtgggaaaccttctagcaacaggatgagtctgcagtggactgcagttgccaccttcctctatgcggaggtctttgttgtgttgcttctctgcattcccttcatttctcctaaaagatggcagaagattttcaagtcccggctggtggagttgttagtgtcctatggcaacaccttctttgtggttctcattgtcatccttgtgctgttggtcatcgatgccgtgcgcgaaattcggaagtatgatgatgtgacggaaaaggtgaacctccagaacaatcccggggccatggagcacttccacatgaagcttttccgtgcccagaggaatctctacattgctggcttttccttgctgctgtccttcctgcttagacgcctggtgactctcatttcgcagcaggccacgctgctggcctccaatgaagcctttaaaaagcaggcggagagtgctagtgaggcggccaagaagtacatggaggagaatgaccagctcaagaagggagctgctgttgacggaggcaagttggatgtcgggaatgctgaggtgaagttggaggaagagaacaggagcctgaaggctgacctgcagaagctaaaggacgagctggccagcactaagcaaaaactagagaaagctgaaaaccaggttctggccatgcggaagcagtctgagggcctcaccaaggagtacgaccgcttgctggaagagcacgcaaagctgcaggctgcaatacatggtcccatggacaagaaggaagagtaaggggcctccttcctcccctgcctgcagctggcttccaccgggcacgtgcctgctgcttncctgagagcccgggcctcctccctcccagtaccttctggtttgtgccccttctgccttccctcaattccctttccacagctcataagcttcgtagtctcgggccccttgtcccaatgcttcaagccacattacagggggaccctgaattgctccacctttcaccaatgcgttttgcctgcccccccctgcttnnnnnnnnnnnnnnnnnnnnnnnnnnnnnnnnnnnnnnnnnnnnnnnnntggaaccgggcaaaaaacccccaacttcaattgcgaagatccatgattctacgagtgcggccccttgcatttccctcactgcccctctaacaccccccaatttgcgcacttcaccctccgggcgcgtttctccttttgacacccccctcaaaccgaatagcgtatcatccacccctccatt

SEQ ID NO: 258735 - DNA, 924 bp, Homo Sapiens
  misc_feature (836)..(846): n is a, c, g, or t
acgagggaacatcccggggcatggagacttccactgaagcttttccgtgcccagaggaatctctacattgctggcttttccttgctgctgtccttcctgcttagacgcctggtgactctcatttcgcagcaggccacgctgctggcctccaatgaagcctttaaaaagcaggcggagagtgctagtgaggcggccaagaagtacatggaggagaatgaccagctcaagaagggagctgctgttgacggaggcaagttggatgtcgggaatgctgaggtgaagttggaggaagagaacaggagcctgaaggctgacctgcagaagctaaaggacgagctggccagcactaagcaaaaactagagaaagctgaaaaccaggttctggccatgcggaagcagtctgagggcctcaccaaggagtacgaccgcttgctggaggagcacgcaaagctgcaggctgcagtagatggtcccatggacaagaaggaagagtaagggcctccttcctcccctgcctgcagctggcttccacctggcacgtgcctgctgcttcctgagagcccggcctctccctccagtacttctgtttgtgcccttctgcttcccccattcccttccacagctcatagctcgtcatctcggcccttgtccacactctccaagcacattacagggggacctgattgctacacgttcagaatgcgtttgctgtcatcctgcttggcctggccaggcctggcacagcccttggcttccacgcctgagcgtggagagcacgagttaagttgtagtccggctttgcggggggggctgacttcctggtgggtttgagcccnnnnnnnnnnngccctctgggtgttttcttgggccccccaggaaggttggcttgaaccaggggggactggaattttctccttgagggcc

SEQ ID NO: 258736 - DNA, 508 bp, Homo Sapiens
  misc_feature (408)..(408): n is a, c, g, or t
  misc_feature (426)..(426): n is a, c, g, or t
  misc_feature (433)..(433): n is a, c, g, or t
  misc_feature (464)..(464): n is a, c, g, or t
  misc_feature (472)..(472): n is a, c, g, or t
  misc_feature (477)..(477): n is a, c, g, or t
gcggggctgcacgttgactgtgggaaactcggaaacaagctcacatcttcctgtgggaaaccttctagcaacaggatgagtctgcagtggactgcagttgccaccttcctctatgcggaggtctttgttgtgttgcttctctgcattcccttcatttctcctaaaagatggcagaagattttcaagtcccggctggtgggagttgttagtgtcctatgggcaacaccttctttgtgggttcttcattgtcatccttgtgctgttgggtcatcgatgccgtgcggcgaaatttcgggaagtatggatggatgttgacgggaaaagggtgaacctcccaggaacaatcccggggggccatggggaggcactttcccacatggaagctttttccgtggccccaggagggantctcttacattgctgggnttttccntggttgctgttccttcccgctttaggacgcnggggtgantttcnttttcggcagcagggccacgttgttgggctt

SEQ ID NO: 258737 - DNA, 1582 bp, Homo Sapiens
  misc_feature (21)..(21): n is a, c, g, or t
  misc_feature (33)..(33): n is a, c, g, or t
  misc_feature (41)..(41): n is a, c, g, or t
  misc_feature (154)..(154): n is a, c, g, or t
  misc_feature (158)..(158): n is a, c, g, or t
  misc_feature (687)..(687): n is a, c, g, or t
  misc_feature (700)..(700): n is a, c, g, or t
  misc_feature (707)..(707): n is a, c, g, or t
  misc_feature (1169)..(1169): n is a, c, g, or t
  misc_feature (1326)..(1326): n is a, c, g, or t
tagtaatgtttataaatttgntttatagtagtntgtaaatnattatcagaaatagtaatgtctataaaccacttactttaagagacaatcaggaactatgatgagggcaataataaaaggagaaatcttacaaaaaattaacctggatgttgtncttnctctaaggttaagtcactgagggaaacagattcagtattatccaatggcttaaccatccttccttctttctgtttgctttttggtggtggctgggttacaaagagcagtgtcttctgccctgaaggtagcagtattacggtgggtgcctagaggtcaattattggtttagaagagattcaggcccttaacttttacatgtgctttccaggaaaggagacactttctttctcagccctgtgtgaggactatgttagcccagaaagtgttcttggaccactgggtgcccattctcagtgctaggaacaggaagaccctggattcctggtagaatttatggatcctacagctttctctccatcaaactttaagtcacagtaagagaggactctggagtcacaggcacagcacggagaggtcagcgtccttatgccgactcctggtcctagacatgggtcttaagatccagtagtcagtaggtctgtagcaaagtcagggactggctagatctctccacagcagaagaaagcncatacatgctganctgaggnacttaatctaacagtttaccaacaaactcataacgcatctcttcctccctgtgatgagagtactgctttcatgtgtactgtctgataacgggtgagggcagaattcttagtgaagcctctctcacagtgagaacacctgtaaggcttttcaccagtgtgggtttttcggtgggcactgaagtgggaactattgttgaagattttcccacacactgcacacttgtatgggctctcccccagtgtgggtgcgccggtgagcactgaactgggaactgttgttgaatctctttccacagacaatgcactggtaaggcttttccccggtatgggtcctctggtggacaatgaggctggaactctggttgaagcttttcccacattgcccacactgatagggcctctcccctgtgtgagttcgtaggtgggcagtgaggttggagcgctcactaaagcccttcccgnactaactgcacttgtgaggcttctcgcctgtgtggattctttgatgccgaacaagataagaacttcggctaaaggttttcccacattcaggacattgagatactttttccagtttgagggctggcttgtggggagagtgcacactctgagagcagtntttcccacagaggatatgtgtacaggctttgtccctggcacaaaaactctggtgactcatcttctcctgggatggggttttctcctcactctcccctggagaatttctacattgccttcttgatgttggctcactctccaagcctttttgtagctcagagtgccaataaactcctctggactttctctgtaaagccttgtttatttctacttcctctgaatcatcccattttagattttcttttttaatctcgatc

SEQ ID NO: 258738 - DNA, 950 bp, Homo Sapiens
  misc_feature (68)..(68): n is a, c, g, or t
tgagacaagttctcaggacagagacctggggtagaatcacatccgtgatgggaatgtgggatgcagtnttcgggcacagccttggcacgccatccttcatcctatgagtggactgtgtcatagttaaaaaataaatatctaaaactgatacagtatcatttctcaaatagaccaaggaaaatggaaaacaaaataattcagcttttcagaatatctgaaaagatgacattgatattgaacagggacctggttatggaccacaggaggccagtcattggccttgagtccatgatccaaggtcagtggctctaagtggtaaagccaaggaacgggaacccacgtaacgtgtccttcagtctgtccttatcaagacaggacaatggctggtatttctaatccttatcttacttgcttttgaaatgaagcagaatctcttaagatggaaagaaaggaaagtcaattttacagccagaggtaggaaagcgtgagtcgttttgtgaaatggtcattccttgcacatcttataggcatcctgagagccttgttcagcgccatcttgggaaagcaaaggctaaggccagaagacacagcttctatggtcccggtccatgcgcttccctggccttctcgctaacaaatctgtgagtgccatggctggagagacccaggcgggaggcaaggagccaatgtcagtcacctcatccacatacctggagttctgccattattttgtctccttcttcttcttcttcctcctcatcctttgaggaggaggtggtgacaggcggtggggatggggtccaggctgaagcaggctcctctgctggatattttgtagctctggtctgtgggcttggtccagcatcttcactggcttgccttagcggtgatgtcctcctttctgccggtgtagaccacatcgcctgacctcgtggtggtgagtcccgatc

SEQ ID NO: 258739 - DNA, 865 bp, Homo Sapiens
  misc_feature (853)..(853): n is a, c, g, or t
ctcgtgttcagctctatgtgctggtgtccttgctcccgcagcgagttggaagactttgttgaagacttgaagaaggactccacggcagccagccgattggttactctgaaagacgtggaagacggggctttcctcctgcgtcaagtgggagaggctgtagctaccctgaaagacatgtcactgatgggctcctgaaaggcacggacgcagcccaagccgcacagtacatggctatggaaaaggccacagccgcagaagtcctgaagagtcaggaggaggcagcccacacctccggccagcccttccacagcacaggtgcccctggcgatgcgaagtcggaagtggtgcctttgtccggcatgatggttcgccacgcgcagagctcccctgtggtcatccagccctcccagcactccgtggccctgctgaaccctgctcagaacttgcctcacgtggccagctccccagccgtcccccaggaagcaacctccactctgcagatgtcgcaggctccgcagtccccacagatacccatgaatgggtctgccatgcagagcttgttcattgaagaaatccacagtgtgagtgccaagaacagggcagtgtctatcgagaaagcagaaaagaaatgggaagaaaaaaggcaaaatctggatcactataatgggaaagagtttgaaaagctcctagaagaagctcaggccaatatcatgaagtcaataacaaatctggagatgccgccagccacaggcccactgccaaggggagatgccccagtggacaaggtggaactttcagaagattctccaaattcggaacaggacttggaaaagctggggggaaagtcgccccncctcctccgcca

SEQ ID NO: 258740 - DNA, 370 bp, Homo Sapiens
  misc_feature (22)..(22): n is a, c, g, or t
  misc_feature (190)..(272): n is a, c, g, or t
cccagggtggtcttgaactccntgggatcaagtgatcctcccaccttgtgtttttaacgggtttggcacatgcatcccggtgcactgtaagagcctagcaaatagaaagtgttactggaatcatttagtgtgaaatcttacagcacccactctaataccagctccaagaagagggggatgtgcacctacnnnnnnnnnnnnnnnnnnnnnnnnnnnnnnnnnnnnnnnnnnnnnnnnnnnnnnnnnnnnnnnnnnnnnnnnnnnnnnnnnnncctctatgtggcagatttttaaacaccgcagagaagacagctcagactcctcccccgacccagcagaaagtttacctttcagggtagctacagcctct

SEQ ID NO: 258741 - DNA, 910 bp, Homo Sapiens
  misc_feature (32)..(32): n is a, c, g, or t
cccgggatggaatttgcggcggcctccgccgnggcagccgagctgaaccggtctcttcctcggaaaggcagggccgaggggcctgcggggcagccatggaggcgacgcggaggcggcagcacctgggagcgacgggcggcccaggcgcgcagctgggcgcctccttcctgcaggccaggcatggctctgtgagcgctgatgaggctgcccgcacggctcccttccacctcgacctctggttctacttcacactgcagaactgggttctggactttgggcgtcccattgccatgctggtattccctctcgagtggtttccactcaacaagcccagtgttggggactacttccacatggccctacaacgacatcacgccctttctcttactcaaacacaacgaacggtaccccccgaaccctgccacgctccaaacacgtaagagaaaatacaacatcttcatcatgggtaaaaaaatccacctggaaggtgactctgtcaaccaccgcctgctcttcagtggctaccagcaccacctgtctgtccgtgagaaccccatcatcaagaatctcaagccggagacgctgatcgactcctttgagctgctctactattatgatgagtacctgggtcactgcatgtggtacatccccttcttcctcatcctcttcatgtacttcagcggctgctttactgcctctaaagctgagagcttgattccagggcctgccctgctcctggtggcacccagtggcctgtactactggtacctgatcaccgagggccagatcttcatcctcttcatcttcaccttcttcgccatgctggccctcgtcctgcaccagaagcgcaagcgcctctttcctggacagaaagggcctctttcctcttctccctctttccaactggacc

SEQ ID NO: 258742 - DNA, 1135 bp, Homo Sapiens
  misc_feature (67)..(67): n is a, c, g, or t
  misc_feature (311)..(311): n is a, c, g, or t
  misc_feature (313)..(313): n is a, c, g, or t
ctctcagatagatattgactatccattgtagtcctattcaaacagatatcttaggtcctggggtagncgtagttatgaaggggggtccgcacttgcccctaacactcccttcccccagttcaccgtgtaacccgtagtccttgggcaaggaataaaattccagggcaacatgttcaagtgggagccagcagcttttggcttttacatcaaagcgacccaggggtcggcgtggcccaaaaagtcaaacggggtgaagggtgtccccagagtaaggcccccaattcctctccccattggcggggcccaggagnanaggtgacattggtgttgaaacagctgctacagatgcctcagcatcctctcaaaggagacaggtcacccatctgtctaggggagtttggccggagtccgattgggagaaaagaggtggaaaaaaacccacaaaccccacccgcgcccagcaggagagccccaaaaggcgcgaggggcgcggttgggcggcgccggggttcagaggctgccctcgtccagcatccggcccaggccctcgcagatcctgcgcaggtgggagcggtagggctcggcggggccgtagagcgcagccaggaagtcgcagtcggctaggtggccgaacacgtggttgatgcggccgtgggacttggcggtcaggtggggacccacggcctggtgcagcaggtcgcggcactcgagcagcccggcggccagcacgcgccggtcgaaggtgaagtccacctggtggaagctgacggccgtcatggccaggcagcgcgcccggtggcggaagcgccgcagcagcgccagctcctcaccgcccagctggtccccacgcagcagcagtcccagcttcagggccaccttgaccaggttcttgagcatcttctgggcctccttgcggtgcgcgtgaactccctggtggcgcggtacagctcatccagcacctcactgctggtgtcatccaccagcacggccaccactgccttggacgccatcttactcaggagcttcttctgcgcctgcagagccaggctcttggtgctgaaggtgtccatggcctactctcgaagcagagtccgtacgtccaaccgtcgggggtccgtccagccgcctccgtggg

SEQ ID NO: 258743 - DNA, 1028 bp, Homo Sapiens
  misc_feature (465)..(465): n is a, c, g, or t
  misc_feature (545)..(545): n is a, c, g, or t
  misc_feature (598)..(598): n is a, c, g, or t
cagggagaacctactctttcctgcccatacgccccttctcacaactgacatatggtacatgcactgtctccctcactagaatgtcagtcccttgaaggcgaggactgtctctgtcgtggtcacctctgtcctggcaccttggcatcatgtcaggcccacagtggccactgcatatatgtgctgaacacctggatgagcactagcccagggactgggagggcctaaaagcttcttccacccagacacagagtggacagcaccagtttgcccacagaggctgaagaggtggccggagggaagcaggaagcagggagagtggagtagggagctggcctcagcccctgggggcctcctgctgtgctgccctaccatccagggctgcgagctgcccttgtccactgtcacccgtttctgcttcagctagtgggactgggttcctgttatttatacccaaaaggcctcccnaggactaaagatgtccttcacctctgccatctacgaaagctcccttgttccatgctttgcagacatctgcttctccttcnaagggcccctgctgcagggactgacaccccgtccagggaagaggggtgtcgcntcgccctctcacctcggactcttcttcgatcttcatgccttccacctgcagaaggtctaacaaggtccctggctgcagtgctgaagaaaatttctccagctttgccttctgctcctggcaccgctccacgagcttccggagctcctggtatctatccgagaggtttgagcggctgatctccaggggaccctggaactccaagttccgctctgccaggctccggttggtggccagtgccatctcccgttccagctgtaggtcctggacctcaggggactccagggccagctggtcaatcgcctccgagtcattctgcaactcactccagctcctgcagggtcttatccttcagcgtctccatccttccctgccagggccgccgtcgccgccgccaccgcgggttaaaccgcagccgcgcccacacttccgg

SEQ ID NO: 258744 - DNA, 3071 bp, Homo Sapiens
  misc_feature (209)..(209): n is a, c, g, or t
  misc_feature (212)..(212): n is a, c, g, or t
  misc_feature (217)..(217): n is a, c, g, or t
  misc_feature (221)..(222): n is a, c, g, or t
  misc_feature (233)..(249): n is a, c, g, or t
  misc_feature (845)..(1110): n is a, c, g, or t
  misc_feature (1130)..(1154): n is a, c, g, or t
  misc_feature (1228)..(1228): n is a, c, g, or t
  misc_feature (1698)..(1713): n is a, c, g, or t
  misc_feature (1942)..(1959): n is a, c, g, or t
  misc_feature (2146)..(2146): n is a, c, g, or t
  misc_feature (2153)..(2153): n is a, c, g, or t
  misc_feature (2305)..(2305): n is a, c, g, or t
  misc_feature (2402)..(2402): n is a, c, g, or t
  misc_feature (2478)..(2478): n is a, c, g, or t
  misc_feature (2537)..(2537): n is a, c, g, or t
  misc_feature (2560)..(2560): n is a, c, g, or t
  misc_feature (2824)..(2824): n is a, c, g, or t
  misc_feature (2834)..(2834): n is a, c, g, or t
  misc_feature (2996)..(2996): n is a, c, g, or t
cacgtcgggccatgaaaacttatgacaaaaattgtaaacaaggacaaaaacccagtctcggcgtgacaggtccaaaagtaggccaagcggaaagggatagggtcagtaatcgccaacacatcggaacactgaaggtggaagaatcacataaaaatggcaagcaaaaaatacaatgagcggaaaatcacaccaaagcaatcaagcatggntanaaaanaagnnctccgttctcnnnnnnnnnnnnnnnnngaatagtcatttttaaactacctatctcatgcaatgaaagcattttcttccacaaagagcttaatcctcatgataggattgcctagtgtctcccatttgcaggtttctgggttgatgtcttaatgcataatactgcaagtgacatcagctggctgtgatgcttcgaaataggtctgctcctcacagctttgggaatctgaatggaagaagaaaagagagaagttaacaacctccactggggcaactttgtgaacacgtaggcacttagtcataggaaacatattatgtgcaggtcctagcctggggtaggaaagtagatagacagaaaatcattaggtaatttaagtactaaattgggcagggctttttagtatcaaatcactactagaccgtttaatttgttaaattatctctaggatggtgatttataacctacccaaagttatcgatattcttactaaactctgaggcctgaagttctgtgatagaccttaaataagtgtcctaagtcagtggttcccaaatctggctggtcgggaatacctgggaagtttgttaaaattttttaaaaatgttttaagatttttgggtcctgnnnnnnnnnnnnnnnnnnnnnnnnnnnnnnnnnnnnnnnnnnnnnnnnnnnnnnnnnnnnnnnnnnnnnnnnnnnnnnnnnnnnnnnnnnnnnnnnnnnnnnnnnnnnnnnnnnnnnnnnnnnnnnnnnnnnnnnnnnnnnnnnnnnnnnnnnnnnnnnnnnnnnnnnnnnnnnnnnnnnnnnnnnnnnnnnnnnnnnnnnnnnnnnnnnnnnnnnnnnnnnnnnnnnnnnnnnnnnnnnnnnnnnnnnnnnnnnnnnnnnnnnnnagagtgaaactccatctccnnnnnnnnnnnnnnnnnnnnnnnnngatttttgggtcccgacctcaaacctactgaatcagaatttctagggatgaagcctaggaatgtgttgttgttntcagagcttccctggtgattgtgataagcctggtttggaaaccattgctggagaactttgtaaagatacagagacccagaccttttgtatttacatttaaatacaaatacaaatcctgggtttctatatgttctgttagcttttcaggtgattctgctacacagacgttgaaaaccactgccctaagaaagagatcagaggccacatatcagagagaaaagggaccaaaccttcggtggtttgttgtgtgtcgttttaatgccaattattttaacttgcacagtcttctgaaaccttgtattaatagttctcttttgtattaccattttcaggtagggttttgatcactatgattctgaagataatagtgaaatagtgaatttcattgatatgaagagataattgattttcattcattggtttgaacacctgcaaaatcacaaataaatgagaactaagtcttgtattcnnnnnnnnnnnnnnnncaaacagaaaaaccaaccatttttgtccaccacaaacgcaaaagaacaagcacgaacaaacaaggaaaagaacacctcccccctccccgagcccggaggcgaacatctagaatttgtcacgttcggccggcggcccccacgaagccggcagaaaaccccttaaaagacggtaacccgccacacaacaggaacgagcgagccgacccccatcaaacctttcacccgtgannnnnnnnnnnnnnnnnntctagtataccccacctcccataaagcaaaccgagatcacaatgaattcccgccccaacgaactaatcgcaccgacgacggttctagacagacgggaccatgcgaggggcgagcaccgacaggcggcccaaccgcgcccgcgacccgccggccgccctacgcggcccgccgcgcacactcaccgctnctacagngttatagcatcgcgcgacgtggcccgcggccgtgcctgtgtcgggcggaggacaactgtgtgtcgggagaacatgtcgtgtgtgagaggtgtcgtactcgctgcacgcacacgctctccacgtcacactcgcacgcctaatgtacgcgcgcnctccctgcctcagaacagatatatgatcgtacgtgcattctatgctacaccatatcgcggtgtctgcggcgcgctatcctctgccgctgtcgacgcnacatctcacagtatagcgtactccttcccgtcgacgactacgatgacctgctatgctcgcacgtcagagcgtactnaacggctgctgaatcctcacgccgcccctcacatcgcacacagcgtaggtatcataaanctcagtctgtgatagtgtgacgntcaggattgtgagatatgtatacgggttgagccgacgttacatcgaggacgaggtgtcgacggaccatcatcgtccgctactgtcgtggctatccggctgcctccggaatatataactatacgctatctgtctcgctgcacatcagaccgacgtcgacacctgaggacgccgcaagcacggctctcgttcaccgatctcgagatgtccccgctgcacaccactccagcccgccagtacagcgacgctgcgcaggacgcgtgtcncgagtggtgntcatcgatgtgcagatcacccacagatcataccacgatatgccccatcatctgatgcgcctaacagtcaccatactaaagctgtgtcaccgaggaatatagatgcaggagtatagatggacgcctagtatgttgcctatgccatagcgcggagaacgagtancacgcccagcggcctgatcgcagcaccataagactggatatgtctagaaatctggaagacatgccatcgccctgg

SEQ ID NO: 258745 - DNA, 1756 bp, Homo Sapiens
  misc_feature (97)..(97): n is a, c, g, or t
  misc_feature (259)..(259): n is a, c, g, or t
  misc_feature (570)..(570): n is a, c, g, or t
  misc_feature (1675)..(1675): n is a, c, g, or t
tccccaaccccagggggtgtgggagaccccctgccgtgcctatcagttaactcccggccaagtcgcgggtcaaagattaacccatgggaaaaggttnccccccgggcctggcgcaacacccttaagctccttcctggggtaggacgcccccttggcccaaaagcttcactcaacccggttgggtccgggcggaaggtggcacagccacttgccaggcgccctggcaggggctataagtcttccggaccgctatccttcncgtgtgtttgtagtcgacccacccctcggcgccctcaacctcctcactgtcttcttccgagtcggtctcctccagccactcctgagtgtctgggtccatctccaacaaggccttccacgcctccatcctgtgcaggtccaggcagtgcaggtcgctaagggtgacctggcggtcgccggcctcaaacatgcccccatagacgtagagcaccccatgcttcaaagccagaatggcgttggagcgtggaaaaggaccaggtgaggggctgccggcctcctcaaggctgtcttcgtcctcagaccggggctganccgacgagcctggcgcggtgagcacctgcttaatggtgaccacggtgccatcctcggccaccacctccttgaccagctgcacaggcccctgggtgccagctcccccacacgccggcctgctaccaccttcgggctcctcttttctgccccgcctgcgtttcttcttttcagacttgggtcccttcagctgtccctcaaaccaacggttcctggtggcgtcgtagaagtacagatcgttgaagaactcgcccgacaggctctcctcctcttcctcgtcacagacacccccgaagaacagtgtctggtgattcggggccatggccacggaaaagccagaccgtggggtgggcttgacccccgaagggttcatccgagtccaaacccacttgtcttctcttccgtcctctggcttcagcaggaacatgtctgagtgccgtgtgcccttgtccacgtctttcttaactctctgtttcgagtagcccccatagacgacgatgccgccctggggagtgacggacatctggcagcctgatctgggtgtgggccccgtccctgacggggacagcttgctccatgtgaaggtgtccagattaaaggcatacacgtcgttgtagtagatgtaatcccgtgtactttcatggaagccaccaaacaggatcaattgtctcttccaggccaccatccgatgtccactccgacccgaaggaccgcctgttgatttgactagttcccaggtcttggtggccaaatgcaggacccagagatccttgtagtggtagaactgctctccgttgggagaggcaaacttcccctccaaagacccacagctgtccgccaacttgaggcactaccaccgcctggtgagcacagcgcctcggaggtggactggggatatcaactttggtccaggtgtcctttctgatattgtagacatagagctcgttatacaaaaaagtcttggtgagggtggggggcacggaacttccacagtctgagtcctcttggcatcgagtgtctggaaatgggctatgagcgcttccaggtcttcctcctccttccgcgagcgcttagacaccttcttctccatcttggcggccgtcttctncgcgccgcggcccttcttctccttcttgcccttcttgcccatcttgccgggtcccaagccgcgacgggacaccaggaaaga

SEQ ID NO: 258746 - DNA, 1541 bp, Homo Sapiens
  misc_feature (820)..(820): n is a, c, g, or t
  misc_feature (1203)..(1203): n is a, c, g, or t
  misc_feature (1291)..(1291): n is a, c, g, or t
  misc_feature (1303)..(1303): n is a, c, g, or t
  misc_feature (1439)..(1440): n is a, c, g, or t
  misc_feature (1445)..(1445): n is a, c, g, or t
  misc_feature (1453)..(1453): n is a, c, g, or t
  misc_feature (1481)..(1481): n is a, c, g, or t
  misc_feature (1513)..(1513): n is a, c, g, or t
  misc_feature (1521)..(1521): n is a, c, g, or t
  misc_feature (1526)..(1526): n is a, c, g, or t
tgcgacaaggtggacttgggaggaaagccgtctgccaaagcctgaagcctccaagccataaacaaccccaatggcctcccacgaagttgataatgcagagctggggtcagcctctgcccatggtaccccaggcagtgaggcgggaccagaaaagctgaatacttctgtctaccagccccatagatggatcaccagattatcaagaaagcaaaattacaagttcttgggcgccatccagatcctgaatgcagcaatgattctggcttggggtgtcttcctgggttccctgcaatacccataccacttccaaaagcacttctttttcttcaccttctacacaggctacccgatttggggtgctgtgtttttctgtagttcaggaaccttgtctgttgtagcagggataaaacccacaagaacatggatacagaacagttttggaatgaacattgccagtgctacaattgcactagtggggactgcttttctctcactaaatatagcagttaatatccagtcattaaggagttgtcactcttcatcagagtcaccggacctatgcaattacatgggctccatatcaaatggcatggtgtctctactgctgattctcaccttgctggaattatgcgtaaccatctctaccatagccatgtggtgcaatgcaaactgctgtaattcaagagaggaaatttcctcacctcccaattctgtgtaatcaagaatacctccttaattctgagagcatgaatatttgaccttaaatctccagtgactcagagcttcacccacaaactcaggagaacataagcctgctcgntaaagctcaatccttctatcatggcaccaatcacaagaaccttggacgtttgactgactctatcctttctctcctaactataaatcctatttgtgtgtcgtgggtatggaaggacagatatatttctttaggcattcttggatatctgtaacttctatgatcattactccaaagttgtttccagaaattggttctatttcttcttatccacctactccattgctttatgaggtttaaggaaggaaggcggtataatccctattcaatatattttttctaaaatccaacttctgaccgcccagtaggaagaaaaatgagacattttttccattacagagaaatgcttcttgactttaacatcagcattataaaaagtgtcaaanaaaaaattaccatcattatcattaaaataaattttcactgtatttgagatgggagggttaaggatcagggattttatttcagtgaacngctggaactcanacatgccctgatatgtaaatgatgatttatgttggcgagtctgagagcaagcccaaatgtgttcttcaaaggacaatgggaaactgtaaagtagagaactaaagaataaggcctttagaatctgacacatctgggnnaaaantaagaaantgtcacatattacctgtatgaacatganaaaattatctaatctctctgatctattttacntcatctgnaaaanaggtgtaataataac

SEQ ID NO: 258747 - DNA, 1919 bp, Homo Sapiens
  misc_feature (74)..(74): n is a, c, g, or t
  misc_feature (1392)..(1392): n is a, c, g, or t
  misc_feature (1434)..(1434): n is a, c, g, or t
  misc_feature (1469)..(1469): n is a, c, g, or t
  misc_feature (1481)..(1481): n is a, c, g, or t
  misc_feature (1504)..(1505): n is a, c, g, or t
  misc_feature (1507)..(1507): n is a, c, g, or t
  misc_feature (1530)..(1530): n is a, c, g, or t
  misc_feature (1687)..(1687): n is a, c, g, or t
  misc_feature (1698)..(1698): n is a, c, g, or t
  misc_feature (1746)..(1746): n is a, c, g, or t
agggatctgaaacttgcccacccttcgggatattgcaggacgctgcatcatgagcgacagtaaatgtgacagtnagttttatagtgtgcaagtggcagactcaaccttcactgtcctaaaacgttaccagcagctgaaaccaattggctctggggcccaagggattgtttgtgctgcatttgatacagttcttgggataaatgttgcagtcaagaaactaagccgtccttttcagaaccaaactcatgcaaagagagcttatcgtgaacttgtcctcttaaaatgtgtcaatcataaaaatataattagtttgttaaatgtgtttacaccacaaaaaaactctagaagaatttcaagatgtgtatttggttatgcaattaatgcatgctaacttatgtcaggttattcacatggagctggatcatgaaagaatgtcctaccttctttaccagatgctttgtggtattaaacatctgcattcagctggtataattcatagagatttgaagcctagcaacattgttgtgaaatcagactgcaccctgaagatccttgactttggcctggcccggacagcgtgcactaacttcatgatgaccccttacgtggtgacacggtactaccgggcgcccgaagtcatcctgggtatgggctacaaagagaacgttgatatctggtcagtgggttgcatcatgggagagctggtgaaaggttgtgtgatattccaaggcactgaccatattgatcagtggaataaagttattgagcagctgggaacaccatcagcagagttcatgaagaaacttcagccaactgtgaggaattatgtcgaaaacagaccaaagtatcctggaatcaaatttgaagaactctttccagattggatattcccatcagaatctgagcgagacaaaataaaaacaagtcaagccagagatctgttatcaaaaatgttagtgattgatcctgacaagcggatctctgtagacgaagctctgcgtcacccatacatcactgtttggtatgaccccgccgaagcagaagccccaccacctcaaatttatgatgcccagttggaagaaagagaacatgcaattgaagaatggaaagagctaatttacaaagaagtcactggattgggaagaaagaagcaagaatggcgttgtaaaagaacagccttcagcacagaggcagcagtaagtagcaacgccactccttctcagtcttcatcgaacaatgacatttcatccatgtccactgagcagacgctggcctcagacacagacagcagtcttgatgcctcgacgggaccccttgaaggctgtcgatgataggttagaaatagcaaacctgtcagcattgaaggaactctcacccccgtgggcctgaaangcttgggagttgatggaaccaaatagaaaaacaccatgttcngcatgtaagaaacacaatgccttgccctattcagncctgataggatnccccgcttagatgataaaatganncngaatatgtctgaagaaaaaaatngcaagccacacttctagagattttgttccaagatcatttccaggtgagccagttagagtaggtgaatttgtttccaaattgtacctagtgaccagtttcctcatccatcctgtaacctgttgagatgtatgtgccatgtgacccacaaatgccttgncttggacttgncccatcctagcactttggaaatcagtatttaaatgcccaaacaatctncccaggtagtgctccttctgaagttatctcttaatcctcttaagtaatttggtgtctgtccagaaaaagcccatttatgtgtattaattggccatcatgatgttatcatatcttatccccttttatgctatgatttattctatcttttgtatttcagaagacatataattaaa
